United States Patent Application Publication US 2014/0057251 A1 - sequence listing, part 42

SEQ ID NO: 45944 - DNA, 3490 bp, Cannabis sativa
  modified_base (3200)..(3201): a, c, t, g, unknown or other
acgagaagtttctaggatccataatagtcatcaaaatatatattattttctagttattttatatttgatttaatgtatacacatctagaaatctaatgggctatggtacaatgataatcagataacacgaactcttttgctgcgtacctaatttagtaccataaaaccaacagtcatttatcattctttcagaactaatctcagctattatgaccagtgtttgatgggttaaggactttctcctaaattcaacactgtagcattgcctcgccatcagttggtctccttagaccatttcggttcttcactatgttaggaatttaaattataagtgttttaaagagcgaattgaccccattcctgtaaacacgagtacggcccattaacatattgtaaactgaaggtaaacctactgcttggaactcttgcatatgagttgttgataatggggattcccccatagtgaggggtagctcgatggttccgaggctcgcaacattatcacatgtaagcccacacacatttacgaaacaaggtattaatttcacattctctagtctcatcttcttcaatatttctttgtatcagtgttgactagtgagctcccattattgaccaatactctttttatccttttatttgtgagttgccttataatgaccaatgtatacgggaatcagacatgtgttgcatcctcctcagtaaaagatatcgagggattaagattttacacattttaagactaaagtgcaaatgtcaaaacttgatttttgacttgattgatatatctgttctgagcattgttgctcttttcagtaaaatgaggccttccaaaaattaccaatatattctcgccatcaactggtggtggttcaatattttaattttgattcagttattaggcttatttttctcgtttggcctatttcaaatatatttttgaaaatacccacaggaaaatacccacgggaatcacttgtgctttgcagatgatctgttagttttttgtaatggtgatttcatctctatcatgttgttgcttaagggtttgaaactgttctcctctacttctggcttgatgccaaatgatcaaaaagcagcgcaatatatattgtgctcgcgggcatatgcctgaaaatgaagtaactagaattctagaggcttccaattacaagagaagctctcttcctttcagataccttggcatcccaatttgctctaagaagatatctagagctgaatgccaatgtttgttagaaaaaatgactagcaggattcgatgttggagctcaaggaacctatcgtacatgggtagggtcaccttgataaactcggttttgcttgccatacacacatattgggctcagatttttttattgcccaagcaactcttgaaggacatagaagcaacttgcaggtcttttctttggaaaggcactcaagaggcagcagggcctggtttggtggcatgggagttcatttgcagacctaaagctgctggtggcctgggatttaggaacatacaacaatggaacatggcagctttaaggagatacgtttgggacatagcaagcaagaaggatagtctttttgtgaaatggattcacatggtatatctgaaagatcagaactggtggagttatgctgctccacatgactgtagttgggcttggcaaaaaattgttgctgttaagaacaagtttcagcaaaaaggagacatcgagagctttgtacaacagagataccgagtcaaacaagggtactttgatcttttcccagagcatcctaaactcccatggtgcaatctggtttgggatagattaatcatccccaaacatagattcattctttggttagttctttggaaaaggctgaacatgaaggaaagagtaagtaaatacagtccaaacatagacactacttgtgttctgtgtggtaaaggagatgaaaacattgaacacctgttttttcagtgtgaatatagctcagaatgcttgcaggaagttaaagtgtctttgcaatggaacacaccagcaaaagatgttctcaagctgctgcaatcctgtcataaaacaaagagattttctgcagctaggaagagcatgataaatacaatggtggctagtcttgtgtatcatatatggaagacaagaaatgacattctctggaaccagcaaagggggctcatgagcaaaacagtgcagcaagctaaacagatcagcaagttgagaattcaagcttggccgcctaagaaagcaaagaaggaagacatagattggatgctagaaacttaattgtacatgatgatattaaagtgtttaaattgttgtaatcagtgttggaaacagggcataagttgtgatgtaagtttggtattgagcaataaaattctcttattcatcaaaaaaaagattagattctcaattttttctttcagttatctacatttttcggtggtatgtcctatattcttatggaatcgacaatatttattcgggtctcttttacctctcgcatttcgcatagagtcaggtctacaaaatgcgacacgattctcattagccaggaagatagtctcacatgtttcattaacctggtatagaccgagtaaatagacaattttttttttttgccttcgatgaatctttcaagtcatctttccttttcccatttggatcatttgctttgttagaattgttggcagtagttgtggtagtatttgtagtggcgttgatcgcacttggtgttgccttgtttatgtgaggcaatgaacgggagcaatgtcaacatgctaggaatattttcgtagcaatgaataagagcaagcttaaataaattaagcttctcaatgttaacaatgtcaacattctaggaatattcctgaatgtcttcacaagcttagcttctttagttgcatattataagtgtgttgagcgtcgtgcattaatgttgaaagtatcagcttatcccaagaagaatatgcacgagcttcatattgcgatgaggcaattgactcttggttttttaattgacgaagttattttattttttttttattgtacacatgttatatagttagacccattatttattgcttgaaatatgtgtgtaacataattgtacatttacaattttgtcactaatttttatgggatgtggcaaaatttttaaaattcaaaattaatgtttttttttttttnnaaaaaaaaaatcttaaaagaaaaaaagattaggaggcctcttttagtcaatgacaaatctagttggggactatggggactgtagccttccctaatttttttttaattatttttatatgtattaattaggtaaggaaaaaaagattatatatgactattattattattattattattattttatggattcgaatttaggaccttgaatttaggactttctatttgtgaagagaagtgtgaaattactagactatgcctataactatacatatgattattattagtttgcc

SEQ ID NO: 45945 - DNA, 1321 bp, Cannabis sativa
  modified_base (1281)..(1295): a, c, t, g, unknown or other
tacacttagctgaaaccctcttttcctccttttcttctctctatcctcaacttaaaacctcttaacaaccaaatacgaaataccaaataccattttatccaaaaactaccattttatcaaaaaactatcattttttttttttaattttcttataaacttatatatattatacttacctaagaacatatacacaccattaaagttattttatttttaaattttaaagttcaaaagggtactattattgtaataaatttctcctctcgccagaagagcttcactaaagaaaaatcgcgatgatatcaaaaaggggtcttgcataataatcagacaaaattgcagtatcatcataaatgtgcgagcacataccaaacaacgggaatataacaatcaagcataatcaagtacctttaaagcaatcgttatatttaactttttaaccaatgtaataaataggcctattattgtttgtaacggtccaattatgaccataatttataaccaccatctacaacctataagtagatgaaccttctctccatttaaagggtgttgagttgatcataataaaatcacatagcaagagatctctttcaatagtggactaagcagagcgagccctacataaccactatattttcctctgtctatgttatattatttacatgcagacaaacaattatactatattcttcgagtactgtactcacatattttaatattgtctaaatttttttcacaatgtttggcattagaaggagggtattctagcaatattctcgtgatttttggagtagaatcattgtcgcaaaccaaccaataaacacaaaattagctttgttcaagaagacttcaacaaaaaaaaaaaaaaatacacaaaatattaaatatgctcgaagaaataagcagtcccaaacttgggaaaagatcagaatcagcccctaaagtattcacagatcagtataatttaatagacatctccgttcgggattgtccacaaaactatttatagaaatgaacgatccccaacttggaaaaaatccagtgttggcgagaagaaaacgtcaaacatatacaatatatttaggcaacaaggagcgctcttactggtagcttagattttggagttgcctagatctcgaggacgctcaaatcttggaaccgctcagatcctagcttgcgagccctattcctttgcccttaaagctgcccaaatcccaaggacgctcagatattagagccgctcaggcatcgaggcatctgttggaattattttaccannnnnnnnnnnnnnnaccaagtatgtttgattaacatccta

SEQ ID NO: 45946 - DNA, 892 bp, Cannabis sativa
caggtgttactaagaaggagttcaggccagttcaacaagcaactgttactgacaggggtaaaaccaaaattgaattggttcgtagtgcagatcaacaatagacaaaggagataactagtaagggggatactcagataataaatacagagaatgctacaacccatggtgaagttggagttgttaaggataactggcaaacaccaaggaaaactataatcagtaagagaaaaataaatcaaaatatggttgctgcagaagagagggggactaattcctttaacattttgcaagctcaacaaggcagtgagaaaatggaggcttcaatttgttactttgccaatggatagttacaacatattgagctggaacataaagggcctcactagtaataagaaataatatgctctgattgacttgtgtcgtataaggaaaatcgggttaggggctatcaattaaacaaaagtgacaggctctaaagttagtgatactatgagaataatttcattggttggaatttttactctagtccaatcattgaagggagaattttggttatttggaagaaggattttgttcaggtgaagattttaaaagaatcaactcagttcaaacaatgtcaggttaaaatggcttgccacaactttgagtttttagctagttatgtttatggtgctaatgggggtaggggaggagatcagaaaagattatgaagtaccttggctaatatttctattatgtccaaaccatcaatcataatgggagatttcaatgcggtaactgattttggagataggagtggggggaatcggctttagagttgaaataaaagacgccaataattggttacccttgggtctggtagatgaaatgaggaaaatggggtcccacttta

SEQ ID NO: 45947 - DNA, 1473 bp, Cannabis sativa
aaaccagctacattttcttccacaggttgatagaatcattctagtttgtgactgtaccattacggtggaaggaacatatgaggagctgacaaaaagtggacactaacgaaatttgttatcagaatatagcagtcccagatcctaatggagtattaaatggattattttctgatgcaagaaattcaacgaaatagaactgaagaatatgtatgtatggaatagaaggccatttgtgaaattcatttttcaggctatggactaacttctcattaataataattaattaatataggataagtaaaaaatagaactgaagaatacttatgtacctattaatcaaaactaaacttaatcactaaacaattaattgtaaccaaggcttcacaatcattatttgatatcatgtaaaagagagaacaccatgataacgaaaatcttttgttgcttttgagatttgaggtgaaggtgtggtattatatagttgtcttgcgattgatactattatgaatgagctctatttactatatattaatctctgtctggtatttaatttacatacaacgtttatatattttttttttcttttgaataatattaacgttcatgttttaggaataggaaatatagaaactaatggtaataaggaaataaatgaataacgtgcaagctggaaaaaatgagtgtttgcgatgcggaatctccggtgctcggaactctagttacgtggcacactcacgcgccttatttctctttctctttcttgtgttcaattttttttttaaaaaaataattattttaaagggagatatattacttgttataacaacaaaaaaaaattaaaaaatataattatacatatttatatttagctacactacatatatagatttcaataggtaagagtctatattgtgtttatataagtgtaggtgttaaactaatgattaatgaattattaaactgcaaaattaaatattttactatacaaaatttgattaagacaaaaattaattatctcttaaaataatgttatttgactataaaatagcatattttgattgtagccctgaaaataatacaacttgcccatatatattttagtttcttttctaattaatttttacaaacttagccagcgagaaaactgtttatataatatgtgccctttttgggtctatagcagttaagtgtttttaactaattttctttcatttcaacttcctacccgattgctcccttcaatccaaagcagtttcctttatgtaaccgctccttttctgggttttttctcatctcttgttatccttttacctttcttctacccctttccattgcaaccactttcagttctgtgtgatgtaaatgacatggatcccctttttattttaatctttctctcactgatgaggaaagatccactctagtcctcactgaggatgacacccctgatgcttcatccactgcagttcatgt

SEQ ID NO: 45948 - DNA, 1907 bp, Cannabis sativa
agtacgctatcttttggaccaactcgttatgatctttactaagtcgcagagtctatgtagtcatcacatatatcttggtatatgtgcgacttgtaattccttcttggtcctaccttattctatattacgtgaggcgtaataatacgactagactctatcacggtcacatcatcttgctgagtttggttcaggcaaggtttattcttgaggattcctttcttgacagctcagcaatcctcaggggatatgagtccacgtgtcattcttatgggagcctagtcttgagtttctaagcgaaaaattcacactacaacaatgtaactcagatattgaatacaatagaaagaaatctcttatccataaaaatatatatttccttttatcttcatcaccatcttgtttctaaggtttactaggattttcggtcacaaaattagtttctgatcgttctcaccaccaataaaaaataaaatttcaattccagtaaacaaaaaaaaaatatcttttattgcagaaatggtacctatcattgttagtgagggcaaagtatttgaagctaagtgatggaaaatgaaaaatggagagaaattagcctaattatctatgataaactaatttatgtttttgaaaacttcaaaagtggaggtccacataaaaatatttgattagtttggtgttttcaaacactaaatttgaatgtgattttgagttttaagtttaaaaaagaaaacaataattttatgttttctatgttttcaaatcattaaatctaaaaactcttcaaatactctcttacttttttattttgagattcctaaccaattacaaatctaactttttaaaattcaaaaacacaaaattacactacaatcaatcacatttttagaaataatttttcacgtaaaaaattcaattttttttcccaaaacactctttaagaaaacacaaattttaagtctcaaaccaatcaagcttttaatttatttatttttgcgactttttatttttggtcttcctagaaacgtggtagggccttgtatctaaatggtaatgaggctcaaataaatgtatattgaataataaataaagatttttttaaaaaaaataatgagtaacaaaacaaaaaattgagtataaaaattatcattaatgtttaaacattataatttaaattcaaacctactataaaaacttaaattataatgtttaaaatatttttgccctcactagcactgataggtactatttctgcaataagagatatttttaaaaaaaaattatacccaaaaaattttataattaataatttgaacattataatttataaaaaaatttaaacattataatttataatttaaacattataattacactcaaaaaaatgttaaacattataatttaaatttttatagtaagtttaaatttaaattataatgtttagaaatatctttttaaaaattaccattaattaaatgtgactacacaattattagtatttttttttttttttaaatattataatttaaatttaaacttactataaaaatttctccttttttttttgttttgtattaaatgtgactaaataacataaagtgtatctttttaacagtataattcaaatttaaacccattgcacatatttaaaaaatatctgtctaatattattttttttacccaatctgtatatttacaaaaatatatttttatcattatttttaaacaaaataatcaaaaaaaaatatttatatttcttaaggaattaatatgatcacagttaccaaaaaaatattattctatttttatttttacaaacagtgtataataatattgttaaaagaataaaaatattataaaactatatataaatattatggttaaaataaaattataattaataataaatt

SEQ ID NO: 45949 - DNA, 1379 bp, Cannabis sativa
caagcacaaagtaaagtatataatatagcggaatgaagaggtaactaacctcatgttattaactataaattttcacaaaatatcttgttggttcaatggaatgaagtacatctaagtaattaagatttattaaagctgattttcatagtttaaaggagagcagtcatatctcgataatgaaaggtttacttgtatacaaaggaagctgacattttaagtggaaaataataatagaaaacagaggaagctgatttgtgcaaatgagttccttgctcatacttaaaaatagaatatcaccctgcatagaaattaaaagtgtgttgtgctcctcatgcataccaatccaaaaaatatgagatcattttctgcctactgaaacaaaaattagatatagttatacttttttgtttctattgaaagatgccactattgcaatagtaggaagttgtatatctccatctgttttcaatctcggaaaccatcatgtattagcattcatctagcctttaacgaaatttcaccgtgtaaagaagctaaaaatactcaactatgtatcagcaatgataatacaataaccaaagttgcttagccatatacatccttaaaacttaaaagtagacagcatgaaaataaaacacgaccaatgtacaagtagtaagagaaacactgtaacaactaaacgatttccagctaatgaaagagagtatacacgctcaggttgagcatatgtcccaacaagggtgcgctcctgcccacttgctcctctaagggtcccaacacttcagtgttttgtcccaacttcctgtaattaactgacctgcaaccatcaacagactaggacaacagaaagtttattatatcttattctaatcttcaattgtgaacaagtaaagtatgttatgaattaaaaggtttagctcactacaaatgtaataattagtaaataccatagcatattagctatttaaaaataaatagaagcaattagtgaactattaaacttaaacaagataagctagaacataaatgaagtgactaataatttcaatggctggactatccaaaccaatatcttataacctgaagtagtaagattgctacagattagttattagcatattatctcaacaatacactctaagaaaagcattacatgctccaatgcctaaatcatcatagaatacaaaaagacaatgtaaagtaaatctgaaatggaaacaaagttaaaaatacaaaaaaccgaacctgctgcataagagtactcaacacaccgtacaggtgcatcatgtcaacctagaatgtcctccttattgtagttaaaaacaagcctaaaataccaaaatcaatcaaattataattatcaatagaacaaccaaaca

SEQ ID NO: 45950 - DNA, 2409 bp, Cannabis sativa
tatatataggatgatgatggtaacggtgaacactgccaaggcttgatgatgaagagtaatattatagtattgattctgaaatggtaataaattttcattaaacatttgttgctttctttgtttgtttagaattagagttgaaaattaaatggttctggtttgcttgttttttttggcagaagaagatttgtggatgagaaagggaaaagtaaattgatcaaaaaaatgtgaataaatggatggagatgagatttgtaaacatttgtgttctcttattaattaattgtcctatatatataacacatttcaaaagtttgtttaaagtcttttagtttgatattctcttaaatacaattctacttaatttaataggaagggatcttctaaatcatcatcttaattaatattactccttataatataatataatatttgtttgaggcttggttccttctctaccaaccaagcctttctactttttcttagttttgaaatgaataaataaataaatgagctttattatatataaaaaaaaaaagaaaagcattataggtctctaaaagccagcattattaattctatttctttcatacattaaaaaaaaaaaaaaaagacacaatataatttttttttgattaaatgtgagtatttttagttacaataaaaaattacttataactaaaatatagtatttagatacaaattatcactaatttaattttaattattgtgactaataatatatttagtcacaacaaattgtaatttttgtaactaatacatttagtcacgaatctttcacaacataaaaataataatttataattatttacaatttttttacttatagtcacaaattttattttattgtgagtaaaagtaatttttttttttttttttgtatatattagactctccaaaggtctatatttttgtggtgtgtttttgccttatctctctttttgtaatggactttttcttttctctaatttatatatatttgttcgattcccattctagaaaatattgcaagagtactcattactataaacttttcaatccgatcttcttaagttttcagttatttaagttaaaggtttatatgatcagttattttgaaataactgaagatataggtctgcgaaatttttttctttttcatcttacatctacactttctttttcttctttggagacactatgttagtgatgctgatacggttggtaatgtgtttggggtggaacaaccacattaatatggtcaaccatcacataataaatctattattactctcttatttcactatttaaaatctcttagtgttatagggtgtagcagattacagagcttggcaccctcttttatgcgtttggaaactctgagagtagagagatgtcatggactggggtatttattctcttcaactgaaacaaatgatcatatgggattgtgatgaaatgaaggacattattactgatcaacagtacaatgacagtagtactactcatcatcactccggccctaattattttctagaatttgaaggtactaaatcttaagtattcattcatccattcacaatgctacttactactactttacattatgtataattaaggaaaatatttcatatgcatgtctctgtctccttttctttattatgatcttttgtttttgtgtgtttctaactttagtaagatttgctaaaaagcattattagtgtttatcgtcctactcagtatcataatgttattggtgaaattaattagtatcaaatttcatataacttaagaaaatagtcacaaattttattgtgactaaaagtaaaaaattttgtaataacttatagatagtgttgggcactactgttatccaatcaaagaataacaaaaagaaaagaaaatgaaaagaaaagaaaacctcaaaacaatactagaaaatcttagcattgatttagagctttatttataagccaaagattacaatagaacaaagattcacttcaactaaattctgttacaggttgacaaaatagagtaaactaataactagctaactaacaacagattaattaactaattacatttgataatcaaaatcggactaattagaatatttataattaattatacattttataaaaacttactaattataaaatattttaactttatattgtatggaaaataagattttttaaaatcttatgtatacattgttattattgataaatttagtcattttttatttctgaaaaaagatttggaagagtttgacccggaaaaaatctataacaatattttttgaaaagatattacaatagatttttatgaaaacaatatgttaagtatctaaataaaacaaatttatttcatttttcaaaaaagaaaacaaacaaatttattcca

SEQ ID NO: 45951 - DNA, 1245 bp, Cannabis sativa
cacttaatttttatttttatttttggtaaaattctctaaaatttactttttgtaaattaaaagtatcagtcaaatattaccgttaaatattaactggattactactgtattgacttcaaagttttactgttatatatacacaggtgtatacagtggtcatccagttagtaatatttaactggtgtgtcaaatttacaaaaaaaaaataaacttaaaggatttttgtcaccaaaaaaaataaataagttaaattgtataaaaaataaaatataagaggtttttaccacaaattgctctatacatatatttatgatattaaatcttgagggagcatgatggatttagatgcaggcaggtggagcaattacttttagtatagtcagctggcatgtgataagatctctcacactaatttaattaataggtttgcaattaataaaaaattaatcgacagatcaagtataaagagctatccaggacatacctatcttaaatgaaactacatttaatgtatatatttaatatactggcttagagatgcattgactttaattatatatgcagtagtgtataatattttaagagaaactcctattttaaatgtactagttttcacctctctttaaattatcttttttcatttaatttgaattcaaatgtttggtacttgataaacgagtttataactagggtagtttagaatttgtttttgtctttcacgttttttggtttagtttaacctttaatttcttttgtttcagaaaaatttgtggtaaaaagcaaatattagagaaacgagcaaaaatagtgaaaaaatgggtcaaattagagttattatgccttttgatttactttgcaatgtgtaaaggacacttatcctcccggtagttaggagttagttattggttgttatgtttagttgtagaattagttagctacttcttgcagttgttactttgtaacaaacatatataaaaactatctctttaatctttgctcttcaattcaatccatacaacttaatcttcttcctcgtcttctctgtgctttctctgtgaaagattgaacttcacatggcatcaaagctccattaatcatccatcaatagaagcatcttcagtgcacacctgaggagcattaagattgaacaatgctgaagtgcaaaacatgttgggaatattttaccaggatctagatttactagcaagtatgttgaattaacatcttaaatatgaattctctaaa

SEQ ID NO: 45952 - DNA, 4181 bp, Cannabis sativa
tatatgtgtttaaattacattgttttagaaattatatttaggatgttaaataacattacatggtagtaaatctagatcctggtaaataatccccaacatacacttggtgcaaatagatcctgacactcactattccaccttacacgtatctgcaacatgaacaattaggtaagtaacgaagcttagcaagattgtcttacaaaatagaataattaaggacacaaaacttgtaacaccttgcttcaaacctccatttgacattttcccactaaatcatggctcttatacacagatacatcactttggctgctttttggattgacgacagaccctgcaaactaacacaagtatttctagtgtgttttgtcctcactcgcacgcttcttaaaaaaactttccagaaggtaagccatcctaagattattccaagtcaagcacacttaactttggagttcttaagtgatgggctattagaaaataagatgcatcttgttgatataggtagttacaattaatccatttaagccttcttcaactgtgtagtcccatgcctacacagtctcagaatcatcacacttgaccttccccaagcaatgtgagattgcatagcttacccgatattattccttacggatcatgggactactgactgtcacaatcaccccccttatgtggtccgatgtcctcgtcgatcacacttctgggtgagtcaaggctttgataccattggtagcgaccttgtttcaagcctccattacgccttttcccacagaatcatggctcttatacatgggtacgccactttggctgcttcctggattgacgactgccctgtaaaccagcacaagtatttctagcgtgctttgtcctcacttgcgcacttcttgtgaaaacttcttagaaggtcacccatcctaagattactctaggtcaagtacacttaactttagaattcttaagtgatgggctaccaaaaaataagctgcaccttgttgatatatgtagtaccaatcaatccatttaagccttctttaactgtgtaatcccatacttacatagtctctgaatcatcacgcttgatctttcctaggcgatgtgagattgcacaacttacatggtgtttctccttacagatcacaggattactaactgtctcaacataaattaaagaaataacaaaaccctcctccttggcttctttctagtcgactccaccatacatatatggtgtatataagtggagaaatgatacctagttttccttaagtgattattcatcaaagataaataaaaataaattattttagggtttattttcataatgtggcatgataaggtagagacacatatgcattatcttcataatgtggcttgatgaggtagagactattatcctattttttgcacgatgacatggcatctagctggatgacacgtgtcctacattcctcaatttgggcagatggtttcactcttagcagcccataaggattgatatgaaggtccaaattgcatatgcataataggatgttcggatagagttgctgagggacatccgaccaacctgaatgtatgatcaactcgcatgcaccagccaggaaatgtgagttggcaatttcagcagtgatcagtgatatctttaagtttccatgacacgaaataatccctactttcgtgggattgactcgtatcttcagagaataagggccatcaacctgagctttcccaaattcctttatcgtaattatggaaacatatttatttcccattttatgtattatagattaagggaaaccattccaatgtaatgacccctataaatagtggtctcacctcactgtttgaggacacgaattgaatcaggaagaaaacactcaagagagaaatagggaaatagtgatccaagagagaattacttagagatctattgtaagagcttggagaaaggatacattgttctttgtttcacaagtcaatataacctaaaagggagtaggctattaccacaattaaggggtcgaacctctagaaattatggtgttttctttatttacagtttttttttccattgtatattttatctaatcgcttaaatttagattcactatcattgactagaagcaaagtaaatattttggtgctttcattgagagcaaagaaataagattttttgttttaagcctttaacaggatacaagattgttgtacaaactcgaaggggagttcaaactaatcaagttgaactaatggtgaaagttccaagcatggagacccctagaatcgcaagagatctacctgggatgactcccggataagttaatacacaaccatcgacggtgggccatggagtaacttcccctctagctgggttcactctaagtatataagaaactgggaataccagtacgacggccgagcagaccacccctggcactgaaatcccattcaccaccaaaactcgaaggccagttagagatgatactgaacttcaaaacttgcgagctgtgttggggttactgcaaggccacaataacatgttgcaccatgaccagcaggatatccgagcaaccatcaatctttcctttgatgaacaaagacaccagttcatagaatggagggattgagagatggaagtcgtgagagcccagtagatagccattgataactgctctaggcaagccaccatactgatcagaagggcctaccaagtcactggtcaacaaccagtgactgattctagtatccccttgggatcccaaaatgaatcgaaagggtatataggtgactataccgcacatacttatatcagtcaaccgtccaatctaaggccacaagttcaaactatgggccaaacggtaaatgggaagatcttaccaaactgtcccttgtgaggaaatagttagctaaacaaccatacctagatagaggtgtcaggccaacctctcaccaagttggtcagacacaaagacctcttggcacattggtgttcgaccgactaggtaccgtgcacgacctcagaatcaatttgaactacagaaggggactggacaggcaaaacattccacctaccattcatctgaataaccatgtctcaggtccagttctaagagatcctaatgtgacatgggtagtcaacaggctggccaagttcatccacatgtgcaagcataaatagatcaacttaaaagccttgtacaaagcctgactgaccaaaaactcacagatcttgaacttgatcgagcaagaggatccccctttttgctagaaatcaaccctcttgacctgcccccaaagttcaaactgctagtatggaagatgtatacaggaaaagaacattttgagctaaacttgtgacttttcttggagctcttcaatcaaatctaatgattcctggagtagagagtgattctaggctgggttgtaagtgtctcgtctgtgagaagggattgtggtttctaccaggatgaccgcttcacacccaaaagccattgaatgcagtgtgtgccccgttgaagttctctctattgtttgatatgcctagaggactcgtagaagctccttcagcaaatgggctttacaagcttggagttttttcttcaatgctctcttcaagatcttattcatagcttccacttgtccattcccctatggtctggccataactgagaagcttttcatgattccatacaggacatagatgtgggtgaagtgttcactatcaaactacttcccattatcaaagacaatcttgtgtggaattttgaagcaacacacaatgttcttaatgaaaaaatatagggccttcttggaggtggctgtattcatgggctccgcttctacccacctggtgaagtagtcaacaacgactatggcatacttgactcatcttttccctgtgaggagggatcctactaagtttattctccaaacaacaaaaggccatgcactgctcatgagtgtgattttggttggtggcactcgcagaaccttggcgtatctttgacactgttcacacttccagatttactctatgcaatccttattcattgtgggccagaagtaaccctaacggaagatcttcttggataggcttggttagaaagtatggtctccaaagaaaccttcgtgaacctcatggatgatagcacttattttagttctaactacgcaccttaggtacg

SEQ ID NO: 45953 - DNA, 1196 bp, Cannabis sativa
aaaattaattaaaattactactttattattttatgaaattgtgagtttattaataatttattattgtaaaactaaaaattatttacatgtatattcatgtgtttttttaattaggagaataagagcttgattgtggaatccaattgtcttaagatgaaaaactttgtctggcgggtgtgtcacaactggattccttcaaaaagtgaattggcgaggagaggtattcagatggagaggacatgtacgggttgttggaaccatgaggagaccacaggccacgccctttggcactgcccaaaactgaaacaattttggaaaacaacgggtttctggcacttatttcctactggtctaagcaagatgacagacctggccgaatttctcatctacatgaaacagaacaactcgaaagaggagatggaaacattcatgggattgagttggttggtttggaatcaaaggaaccaacgtattttccaaaataaaaagatttcttacaacaactggactccttgggccattgatttcatatcgaataccattcagcggacttcaaccaagataacaacaacaaagccttctcagaacatcagatggatcccacccaaaccaggtacatatatgttgaattgtgatgctgctgtgagtaaaaacaatcagaattttgccttagctgctgtcatacgtgaccatgaaggtatcctcattgctgctgaagtcgaacatcacacaggactggtttcgattcttcttgctgaaatttcagccattaaactgggacttaaactggttagatctcagcagaccaaaccttttattactgcttcagatagtgcttcagcagtgcaccaaattcggctgaatcattcttctcgggcagattgggggactcatttgattgaaattttttcaagtaaccttttagatggttgtatagaggtgaagtttgtaaatagaacatgtaatgaggtggctcattctttagcaaattgggctttgaatcatagatgtaattctttttggtcagaggatattccctcttgtgctgctgctattttgaacgcgaaaaagcctgacctgatgtagttttcttttgtttaataaagcattttttcattcaaaaaaaaaaaattagttatcaaaatggtaatatattattgggcattttacaattttgtatacattattttaattaa

SEQ ID NO: 45954 - DNA, 3320 bp, Cannabis sativa
atgatgtcatgggccctaacagcaggatcgatcatgaaattcttccccttatcttgggcagatttgtgctgcttctttgacaagtcagccactggcgtagggacagcattgcttttcctcttttgtgggatgataggagaagttgttgcagttgccaccttaggctttcgattgagaatgggagcttgcttcaagaatgtcatttctgcgagaagaccatgagataagaatattttttatatagtataaaagaacatgcatatgttcgatgcattacctaatgttagtgttgatgtttgtttagatagacgcttgtctattctttcctttagtttcttagaaggctccttgtctacttgttttcactgaaggctggcgttctcaggtatgagcttatgttctcgcaattttgcagtggttcacaacagctgtcaatcgcgatcttaaataagcaggctacctaaaacttcagcaatctccctacgagtagaatccagtacaggtcgagcagacctagctgtgattgataaaaacaaacattagtgactgaacaaggtgataaaaatatacattaagtattaggatacacgacatactagtttgacgattgaagtaggtcctaactcctggtactttaaacgcgtagaacaatttcaatttccaatctcccatatttgaaaccgtaccttctaccccattaatctcagagttgccccatttgcaaaaataataaaagccattttcatggccaacacttattatatcgtagaaatagctaaagtcctccatcgttggctttccatggacatattccatgtacatcacataaaaccccagaattaggcaataactatttggagttagttgaaaacgagagacattgtaatgtctgaggatagcttttacaaacagatgaaaaggcagtgttaccccacattgcataatggaaatcgagaccaccatgtcttgcgtagggatgatcttagggttagtaaatggaaggtgaggccactgagatgttgaaggacgtaaagtccctatatgaatcaaatttagctccgcaaacatatgtaggtctgattttgtgactcgcgagaccagatccttgcatgaaaatggttcattcagttgagtgttttcaactgaatccgtctcacttccatcagcatctcccccttcctcaaagttgtggtcaggtacatcgatgtcttcccccatttcttcaacctcgatgttaggggaatgcctcgaatgaacgagataatcctgggctgacaccgtggattccctgtcgcaaatttcaatcgtcactagttcagcgagttcctaaaccatctgatctatgttgttggtagatggcgagtagtgacgagccctggcagcaggggctttgtcctaagaaattgaggtgggtatgtaggtgttgctcctttgcagctcgtgagtaaaagccccacctccagagtcgagcatctagctgttcgacaggtcgctcatctgaaagatagaagatcttttcaatgtggtgaaagtgcgagaataataaagtgccctcactcccataaaactcaaaaaatataaaggattggccagacatctctagaaatggcttggagtatctcagtaacataatgatcatgtcgctacatgagaattaaggtaatgagacaaccccaccattttgagaatttagtaaatcctcgcaaaggataagtcacacattcgcaattaattgtgtacctcaagaaatgggtcggagtatcccagtatcccaagggacatgcattccttgcatgaacattgagttaatgggacaccccaccatttcgaagaacttggttagtcgtaatatgtgactagaaaacaagaaaagtgaaaaatgggccgcatgtctcaaatggctgggtgtttcacagtgacccaaggaacatgaaaaggtttgcatgaccattaagttactgtgacacaccctcaatttaaaagactgagaaagttttcataacaaaagcacatataacctgaaggctagaaaataaactctaagaataattaaattctaataggggttaaaataggtagggaacaaattaattgtcatttctggatattcagaactgcacgggagtattcaagatgttcatcaacaaactcgcgagtattcgaaatactcaatgagaaatgtgcaaatactcaaggtgttcttcctgcaacccatgatcattcaagttttaggtatatatttcacagagaaatgcatattttttcaaagggcaaataaatttccatacatatatcctctcatctcatgcattttctacctctaaaagcatagattaactctcaaaagaaaaggaagcagttgcagaatttttttcactaaccttgaaatgcacatcttctttgaaccattctatagatatcaaggactttcaacttttcttctaacaaggaaaagttaggaaaaatgcaaaggaaattttttgggaattcaaaaatcagaggaagaagaggagaaaaatgaaaatgataaaggatcattttgtatcagggaatttaaataccattatccctcatttattgggatggagacacatggcaagggaatgcctaaggtctcacaaccaacggttatccataactacgcctacaaggactccaaagagtttttgatgatgtggcaccccaaatggattaataataatgattacaaccgtctttttgaaaccctcaattagacaaacaaaggtcaccatcttgtgacaacctttcacatgcctctcacttatagtttccctcgtgacacatctgtcaatcgcgaaactaagggaatgtgttatagtgagaatttttcacatagaaacttgagaccaagctcccataaaatgacacgtggattcactctgctcgaggagggctgagatgtcagaaggataccacttgagtgtaaacgtcgcctgaaccagactcagccagatgatgtgaccttgatagagtctagtcgcattcttatgtctcgcacgatgcagaaccgaagatcaagtttaagacgtgcatatactgagatatatgcaagaactataaaggtcttcctacgaagtagtaaagatcgattctctactcagagagctggtctagatgacccaacatccttgataacacaataaggactcgcatttcctatgttatcgacctgttataggatgtccgtatatgggacttgaataggacgcatacatcctagactcgattagtgttgtatgaattttgagcctacgagcttatgcgaggacatgaagagaaaactcgtaccataaaggtcg

SEQ ID NO: 45955 - DNA, 757 bp, Cannabis sativa
attttcttgttataaaatctctaacagttagggatatgacttaactacgtaaccctaattagattgggtttattcatcaaaagtttcagttaactagaaaatgtcacattttttctttaactaatttttacacacaaaaatattaaacatgttaaaaattaatcactaacaatacgagttaactcaccataaaactctctaatcaactgatattttattaaaattaataaaaattaatgtaagatcaagtaaaaagtctaagcaatggtcagctaagctttctaatgagaatgctagggagctttatagttatggttggcctttaaacactaatgatcttcatgtttagtactccctaagtgttttttttttttttttttttttcaatttctctattaatgattttttttatacgaaatcacattaaatataacacttatttaattattaaaagcctataatgagattatgacttagtagctactttattaacaattttttgagagttgattatagaccattttcattcatggcttgcctaacttgggttctcgttaagttttttaatatataaattatagacaatgtgtataatttgtgtggttatgggccacttgtatctccaataaattagacttttacataattaggtatttaatcttgagaaatataagtaaatgaccctatttctaactttatagatagttaatgttccttttttaaaataataaatcaaatgtctttttttactttttaa

SEQ ID NO: 45956 - DNA, 2241 bp, Cannabis sativa
  modified_base (904)..(914): a, c, t, g, unknown or other
ttacaaagttgtaatattttcttgtataagtgggtcgaatggaaaaaaattggttttaaaaagtgcaatttagctaattgtttatttatattgggagtggaggattcgaaaaatcctctgtgaagagaggaattgccagttgagtagtatctatatttagggtttatttggcctcgagaaactaaaaatcatgtctcaacttttacatttacacaaatttaaagagcattgttattaggcactaatggtgcctagtaccttctcgacatgccgcgctgcgattggctagcgatcctccctaaaaactactatattaaattatatggaaccccatacttagtttaaccaatagcgatattgacacataagagagtgctatacaccattggtgtcctttttattattccattaaaatattaacgtaattttataaattaacaattttgctcaaaaattcaacaattttttagtaaatcttaacaaattaacttagatttaaaaataatatcattttaaataattaaaaaaattttaaaaaaaattaaaattttttaactaactaataaatttaaaatatttttgttttttgaataaaaatttaaaatattatttattttttattacaagacctatttagatataaaaaatatttttaaattcaatatttgtaaaatctaaattttataagaacaagtttgagtttatatttttcctctaaaaatttaaatttattttaagtaagcataacttttttattttaatttctaatttttttcaaaataattttatacttttattgaatttttaattatttttttttttaagatatgagtttataaatataaataagcttgatttttttcttcaaaaaaaaaaaagaaatagtttgtttaaattatttatnnnnnnnnnnntaattttagtttgattttttaaaatacaaatttataaatataataaagtttgaaaatatttttttaacaataatttaaatttttttaagtaaacttaatattttttaattaatttaatatttttattaaatttcttaataatttttttagaattaataaaacattacaatttttaaaatttaattttttaataaaaagaagcaaaattttatattgatcaaaatgataaaaaaaaaatactaattcttaatagcaaaaaaaataaaatctaacaaaaatacgtcattatataactattacattttaggggaatttttaacaaatcttatattttaaaagataaaattaagtagtgttaaaaatttaaagggcaaaaatattaattagtagtacataaattgttagttattcagattctatatttaattgccgtatatgtaagagtaattcctttaatcttcatctgtcacactctgttatatgtaagagagtaatagcaactataataacacgatggtggctgcgtgatgatggaagttttcgagacgaaacgccttggtaacctctccaaagtcagtagagctcatctccatatagtataattgaccaattcaaatacaaattcatattccttccaaaaatatatttcaaacttttagcgattaaatcttcccaactatttacactccgaacaactacactgtaacaaatttaaattgtcattcatttattattgtacatatagctaacttaaattaatacatctaatattattattaaacaattatataaataaatatttcaaaattcatttaaaaactaaacaaaaccaagcttgttaagaacacccaaacccatttgatacaagacctagaaaatacacttggctagtgttgaattcgtctttacagaacactaccaaagaaaaatcttcttaaccgaacactaccaaaagtactttaattctaatagctaaaatcagctttaaaaaatctaacccaatatagtcagttctcatagtactaaaataaaatcaagtttcatgccacaagaagatttgttttgaattactttcaccaatcaaaatgtccatcacataaaaataataactctctacacaaatttgatacccttccgagttttgtttctcaatttcgcttaatatgttgctcattagcatagtaaaaaaaaactcagctaattcctggctaatgatggcctcaacaaaacaaaattggaaaaatattacaattatcagattatgtaccaaagcttctgtcccctgcatcacccagtccaggaatgatgtaccttgtaatcaaaacaa

SEQ ID NO: 45957 - DNA, 1205 bp, Cannabis sativa
taatttaattttttttcatagttgtatatatatgttataatttttaaaatcattttgtaaattttttaaaaaattctgaataatttacaatgccgaaaataaagtttatatattttattacacgcgctactattttttttatatacatagtaagtaattattttaactttatttttatcacggtaaacattttctaaaaatttataagtaatactaaataactataatatacggaattataaaaataaaaaattaaaccaagaaactgatctagatgtcgaaacggataaaaaatttatcgaaatacccctctattaaagagatacttcagaaattttttatattttttatcttcgaatatttttttttttcaaaagaaaagaattaaaagcaaagagaaaatatcttgggtttcaattaaatgtagtatgatgatttgtaatttttgcataatataggataaaatatatgtgatgatcttatctgttttgagttgaaacttcaaaccaactagctaataatatgagcatagatgtgacctaaaagtgggctttcatgtttcatatatattatcagaaaattatgtttcactaaatgatagatatatcattgatacatattatcataaatactcaccaatcaccaccaccattaattaatgagcttataaaaaggatatatattggaattgaatggaatatacctcttatcttttcaattttggagcttttatagctagttgggataatttaaaaaaaataaaaataaataaaattacaaaaatatagtttgtttgaattttttaatatttttacatttttttagattttatttacataaaatacagttttttggtgtgtttttctgttatactcttattttgttgttttttttaaatagcttgttcatttgttgttgatttttttgttatttgtatattatttttgagataagttgagaaatatctctgtatctattaattaaaaatatcatcatattatattttattaaaatgtatccacttttatgaatgagttgttcaatataccctcttttaagtctaccacataatttacattaacctaagaaatataatagaaaaattatctataaaagtagatatatcttaaaaaaatataaaaataaagataaaaattaaaacaaataaaataaaatagatatacaatataattttatcttaagat

SEQ ID NO: 45958 - DNA, 1432 bp, Cannabis sativa
atgataaattaatgatatattatgtatataatccttgatcaggtgtgggatgtgatatcaaatcaagaagcagtggagatagtgtcatgtagtgtagagaaggagaaatcagctagaaggttagtggaatgtgcagctagggcttggaaatctaagagaagagggattgcccaggatgacatttcagctatatgcctatttttccattctcctactactaatatatctactgctttacagcccaatgactttttggtctctaggttttctaccttatcatcatgcaaatctgtctagatttctaatatatactcaacagtctattatgctctctagcttttaagttagaatagtctaatatattattaataatatatagtctattattatatttttccttttaaatgactaggttaggtgatttgcttattaaagtgttggattatatattttgtttgagttgtgtaaataaataaatgtaattgcttacctattttataggacacacaccagatatttttacttatgaaaattttactttatttattttatcacagttaaaaattactaagaaaatgaaatggttttactcagctcaatttggcctgagtttttgctgcattttatactaattggaggagattgatacacttggcatcattctagaaagaaaatcatacacagaaaactaggcacaacaaacttttacaaaacctataaaggaatattctgatttccttctctcctccaacagaatggggatggccaccctgtcaataccagctcagcattattaagcaaaatcttcatttcttagcaccactcctcaaacaataggctctgtctttttctctttctatgagggttggaatttctaatggatacaagagattatctcttgagtagttttgttctggtttagaatcctttgtgtgtgattttcctcttctttatttttactttgtggcgttttcctctccctattactttcctcttcttgacaatcttttcttgactcttatactcttgagttagaatttgattttgaactcagtgatgacgttacaagaacaggggtcttggcttgcttctttgaaggtgaaggtgtctctaaaacccttctaaaatctctgaatcacattttcatgaaaataagttttataaagcataaaatataatcattaattactacaagtgtttcactcagggcggagccacatacacccctataggggctgtggcccccccctcaattttaaaaaaatttacactattaaacatatatatatataatcatatataaaaagatatttatacataatttatcatgtatcaaagaaagtatttacttatttaaatataattttattattaagaaaatatatacagttttattttatatattaatgtagtaaattattatattactatt

SEQ ID NO: 45959 - DNA, 1173 bp, Cannabis sativa
gacactaacgactaatagttagttatgaattctgttattacagttagtttgtttcttgttcagttagtattggttgttatctgtcagttgccttggttctactggtatatataatagatatacctctctttgtaaattgatatcagagaataaagattcagcttcactttgttcttttctttctctgttttctctgttttcatttcattctctaagttcaactttgagatttctattttaataaaacaaacgattaaagaaaatatcaaaagtcttggtatctatttagttattaattaaactattacatctagcaaactcaacacacttctatctacaagtagctcgcatatattaatctaaaagacctcgagaactaagattttttctttcttttctttcttttttatcgaacaaagttcttgctatgtagatatggttctatgtatgagtacatttttcttctctctcaattattatcttaaaattttcttaattagttttttatatatataaatatgctttatcatatagattcatttccagtaatatatataaatatgtatttttataaaagattctatcatataattataatatttttagaatttattctttgtaataataaatttgtagaaagattgaaattaagtgattttttaattaagttagtataaaattctatatttttctgtttacaaagatgtccatcaacttttgtgtttcaaattccacacgtggacttcaagtacttaaagttgtagagttttattaattttatagaaaattatttgcattgagtactagagttataggaacatttgagaaacaaaacgaaaaaatcatcaaaaaataaaatgtgaatatactataaagttttagaatatttatttttaattatcttatattagttaaaatatatagtaatacataaatatataagtaggctacaaaattttttaattcacgattcattttaatatattttaaattcaaaaacaaaatatctatttatatattcatcttctaacaatttttaaaattatatacattattttatactagcaaaaaactacgtgcgaggcacgtgtaataaattttatgccaggttttttctatgttatttgaaagtgagattattattgaatactgaatgcaatatattagtgttta

SEQ ID NO: 45960 - DNA, 1227 bp, Cannabis sativa
aaaaaaaaaaaaaaaaagttttaacttaaaattttccccccctccttaaaaaaaaaaaaaaaaaaaaagatgccacgcaagcaacaacgcgggaggggctagagtgtcaacgacacatttgtcactctagctgtaatgtataggtaagccacgtaagcttgattaaatgtcctcatttgtttccactattacacattatgttgctcttttaaatttcacactccatttttcttaatttgctctcaactttaaacgttgcgtgaatttaggcttaacatttttttaaataaaaaatcattttgaacattttggtcttttccttcttcttttttttttaattcattaatatatatttggaagatgcaagaaagatgatttatagatttcttacgtatacataatacattaagtacttatctaaagttatttatcattttttttgaaggttatttaaagttatcttgaaacaaaagtatttacaatttttttttgtttgaaaggaaattatttacaagattaagaatatatagagttctacacatgtagatgtagtcatattactgaaattagatcttttaaatattactttataaaataatgtttctttagtcttgacaatgtgttatattatttcagtagtatccaatgatagattaaaaaatcaaatatgtttaaaaaacgtttttacagagaattataaacagatacatgttatacaaaaccaaaagaactgaagactatttaatttttttcatcgaaaatgatagaaattcttcagcgataaaagtctttcaaggtgaggtggcctaatactagccttttcaccaaccttcattccaacacgcaccaccaataaatgtgacatttttttttcttttattctttacaatccaaaaaaattaaaaaacaaataaagctgtctctgctgaaatgtggagcacgcattatttgggtatatatgaaataatttatatatctcaattcagactgaataaaaataattgtgataaaaaagagacgcaatttttatgttaaataaagttcccaatcaaaatcggcgaaggtatgtactaaagataacgtaatccctataaaaatattaaaaaaaaaaaatatcagaacaaaaacattcatacttacaaacaattgaggaagaatctttcgtattgatcaattgaggaagaatctttcgtattaattttattatattgttattaatattaacca

SEQ ID NO: 45961 - DNA, 927 bp, Cannabis sativa
aaaaaggaggaatctttattcaaaaacaagcaagaacaaacaaaggcacaaggccacaccaccaaaaccagcggcaactgccacagccagcagccccacaccaaacaactaccaccttttaattacattgagtaaataattgttcttttggcaagctttaaaaggacccttactcaagattctcaaccgaacctctttcctaatattcaagctcaaacaactaggagcagtacaacacaaataaaaaatacatctattcctattcttccaaatattactaattagtaaatctgattatattgaaatagattttatttagggtacaaaactcaacataatacgcctagaatactgagtccatgtggtattatgactagttgtagttatagtgtggattaatgctatcacatctgcacggctagagtgtttagtataaactaatactatgttcaatatctttaagaacattcaaaactcatacgcattgaatgcgggttagattcatggtaattacgtctatgggcacctaattacaagtcagaagatacatttatgttttatgcttttcttactaagtctatcgaatcactgatatatttcatgtgtaggtaaaggccaatgttgaacaggagagagtttggagctcagtaaagattaaacatatttagatgattagacctagagtgtttagatctttgggacaatatgggttcagttttgttagtcgttaagtgaaaattttgttaagttgcattatgttaatgtttgaaaaatagagtttgggatcctgagttttgtaaacagtttgcatttatgatgtatattgatgaaactattttagaagtacaaatttttaattaagttgttaaaaaaaatacagtaatgtgcctaaattagtaagttgttacaattgtccaacaataataa

SEQ ID NO: 45962 - DNA, 2780 bp, Cannabis sativa
  modified_base (32)..(33): a, c, t, g, unknown or other
  modified_base (1196)..(1202): a, c, t, g, unknown or other
gtatttttgtaaaaaaatggcaaaagttagtnnaccatgtaaatttccctatttataatatggcatagaactttgggtcatggattcgggtgggtcctaggtacaggcctagccggccttaacccaggttcgcgcttgaccaccacccactcttgttgccattatattattttttggtacttagaggaagctttcataagtttgttcctttctctaacatttatgcattggtgttggtttttacatgtttaaagggttttttcaactgatttgtgcctttatttatttgctatgttgaattttttgcttttttctgcattttttttaactttttgcaaaaactcgataggttcaatggttactcgatataagtatgttcttgagattgggagtgaattttcgatatatatatatacatactcaataataatcgatggtgtcgttaagttatgttatttgatttaaaacattcattgtactctgttagagttgttagttcagttagtgacagttaagtttgctagttgtcattagcaagttagttaagattcagttcaattagttgttatttgttattatctttggttgtaatagttttatatataaacatttacttcagctataataagtgaaactttattcaccatcgagtactatcaagagccatcaagttcaccatcgagtattattgagtatcatcaaattcaacaaatactttaaataaaatgacataatttaccaacaccatcgagtactataagtaccatcaagtatagattgaaaattcatctacctaaaaatagacaatttggaaaccaaaatgcaagaatcaaaatacatgttatttgattgagtattaatgaagccatcataggcttatagcttaaatcatgtgatctattctattgggcatttttataaaatcaagcccatatcttgagtcacaaccataatgttgtcgttttccttaaaagctagaaagaagttggaattaggtgtaatcacattgcatagcttagctgttttactcaaaaaaaaaaaaaaaaaaaaagtgatggatcatggatcacaacaaaaaggtacatgtcccacaacgtggtctctattttatcttattattattttcatctctcatggcagctggaattgaaattgatttctttgttggtcgattgcaattattattattattattnnnnnnnttattattattatttattttctttcttgccaaacaaaaaaaaaataagagaaaattttataagataagaagagggtttaaccagctaccaattctgtacacatacctcaaatgttatggggattttcacaaaccaccacttcaatacacaaacaatactctctctctctctctctccatctacaattaagatgcaaaaccaaaaaaaaagagccaaaaagatcaaccaaccagtcccctaaccatgcccctcaatgccaaaatggcaaatatattggctcaagatagatatacaatacaagcccaagaaattaaaagagttgaaagaatttcaagaattttaaattaagtgttgcccatcagataatagatactcatcatatgacttgtagttggtaatggaactcatgacctttggtagcttctgctacctgatcttgaacctggattttcactcctatcagtatctgaaaattctttttgcgaatcaatctccatgctgcccgcttgggctctacggtgccttcgatcctgaaatgaaacaagctagatttgttacaaaaagcttttggtcaaaagttataagattcagatatgggatttatgaagttgaatacgaaaatgtgccatacctctcttgatataggatattcctctgactcgagcattcgaacaacttggcccatcttcggtcttttttcagaatctggatcaacacaccttaacgcagtcaaaagtgctcgctttagggctcttgttgatggtcttacctcaatgtttgggtctaccacttcttctgagcgccggctccctaccatcaatttcagccaatctacaagatttacctgtgaacaatggtttcagttcatgtcactattccaatagaacaggatcagattctaacatcataatgaccttttggatcactccttaggttgagtcagatttcacttggtcaaaaagatcaagtaaaagtggtgaattaacatgaattacagccataaatgtctactgataattctatgtgatacattatgtgatcagtgacagattgagcattaaaattcatctttgtagtcatgaccctttgaggattctaacaaatgttctcaatagcaacatacctcattggtagggcgtccataatcgacaggatctcgtcctgtaattgcttccaaaaggacaactccaaagctataaacatcacttttttcattcaaaaggccagtattcgcatactctggagcaacatatctggaaaaaagaatggtttacatgtcaaatagttaattcactgtcactaattttaaaacttatgaaacaaacatgaaaagggaattcagcatataccgctctaggaagaaaaatatactaacccgaaagtccccataacacgagttgttacatgacttttcccagctcctaacagtttggctaggccaaagtcagatacctttgcattgaagtcgtcatcaatcagaatattgctcgatttgatgtctcggtgaacaaccttcggctcaatagcttcgtgcaagtatgcaagactgcaacaagtagtcaaattaaatcaaaactc

SEQ ID NO: 45963 - DNA, 2659 bp, Cannabis sativa
acttaaatagagagtaatggtatattgagcaacctacgcataaaaattggtatattttaataaaatataacatgaaagtatttttttattaataaaaacaaacaaaaaattattcctcaacttatctcattcaattatacaatgactttccaaactcacaccaaaccaaaataagttatcactatcaacaaatatgatttaaaagtaaaaatttggaggagtgtcatgaataatattagtaaccaattactaataatgtaaaattttaactcttaacaaaaacaaaatagaatctgaaaacaataactaagaattatgtagctcgttataagcaagaggtttgagtttaaaccaaaaataagattattaaccaatgactaattaattaagcaaaaaaaaaaaaccaataactaattacttactagaataattagtatgaaagtatctatttcaaatcataaccaatgtaaaaacccacaataagtttgtttttgataggagatatgcaaataaagaagtttttactacaactagtaactttgaagtatggccctaagagtaaatgagtctttggaaggttcttattctaaagaaatttggtatttttgaaaattcaaaaaaaaaaaattgtgtatttctttttttttcaaaaaaattatgattcctgtgtagggcgagctctacgcgcgggccgatccattttagcctaggactggcccagatgataaggaataatattcaatgagctctagatgcagtatagggatgtgcagaaagtcatttgattcaattacaattgtctcgtctaatagaatcggatatctaattataactaaatcggatcagatgtacattctgaaaaatccaattggatcagatcggttgttggatgggacatccaatccaataaacatcggtctaattatcatccaattatatttatatatttttaaaatatatttattaactttatatatttaattttttttattaagaaaatctatcaattaattttattcttaatatgcacatgcacacgtgagagtacatgaaaaaaaaaacctaaatctaaaatagcacaaatcacatatttataactttaataaatatatatttaaaaatatataaataaatataaaattattttaattatatatttatgtcttattgctatgagaattgcattttaaactatgttttttttttatgttttatttttttaatgacattaatttaaatgatcactaaaaaggattgaatggatccaatttaattcaatagaaaatcagttaatacatttaatgattagaatcaatccaattcaattcatctattggatcaatcggatcgattgactcaattcgatttgattagaccgattgacaaaatctaatatctaataaataattgaattatatctgatcggatcggatgagtctaaatttactgaatatgatctaatgaacaccgctgagtgcatgcctaatctgttttcgggatcgacccaaacgttttgggggccttgggccaaaaattaaaattgagcattttatttaaacaaaaaaaaaatcatcaatcaatactttataaattcaattttttttaaaaaaaaaaaaatacttcacaaattcttgaataggcaataattttagaatcgtgtgtattggaaccacaaatttttatcatatttttttaagtgcatgtttgctgttatgattttgtataatcgtatactgttgacgcgatttgatctaagaagatcgtaaaaaatgaaaggactacgctgaatcaatttggctaaataaaattgtaaaaaataaaaaagggcaccaggatttataatagctctctcccatgtcacgatggtaatgaggctacgtctactttatcttttattaattaaatttaacacaccagagttatgttttcaagagtgtgtggataatagtctaaaaagatacttctagggaaaatctatatcgaagcttatgaaataaaatgcccatggaagacccaatatcataaacttgatattagtggtggttttaatgttctcaggaacagtaaaccaatggatacaagaatagagaattgtctcttcttcttggtagacgtctatgtcaatggtgatagaataatggaagcttggtgttgtcaaagtatgaagaacaccaagaaaaagatgaagagagaaaaaagtctcaagggatgatgtgttaatgcaacccagtaagtcaggagtttaggaagcggtccccgaaccctagcctatcattatctatatgggcttagagtttgttagtgaacatcaaatctcgtatcattttacaaaataatgaataaataaaaatatagaaaatatcccatagtcataggcaaatatcccacaattattggttgttgttgttgaatttaataattttcttttctccattgaagttgtttttgtggcattgcacctctccttggggaatggaaaaattggagaggagtgcacaagggatgaaacttctcagctagaaagccacaaatgttgtggcatagccctttagaataaaaaaattggagagaagtgacaaacaaggaagtcacacaattggagaggagtatctaagggctgacacttttcagccacgatgccacataggttgtggcatag

SEQ ID NO: 45964 - DNA, 1630 bp, Cannabis sativa
tttttggcagaggacagatacatatgtcatttatgtttttctttgcttccaattagctagattgattcttggtatgcgttatttggttaatttgttgagaaatgctaaaaagtactacaggagtgtttagtaccctacaatgtgttaatatcgctatatattagtctaaataagtataagatcccatataatttaatataataacttttaagaagtattactagccaatcgcaagacgacatatctaaaggtgctagacaccattattacccaataacaatgctctaatttattcttaatgcattggggtgatgacataaaatttattacaaattccttgtgttgtgcatttttgctaaatggatgaactacggttttgaagtactaccaatttacacaccagattaatttttcatatagtatcttacattattcattgtaaagaatatgtaagtttcgtaaatttatttacgggattgtttggtaagtcgtataaagattgtattatattaaataataaataacactatgtttgaataaagaaatatattgtattaattattacacgtaagttgtattgtttaatgcatcacaagtagtttgtataattagcttgtattataatatttacaaaagatacggggtcaatcccaatctttgacccgaatctaggaacccagacctgaaccttgaccccggacccaggactcgaacatggacctagacccagacacggactcgaacttgggatccaaacacggacccgcatccggaattggacccgacccagacccaaactcgagacccaaacactagacttggacctggacccggacccaaacaccacacccggacttggacctggatccagacctcggacccaacctggaccggaccccggacccaggacccagaccaggacctggacctggaccacggacccatatcgggctggacaccaaaccccgaactcgaacctacacccaaacccgacccatagtcggtattgggtcgagtttattaaaaatatattatctttacacaacctattaatacaagtcaatacgaaatatagtattgtattaaataatactaatacgatacaataaaatacaatccaacataatataatagaatataatataaatatgatgtaccaaacgagccatttaaatcataatttatctacatgtatataaaatacataaaagataacacttaaaagtatttttctctctcgagtttcttacagctcttgagctgaaaccaaggcaaaaacaagagctagagtgtaagggcagctaaattcggttaaaaaaagaagaagaaaggccctaattcaatttttgatgttcaaaaaataaaatttattgatcttgtccttggaataaatccaattgttttttcttgaacttcgtgacatgtccccttagccactttctcccagatcgtcccttcgatccatcaaataggaggaggatataagggaggactttgctaatttcctagaggctactaatcgatgttccagtgatatttctcaaggtaactccattaatccctctgttttaagatatggaaatgtcgtgcgaagtctagaaaaatctttttcgagctctgagtactcaac

SEQ ID NO: 45965 - DNA, 4714 bp, Cannabis sativa
  modified_base (520)..(532): a, c, t, g, unknown or other
  modified_base (645)..(647): a, c, t, g, unknown or other
  modified_base (703)..(712): a, c, t, g, unknown or other
  modified_base (2815)..(2827): a, c, t, g, unknown or other
  modified_base (4661)..(4688): a, c, t, g, unknown or other
taacactatgtgctactctagtcccatagcaccaccccacattattaaccacaaatagcataattattatactcttcaacatcttcattttctagctatatatgtctgtgtttctatgttttttttttcttgatgatatatgtatttagacaagtgtatttataggagaaactaagctaagtaactactagccatatatataaaaattattattagatgtaattattggatcacctcaattatttcatcatataataattgtaaaaatatgttaattaaaattagtcgatcgagacacctacctacgtactaattataacaataaattatctcttattttctccaaagtattatttctttactgatgaacttaagtatttagttttatgtaatttaatttaataattatgaaatattattaaccaatcacaagacactacctacaaataatattagatatcagtgatatccaataaccactacaaaaaacagctccttttagtgacaattttttagtcannnnnnnnnnnnnttgtgactaaatgtgacttttggtcacaacaaaatactccttgtgactaaaacatagtatttatacacaagttgtcactattgtgactaaaactacatttagtcacaacaaannntaatttttgtgactaataccttcagccacggagcttttagtcacaacataggaatnnnnnnnnnnaattagtcacaacttttttactttcaatcacaaattttgttgtgactaaaggtaagattttttgtaatgaacaatgctcatgcaataacaaaatttacaagttactacatgaatatgaatctagtatatatatagtcgtcttaagcttgtacaaggccttaggtgaagcttgaacaaaggcttatgcacaaattaaattatgcttttttgacaaaattattaattttatcaaaatttattaaacttttatttttcagaaaaattaattttaatttcctattttttaaatctttattttttatattaatatcatattattctttatatattttattaataatcatcatgactaattcttttttttttttttactttttataaaaaaaaattcataaaaaaaaaataagtcaataatcatataaaaataatcacaataaaatatgtataattataagatcacattatgctattatttagatttgttttatatataaaatttttcattaaaaaaattattaattatgaattaatagttttgaaacttaaaatttaaaattaattgaattgtaatgttgacaacttgttaaattaattgaatgaagaagttattttttctaaaatttttttaatgtatatcacccatatattataaaaaataatatatattaccctaaaatatagactttaaattttgtaaaaccttaaacaattggctatgttgttttataattaagctgactttgctattatatatagttggtaaatttttattttatatatgagataattattattcaattggattaggtacctacctacatacctagacctacctagctatagctacatgttctaataacaatagattaaatattatctaatatccatatataattaactaatatggatatattattaaccatccttatcaccaatagtatatattaaccatctctatatatatacatattgtgataattaatcttctttttattatatgtattcatggaaaaattaagaaagctagcaatagaaaatattattagatttcatgtaaatcattccaattattttattatgcaataattctgttaattaattaaaaactgatcgagacacttacctacatactaataacaataaatttattaatattacgtaagtgaaaaaattgtgactagttatatataaattggtatttgtgttactaaaatgtttgtagttaaaggtattagtcacgaaaattacaattagttgtgactaaatgtatttttagtcacaatacttgttgtaactaaaactaagttagtgataacttatatttaaatactatgttttagtcataagtaatattttattgctactaaaaatcacatttagtcacaaaaaaataatattgtgactaaaaagttatccctaaaagtatcaaatttttgtagtgtattgatttgactctacacattagttgtaattttctcaaaattatcaaattaaaatatgtaaattatattaatagataaatgcatctagtaaaagtgttatattgttattgataaaattaagtattgggtcttgcaaaatttaatttactaattatattataatatttttctatcaattattgaaatcttttgaaacgtttttttttttggggtaaatcaattgaatttcattgaatataaaactaattacaaaactccaatcaaatgaacaaaaaatcttcacgttgacaaaaattaaggtgtcgtttggtaacacttttgtattctagttctttaatcacaaaatgaaagtaaaatttttgttttaaaaaattttgttttgaaaactaaaatgcgttctataaccatttttgtttttcaattttaaaaatagaaaacaaaaatgtgttctgtaaagttcatttttgttttcatttgttgattttatttacgtcgggtttaggttcggggtcgcattcgggttcagttcagaggtggggttcagcgccagggccgtggaggtatttgggtccgggtctgatcgaagtccaaaacattgattaagaaaaaaaacggtttaaaaaaatattgaaagtgtctttttttttttatttttaaaatnnnnnnnnnnnnntaaaaaattaaaaagtaaaaaattatagaacatgtttttgaaaaatattttcgctttttcaatcttaaaaacggaaaactgattaaaaaagtattaccaaacgccacctaaatttatggtctgttttgtattttttttttttctcaaaaaaatacagaatctgaattgccatttaataaaacagaataagacccaattaacaacttttataatacacaaaatctaaaatggttttttttgttaaaaaaagataaaatcaacattaataactataaatttggtgaagtgttaagaagtaaattaatatagtgaaagttattctccaatcccacacatgattgaaaaatttggaacacgtaattttctttgctaagtccaatcccaccttcaaatgagatgaaacactttcaacttgggccatgtgatattgagttgttatgtgagtgagactattcatctatgtgatcattgacgtagtagcccatatgttgatattataccaagtttacttaagcgtaaattgcggcataactctcgataacattatttcgctagcaattaattcttaaattccaaattttgagagtaaaactcctataaattcaagttctcttagcacttagcccattttatccatttttgattgttaactattaagttggatgtccatgtatacataagatattatccacgtgaacacaatatacacatgacactatactattggcacacataaataaacatttaaaactaaataaaaataaaataaattaatttaaaaaaaaaatcatttaaaaaaaatttctcttttcttttcttttttttttcttttttttttctctttctcttcttcctttctcttttttaatttttttctcattaatttacagaccaccattcctcattcgaaactccacctacctcagtcctcccaaactccacctcggtcctccatcgaaactacacctcggtccattaaaactccacctcgaatccaatggcatgtgcaaacccaccgaaaattcccatctctaaaattaaaatctaaccttgacaataaaaaattcccagttaaaaaacaaaaaaaaattaaatgaaagagaatggagactcacaatgtctagagctttgttcgatagagccaaggccggcgatggaacacgtcgatttcaatggagggctccaactgcggggatggacgacagaaaaaaaatcaagaaaaaagctacgagatctagaaagagattaaaggtgataggataagaataccttccaacgcagtccctaaggagttgttcagtcttctcgcactttatgacaaactttccaagctcgatcgacctcctctgttgtgcacttggagttttcgactatactggtggtgcaacgtgaaaaaatgacctcttgtaagaaaaggggttaggttctaccaacatcagggttggacgtggcccacgattcctgtccagtcgtattggacttgaatcgtgggccacatccagctctaatggacattgggcctctctagaagaaattttcttactttttaatttatcacatccggtcccacctatttttttagtccaatattgatggacatgataatttttttttctagtccatcaatattggactagaaatctcccaaatttctttttatgtctaacgctttttttattggacattaaaaagggacatagaaaagattattagtactaatatttaattagtcctgtaatatataatatggaaaattctaatatagctaggtacatttcttagatagggacttttttttaaggctaattaggatttttgctccctgaactttgannnnnnnnnnnnnnnnnnnnnnnnnnnnttaaggtcattaaaaatgccccctaa

SEQ ID NO: 45966 - DNA, 3172 bp, Cannabis sativa
ttgaatcatctgctgcatttgagtattgtttccctgccataaaatgcagttcctggttttccaaatatgatagactaaagctgcagtagcagccgtatatacagccttcctgaacttggatttcttggctctatttatccatctaatgatctcctgcagtgatatggttgtagctccccagccaagccatgccttaacttgttcgagacactccttagagaatttgcagtagaagtataaatgctcggctgtttcatcagattcattgcagagaatacattgtgcatctgttgcaatctaaaatttgactagtcttcgcctggtttttaacctgtcttgcacagctagccaaagcaaaaagctatgctttggtatgttcatcctcgaccacacctgtttactccagtgacaaacttggtttcctactgtcatatgattgtatacatcagatattttgtaatttccagcagcaaactgacttgtgttgatttgatctttccattcatttttgagctcaactagtttcttccaataccaactgctttgaataggggcctcgtactcccaccaagagtctttgttgatatagacattatgcacccattttacccacaagttgtctttctttgatgcaattgcccatatatttttaataacagcagctttgttccattcatgtatgctcatgaaacatataccaccagatttctttggcttgcatatgtttttccatgcaatattcccagcacctgccataacactttgccctttccccaaaaaacttctgcatatggcttcaatatcagcaactactcttttggggagaatcataacttgactccaataagcatggatagtgagaagaactgaattaatcagaacagccctcccagcatatgatagatttctagtgctccaaaccttaattcgggcaatcatcttgtccactaacaacttgcattcctccttagaaatcctttttgcacaaattgggagaccaagatatttgaatggaaggtcttctctagtgaagcgagacatgtcaaccactcttttaatgtcattttcctccatgccagtgcagtaaatggttgatttagacttatttgggaccaatccagaggaatttgaaaacaaattcaggccttgaagcattcggtagatgcttttaaaatcacccctgcagaataatagtacatcatccgcaaaactgagatgatttagtttgagttcgttgcatctttcatgaaaaaagaaatcttgtttttcaccaactttgctcatgattctactaagatactccattcccagaacaaagagcaacagagacatcgggtctccttgtcttagccctctgcttgtttgaaaatagccattcatagaaccattaaacatgagtgagaatcttggtgttggatgcaagtcatgacaatagctataaactgtggggagaatttaaaagcaaccagaacttcctccagaaattcccaactcatggtatcataggccttttgaagatctaatttgatcatacaattggccttggctgatttcctcccatagtgccttatgagaccttgacaaatcataatattatgggcaataaacctcccttgaatgaatccaccttggtttgaggcaaccaaatctagcagtacactttttagcctgctacatatgagcttagtagcaaccttataaagtacattgcaacaagcaattggacgataatcacttaccaaattcgggcacttactcttggggataagagtaaggactgtagagttgatttcttttagtaattggctagaatgaaggaagtctatgattgcatcagcaacatcatctcccacaagctcccaattgtcttgataaaaatagctgctgtaaccatctgcacatggagctttgcctcctggaatgctaaaaattgcctgtttcacatcttccgttgtgtatttagctaacagtatgtctacatgtgtattagtaatggtggcaccactctccattattttggttgatacctgtgttctcccctccatgctagaacccaataggctttgataatagtgaagaaaagttgctgttataccaatagaatcttcgactcgaactccttctacattaaccacttataagatcttgttctggttccttctttcacgaatactgatttggaaaagagcaaaattttcatctccatcctttatccatgccattctcgatttcagatgcaagaacgaacaatagtttttgtgtacatcagcatatagcttcttggaatcagcctcctgctcctgtaaaactttactcaatggatccttttgaagtgtagtttgacaatcgattaggtcttgcctcgctttagtatctgctgcttgaatggcagaaaaatagcacctgtttagctctttaaatgcatatttaagagcttttaccttggtaacaacctggtacatttttgtgccttgcacatgttgattccaaattgttgagataatctgttgaaagttaggatgggaagaccacatcctaaaatacttgaagggcttccttccactctccaaagcagggtgtatagaaaccactgcatgtgtgtgatcaaataagccttctgtgagaaagatagcttctacagttggcaataattccatccaggcctcgttagccaaaactctatcgatcttggaataaattctatcagctgcactctgcttattactccacgtaaaatagcttcccgaatatttaatgtcttcaaggtgacatttagaaacacaatctgcaaaggcattcgaattaccatgccttactctttcacctattcgttcttccttataaaggatgtcattaaactcccctaatactatccaaggatcagtattagaaagaccttgtaaaccctgccacatttgctgccttccttgttcttcattaaatccatacacaaaggttgcagaaaattgatatttaccatcaaaagttgtaacccgagtgtggataaattgactcgagcaattcatgatacacactgtgaactgattaggattccaagctaagataattcttcctcccttatgccaagccaaattagtagtaaaataccaacccgaaaacatattcatatataaggctccaagctttggagccttaactctcgtctcaagga

SEQ ID NO: 45967 - DNA, 1578 bp, Cannabis sativa
  modified_base (1546)..(1552): a, c, t, g, unknown or other
ctcatcacaattgtatacttttgataattagataaataaattgcttttgatttagagatcaagggaggaagacttagttgatagtattgtactatcaaattatagtaattactatggattaatcaggtacgcatacctaattcttatatattattattgtgtactatattacataaaaaatgatcttggatttaccattaatttttcttaacacatttttaaacgttggcattgcttctaatatatcccattattaacctctaaatcatctaattaagtccatttaccaaaaccaaagtaagagatggtaaccactatggggtatatatatagagtgcttgtatttcaaagtgtagtagtctaacattataaatataggtcttggttcgctctttgacatacacttgttttctatttgttgagcactagctagaacaacatcgagacttgtccattcccaaaaggattttcactttgttccctaagtgtttggtagaaagagaaaataagttttttggacaaaatcagcaccaatagaacttggtgtagctatatgttcttccatcacatgaagagtatttttataggcataaggctggcatggttggggtaatctaattaagagtatcactacttataattagggaaataataataattagttagacaaaacaaataataagagaaatttcctcaatgggattaaagtcttttttaaaattaaaaattagatttagtttatccatgcacatgcatgaatgtattggatcaagagccaagtaaaattaattaataattaagaaagacaatatccttattgttataaaactcatgacgcagtcattatatattacgtacgtgaagaagtccacgtactatgatttttagttcgaagcaaataataataataataattaaaaggtgtgtgatcaaagtcaaatgaattttttaaacccatgttatataatactaaacgcacttttcgagtcagagtaaaactcccaaatgtctttcagcttgcaatttctttgataaaaaatccccattattaattgagtatttatatgagtaaagcaaaattcataaaacaaaaaagcaacagaaaattggaaatggtgagagtttctcaacgcctctccatcctaacaaactctccttcatccatcttggcttcacgcgcatcctcttaccacgcgctccctcttcttcagcagccactggaaccaactcctccatgcccgatcctctcttctcagcaacactattggggttgtgactttgggcttccacttggatccacttgctgatttgtttacctacggtctcttggtctaaggctattgggcctccaccttgggccaagtcttgttctctaacattatatatatagtattaattaattagccactgttacatattataggctaatcaatcaaattttatagcttagatttaactaaaaattatatatatgagattggacaaattcaagattaatctatctattctatataaagtgtgcttatataacagaatttttggtttnnnnnnnattcatgggtaactttttatttatat

SEQ ID NO: 45968 - DNA, 3437 bp, Cannabis sativa
cataccaaataagatgtttattgtgctcatcatttaattagatcacttatttagtccaatttagaatattaactcaaataaattgtcttaatatgtaagctagcccacatattggattacaaaaaataactcaacaatctcccacttaggctacaaattaattctattgaaaattacattggataaccttatgtgcgcacaaacttgctaattattctcaaaacatcttctgtagacaatcaggtccatctcatataccaatacgaggccaaagcggccttcgttactttatcgtaactggacctatcaatgatcaccatatcaaatatatttaatgacatagatgaaatatgaatatgtacttggaaattacatgcaatgtgatcttaatcgtgctttttcccaattgatcctttattccttagtgtgatcaacaatccttagtctttcaaactttatgtcagatcacaatgaaagataacacaatcaaagcaataaatataataataaaactatcaattttattatgtagaaaactaaacctacttaaagtagtgtaatagtgtcaatcaacaaagtaactactattgaaaataaactctcactaaacaatacacatcatcaaataaaataacacccatgtaaccaatatactcatgaaagaccttaaatgtcaaaactttagttagtgggtgtgctagcaatgagtttgttcctatatactcaatatacactatctttactttgaactatatcttgaacaaatagaaacttcatgtttatgtgtttagactttgctaagcttctattgatatctgaatatagaactgctcatacattgtcacaatatacctttagcggtctttcaattccttacacaaccgacaaccaagtgatacaattttacagtcatgttgcattattggttgcctcataacaagttatgaattctgttgccatgataagatgagttatgagtgtctgcgtagcacttttgcatgatatagctcctttagacaacaagtagacatagtcagaagtggatctcttattttatttgcaatccacaacatcatagtcagaatacctgattatctccaaatttttagacttttgacaagtgagcttataatcatttgttttttataaatacctcatgatccatttggttgccttccaatgatccataccaggatcacctaagtatctatccagcatagtcactatacgtcgaaactagatgtgtacatacctgagcatacataagacttccaatagttgaagtataaggaattttcttgcatcttcattctttaaatttcattattggggcaatcgttgagactaaacttgtctcatttttcaataagagtcaggttaatttactctaactgagcttgtgacatacacaactgtcaacagcattgactttaaattcatatgagacaatgctgtaatgatgaaattgtgatactattaacacgaaactttcttaagaccatagatagatcttgagtttacattcatagaatttggatcgcttgacacaaaattttctagttgcattatatatagttttctctatgtcaccaatgagaaaaattgtcttaataaccatctagtgtaactctaagtcaagatgagctaaacgtgacttaatttttttcatagaatcttttgatgacactggagagaaagttttttttatatataatcaatgcctttcttttgtataaaacccttggcgacttgacaagatcctaaatgtcattgtccttcatggatttcatctcatcattcatggcatcaatctacttttgaaaattaacactttctttgacttgttaaaaattaattggatcatcttccactgtctttatgtcaaacgaatgctctttaaggaacacaataaaataatttaaaattgcttttcttttctctctagtggatcgcctaagtggcacttcctcttgaggtttttaagttcgctcttttggaacaacctcttgatattgaataaggagtaccattgttgaatcctcaattgttgtcttcaaatatgtcttaacaatgtcaatagattgatcattgtcaaaaataatattttgtagaagaatttatttctcttcaaaaaacaacatttcttactttatccccctcaaacacaacatgctcaagaagtctcacatttcctgtctcgaaaaaggacttgactgagggatcataaaactcaaaaacccctcaacctttcaagatacccaacaaaatagtagtttactatatattcttaattaagtccagctttttttcatgtggggcctaaaaagacattggctcaactagacaaccccaaaagtgcaagtgtttaatactaggcttttttgcctatccatagttcgtagggggttatagctaccaattttctatgtactctatttagaatatagactgcagtcttaagtgccttttcccaaagtgattcaggtaaagaagaatgattaatcatgcttcttaccatatccttaagtgttttgtttcgtctctcaaaaacaccattcatgcaaggttgccctagcattgcaatttggtagatgatttttcattcctctaagaatttggctaaaggtcatgaacgatgttcacttgatctgtcatatctacaatagtattcactacagttagacttcacaagtttaatcttctcaccaagttgattttcaacttaggctttgaaggccttaaaatgtccaaggcttgtgatttttatgtataaggtacaagtacccataatgagaatagttgtctacaaacgtgataaaatacggtttgccatttcaagaagttgtagggaatggaccacatatatcaatatgtctcatttgtaagacactaaaactcttgctggcacttaacttcctaatgtttgtctattttctttttcatacattaattcgacacacacatcaaggtcaatgtaatcaaggggtgcaagtattttttctgacacaaatctccctattctccttttggagatttatcctaagtgttagtgccataaggtaatgtaattctgatttgataattttgttttgtaccttttgatgttgtttgtaaggtttcattatatgaagtaattgtattaatcatatgtagtttatcaattaaagaaccaatcgtaactaagtagaattaaaaggagactaaattattagtctaaaatgaacaagaataactataaaattttgtctaaatgacggtactacataagttccatttaattcaataaaattattagtcttaaaagataatctaaatgtgcacaaaatgactataaaattgggttttagtgacacgtacaaaagtgcgggtcactaaaaatttaaaggtgagttttagtgacacgcacaaaatgactacaaattcagtgttagtgtccc

SEQ ID NO: 45969 - DNA, 1157 bp, Cannabis sativa
actaagcattaactctttcattggtcttcttcttcctttcatctactgaaaatctcacttcttcttggccatgagagttttaatcagctccagaatctcatttctcatttcagaaaccaaagatggagtaaccttctccttcaaatcagaaaaccatagaaaatttttgccattggctatgttgtgaccattactatgccaaaggcatatcactctggcaatggcagtaacatataagccacaatcataaccgttctcttgccttggacaatcactgcattctgtatacttggctttagattctgaacctgaatccgagatgtagttgcgaactgcattgtaaagacggaaagcaggtaatctgttcccgggtgcattgctatcgtggtgaacgaacgtattagtttgtctctcgaatgcaagtaagctccaatgagttccaccttcggccaaactcacatcttcattgtcattgacaggaaagagtatcagtcttttagaagacaaattcagcggctccacaaactccttgagatttgacatcgaagaacagctcattatccagtaagatattgatggtggaactagcaagacgtctgaagaatcaagggatgaagagagatagctcagatagaactcgattatacgatcattcagaaaatctggtccacttaggatatccaaatctgatctcctgagtacaacatcattgtagctaagaattttctcatcagggttggagctctccatctcttcgtgcaagttatgatgagctcgtaatcctggacaaacaaaactgcaatcattgatcaacaataaccataatcctaaacaaatataaattgagaattgaagaaggccattgataccaactcacaaatggtacttagaacttaatcaagaaagccatgaatgttaaagtttgttaagtcaaggtttattcttcagcaacaaaaatacaataatgatcattcaacttgctgaagctgaatatcaaatgtcctaatccagaattacaaaaacactgcttcattggaatttatcatctctaactaagtcagtgaatattaaaactaaaacatcataaaaaaacgagaatttaagaaaatttgggtatgttttgtatgtagcatctcaaataaatatttctgcaattt

SEQ ID NO: 45970 - DNA, 2460 bp, Cannabis sativa
  modified_base (228)..(244): a, c, t, g, unknown or other
atcatcatttcacttctatgtcattatagaagctacagattccgtatctatgattagcgctcccactcaattgtactaccatactcctaagatgtaagtattggactgattaatttggccggctttaacgaacaagtcaaagaacatatataatacagttgagctcgaacctaacaatctcaggattaagatcttttgacctcagatcaactaagtgatattgacttnnnnnnnnnnnnnnnnnagtttatgatatcttatccaagtttaatatctgtgcagcctgatgtatacttcatatatcggtgcagtctagtgtatacatccaatactactctgatgtatgtatactccatacatccacttatctaagtgtaagtaaactttatcgctgattatcacattagtgtaaatccagtgcaccgataaatcataggactaaactttgaagcatataataataattactttttattgtaatgacatcactgtaattatgaataactatatgttccaaatttatcagaatttgtatattaaaacataatcatgaaaataatatgtaaacttaaatgatttctaattttctattcatagaaaataagattatattaaaataggttttatttagggcatcaaatctcaacaaccacatatatggaataaccaaaactgtatgtgttatgattgaaaggtgtgcaaatttcttaaatctatttatggattgaagcaagcctctagatttgggaatatcaccttcaataagagtattaaagagtatggcttcaaataaaagaaagacaaagcctgtgtgtacaaatacatgcattaaggataatgtagttgtattcctaattttttatgatgatgttattctactattagaaaaaatgtagaagggttatcagatataaagaaataattagccgataaattctaaaaaagggatttggtagaagcaaattatgttctcgggatcaaaaatctaaagagatagaaaacggagaatattagcactatctcaagcaacttatattaataaggtgctcgaatgattatccgtggagaattccaagaaaggacagttaccatccagacatggaatcaatctatacaaggatcaatgtctagagactccttaggagatggaggacatgagaaagtacccttatgcatcagcagttgggagcttgatgtatgcaatgttgtgtactaggcttaacatatgctacgatgtagggattgttagtcgttatcaatctaatccaggtttggaacactgggtagctataaaacacattctcaagtatctttagagaacgagagatctcatgcttgtatattctgcaagagagttaaatcatattggatatactaattctgatttttaattagacaaagatagtcaaaagttgacatctgggtcagtatctactcttggtggaggagctgtagtctggagaagcattaagcaaaccagtattgcagatccaaccatggaagctgaatatatagtagcttgcgaagtagctaaggaatcagtttggttgaagaagttctacattgctcttaaagtagttccagaagtagaaaaaccactggtgctctactgtgacaatagtggagtggtggccaactccaaagaactaaggagccacaatagaggcaagcatattgagaggaagtaccatctactaaggaatatagtggagataggtgatgtgatgatcttggagatcgtgtcaaaacataacctggaagattcattcacaaagatgctactagcaaaaattttcatgggtcatataaactaagggagatgcctagtttgcttttagggcaagtgagagattgttggggtttatgccctgaaaagcctataaagatatttcttattatatataaagagttgaatattttaatatatacttgaatgttaaattattaataattattactgaataatttatattaaatatcaaaaaatttcttattcatatatgagattgtgacttatagctgtacatagaactaagacaacttagctataaacaaaagagtcaataacatattaaagttatggaatctttaatcaacgcttgcttgtacggttcactgatactcgttcttcagtgcaagtaatcttagtttagattactgatgtagtgagacatctaagtgaatgtactatatataatagagattatatatgacaaggaccgatatgaaagaagtttcctctattaacatgttcatcataaagacctaattcatatcataatgatgatcaatagtagattggcttaaatcttgagtaatcctaaactcttgttcatgttataagtttctttaattcactcgttaaagtttctaagagaagatgattcttacaacttctatttcaaaaatctaataatatggatgactgagaagataatctacaattatggaatcttgatg

SEQ ID NO: 45971 - DNA, 3209 bp, Cannabis sativa
ccaagtagtgcggaacttagaaacaaaattcttgatgaggctcataccactccatactccttgcatcctggcaacacgaaggtgtatcaagatcttaaaccgtacttctggtagagcaagataaagaagaatgtggtagaattcgtatcgtgatgcctaacctgtcagctgatgaaggctgaacatcagaggccagcaagtttgttgcagcctttgttacttcctgagtggaaatgggaggctatcaccatggattttgtggttggattacctagaacatcaggttaattttattcaatttgagttgtggtagatcgattcacaaagtcttcacattttttaccagttaaaataacctttacagtgaacctgtatgcaaatttgtatgtcaaggagatagtaagattacatggtgtaccaaagtctatagtttcggatagagattcgaagtttacttctaaattctggcagagttcacaacgggctatgggtaccaaactaaaattcagtacagctttccatccccagactgatggacagtccaaaagaacaatttatatactagatcaaacatgattgataccttgaaaacaaggtttgctggtattctcatggtggctaagattctgaatcagttgactataatatttaggaaggcattagatcaagctcgttttgatgcgatcaagaacttcaccaatgcacggatgaaacctaatcagcatgcccatgatcccctactcaaggtagatggtcatttctaagaagataaaatccatggaactattatcgatcaggaaacacaagtcagtttgatccttaatagtttatctccagtcttcatgccctttacttcaaactacatcatgaacaagttgatgtttgactttcagaaattgataaacaaccttcagacatttgagagtttgattggaggcccacagaaaagaggtaacaaagctcctactactactcttgctaccaatggcgcagccaaggctgaggcaaacattgcctctacttttaaggccaataagaaaaagaagtagaacaataccaagagcaagacacttaaatcttttaacacatctaataagggtaagagggtcattgtaagcaaggcaaagggaaatggaaaattctccttttgtggtgaaaatgggcactggaaactccagtgttctatgtttttggcaaagaatcaaggtatttctaactcttttgtcaagaactcatgtgttctagagaataattaatccctttttggttattgattctagatctactaaccatgtatttattcttctttttcagctccacctgcttgaaatttgaatttatatcctagcgagtagttaagacagatagttcaatggtgaggtggagaatgtccaagctagaagacaaagctcaaaattttaaattttaaataaattgttttaactttcaaaataatttattccaatttatatttttgaactcttatttcaatttccaattatgaattgcaacaatcattatgatatttttagtattaatttaatttcagtttcctcttaaaggatttcattatgtgttgcttttatgaaattgagctttatattctgtaacatatccattgatgcctagaaccatttattttatattgcttattatctatttatcaattgtgtgtgatttatattaattatagatataataatctattgtatagatcttgatgatggtagtttttacaagatcaatctttcaaagaagaatatatacaacataaatacttggactaaataaattgttaaatctagaaattcttatggataatttgtcaagtccttagaaaattattgtgatataattctttaaatgatcatttgatttgataagggtagaaaaatatttaatatatgcagttcaataatcttttaactctagattgtattcaaacttactatctcaaaatttcaataccacaaatagataaaaataattagacgtatgcttagcttttaaaacctacccaaatccataagggtggatcttttcatggttatccaaatatttatacaaatatttcaacaccaaagtagcaaactagtagaaagtgtttatttgattttgatcctgcaaatgttccattgtctcgtacaatcgtaatagataatcccacaacctccattgtattgactcatgtcgtgacaactgaaaatatctataccactgtagtccctagcaacaatcacaatacctagtcttagtggatgggttcttaagagcctaccataatatgacaaggattacatttgtgataatgactcattgtcaatataaacaagtaatgaaaagtccatgaaataaactctaaaataaagctaccaaaacttgttctaaccatgcacatggatagtccaaaatttttagaatacaaggataaaatagaaaaccttgctttgtctattcaaaagacttaagcctcattcatatttttagcatcatacatgttttttgttgagatcaacaaccaatagcttatggtatccttagcaagtgtcttacattaatagaatactaggacattatcttaataacttattctaaagaaaatcattagacttcaagaattagacataatttatttaaagaaatagtttctaccgtttcaaaaataaataaatatcgtagaagaaaatccttaagtatcaataatgggatgtcttatgcctgcttctgtacgcattagactagacatctattgttgagtgagagctataaatacgtataattaaaatccagtaagagaggtgtaatattctgataaacctaatgataaataattaggatttatatatattatgagctaatcaagtaataagtggataaataagcgtaatttattaattacaaagatttatatagcatgcatgaatatactatgagctatttgtggaaaaaaaacatattttctaactggcgaccttggagactcaatcagggaccaaaaatatcataacatatttaattaataaatttgatgagaatattattataagttgataatgtaactattatagtaattaaaagtgttaacgcggtttttcaccaacggacttaagaagatcgtaaaatgagcaagatgaacacaagcaatagctaatgagctcctctttagcaaatgggctcctctttggctaatgagctcctctttggctaat

SEQ ID NO: 45972 - DNA, 1087 bp, Cannabis sativa
tagtgccttagcattagagcgttacaaaaattgcgtattttactttggaaaagttgttcccaaaaggaagcggtgtttaggaggttttattacctcggtactcacacaattgatcgcattatcattgtgagattaccaaataagaccgagttcaaggatgatttcttctggactactggtctctcccctatcaacacaaccgcatttgcattacacgtaagtctcatttctttctcaaaagcttggttttgagtttttggatttataaatttgaattcccttactcatttcacttattgtgttgacaacaactattagaaggccgatccctaccctcgagatggatgagcggcattaaattttgttaagtcttcccttaggattgcggtcagctgatttcctactaaacgaggccaatctgaggaccgttaacctccttggttctgatcaattcacctaaaactacaagaatccaaaatattctaagtggcagaaagtcttagttccagtcgacgaggaagacaaggattatgtggcttgcacccactatctcaagaaagtaatccctcaggaagcttaagaagaagcatcctgaggtaatcaatgtggatggtcaccaactgtacttaggaccgcacgtaccttgctagtaacctttaaggatagccagtataacttttacacctaggataatttttgtatagatcgcataactcataggtttgatagttagtaccctcaattttaggccgtaacataaaaaccactaaaccgtgggaatcacccaacccattagaatttgcccacatggaaaccgcccataaaaaacctgtaaaaattgggttgggttgagttttaacatgctgtttggcaggcggatacgtgttagcctaaaaggggcaggtcaactcgtacctgctaattttttttttatttttttttatttttttaatttataactaaaactaaaaataaaaaacaaaaccctaaaacctaaaactaattttctgaactgctcacagccgctcgactccccgtccccttcttctcttcacctatcatcgactagtcgctgcccagcctcagg

SEQ ID NO: 45973 - DNA, 1283 bp, Cannabis sativa
tgaaactcacaaatcgactagaattgtgatttctagatgttttggcattcccaaatgcttctagtatataattggccttaagaattctatgctcaataccagaactatcaccactaacagctgctaagtattgcattgcaattctagctgtctcagttttcccagctccactttccccactgcaaacaacaaaaaatgttaagatggtcttatggcatgaattgagaactgaagaaagctgaaaggtataaaagaaaaactttaacgcagatactaatataaagaaaacatatcatactctaagggtctaaccttatgattatggattggcttacttcatctgcataattattaaaaaaaaaaaaaagaacttcagaaacatgttacttattgctacgagataatataactctcccaacaaacaaaagaagatataaaagccgcacctctcatcatctcattataggcagtgtccacggtagcataaacatgaggactgtctaactttttctgcctataagctgtgatcaaatcatctccataaatttgaacatctttgaagggattgacagcaatcagaactggtcctgctttactctttagaagaaaaacaaaagaacttcaattgacagaaacaacaacagatgaataattctaaatgaacattgaagagcatcatacttacgtaaatcatatccttagaatatctatgctggatattataaacagtagatggttcattcaaataactaagctgtacaagatcatccactccttcaagtatatctgggtttgcaggtaatatctctgatgcggtgactttcataacctacggtaaaaatataagatttatttatacaacaaattaaagtacacaaatctgcagcaaaaggtttcaatcattcaaatatttacaaaaaggtgcatgaacatacatttccatttgacaaagaaacagttgcatcttcaccagagtttgattgtattgttcctgactcccactgcccattcgccaatcgacaccaaacacgaagtttctgaaaaaaaaaaaaaaaacagagttgatgtcatgagtttatacaccctcaaattctcaaaacatgaagatgtactggttcaagttacaaattttcaaacatccaaaagatcaaccttttagaattgctggatggatacgtatgcaaaagggtaaatactctgtaaaacaaatctcattgaagctagccctacgccttaaacagcaaaaaaaggatttatgaaatcttaagattacagggctaaaa

SEQ ID NO: 45974 - DNA, 4323 bp, Cannabis sativa
gctgagcatttacctattcccttgctgcctccttttatttttctgtcttggtatcagagcagtatcttcggcatgtgtcgagatccatggagggtgatggaagagcttctacagctgttgacggaggctctgcaacaagtggagaaacagcccaaccatttgccttaaaactggatcgcaacaatttttctctatggaagacaatagtttctgccattgtgcgtggacatcggttggatggttacctcaaaggaaccctatccaaaccactggagtttctacctccaacaactgaaccagatggcactgtaagttccactgtgcaggtcaatcctgcctttgaacagtggatcgtcaacgatcaactcctactcggatggttatacgggtctatgactgaaggtatagcctcagaagtgatggggtgtgactgctcagcttcgttatggaaagctcttgaagatctctttggtgctcactccaaagctaaaatggatgagtatcgtaccaagattcagacaggaagaaaaggtgcattgtccatgccagattacctacgccaaaagagacaatggggtgatgtgcttgcccttgcaggagaaccatatctagaaaaccagctggttgctaatgttctttcgggcctggacattgattatattcctatgggcatactcatcgaaaccagaggttctactacttggcagcagcttcaggatatgcttctaagctatgatagcaagatggagagactccattctctctcaggtactactaaacttaatggtccctcagctaaccttgctaataaaagctcttcttttggatctggcagaggttcgaacagcagtaacagaggtaactcaagcaacaacaacagaggctctaatcacagatctagaggtcgtggaggtagaaacaatggtcctcgtccaacttgtcaggtctgtggaaaatacggacattcggcagcctactgttataataggtataacgagtccttcatgggaaatgcacctggtgacagcagcaacaactcaaacaactctcagaatggtgcagcagctctcacagcttcatctgaatgcttggatcatgatgcttggtttgctgacagtggtgccagcaaccacatcacggctggagttaacaaactgaatatgaaggaaaactataatggtaaggaaaccgtgactgtggctaatggtaacaagcttcctatacatcatgtgggtattggcactttgcatactctacctgcctctcctttaatcttaaaagagattttacatgttccaaaaatcaccaaaaatttacttagtatttccaaacttacctcagataataatgtgtatgttgaatttttctctgatttgtgtcttataaaggacaaggggacaaggcaggtggttctcaaggggaagcttaaagatggtctctatcagtttgatattccaagcctcactactgggtcttcattcactcagcctctatcatgtttttcatgtttttctggtcttgttgtgtcatctaatcctcatgtaaatcagcctatggctgctaactctgtttgttcaattaaaaatagatggcataggcggttaggccatccatctaatcgaatccttgatgttgttttaagcagaattaatataagaaatgttaaacataaacctgatttctgtgatgcatgtcagttggggaagtctctttctcttccattcaaaataaatcactccagagctgcctctccacttgaattaatacatacagacatttggggaccttccccaattatgtcaaacacaaattttcgctattatatacactttattgatgactacagcaggtatacatggatctatccattaagatccaaagatcaagctttcaatgctttcactcaattcaaatcacttgctgaaaatcagtttaactatcatatcaaaagattgcaaaccaattggggggagaatatcaagccttcactcggtttgttagtgatcatggaattgagtttacacactcttgtccacacacttcagcccaaaatggaagggctaaacgaaagcacagacatattgtcgaaatgggtctcactcttcttgctcaagcacatgttccccaaaatttttagtgggatgcctttcaaacgtcagtctatttgatcaatagactacctactcccattttaaacatgaaaacaccattggagacactttttgctaaacaaccagattatcaattcttaaaagtttttggtgtgtcatgttttccttgtctaaggaaatattaaaatcataagtttcaatttcactcaaccaagtgtgtgaaccttagttacagtgaaagccataaaggatataaatgtttgtctagcactgggagactctacatctcaagagatgtgatcttcaatggagaagaatttccattcaaatctggttttttaaatacacacacctctgaagcaccagtgtctatacttgtccctttttggtctgcaacttctactctcagcacacctgatccatcgcaggctgaatctcacattgtctctcagccaaatcaaactgatggtgaccatcgtgactttccaaatagaaccccacctgctggttttcccctcagatcgaatacacatgaggtaactaatactgatcactttattacgagtcctactgcctctaatagctcttttgatgagactaatcaacaagcacagcaagatattcatcatgtacatgtttcggattctcaaataccagcagtaagtgaaagtcacaacttgaatacgcatcccatggtgacaagggctaaagcaggaatcttcaagccaaagacctatttgagtcactcaaagtggtctaatattagtgaagaaccaagttctgttgaggaagccttgcagcataaaggttggacagatgccatgaatgttgaacgtgttgctttgatcaaaaacaaaacatggaaggtagtaccaagaacaccacacatgaatgtcattggatgcaaatgggtgtataaacataagaaaaatgctgatgggacttctcaaaggtacaaagcgaggttggtggcaaaagggttcaagcaaagacccggagttgattttggagaaacatttagcccggttatcaaagcttctactgttcggatagttcttactatagcagtagcaaagtcttgggaggttaggcaattggacatcaataatgcctttctcaacggacatattgtggaagatgtttacatgagccaacctcctggttttgaagacaaaaataagcctaatcatgtgtgcaaactaatgaagtctatctatgggctaagacaagcgccacgggcatggttcgataaattaaaagctactctggtgggctggaaatttaagaactccaaagcaaattcttctttattcttctacaaatctacttcatacataatacttgttctcatttatgtggacgatattatagttacaggaaacaacccagagaaacttcagaagtttgttcaacaactaaatcagcattttgccttaaaagatctcggacctcttcattattttttaggcatagaagctcatcgagatgcaactggtttttatctcagccaaccgaagtatattgaagatttgctcagaaaaatgaacatgttgaatctgaagtcctgtccaaaacctatggctactgggaaaatgatttcaatctctgatggagagcccctaaggaatccaactgagtacagaagcttaattggggagttgcagtatctgacttattctaggcctgacataagtttcgctgtgaataaacttagtcagttcttgaaagcaccaatgaatgttcattggggagcagccaagcgcatcctcagatatctgaaagggacaccacatcatggcctccacatcaaatattcaaaccgtctttccttgactggtttctcggatgccgactgggcctgctatccagacgattgaagatctgttgctggtctttgtgtctatttaggcgacaccctggtctcgtggtcctccaagaaacaatctgtagtgtcacgctccagcaccgaatcagagtatagagctcttgcccaggtggctgctgaaatgtcttggatccaaggactatcagctgaactcgattttcctctgccttctataccagtgatttggtgtgacaatatgggagcaagtgctctcgcttctaatcctgtctatcatgctcgcacaaagcatatagaattggatgttcattttataagagacaaagtcctagagaaatcactagaaataagatacattccctccagtga

SEQ ID NO: 45975 - DNA, 1597 bp, Cannabis sativa
aaaaaaatgggtttttcgggtgggtttgagtttgacccaggttttaggtgtcacaattgtaaaacccgaacccagtctggtgggtaatcacgtgtaacccgaatctcgcccaatagataaccgagtgtaacccgaatctcgccctataatttttcaaacttttttttttgagttttctaaattttgagtcgagtgaatttcccgaattagtgagtttttgggtgcgaatgtgccgccctaagtaaaagtgttttatttcacaataataatatattgtagtttataagttgaaaaatatatcttacctattttaaaacattttgaataattagaattgctaaaggacaaaccatattcatcaacatgacatgaggcgtcaatactgctattattagtgtaagtgaaatttgttgtataaacatttaaattattgaatttgttactattaaaaactgatattggaaatataatggctacatacctaaatttcctaaactaaataattccgttagaacctagctatatgtggggctatatacattggttgattttgacgataataattcttaaggtcgttatttttggaagtccgttactacctattttaactagtccgttagttacggtcaaatttaccacatcttgaagtattattggtccacctcataattttgattaaaaattattaaaaaatccaatatttttcttttattaaaaactaatttaaaacaaataaaaatgtaaattaaaataaataataataattagaaaaaaaaaaatacacaaaaccattatcattgatttatgtgtttcttcaagttctcattggtcttcttctctaaatggacacaagaaaaccttctgcgcagaacgtgccaccatctctggccatccctggctcaagctaagttcataatcgaaatccccacccttcaaaatcccaaactcttaaagtttcttccctctatgtgaatcctctctctcacacgattcttcgcccaactctaagggagcacatctttttgtcttcttcttcaacctccactactacaaaaatagtttttttttatgtttttaaatagtcgtttaaagtattctcatcggtttctataatcgtcgcctatacgatcgttgcaaaacggacaaaataggcaactgttaaaaaccgttgctaatgtagacttctcgacggtttaaaaccgtcgcttataacaaggtataggcgactgttgtaaactgtgccctatactatagtacgggcatggtttagaaccgttgcctataccctgttataggtgacagttttcaaccgtcaagaatattaaaaaaaagagagagagaaaaaaatacaggtttttttgccattaatggtagaaaaatctgtattttccctatttttatgctacattagttttatcattttacctaaattaaaataaaacaactaattaattttattacaataacaactaactttaataaaatacattaaaatagaggaatatgacgagagaggagggcgatggtgtgaaggcgtgggtggcgttttggagagttaagattttcgttttagggtgtgggaaatggagaagaaata

SEQ ID NO: 45976 - DNA, 1659 bp, Cannabis sativa
gacaggggcaaaattggtacaatatttaaaaaaagaagtaaaaataatagactttaaaaaagagagtaaaaataaaagaagacaatataaaaagggtatagagagtaattttctctaaacatattactacctcatatacacttcactttaattctacataactaagcaaatattttttttatccaattataatcccattagtggtatcaaagttccgttcgatcatcagtgagcgtaatctttcccgctcatcaacatgagtttggagtccaaccgctcttctctacctcttctaatttttcatggagaaaactatgatttttggtccatcaaaatgagaacatattttcgatcacaaaatctatagaaaattattgaagaggaagtcactattccagaagatgttacatctctttcagaagataaaaaaaaagcactagaagatagccaacaaaaatattctcgatcatgcattatactgtttacagcaagctatgacagactatctttttccatagattatggagacatcaacggtaaaagaagcgtgggacacattgtaggatgaggatccaaggaacaattaaggtacacacagttagactacaaaaagtttaaaaaatattttgaaaatttaagaatgagagataatgagatcgcaaaaaattactattttagaattaaagaaatggtaaatcaaataggagcttatggaaaaataatttctagcgggaatatagtacaaaagatactaatttcttgtacaaaaaaacatgattcaatagtttctgtgataaaggaaacaaaagattaggaaactctatcaccaatcgaactaatgggctctcttgaagcatatgaaagtagacgagaaaggcataggaaaagtgaagttgaaaatacctttcagtctaaaatcaatctgcggtctcataaactaaaagctgatggagaaagacaaagaaaaacaaaaggaaaataatgacaagtatcctccatgtggcatttgtaaaagaaaaagtcccttggagaaagactgttggtttaaggaaaataatagtgccaaaattgtaagaaatttgatcacactgaaaaaacttgtcacttaaagaaggttcggtcactttaacttccacaggctaaagatgctttcctatataatggagataagaaaatagtgtgaccatacaagcacaaacatatgagtcgtggctatggtatatatagaaggttcggtcactttaactttcacgggctaaagatcctcgagtaaaagaatatgcgagacctcccaacgattaaggatatcatcacagtctacaaaagatgcatgcttaagaaacaacatcatcaaccttttctgtcaggcagaacttggagagccaaaaagccattggagatggtttgtacagatgtttgtggggcgatgcgcactccatcaaatggtcaaaatagctacttcattctcttcatcgatgactttactagaatgacatgggtttattttttcaaacaaaaatcacaagtttttatattctcaaaaaatttaaaactcgtgttgaaaaacaaagtggtcactacatcaagacaattagaagtgatagaggcaaagaatacacttctaatgaattcaacaagttttgtgaagatgaagggatg

SEQ ID NO: 45977 - DNA, 3414 bp, Cannabis sativa
ttatttacattgttttagaatttcatatttaggatgttataaaacatggtaaaatatattccaacaatccacaatttgtcttccttattcataactgcacacacatattccgtcatcgctgcaatgttccattctgcaattcttttcaaaccatttccccctacagcttttggttggcagacatgatcccaagtaattggtccagatccttggaaaacattcttctcaatgagtattacccattgatggttactaaacaatttaactataaatattaattttaaaaatataaactattatatttaaatcaaatgacaaaataataaacgagaaattttaatttctttacttaatttaactacttaattaaaaataaataaaaaattattactttttacactatatcaaaaatatgtttatatataaaatatacttaagtcaaagtcaatttttttttcgctaaaaaactctttttcttaatttttcttttcagtcgatagaacaactccaactcatataatgtaaaaatattttttttaattagatcgaaaaactaagtataaaaactcaaatttttataatattacccatgaatagtgttaacgcagattttcattaaccaataataaatcttttttgtaataaatttaacgcataaattatatgaaataaataaagtataataagtataataataacactagatatttttacgtagttttgcagttaaatttgcatactccacgagtttattttattcaagatatttttgagtatttaatacaatatataattgatagtatttctgtatttctcttaaagaagatttaccgtcccttttcatgtgctcgatctattatttataagaatataggttgacaattattaacatttaaattcaaaatacttaactgtttcatgacacgtgggaactaatcacgtttcatttaaatcttgtgtggataacaattgataataccacataactgaatgttattcttatcctcaaagatgataaatactgatttggacaatagcatctcgccttccagcaatggcatgagcaccagtgtactgagtaaacttaagaactgctctttgaccataaggcattgcaatctggacaatcgtgtcttgtatattttcatgttgttacacttagttattataatgtgaaaaatatgctaagtgtttaacaaatgattcgcctcgtcaaaatttcttttatgaatagcgaggtgaatacaccttgctatatgtagtctgaagttgctttgcgttatttcacttattcctttaaaataaacaaatcttctctttggatctgtgtattctgaggcaggctggtgtctcatcaatataggtatcaataattttgtattcttgtattgcttaagactatacaagtagcgtgttatgaatatactctgttaattgaatatttaatgagttatatataacgatataacgttattgtaccaagtggttcatattccactaattgacacgtgtcaccctccgaagggtaggcaaacttcgagtgtaacaaataggtaatacccattaagagtgcacccaaatatgtatttatttaagttttgaatttaatttttatttatgcttattataaataatttataaattaatttaattatattaataataaaataatatttatatatgaaaaaaaaatagatttttaataaattttaaaaaaaataatgttaaaatacaaaattttaaagttgaaaaagttcatataggaagctcctatagagtcagttatttcataataatttactccatagggtccatacagcgtcagttatttttaacccttacaacgttacttggagcagcgttagtagcaaattttgctaaaaccagcgctaaaagactttaaagactccctctaaaacctaattttatagtagtgtcttgttctgacatactcctagaccagattgcaaacaccttgattaatgcattatttagcactagatttaagtttttaagggacaaactcagtctgatttaactctccacactgacactgagtttgatgggcgtgttagtaattctttttgttagttaaagttgttagtattagtttgttttgccagctgtacattctgttatataattaacttatctaactaactagtgtatatataaattgagctaacagctccttcattaataatactcagattaatatttctcactcattctttttctctttttctctctttgaaattaacagatgccccataacttgttattctcttattttatatagttggacaattacttttttcctaaattgtatgtaaacatagtaataatatatagttattaatattgttattatttgacaaaagttcggtgttgcaaaatcctatcttacatattaatacgtctaactacttaattactttttacaagtttcttaaataatttttgtgggggagagagtacatatatataatcgtaatgtatgtataatattgcgaaaaaatataacatgacgaaaagaaattaatgcaaagttggccagacataatcatgtacgtactgccgactaaaactatatatgtacatgtttcatttgttcaagaaagctaaatttagagtactctaaaagctagagaacggttatataattaagtacgtactgagacaattcacctccgctccaataattaagaaaaataataccctaattataattatgtgtaatactgatcgatgaggtcagtctagagaagagaacaattgcacttgccgcttgagtgttctctattattattgatagcgtacacacaaatatatacacacaataatggatataatatatgagaattatatgcatgaatactcttaaataggtattatctattaatttgtactaaacaaatttagatataaatattaattttaaaaatatttaaccattaaattttggtccatagcgaataataaaagagaaatttcaatttttatacttaatttaactacttaattaaaaaaaaaaatcaaaaaatacctctttttacactatatcaaaaatatgtttatatgaaaaatatttaagtcaattttaactttttttttatcacctttttgctgaatttttttttttttaattattttttcagttgatggaccaatttcaacccatataatgtaaaaataaaaaaaaaaaaatctgattaaatagaaaaattaatcatcaaaactcaaatttttctaatattacgcattcatggtaatacacattaaaaatgtaccgttatatgtatatattacgaattaattttggaacaacagctccttaattactaaaaaaaaataggaacaacagctttgtacttaatattatttttaacaataacttgtaacttattaatttcc

SEQ ID NO: 45978 - DNA, 1930 bp, Cannabis sativa
aagtaggcacagtcacactgacagcccgtgtatcagagcccaaacaagaccctattctcttgaccttgttggggggagcactagaagaagtagatgaagaagaaccccccttcttctggtaagtttcatgtctcaacacactgctcatatttgcaaaacacacaaaagacaattactaaaagagtaatggcgtgcgagttaataaaacaatatgatacaaaagatgaataacaattatcaccaggagagtcattcccaccaacaggccttttctttgaaggcccagatttagtaccatccaccactacgacatccacattctcctttcgagattttgaaggttgcggtcttcctttttttcctaaccccaacagaggggataatgacaaagttaaaattgaaattgtctacagcatgggtagaggtcaagattgtgatatccttctaagagacaggcagttgagttatcgcaaaagctctcttgtacatggccacggtaggcaagggtctagaaaactagtccacctgttggaaactagtgtaactagacccaatgtctttcacaagaaattaataggccttggagtcaccttctttcgacaccttatctacacctctcagaaacttaacacctttgtatgcgtgctagaagccatagtagccagactattgatgagtatggtttggcctcaaatcgaaaagttagtatatttcgtggcctgtaggccatttccatctcatcaatgtgtacaggacaaaaatcactatatgaatctgcatggccattgggcagaactgcctaggactaattccaaagtaatcagtcacgtctttgaaaaaattatggagagggagtttcccccataagtgatatgacgacgagaccaagcgcacaatgccttttcgaggttatgtgtttattggtccttggatgggagtaccatgtgacagtccttgtcattcacggtcatttcttctaagtgtttgaattgaacatcagagaggctacaaggaggggccacaaaaggagtttgaggtgttgaatagtgtcgtgtaggagccttttcgataacctttagagcgaactcttttgcttttagagtaactgggctagaggtatcaactagatccttggtgtcatccttggcgaagttgttttttacttcatttttggcccatttttcaaatattttgatgatttcatccataatctcttcatcaggtgacccagtctcatggtcatcaaagactttccttctagtgatcacccccactgcacgggggtcactagaagtcttggctcgggtgcttttcttggtccaagccatagcaggcaacaagtctgacgatcgagcaatggtcacagtagcctcagcaaagatatactccccagatggctcaatgggtacccccactggagtggtacactcactaggagaaggaatatatgtccactctttgggtagataagagtgtattccccttcttagttcccaaatgtgtctaatgtacgcttcaccgcctatcgtctcccggtagagatgggcggaggtctcaaactcactactagaatgctcatctttagacaagttaaatgaaggcaacttggaacaatcttcaaacaaagagttacaagaaaggtctttgtctacttggtggccacctccccaatagtcgccatagtgcatctataaaaaaggaagactaaggaggtgagtacaccgagtaatgctagtaggatatccaagaaggactcacctactagtacaaaaaaagaatgagaaaagaaaaagaaacaatacatacatgacaaacaaaatatttaaaacgaaggacaatcattcatgtaactaaatgaaagaagtaacaacgataattacacacttcaaaattttactaagtgagtaaggaaaaaataatacatgaaatt

SEQ ID NO: 45979 - DNA, 2211 bp, Cannabis sativa
tatgcatatttttgcatcttcttcttcattatcttttttgtattctcagcctctctctcagctgataaagacaaaagtcaaaatattcgtttctttatatattaggctaacaattcatttccagagattaaaacggcgttcaacattcaaatataataaaataacacaagttctttctttagttgtgagcacatcgttttaaatgttgtgataataatccaataaacgatcgacatgatcaacttcgtataagtcaattacgtatttgtccctgatttgtctagccgattctcatatcttcataaacagatagatagaacgatattatatctacctaataaagcaacattgttaatgcatataattctatatgcaaatgttaaaaagtttaattttattacttatatatggtagattaaataaacttaattaatataataaaacagagtgtgacataagaaacaagaatgagattggatactttccaatcattataaactcatgcaaatcctgactaatatctttacatctgcaaaataaaagagaagatgttgtagatcttccaaggatctcgttaactctcttttgactgtactttttaaaattcaaactatatagctaggtataaaatgaaccaattaaaactacctatgcaaaccatttttttttttttttttgatatttatgagtttttactccgtactcaatctctccaaataaatctaaagtttcgtaaatacaaatagtaaaacaagattttatctttggtaataaaattttatcaccaaagacgaaaaaataataagaattttgtttttatgtgttattagaaaatgttatgtcattgtatgtatgtacatcataattatttaaggtatccttgaaagttttaaaaaactcagaataatttaacgtgcaaaaaataaattaagttcaagtaatctgttgaatgagtgtttttttttttcattttatacatgtataaaataaactgtttgaaccatactttatgtatcgtaaaatattttaaatttcttgaaatattttgcaggatgtcttaaataataacgatgtcttataaaaaaattaaaattaaattatttagagattgaagacacaaagagatccatgggtgcacccatttttaggaggtgcacaatagaatctcttatagttataatagggatcttgtccgtttttaaaaaattatgaataatttataatattaaaaataaaattcataatagtccgttgtaccagtgtaaaatataactataatatcgtataatgaaaaatagtctataatccctgatcaatatgtatatatgtacaaactcataatttgatcaaagctattgcaaccaaaaaacttggcaaaatcaaataaattaattaagcaacttttccagctatgtacatcttaagttttacgctcatcaaattggaaatccattggaacattctaatttgaaaactctcactcactgccaagtaatgcctatccagaaaagttgcaaattcttgaacattttctatatcgtcactatttttattctccgaatagggttactagtgtgctaaaatcgatgtaaaaataataaaaaaaaaattcaaaatacatggttacaaaatatgaaaaaaaattcatagtaactgatgactattattgcatagtctaaaaataatgataaaattgtttaacaatttttgtaatgttagagcaactacagcgataaaatatttggaatgtacgacattaattttttcagtttcatataattgtaactggttactatattctgctaaaatcttagaaacacgacattgtatctcgttgctagttttttcaacttcatagtcaccattgtcggcaaataaatttaactaaaataaaatatgatataaacacaaaacaataactagtatatatattatgtttttacaattaattaatgttagacaagaaggacaaatacataattgacttatacgaagttgatcatgtcgatcgtttattgcattgcattattatcacaacatttagaacgatgtgtcctatatatatgagcacaactaaaaaaagaacttgtgttacttaatgttgaactagggctgtacataatttttcgtaaaccgcccaacccgaataacccgcccaaactaaaccgaaaaaaccgacaaaaaatccaaaccgaaaaaaaccgacgaaaa

SEQ ID NO: 45980 - DNA, 6067 bp, Cannabis sativa
taataacaacatatatataaaagtgggctaattaactttgacatgtattaaattatgccccttgaattttttttgccgtttaaaattccctctgaacaattgagattgttagatttaaaatcttttgtcttatttcattcaattttgctgtttcagtgattgtttatatactaaacaatgctccccggactttgatatctaccaaatcatgcccctcaaactttgatacatactaaatcatgccccctaaattttcatccatgttagaattttttttactaaaactagacaaaaatctttaaatctaacaatcttaatagttcacgggaatttttaacagccaaaaaagttcagagacataatttagtacatgtcaaagttcgaagggaaaaattactaattagccttaaaaagtattatctttgtatttatgtgctaaaaaacgtaatggttgacacactagattaaattaattaattgattagttacaaacaatgacatatatatattcatattaatatgtaattagtgttttttgtgtaaaatagttatatagaagagtgcctatcatacactttttaatttatttttgttaaaaaataaataaaatcatgttttttttcgttatgtcagcttctaagcatacaacaatataataaacgattttttattgttttttttccctgataatttaaaaattaattaaacaaatcgaatacatagatataatatttgaaaaaaaaaaaatagtcaagtataattgaatgcatttaactggttttggttctgaaaaagtgaccaagttcacttgatccatatgttaatgaaaaatccatttactaataaaataatatataagtaaatcattatataccattgttaattaatttaatccttaattcgttccacgtggcatttaattaagcttcctctggtgattatatatataaactatttgatcactttgtaataatttttcatttttaaaatgataattccaatttgatttatttaattggaatctgaccaccaccctgcattgattgttattttttatttatatatacacagaaaaatatcacgtgacgtcctttattaagtatccatattaatcaaccaccaaacttcatatgattattaatatttttagcatgaaaaataatttaattattatatattaacaattattgtaattattatgaatatgataaaaccaacattgcagccacatatattatacacatgtacatatatgtaattatttaattaagactatttataaattttaagaaaatttaaatataatgacgaaaataaaatttaattcctgttacttaatatgcgcataaaagaaaacagtaacgtgtacacaatatgtaaattttatttttagtattataaaatatttaaaatgttttgaaaatttacaagggattctaaataatataatatatacaatcatacaaaaaattaaatatgtatcgaaacagatcaaggattaaacactcttttaaactgaaaaatgtattgtatacttatcctatattatatatttttaacgtatatattagaacgttgttgtagtatactttaaattacatgcacgtgttgaaactttcttaattatttatttcgtaaaaattgaaagaactagaccaacgaccatgaatcactaattaatgataatataacttttatattcatttggtttattcggaaaaaaaaaaaagagaaattaactttatttatatatgtaaaaaaaatgttgacaattattattattatattatttgaagaaaaacactaccgtattcgaatttttttcattcaattaatgtagggttttaatcttaagttttggatcacttaaaataataaaaaaagcattaatcataaggtgttaatgatatcattattataataatacataattaagtgtacttatatatattgtgatgtggtaaaaaaattacatagtaaaaattatatatattttaatttaaaaatagtaaaaaaaatcacgattataatttttatttaaagtaaatataaatatttttgagaaatttaacaacaagaaaatgacataaaagtaaaaatatttaaaattatgtacaaccataattttatttatttttgttattattaatttttttttttgtatatttttaaaataatcttaatattttttataacaatttagtccctcacaaaataaaaactagtgtattagtgcttatatataataattctctaaatattggaaggtgacatatttgcataggttccccgtgtccggtggccactaacacaatacttttatatataaataaaaaaaatatttatatattttttatatacacaaaatctaataagtataaattatatatataataatagtggatggatcatttggtagctttataagaataaaaaaattaaggataattaatgaagattatattaaacataatggctcacgtaaggtaaattaattaattaattaatttttatgataattgtatatattcatctaattacaatgaactagattagactggtcataagtagtagatatttagtcaataaattacaaagaccaaaataagaataggttcacttggtttgaacttggactatgtactattgtgttcaaatcaattaaattaatattttaatttttattcatttatattatatttataataatctattattaattaataatccgaatctttttatttgttcttttgtgcatgtgttgtggaagggtatctttgtcatttactactaagcaagttttgatttttcttttcccattatagaactaatagctatatactattatagtaccttccaaatatggacactaattgctaatttaatcacaattaatatttaaaacaaagggttttgtttctaaattatggtcataataaattaaaaaaaaaaacaaatctatggaaaaagaataatatgcttatttatttttgcatgataatgaaatgatttcaacactagtcccatcaatcttaaattttatattatttttaactacgagcaaaaatcgagctttgagatgagattaaatgagtcttataaaaaaattataaataaatgtagagatattaattttttttttttgagttgggtggaccttaagtgcggacttagcccgccttaactgaaatccaaactagaaagtagttgtaatcatataaccactttaactattttttacttcttcttctaaaacttcacttaagaggtctaagacccttattaggaagccaaaccaagaacaatccacaagtaaagtttgaatttttagacataatattatccacaaggatatgatttaggtgacaatttttgtttgtttgtatatagacacaaaaatataaaattaatattagtatattttactcaatggaatattctcttcgtccttaatttattacctaatcactaaaatatataattaactattcactacacacgagtcaaaacataatagctcgtataatttaataattaattaatttaaatagatagatagatacatgtacaagaaaaaaaatccaaattggattgattttacagatttttcaaacatctcagtttcaacaaaaatctaactgaaaaaaaaaaaaaacagatttataatctttgatcaaaatcaaagtactatataatttttttggattaatatttttgtttaaattgaattatttaaaagctgttctaaatagtctgctcctaaatcttcaaaaaccaccacgttttctattctcaaatccctttctttgcttttcttgttcacaatttttcttctcattgaatgttttcttttgagtgccaccaccggcgaacacccgtcatcaccgccaccaccaccgccgccattcagctcgcgaagagactctctaaccgtttcaacgggaaaattgagtatagctgcgggtccacgcatcgaaaaagcagcttgatcataggctaaagctgcatcttcagcactatcaaatgttccaagccaaactctaattccatgtcgggttgaatccctaatttcggccgcgaacttcccccacggccttttccgaacgcctcggtacgacttctccttcctagaattcacttcgtcttccttagttggactctctattgctttgtatgtttcttgacttgtgttggaaagtaaaccatagagaagcatttcttcggaatcattttcgttgaaagggagagaattttcggttgaatcccaaccgaaaggcggttcgggtgaaccgaaggaagattccggcgataaatcggaagatttagaggtgaagaaagaggactccatttttttctcttcaataaaatttactctgttttttcaggttgctctgtttttttgagtaagcaaaatttggatgctctgcctttaaatatttatactaaaaaaataagagaggggtaaaattggaattttagagagttaaagaagggtaaaacggtaaaagccgccggggtgtggtggctatattatataaataaatatatttggtggggtccatttgcaatttgacaaaaataaggataatttcaacacatgggtcaattgaaaggcttgaaagagaatggtaaggcggccaggtcagactgccaaatagtagtgacgtcattaatttcatttgtcctacgtggcatcatgaggggtcagtgactagtcaagggacctttaattgtgtacacgtggcaatcacgtgggccaatgttgatgataatgaacgtgagccatgactttatttatttatttttgaataatctttggaggatattaacttaaatagaataaatttaagttaatatttatttttcttttggcatcaattttaaagttttttagtgaaaatattgtgtgtggatgttataagtaatgctatatgtaaatatatattatctataataatagcttatttatttaaaataagactttaatactttcttcctttaattttttttaaaatgttaaagactttaataaaaaaaatatatatataaaacatcacattgtatacagtgtaatattttgttatatgttttaagtatattatcatatcattatattctttgaatagtcaatataatttgataatttattatgataaattaaataatcaatgaaggtttacccttatatgagagaagattcaaagttgtatagtattatatattcaatttgattttttacaggggacattatttttgtctttattgtagtgttttttatttttggaatttcaagaaattatgttttaatatttttatatcatgtcactataattaactatagctctattatatatatactgttattttttaatttttttaaacaccgaaacaataaatgtcactacataaaaaagtgatgattttacctaaaaaatttcatatataataaaaataatatagacttgtattttatttttaacttttcttattggatttggatatactacataagcacatgggtttatacttaacggtaagaataattagtgtttctatgttctaagaaaaataaatgcatgatgtgaggtataatattatatgttggtgcatgggaaacttcctcttccacctaattgatcaattatcaaaaactatttatatatatatagtattcatgcataaatatatataggtttttttatataattattttaattacaatattgaccaacatacatactttattcttaaagaaatacattttggacaaccatgcaaattatattatagttgagaggttatatgttgaaactttacttaaaattttataaaatatatgagaagtgaagtgtaggataagaaaattttttaaaattgtatgtaaagtgtaactatgagatttggattcgggacctaataagagttactcaattttgtacacataggtgagcacttacacacagcacttactcaaaataaaatttaattataatccgatctaaaagtattatcacaaaattattttatattttctgtatctcgtattaagaattgttttcaagttgat

SEQ ID NO: 45981 - DNA, 1784 bp, Cannabis sativa
aagattgcacaataattgaaaaagcactgtagcgtgccttagcattagggcgttacaacagatatctcccgatgacattactttcaccctcaatccgggtgaagtagatgaaccacaagaaacaaatcaagtgcttttaggaaagatcattaacagattcaagtttggaaaagctgcaatacaaggctcattgaacctctcatggaaggcagttaaaggttggaaatggaaggaaatagaggatggtcttctccaattcacattcgccataagagaagatgcaatgaatgtcctagcccgcaggccctggttcgtgtgcggtgcgctcatggtgctcatgccctggcccgcctagctcaccccagctaaggtccgttttgacaaaactccgatgtgggttaatgtggagagtatcccacccttttacgggaacctttctaatcttcagaagatggctgccaaggcctcaccggtcgacgaactaccagcaagaattgaagatgctgttggattaagtaccctgagattcagagcaaccattgacatcaacaaacctattttctgtggcttcttccttcggtgacaaaaactgaaggatctctggatccaatataaatacgagaaactcccaaaactctgcttcaaatgtggtgtgctttcacatgaacatagttcatgctataaagctcctactgtcgttaaagacagtctaggcaatttctacccgttatatggaacttggttagggaatgatgtcaaagaaaaatccacattcaccacccccttagctaagtggttccaagattgggtcctgcagaagagattagggaaggatcctgttctatgcaaccaaattaaggtccacaaagccattcgtaaccgggaggaggtggagatgcgtgaatgcagaatgcaactcccgtcaaagcgaagaatagtggccgagtccgatgaagacaatgatgggaacgagccggtgatggtcattacccaactgcctatggtttatcttccgggtataggcgaaatatccccttttggacaaaactcaaagcaagtcaatgtccaggagcttattgatgctgcaacaccctctgaagacaaaaggacaaaaacgtttaccataaagggttccagttcaaaaggcaataatctcctcacaaagcaagacaatgatattgcaatgataaaagaggaccttaccatttctgtgggaaacaacaggaaacctttggaaaggtgtatacatagtaaccatatggaggagaagcgtgcctctgcttcctcttccccgattgatgctaatctgaaccaaaacagaatggccccatccaacgaagtgaagaaaggttgcctctctccttataaggcctcaatattaggcactcaggcccaaatcgtcccatggccttcaaaagaatgttgggcccaagataaagcccgtgaactcctctttggctctctaaccgtggacaaattccaccgtgagcctcaactcttcaaccccatcctcaacattgaggactttagggtccaagaacacttggagggcccaaggaaaaggaaggcctcggacggtatcctactcagcctagcaccaatgccaaataatggaaaaaaggctttctctcccacctcagaagacaagagtaatgaagaaatcattaatgaatctcagaattcattaacctcgtacagcgactcattaagtaatccccaacctactggcacttttgctcttggtcaagcttctgtagttaccactcccaggcgtcgaggaagac

SEQ ID NO: 45982 - DNA, 2173 bp, Cannabis sativa
acgagacgagtcattacaaagagcatgtatactgcgagatggacggaggagaataaatcattatgctagtaaatcaatccttctcaaaaccattattcaatcctacttatgctatgagcatgtttctcttacttataggcacttgtaatgatattgagaagttaatggccagttttttgtggaagacaaattctaacaaaggaaatggtattatatggatgtcttggaaaagaatggctgccccaaaagttaatggtgttatgggctttcgtcatttacatgattttaacattgcaatgttagtaaagtaaggttgacgtctattatgaaagcctgattctttagcgggacaagttttcaaagacaagtattttccttactctgactttcttttgactgaacttggtcataatccaagctttgtttggcataacatttggaatgctcaacttctggtttgtttgggattgttatactattggcaatggagctactactagtattctctctcatccttggctaccaaattcagagtatgtcaccaccactaaccctagtttggtcaataaaactgtaaactctttgttctccattgataaccacaattgggatcttgatgtcactcaatatatgttctctgtccatgatgctactttgattttgggcatccttttgagcttttcaactgcagcgatttatggtgttgttctcgagatcggataggtatgttctttgttcgaaatgcttatctcttgcttcaattccaaaagaattttgcctagacagcaacaattctgggttttggcgtaggctttggcatttgaaaattcatcccgaagtcaaaaatttcatttagcctgtcatctctaattatctatcgacttgtctgcagttagtaacaaagcatgtgaaaattttctcagtttgtcccctgtgtcattctcatgttcaaacgataatacatgctatgcttgcttgtgattttgctcactcttgttggaccacttttggtataacttatgatacaaccccttgccttcttttggtggatggttggttggagaatattatgaagtattttaatgatgattttgttagttgaactgtcacgttgtgttgggcagtttggaaagccagaaatgatgtcgtatggaagaaaaataatacctacaaaggatgaggttattgcattagcttgtgttttccttgatcattggcgaaaagctcaggacaaatctcgcttatcatctttgttccttacaagcattattggactagaccataagtaaaccacatctagaacaatgttgttgcaaccttattttagaaggaaaattcttcatggctttggtatggtagcttgaggtagttcaagcattattgaagctaaaacttgttatcaaggaggagattatgttgctgaagtggttgaagttatgggaatcaaagaagctcttggttgggttaagaatcaacaatggcagaatgtagagattgaaacagatagtatgctcactatacagggcattcgttgtaatcaagctatgaactctatttttggtttgattattttctctttacaaaatgttgattttcgttttattaggcaatcaagaaattgagtggcacatattttggctagacactctcgatttttctttggttgtactatttttaagagtaatttttttaggctaatttacaagctcttttgtattcatagtactaaatttcaataaagttgctatttcatttaaaaagaaaatacatatatgtaatatgtatatataaaattgatgggtaaatatacaactgataatttgcttctttagatgtgaggagtacacaatattgttttggaaaattctacgttgcatcccctaagaaaaaagtacaccattgtatctctttcgtattttagacatatttagatagtacattatagttatttaagatattatacaaatttttaagaaattaaaataatttaacccgcaaaaaataagatttcaaacaatctattacatatataagtacctatttcattttatatttgtgtgaaataaataatttattttttacttcttgtattgtaaattattttaattttttttaattttttatagagtatcttaaatatgcctttatatgaaaaaaaaaaaaaaaaatacga

SEQ ID NO: 45983 - DNA, 2370 bp, Cannabis sativa
cattaaggagttacatacagaaaggtacttatttcaattttataatgaaattgatattacgagaattttagaaaggattccatgaatgtttagttgggtgttttctcactgatggtgcgatgaatttttcctcgatgcaacaaccattggcggctctggaagctaagtaagggtgtctacattaagcagttgaatacagaaaggtacttatttcaattttattatgaaattgatcttacgaggattttagaaaggattccgtagacgttcaatagaaatgtattagtgatgcttagattaaggaatgacgagaatccaaggagcatcccgttaaactctttatatttatgggtccaaatctacaatcttacgataggatatatgactgagctgaaccttaagaatattggtaactatattgggaagattttagaatcagattgtaaaaactttatggaaatttggagggattatatgcggagtttctatggatttgaataagccactacaaagaaagatgaaattgaagaagacggaatcatattttatattgattacgttcaaatacaataatgttcccacgttttgcttcatatgagggctattgggacatgcagaatgattttgtatgtggctgtttgatacactattgggcaagataaccaaattgtatggaatgttgatgaaggctctgttaaggagacaaatgaagctcattggagcaaaatggcttcgaacgggaatggaggagatgggtggggttcacatgtgcaccgttgattaagggcaggaagttggttggggtggtttgcggcagaagaaagtcgtctttggtattgtgtcgttggttgcaagagttggccagcttattcggaggtttgatacccctaattgcgcgggtaatactgagattattggggaaaaatctctagttagtatgcatgtatctaccacgattttaagagaggagtgatctgtttcaacattggtcaaacctattattaatgacgctattgtggatagtgttgatgatactcaattaaatgaggcgggttgagttttttggaaattaaaaggaggagactctcttctattgggtctattggaccaaatatactagctgaagaaaatggtaataaaatggaggtagagatgtcaaaaatcttagatttggtgggccttgtgaatgggactcgctaagagtcatgagttttttaagttgaaattgtcgtgggctaggaaacccaagggtcattcacttccttaatgagattgtcgctgaaaagaagccctcttttatttttattttttgtgaaactttttgtgatacaaatcgcgttaattggcttggtcattatttggggtttgaggggatgttttcgattgatggggcactcagggagtattgcaatgttgtgaaagaatgctaatgaggcaaaggttattgggtattctcagcgtcatatagatattattaaacgtgtggttggcttagatgattggagcttgatgggagtttatggggaagctaatcgggtacttcggcacaacacttgttatttattaagaactcttaaggataaatcttcattgccttggtgtctaatatgggactttaataatgttatggattagatggataagagaggagaagtgccttatttgtcgtggaggctagaagggtttcaatcagttatgagtaaggatatgcatcatacaaggagaacactgagaagaagaatgacaagaaggttgctcaggaggcaaagcataccgtatatggcttcgtacttgccatacaatattggggatatgaagccatagagaaagtgggaaataagtatgatgattgtagtgagactaggttccttaggatgataaactagaaaaccaaggagggccagcaaaaacaggaaggcgagtgacattgcacaactgatcaaccaaagggtaagttcttatatttgttgttgatattttaatctattttgagtttgcgacatagatcaatgttagtttgggacatttaacattttttatatttttatttacagttggttataaagaagtgcttatgcccccgtcctagtgaggatgagtattttaagtccatcaatgagggtaaagcccctttttgttttaagatggacaatgatgagacagtggacgatgatggtacaaagaattgggtgtttcaaatgaaagccaacaccattgttgaagtcgtttgtaaggcaaatatagttctaccattatcgcctctaaaagtggataaactatctactttgaccactacagctaatacatcagacattacatcgctagtagagaggatggatagaattgaggcccaataggctgcctaattta

SEQ ID NO: 45984 - DNA, 2784 bp, Cannabis sativa
gtctcatcaactaaataattctttgtttattaattccatgattactccactataaatatggaatcaaactcttagtaattatagaattatatttattgagtttgactgcaatatctattaatataatcaatttcagtgactagccatctatgtgttggtccaaaattagttttggtcaaattgtcattttacccttctaattacttctttatcctttagttccattaattcactagtggaagtataattcaagatcctatctgaatttgcgtgcaacttttcagtaccagaattaacacataaagggaaccaacattcgatccgttagaaaagtcaagattctataattgtacatcatgtttctagtcattcacattattagattcccaaaatagaagttgtaagaatcatcttctctgtgaaactttaacgagtgactcaaataaactaataacatgaacaagagttcatgataactcaggatttagaccgatctactattgatcatcgttatgatgtgaattagatctttatgataaacgacgtgttaataaagacaactttattcatattgatccttgtcatatataatctctattatatacaacacatttgctttgatgtctcataacatctgtaatctgaactgagattacttgcactaaagaacgggcattagtgaactgtactagcaacccttgattaaagatatcataactttaatatgaatttgactgttttattcatagctaagtggttttagttctctgtacaactacaagcacaaccttatatatgaataatgaattttttgatatttaatataaatgattcaataataatattaataatttaatattcaatgtatatgtcaaaatattcaactcttataataattaaaaatatctttatagatttttcaggacataaactccaatatcgacaataatcaatgcataaagaaaaacttcatttgcatccccagatgaatttaatctagtcccacatgcgaatgactgacccaacgataggaaagataccccacgggaacgaccgccacaaatgaaaagccaaattacacaagagatgaaaagatactccatagattcttcctcacccccacaaataggggaaatcacatcattaatatggaatctcttattaagcacaacttgaattgggaggccattagaaaggatgcaccaccaaatgatcttatgacgctctaagatttttactattccaaagcttgttctagagggagggggcgaccttacagtgaggagcccattacaaagcttggataagatatgcagatttgcacgagaagcgtccattactttccttggtccaaatccacttatccttaccctgactagaaggtcttccccttttaaaaatggcaataatagcttcattgtcaaattcaacttcttagtatcacaatcaccataatatgtcagaagatcagccactttgtcaaacccaaaagtattagatttattagactttggataaaactctttactatgagaaacccaaggatcatcccagatactagtatccttaccatttaccactactattttaccatcacctttttttaagatggctttggctttcaccatattttttaaaactaaaaatctgagtctttgtacttgcagttaaagaaatcctttcctttcaagtacttagcttccaaaattcgataacaaagaggctggctaccaatcaacaagttccaccccccactattagcaaataataataataatcaaattgggttgttgtgtttgtatctttgtaattgtttggatgtgtatctctattttttcttttcacctatttctaatataaatgttattcttttttttttttcttttttgcagcggcctcaatgatgcgttttgcattggtaatccagacaaacaaaaatgaagagatgaagattattgtaaattatttgaagaacaagctgctttctaaattgatgacacattaaaatttctgattatgatataacactgtatattttctcttttttgattgagaattagtctataagtgagagagttttgtaaatctttgaattgaattggttctcaatagaatatatatttggaataaatgtgatagtgcgttttgtaaatctttaacatttcatatcaacattatcacatctatattatgtttcatataaataattatattattgtactaatttaattatatttaaatatttatgatataataataattttatttttaaaaaagttgattattatgttggccctaaaagtcaaaatagattctgataaatacttgtaggggcgacataactatttaatttaataataaatatttaaatgtacactaattaattgtaaaacaaaatttattcacattaacacaataatggcatgtctaaatgaaatcatgtaattaataaccaaatcatatttttttttcaattttaattcataccaaataacatataaattccaaatatatattttaaataaaaataaaaaattaactaaataaataaaaataaaaaaatttaattaatattccaataaataaaaaattataaacaaaatttcgaaaatttcttttttttttttcttttgaaaaattgcctactaaaaacgacatgttttcttcttaaagaaaaaaaatgatttgtcgtttgagtaagatttcaaaaagcaacatgtaggaaataacgcgcagggccggccctgaaatttagtgggccataggaaaaaaaatatttttagg

SEQ ID NO: 45985 - DNA, 1884 bp, Cannabis sativa
ttctcgagacaaatatcacaactatgtagtactccccaccaagaccaactatgtagtactcatcatattatgcagaaagggaaataaccaacacaccctttcaagtattgcgtacttttatggtctgatatacattggcatggatgactgatgtgtagccattgagctctgcctcatcgaaaccagtttggaacaaaagttttatctgcataaaaatgatgattgataagaatacgattaataggatgatcaacaaatactcttattctttcaaagagaaacaaacacaatgtcttgcctgcttaaaaattgtggacttgcccgattcaccagcacctttatagaatgatgatagtattagttgaagattaacccaaacaatactactaacattctagaattgaaagttaagtacttgaaatatgctacaccaaaactgcacaccataacagcagaaatagggtacgaaagaaaagatatctaatcttaggcagccaagattgaatagttttcggttctaaaatattgctcttcttctttttttctctctcactgattaaaccaaggtatgaatgttgaatgataaggtaacagatacgaaaaagaagcaaaaaatcacttgaaaaaatagatatttagaagaacaaatctattgatataaagagcatgctcatgaacacataccaagcaatagaagcttctgaatatgcttttcagcttttgtctctagctcaattcgcctttcgatttcagcagcctgggaaaacataatacagcaacaatgaagtcagattacaataaccacatgaatctaaaaacatgaaatttttaaaatgagtaaaactaccaaaactatacttgtttcctttccactaatcaagaatcactcacttgtgcattctcttcagtatctgcttgattcaaatggcggtttctactacagagtaagcccatattctctatcaaaaaagacagcatagaagtatggagttcaagttcaactacttctcaaaatgagctttcacttcccattcaaattgttcacttcttacacctaatcatatgataacataattagtcacagggtcaatgtagaataactacatttcttaatcacaaaataaattaataaaaaaacatccaagaaagaacattgatttgtactatgaatgatcttttcatctaacaaactaataacatggcaattaacacagactaaacatataaatccaaatcattaaaaccccattacctcaacaaactttaacattatctcattctctcataattgagaaaatggtcaaaaacaaacacactaactctctcaataaacagacattgatgagcagattcaaactttcaattccaaaaattcgaactttatactcaaaaataaacccattaaacatatctccacctacccatccatctaaaaattgaaaaataaataaaaataaataacaacaacccattaaagccaccaaccaaaaacacaaacccaaaaggtattaaacaaaaacccattaacaaattgaatctttttcaaaaagcaaaaaagaataataacataaactcacttaatcttttggtcaattagagagatctccaaagctaataagaaaaacccagaagatctagagcgagaaaaatggtgatggggtaagcaaaaggaaagaacaaaagagcagaacaaagtacagtgaagtaaaggggtttacctgacaaagaagaaaaaagtgaaggggggttacatatatttatatatatatctatagacctatatatacatacatataaatataaaaataaaaatatattcttttgtagtgaaaagggggtgctctgcggtggagctagatttgttgtgtagagagagagagagag

SEQ ID NO: 45986 - DNA, 2280 bp, Cannabis sativa
agaaaaatgttcctcatataaaacgtttcatacaagtaacatgggctgtaattcaaactatttaagtaatcattatttaataccaaaacacagtactgaaaaatcttagactgcctacctcaacacaacatacattcacatgcaaaaacctattacattggaattggaataggtttaggggttgattagcacagcagtaaaagattgcaccaaaaaccaatacttatattccagaaattgggaacaccaccaccaaactctcgagaacataagaagttcaacaagggaaaacaaaagttgaaaattctcaaatacccacctaaatgaacaaagaaaatccacacaatgttgcgagaaaaaaaggccaaataccgaagggggcgaagacaatgcaccaaaaaaagaaaaaaagaaacaaactccatgcaattaaggatacaaggatacaaggatacaacaaaaaaaaaaaaaaacaaacaaacacagtatcgaaatactcaatttcgaaccataaatcagccaaattttgcgaaaatagagaaacccaccaagagcaccgaactgggatttcttagacgaggcggaataggaaggcgaggaagcggcggcttggtccttcctctccttggaagacgagtgagacgacgtcgtagcggccttcttggcagccaaggcttgttcgggagtgccatacttcctgggtcggcctctcttccgcttggccggctccagcggcgacgtcacagcggaggggacggagtgagacgggtagaccatgtgggtcccatcgccgccgcccgagtgggtattgggcaaaaggccgttggtcggagatgcggcggccgcagggccggcgccggagctggggctctgttgttgttgttgttgctgctgttggtgttggtggtggtggtggaggtgctggaagtagctgagttggttttcattgggttccattcctttagagagagaaacaaatggtagagagagtgtgtggaatgccaattttttttttatttttttaatgaaaattcttttttttttctttttttctttttttactctcgtacatatctatatataattcgtcttaaactcatctcggccgttagatcagattttaggtataacctttttcatttctttcattttatttattttgactttctgaacagctcttccgattttcctatatataattgtattgagaagccctagcattattaattttttttttctttagtaatgtatattgctcgctactttaattcatatttaattattttaataatattttataatttaagtttgataaatataaattaattttgtaaaataatattatttttaattaaaatattattaaaaaatgtttttaaaaaaatagaaagtttcctctatgtagagagctcctatgagaattgttaaatggtattttctgtacttatcagttatcactctccatattattatattattataggtgtaattaaatagcaatactcgagttcttatctattttttatcatagagagttatttttgtatgattagaagaactcatttttctatttcctattttaattaaggagtatgtttaaaaaacataattaaagatactcttatatatatatatattaaaaaaaaaaaaaaaagaaagagtaacgtagccatttctaattttctacattattatttttaatgtactcaaactttgtgctaattttggggatcatcatctttttaataaatttatacataaataaataaaagctttgtatataaaaacacaacttttgtctaaaaaaaaactaaaaatactcaaaaaaaatatataaagaagtagggttgttcaaaaaaattaacaaaccgttcaacccgaataaatcgttcaaatcaaactgaataaactgataaaacatacaattcggataactttacaaaaaattcaaatcgtccaataaatatattaggcggattgaatattattctaccccaaataacccaaataaaccgatttatatatttttttactaaaattatttataacctaatatataaattacgtttaatagttaaactattttacatttaaagtttgtattttatagtgtttatcttgaaatttagaatttatagtgattgtatttgaatattgaagttgaaatttagaatttacaactgagtatatttttttttattctatttttttgaaaaattttgtttaatactttaatatttattcaattcatatttattttttaacattaacttaaactat

SEQ ID NO: 45987 - DNA, 2246 bp, Cannabis sativa
caaatccaaacaaaggttaatatataatataatatattatttccatgatcgaaagttcaattaattctgcaaaatttaaaagcatgtatatatatatatatatacatatatatgggtttgcagctttgcatgcatgcaaaaactgtatcaatatttgattgaaaaagaaataattacaccatattttttgtacagctctagtctcactgtaattttttagagattcttttttactgtttttttttttttacattaatgattaaatattggggagtttattaattaatgcatattttggtaatccaaaaagaataatctcttattaatttcaacatgcatgtacaaattaatgtctgtttaattaatcttgtggcttaattaattttgaaaatgctgcttaatagttattaagttaaaataaaagtgatatatatttttaattatttaatgaatacacgctttttttaatttagaatacaataaaatgtaaatatttatataaattttaatttaataactaaaaaaatacaataaactagtgtggtgtgacatagtgttaagcatctaaatcattcttctatctacacgtgtcaaatcataatgccgacacgtcttacaatttatcaaacagaatattgatgtttttgttgttttatattttacccacctgtcttactctacaacttgacacgtgtcaaacatgtagaagaatattccttactaataatacgtacgttagtctaataaaaaatgaagagaacaataatgttataaaaatttgtaacatatttaattttagtaatttctattaattttgtatatataattattatataattataattcagggaaagagattctaccatatgtgggcccacgtcccccggtagggatccaccgatacattctagttctgtttcgacagaaagggccactggggctggtggaccagcccccgtgtcgtgccaatttcaacacgcgcttctttgctgcacatctcgatctcggtttgccagtggcgaccgtgtacttcaactcccagaaggagccggccactaagcgccgttaggctaaccgagccgagttgagctgagctgaattgagctgaaacgagctttgtggttgaataatgtgtacatgcatggtctaagagggagaaaatgagcatattattattatataatataaatattatattatatagttggatatatgaataataatgcaatatgtaatattgtaagctttttatttttattttattatgttttattacaatgtagtaaactgtcatgtgtttgttaattaatatttttctcttcttttttttagttttcaactttttatttgggtttgtgattaaatttatcaatttattttatatatatatattatcgtatttccttcattaaaaaaaaaaagaaaaaaacttaatattttgttttcaaatatgctttattgtttattaatatttcttattaataaataatatttatcattttcttcaaatataacaaaaattatggaatttcattggaaaaaaaattatgaggttccatatgaaaattattttggtgatgaacgaattaatttgcattcttataaatggtttaatatttatacatttgttctatatgggagtcaaatattccctcttaagatttgtttttttttttctaaaacaaatatcaaagtaattaactagttatcatatttatttaaaatcgatctcaactgtatttctttttagtgtagcataatggtattacaatatcaattaatagttaaaaaacttaagttcaaatccataccatttctctttttttcatccttccctcaccactaagctagcttaatccctcaccactaagctagcttaagtggcttgatctcaaatctctttagtactatgtgaatgttgtaaataccttgtactaaatatataaaagtaacaaaaaaaaaaatataaaaaaaaataatatacaaataataaaaaattaacaaaaaataataaaaatataacaaaaaaaaaaaatatattaaaaaatcgaattttatgtaaataaaattttaaaaatcacaaaaatatttaaaattccgtacattcgtatttttataattatttttgttgttatttttgtgttttttttttttaaataatctttttatttttttttggtctttttttttatatttagatttcaaaatagggttttttttttttttggagagaaaggagtagttta

SEQ ID NO: 45988 - DNA, 1232 bp, Cannabis sativa
tatatacaggtgtacaggggacatgtaagtatggaactcgagtagattacatattgggttctccaaactcttgttaccagtttgtcccaggttcatactcggtcttttcatccaagggtacttctgatcaccacatagtgaaagttgacataacaaaagtagataacagtactggtcaacaaaatgtcaccacaaagaaaagacatactaagaagaaagttgtaaaggtaacaggctcttctcaatccaaaggtatatggaagacacatacgacgtgagactataatagatttgaatttctttgtttttagaaattataaaaaaataatttatatatattaactaattatatgatttataggtctagtgtttttttttctttttcaaagtgagaagagtatctgattttgaagctgctctgctcttgtgccctacgtgtaaatcatctatcggaattgagtgctagcagctgctgcaatatatattacatgatctatatatttgttactcttatattttctacacataaacattaaacattgagaatatcattaattattagaatagatttaagtatatgtaaaaaaataaatatttttttatttaagattaattaaaagaaaatcccatgttcgtgcattagtactatatatatgtgcagaaagttatcaaatccaattatatccgatttaattgttggatgacattcgatccaataaataaccgcttcagttattgtccaattgttatccaattaaatttatatatttttgaaatatttttattaattatcttttaaaaatctattaaattttttaagctctcttgactgcgcgtaactagattgttcacgcatttctttctagggagtttcaacagagacaaagtgaaatagattttctttttgcaagagaagttcgattcttcattcggattggaagttaccatcaaatttagttacatagtaataggattatgtgtcaatattaaattgttgttccattttatatcgttattaaaatgaaataaaagataaataacaagggaaataagcaataggatataaatacaatataagtaccataaataaaaaataaatatcaagtttagaatttaaatatgatgcatgcgaacacttagaaaaacacataaaacaatttagaaattccacgataagattatccaaagtttaaaatttcaccttaggatcggtcaaattaatatcgaataat

SEQ ID NO: 45989 - DNA, 3917 bp, Cannabis sativa
aatccatttcttaaatccagggtaacaggtgttgcttggaattataggaattagggcagacctctatagttcttcagttgaaagccctgattcggtcgtgctctcctgattttatcttcattaccgagttgaaagtggatgccacctttttggtacgttctcttaaaaatttacacttttagtttaatattgttgttccagttattagcactgctttaggtattttttttgcttggaaatcaggatttatctttgaaggcattagtatctccaaaaatcagatatctagaattgtgtattcaaatccagagcgctacccgtggttactctcttgtatttatattcctccttatctccatgctaagaagaatttttggtcaaatctaatggaagtcggtaacaagtttggtgagccttggttgagtttaggtgatgtgaattttgttctaggtaactctcatcgtgttgcgtcaaaagaaaaggaccaattcatccagtttatctctgagtttgttaaatgcaatgctttgatagatatgcccattaaaggggacaatttaacttgggataaccacatggagggagttgagcatgtgaatctgcccttgataaagctttggtcaatgaggattggttacgtatcttccctagagctgtgatccaatcacttcatactagtaattcttatcataagcccctgtatattcatactgatgaaccccattccttttcaaagaggctgttcagatttgaggtctggtggactagggaccctcgtagctctctggtggttaaacatgcttggaagtccttgtcttttgactacgctctggctagaatctttagaaagattggggctactcgcctagctttgagcaaatggaatagagagcaatttggtaagctagatacctatatccgccaattagagcatcaactaaagaacatccagagtttgccagcggggtcacgtagttgggccagcgagttagaggtgagaacaacactgaatgaggccttattacggaaagctctttactggcaacagagatcacgggtctcgtggctcaaggaaggtgataaatgctctaagttcttcttcgttttgaccatgatttgtaataggcagaatgttgtggagagtatcttgaatagagatggagtttagattacgaaaaggaaggacattggtagggaattcttaacctttctttgggacatcttctcgaaccccaagtaaggccccttggagacccttgaacacttcatctacctatcccttgaggagcaggcttcctttgtgtctattcaagggcaagaggagattagacagactctttcttcgatgggtagttgtaaagctcgaggcctggatggcatgtcgactttctttttcaaaaactattggaactctgtgggtaaggatttttatgaggcagtgttggacttttttaattcgggtgttatggataggagaattaacaaaacgaatgttgtcttcattccaaaggtcccaaacccaaatagagtggatcagtttagacccatctccctatgcaatttcacttaccaggttatttcaaaaatcattgctaacagaattagacaggctctccctaggttgatttgtcctactcaggctacttttgtcccaggaagaagcatccatgataacaatgtgttggtccaagaagtcatccattcctttaagctcaaaaaaggaaaagaggtgttttttgctatcaagattgatcttgtgaaaacctatgataagatcagctggcaatttattgaccatgtgctctgcagtatcaaggctcttgacaagttttgttggtggattttccactgtatttctacgttctcttttaacatttgcctgaataggggtaaggttggtagacttactcccgaatgtggtattagacaagggaaccccttctctccatatctttttatctaggttgtcgagatccttttgtgcatccttaagaaggccctggattctagttccttagagaagtcaagcttagcagaaataacacctgcctgtcccatcttttctatgctgatgatcttatacttgtgggtagggccactttggaagaagccaacggtttttggcaatgtcttaaaaagttttgtaattggtcaggccagcattttaacaagatgaaaacctctattgtcttcagtaataacaccagtaaagggatgaagcggggtataaaagaggtacttgggataaaagctgcaacaggcaatatcaattatcttggactcccgttgtttagaaactgttgtagggatgttgattttaacttcatccttaataacttaacctcgaagcttcatggttggaagctgaaatccttgtctaaagttggtcgtgctactctaataaaatcggtgggattgtctttactagtctatgctatgcaaaccatgaagctgtctaagaaacttgcttctaaaattgatggtatggttaggaatttctagtggggccacgagctgggtaaccgtggtttatgccttaaggcttgggatcagttatgccttcttaagtctcgaggtgggctaggattctaaaagacagtggaaatgaatcaggctttccttgccaaatggtgttaggctcctataaatgataatcaatcgttgtgctataaggttttgaaagcaaaatatatgaaagggaagctattttttaattgctcatccaagaactcagattcgtggttttggaagaacgctgtgaaaactaagaaattctttcaaaaggagcctgtagactcattacggatggaaaagatatgaagatttgggaagacccgtgggatttgcatggtcaaaaatttttcgctaagccttcgaatgttagaccagaggggttagaaagagtagcgaaacttcttacagacgatggcaattgggatgttcctaagcttctatctctttttgaccgtgagaccactactaatattttcaagggtggtaagccgcgaggccgaggtacgtataagtggatttggactaaagaacctaatggtctcttctctactaagtctgcctaccttctccaggccttcaatcacggctcctcctagcagtgtggctctcgactttgtggaataaactttagaactccaaaattctagaaaggacaaggtcctttggtggagtatcctcttaaaggtgtttcctgaccgatccatccttgcaaaaagaatgcagattcaggagattccgtgccccctgtgtggtcaaggagaggaaaccttggaacacctcttcctttaattctgtgacttttcctcccatctctggcgtgcctccccctggggtgtgatgccagtcatggactctagagcccgaatgtgggattgggtcaaattcctttggagcatgagggataaagggggggatactaatgagttgttcctgtatgattcaattgtagtggacacgatttggaagacctgcaatgataagcttcacaataactcgatttgtaacattaagtactgtattgactctatttctatgtgttacgcagagtatgtttcttgcttgcttccttcgttgatgacgattgcttctccttgttggtccctacctctggtaaactggatcaagatcaattatgacgtcaaaattggttgtgattcaatgtgcatggtggcaatctctagagatcacaaggagtcgtttttgtgggtggctaggcttaacttgtttgacccgcttattggagaagttgcgacttgtttgttagccttggagttagtagtccgtcggaagcattcttttatcattgtggaaagcgaatctgggacatttatcaataccttgaatggttctgtttctgtttggggtataggtaactatgtgactcattgcattaagctctgatt

SEQ ID NO: 45990 - DNA, 2746 bp, Cannabis sativa
  modified_base (1996)..(2003): a, c, t, g, unknown or other
ttctatatatggcatataaaatgcattctgaattaaaataaatacgtaaaatgataattcataattaatattccaatttcataattaaactctaattatctgctaatttttgaattaaagttaagcgatcttaactgtaaacaagctcaaacattacttggacttgatcaagctcagaagttagtatactgagacatctggaacaccaattatgatgactgcattcttttttcatcacaatcatattttaatttgaaagaactaggtgaaatttgtggtatagttcttccaaataaaaagatcttcgaaaggagtcttgtggaaagttagatgtcgtccaaaaaggagtttcaaaagtctagcttgtccactctagaagttatttatttatggaaatttagatgtcatccagaagggccttcccggaagtctaacttgtccatccagaatgagtctccagggaaagctagccttcctcttgaaaggagttcctaattactagttgttccctcctgaaagggagtcccagatattcgacacctgctgctgcttttcctattcggtaagtcccttcagtgtacgcttcgatctatcttctaagaagcgtacgactcatccaaaaatgctttaacttgagctgatgtggagatatttctatgaggagtttgtcaagttcattaagtcgtaactaacttagcaacttatcatctacaaccactgtcttagggatccatattcctgatctataaatataactaacacttacaattttgtaagaagagttttagagagaagacttcgaagttgaagattgagattgaagagagagattgagaggtagagagaaagaggtacaaagaaaagaaagagattgagtttggaatttgtacgaagaatcttctatagatgaaaaagatttttaggtaagaatgtgagagataaacactttgagagaattcaaacagagattcgatcttgactttaattgtaccatgttcttgcccaatgaataaagacaatttcaatggtgttccataactagagtagagatatagatcacatcgatctataagacttgaaacagtatatagcttagtgttaattttattattttattattttaatcatcttttggttttgattactttgttttatcttagattattgtttgtgaattattaattttatcattactaatggtttgttaattaaaattttagttgatttaattctatacatcaattgtaattttctcacaatgactttggctcttaggttgatcaacatataaagacttatagggaaatcttaagcgattttgtcttccaatatttctggacaccatagaactagaagaaacgaattttaatttactttttcttatttttcaagatattaatattaggaggaactatatactaagttccttttatttgcaagtagatatgaacctgaaaaatactaagaagtaataatataaatatatatggaacacttctcaatgaatattattcattgatgggtactaaataattttaactttaaatattaattttaaaaatattaaaccattagattttgatttgatggcaaacaataaaagaaaattttgaatttctatgtttaatttagctactttattaaaaaaatatagttatataaaaaatatttaagtcaaactcatcttttttatcttttttttttttgccaaataatttatttatttttatttttttcaccgatggaacaatctcgatccatataatgtaaaaatgagtgatttttctaattaaatacaaaaattaagcataaacactcaaattttcttaatattacccattcatgggtaatacccattaagagtgtatatataatgtatacatattgttgttacgtatcaaattatagagcacattaatatgaatattgttattgattattagtggtgcctatcactttttataaatgatattttacaattagttagcgatatttnnnnnnnnttattttcttaaattatatgagatgaaaaattgggaatggctagaatgttagatgtgctacagaccaatggctgccgagtaacactactttcaccccttatcactatggcggggatcctctctttactgtggctcattacatatcaactgatagaaaataggacataagaattttgaaagatcactttagaattgtggacaatgaacgtattctttctattcctcttgctcctattcctagggaggatatgctcgtttggcatcagtcggacacaggtttatacaccgtgaaatctggttaccatttagtgtagagtttggaatctatgaatgttgattctccttcaacctctaaccgtcaatggtagaatggttctggtctttaaagatacctaaaaaagtcaaaatttttgcatggcatttcattaacaatgcccttcctactgttgtaaacttggcacatcgcaagatttcgacttcaacaacttgttctctctgtgtatgtgcttgggagtccattggacatgcactctttcgctgtaatcgtgctaaagcagtatggcagaaatcacatttaaatgtgtttatgcctaacagggccggccctgaaacaaagtgggccatagggagaaaaaaaaattggaccctttatgttagaaaaaatgtggtatttttcaaaatcggtaaaaaaatgtataattttaaaagagaaaaaaaaaatttgggcccctgggctgggtggg

SEQ ID NO: 45991 - DNA, 754 bp, Cannabis sativa
tgatgtcggctagaaatagagttacacacttaaatgcagttcgaatagatgtgaatttgaaggtagccaagttgaaaacagagcaacatgctttgaagcttctgcaaccacaagattgtaagttgcctttagaggcgtggttgaagaacacaacacaacaccacaccatgacaatcttgaattatccttaatttaatgagcatcttgtcattattaacaccaacatccacaaacaactcaacctcactttctgctagcggagtaagagcaatcgggcaaggtggagttgagctgaggaccacttgttgaactcccataccactcttcagtgcgtcctggtatcgccacaaaaattaagatcccaagcccccaccattgcatcaatctaacaatttattgtcatgaacatattggttctgcctataccaaattctctaatatagaaccaaaaattctcccacctcatttttctcaagaatatccatatacccaatgagcactttgtgaaaggaagaagcactgctcaaactatccaagcctttgagatgccaaccctgacaaatattgtaagggaaggcacaaccaaagagcatgaatgctagtctcattgttttgaaaacaaattggataaacttgaggtgaagaaagaccatgtttagaaagataaccatacgttggcaaaaaattaagagtaacttccaagcaaaatttttaaccttaggaggtagagatagcgaccaaagaaacttccccc

SEQ ID NO: 45992 - DNA, 1818 bp, Cannabis sativa
  modified_base (50)..(54): a, c, t, g, unknown or other
gaaaaaaattagcataaaatttagggcacgtagctttttgctagtatatnnnnntatatatatatatatttatgacaagcaaacagagaaaaatagttatggggatagattgatggtgtgatgggtatggataagttgtgttgttatacgggggaggtgaaaccttggccgttttattataatagattatttaggaaaaaagaaaaagattaattaactataagaaattgttgagaaatgaaatagtgatttttttggctgcttagaagtcaatttttttatccatttttgtattattggtattcacacggaaattttttctaatgatgtggatatcaatatttgacatgtggcatgaaggatgacattacggagttgagtagacccgagtcataacagtcaacctagaggggactctagtcttgcgctcatgttgactttgtgatctctgagatggaagtttagacttcaataacttgaatccaattcgtttcagtattatgtaccatgaaaacatggagtaacttaatctaagtcccgagagctgaaattacacgaacctgtaacccggaagctgacctaggcacctagggttttacctggcgcccaagttgacatcctctactagagtttcaatttttgggaccttcttagtgcaaaaggataaaaacttgcattgagacatcaactagacataccacaaacatatttgaggcattagaatcagaatcagaacaatttgatttttgagcacctgagggctgaggccccaagcacccaacgtctaggttgacaatttgacaatttgggggccttccaagtattagatcggagatccgaattttgcaccttcttcgtcttaatcaaaaatggggaaataggtccttttggataaaaataacaattcttaggtacaaataacagggcccagtgcccaggttgacacttatgaatggccctgacctaggccatttcaaatggagttttttaagaattctttcgagcatcttctttgtcttcagaaaatattaagattcaactagtttcggggaccaaacgaaatttctagaggggaaaaagggggacccaacgcctaggttgacatattgtcaacctgggttatttctgatcaagttgatcaaaaagtgtttcggacattctttctgtcataaaaaataacaaagatttaagcaaacttgagggagaaaatcacaatcccgagtccctcgaaacagggcccagtgccaaggttgacctagggctgcccagcccccaagttaacaatcaacctgggacgttacctttaattgcgcaaatgtcaaatctgatgcaaccattgaatctggaatagtaaaaaatggggtaggagacctcgtcttcaagtttagaaaccttggaagtataaaaaatgaaatcctaggagctcgagagtaagtgggtccaggttgacaaatggtctggtgcgttgggttctgcttatccgaatttgatgtagttttgatcgtccatctagtttttgacaatgacaatgatttatgaagttagagaaatcaacttcacagcttcgcatttctcattttcagctcacctagaaatgaagagttttgagtctctcatttttgtaacatagcaacatctccgagaatcggtgaccagctttaccagaacacataaatagactaagtgatgtcaaaatatcacttaggcatattaaagtacaccccttgaacgtttttacactaacctagcctccaggttgacgtcatatgtcaacatggacgctgggatgtcaacttgggcgctggatgtcaacctggg

SEQ ID NO: 45993 - DNA, 1394 bp, Cannabis sativa
  modified_base (140)..(143): a, c, t, g, unknown or other
  modified_base (272)..(274): a, c, t, g, unknown or other
tccaactcaatgcttctttaatgcctattatctcagcaatttcgggttgaacacatccaatctttcccttctagaatgcctctaccatagcaccgtgatgattctgagctacaccacccatgccaaaagacaagactcgnnnnagaaaaaaactaaaaggaaaagactaagaaatgtcaaaaggcaagactaatggaaaaactaaattagcttcaacatataaacacgatcacagcattaaaattaattaaggaatgaactccttataattnnnaccccataaaaatattaattagaattaaactaataatagtaaattaataaatgaaaaaaaaatctgaaacggaggatgtcgttgagccgaaccgaaccactctcagacgactgctcttgaacccctcacagaaaaagacgttgatgtgggaatgagaaaaacattttatttatttatacaattaatttcaattaatgatggaaactaaagacgatatatacctcaaattgtggtgctaaataaatgttcacacttgaaagttgtctgatagaaatggataatcataaaaatccaatttttctattagcaagatttgttatattagaataaaaatgaaataaaaaactattagaatatttcataaaaattaaagattaaaatttaaggtgtcattcgattaattgtcattatgaactgcttatgggtacactcttgtacacatgacatatttatattagtacacttaatattattatttaaaattaaataaaattataaaaataaaatatttaaaataacataaaaaaatataataaattttaaaataattttatattttttaaataataatattaagtgtactaatataaatttgacacatgcactaaaatgtacacataattagtctatattggcaatgattgtgaaaaatggatgacaccttaaatttgtaagcatttaagtagtttggagggtcttaccgtcaaaatttgagattagagagttaagtgtaagtaaagcgataattgagaaggtttagctgcaaaaaattctaaaaattatgttatgttcttataaaaaatttaaataaataaattagtagcgaaagtatataaattctcaatttgctgtagtttaactactattttagaatagttgaatatgtaaaattgttatttggcaattaaatctttatataaaaataatttaaatggaatttaaaaaagaataataataattcaaactaaaaaaataataaaagctagtactatgagtctatgactatttatgaacctagggctacaactttcattcatttcccaagtcattaatcatcgtggatcaacggcccaagaaacaattgaaatggaaagtacaaagcatactgaagtgttcatac

SEQ ID NO: 45994 - DNA, 2031 bp, Cannabis sativa
atcttggagaagctaagaagattgttgggatggagacacaagaaacagagttgcaagcacagtctgtttgacacaaacttagtatttgaagaaagtaatgcaaagttttgacatgaacgagaagcctaaaccagtgagtacactacttgcacctcattttaagttaagtggaaatatgtcacgtagcaccaccgatgagaagaagaaaatggagtgtattccatatgcaaatgtagttggtgccctaatgtgtgcaatggtatgcactagacttgatatttcgcatgttgttagtatggtgagtcactacatgcacaatcccagtaaaggtcactagcaagcagtaaagtggattctacagtatatctatggtactatggatattcgtttgaagtttgagagagccaagattcatggtaaccatctagttggataagttgattctaactacgctagagatctagataagcgtcaatcaattactgttatgtgctcacaatggcaggaggaccattttactggagatcgacattgcagtcgactgtagctttgtctactatacaggcagaatatatggttgtaatagaagtattcaaagaagtaatatggcttctcaagttgaccaaggaattaggtatttttcagaagaacatggagattttctgcgatagtaaaagtgctattttttggcaaataaccaagtccattatggccgcaaaagcacatcgatgttcgattgcatttttttcgtgaaatcattgatgaagggaacattatactcaaaaagttgggactgcagataaccctgcagatatgcttacaaaggtggttataggtatcaagtttcatcactgtttgaacttgatcaatatctctcgaacttagagcacctagggcgcatgtggaggcagcactatggtttttttgccaatgtggaaattgttggatttggctcaaaactaaaaaaaattaaattggtttgaagttgcaaatatatggttcaatgatcaagagatttggaacttattatttgccacattagtcaatgaagctatgcaatagctattgacttatgctccctcattaattacatatggcagagagttagtgttttctttctataagtatgaagctctttggagagcttagggcatcagttcaaggctaagagaaattgagagagatcatttgtatggtcaaactaggaaatactcagcgagtgtgagtattttggtgagttcgagaaaacactttgggaaatacaataaggaatattattagtggaaaatatttgtatccctattctatatatttcctactaagttaaacaattttgtgagttttattttaccactttgatatatcatataccattttttatcgctatttattgctttcgcgcacaacattgtattgtttaatctaaataaacgaaggactaaaggctaatcaattggttaagcttctttggcataatttttgagctttgctaatctctctctctctctaaattcttctttgaaaattctcagccagttgttaagcttcacaggttggaatagataaaaaaatatgtactgatattatacattttctgttgttgaaccaaatttaggctttaccaagttgtcctaagaaaatattctattaaaaactggatttacggcttccatctaaaagatcttgcattctcttgatagtacacagtcacatcacatgtaaatgtgcaaatgtcatggtggtccgaggattagtcaaatcgtctaggtacataaactacttaaatagaatttagagtaaattgtagtaaaacctccaaaatttttgcttcgctagcaattaaccccaaaacctatttcttaacggtaaaactcccaaaactcgtgttctgttagcagattgtcatttccattcatatttgagtattaagtgccatgttggattgtccatgtgtacacattgtgttgtgtatgtggacacattgtacacatgacacaattttattcatccacgtaaataatttttttaaaa

SEQ ID NO: 45995 - DNA, 2638 bp, Cannabis sativa
aaaactaatattaatctccattttcggagctacttctagttatgtgtagaacattttcaaacaaattgcttcttgagccgcttcagaagttgctatgtattcaacttccatatttgaatcggctatgttggattgcttgatactcctccagaaaactgcatcaccaccaagagttaaaatgatccagaagtagactttctatcatctttatctgattaaaaattagaattagtgtacccagtaagttcaaggtcactacttgaatatactagcatatagtctctcgttcttttaagatacttgagaatgtgcttcaccgcaatctagtgttccgaacctgaatttgactgataacaactaacaattcctactacataacatatgtcatggtctattacataacagagcatacattaggctccctacaacagatgcatagggatactttctcatgtcctcttgctcttgaggtgtctttggatactgatctttgcaattccatgtctggtcgactattgacccttcttagaattctgcatagagaacttttcaagtactttatcaatatagtttgcttgagaaactgccaagagcttgttcttcctatctcttcgaattttattgcccagaacattgcttgcctctcccatatctttcatttagaatttgtcagccaactaaatctttacatttgataatgttcctacatatcattcccaatgagtagtgtaatgatcgtatactaagaatataggttagtaaggaaattagcactaattaattgtattatataactatatgtgatcattttattatgtgagccctatttttatgaaaaaggcattaggagttataattttttaatttcggcaattttattaaactttaagtgtattatatattatatatgcaatttattatttttataatttttgctcgacaacaatagaaatgtgacagtttgaccattagagtaacatgggtttagtttagaatctttcttatattgggggtacatttatttgatattggtatatcaggtttagacggggttgtggtggttaacagttttacccttatgttttcagataacttaagtggatagtaaaagggcaatttcgagaatttttcctaggagtttaagtttaattttttttttttatgaacttagtttaattttagtcaactttttttttctttgctgaagtaataaaatatttcaatataaaaataatagatacaaaagacaaagccaacctcttcatctctatctctttcccttcgacctcaagggaaaaacaagaagaaccaaggtgtttctttagtttttttcactaatttcatcagacctttttctcttggtttttggaagctttacttgggcgcaagcatgcaagtttttgaatttagttttttctgaacctaaaaagtttaggggttgttttctgtggtatatttgagttatttgaagtataattggtttgattttgatggttaagtgtcgtgttgagaaagtttaagttgaagaactcaaatttgactcaataatggtgattttgagattctaaattttatgagactctactgcttgggatatgcttattgagccttgtttaggtattctagagagtttttaccaagtctaggattgatttgggcttgaaatgagacttagtgttttctgcagtagaaaacaacaaactatttatgaagaggtctaccatttttactggcaggaacccagaaaaacaatttattgtttttcaagcagttttttcgtagtctcatttttttttttgtgtgtcttcaatatttagggtattggcatgctatttattgatctagaaaattttagttttgagtataggtccccgagaaggtttagcaagttgtttacccattttacatgattgtgacataggaccttcattcagcaagtgaatatccattcaagctaactagtacacttgaatctagaaacaaggtaagattagtataaaacgtgtatatgtatatgtatatgtatatgtgtatgtatgttatatgcatgttgtagtatgtactttatataatgataacactagtacagttgcagtatagactgcattggtataatatatgatgttaaatgggtataacaacgttattgacactagtacgggacgaatgtagagtgcatgtggtacaacactcagttatactcggggtgcagtttagccctaccaatactagtacgggatgagtacttagtgcatgtggtacagggggtcgtacttctgttaagagcattcttgatttatctgaagccttataaatatgtgtatgggcgtctagatacaagttggtaatatgtattatattttagggtaaatatcattttggatcctgtgttttgcaaaagttaccaattggaccttctattttattaaatgacaaaatagactatgtattttccaaaatggtacaaataagattctgaactgattttttgtcaaaataaaatttaatgaaaatatgatctaaatgtgttatgaaaaaactgtttacattttctatatctattcgtgttaggaattgtcttcaagtttgttatatcaaaaaaaattgtcgaaagttaagctcaaggtcctatttttac

SEQ ID NO: 45996 - DNA, 3025 bp, Cannabis sativa
gtcccccagagatcgtggccacatgtccatcaacaggtggcaaaactaggcttagaggatatgggtatcctgatcccagagccaatgtggctattacagtcagagatggtgaagtagggagcactggaagttgcactccgaagggtgacctaccccttatggaggatttatggtaccctaccatatgggaacgattactttctgtgagcgatcccctgtccaagatatatgatgggaatgacccattattccaaatgtcttgctcttaccaacatctcaatctcatcttttaggtggttacatcattggtggagtgtcctacttctttgtggtactcgcacatattacttggatctcttttgaacttgcctcttgaggcgtccatgggggctttctacagtggaccatgttgcaggttgctctttacatattctctcaagtatccactagactggagtactcggtgtacttgggttcattttctttctttgatctcttcgaagtttcactccaattttggccctttcctcctttcttgttctgggaattactcatgtttcgttccaaaactttagcttttgattgtctaggagtgacactacatccggtttgtgtagccccatacccagaaaaattagtttgtgtaggcacaggcacagatgcaaatggtctgtagtctgttgggttatattgtgttccaagaataaaggtaaatttgttagtagaagcaataagagctggtactggagggactctgaattgctgataagcatcttccaaactaataaagccttatgccttttccatgaattttgacaacgtcttggtcctccttcctttcatctctccccataagagagagccaactgcaattacaaaatgtagtgccacacatttcatgtcatcggtcaccttaatctttgttgccacatctgttattagatgaacgaaactcttcaagctttctctgacctattttttgatattggtgatggagcctatttccatgtcaaagtcgtaagcagcaatgaacttttcctggaaggtagactgcaactacttccaagaatggattgatacgggagccaatctcttccaccaatcatatgtagatttgttaaggatcagggagaaagacaaacacttggcatcttcactcaccctgacctcttgcatcatgttgttgtatttggctagatgggtctttggattggtgcacccatcatacaacttgattagggtatcttaaagttcatcgggagtggagcttttgtgatccttctgatgcatggctttgggtcctcatcctcaaagtcgatgagggccccactttgtttttgaaccaatttcgttagtgtagcaatttgttgttccaatattttggtgtcactatttaggagatctcttccacgaaccttatcgttaagatgattcctgaggtcattactacatggcctcgccttttcactttttgctttttcatacttggcgtccaagcgccttctgagatctattgtggacaaactgtcatcaaaatattatcccttggtcccaccatccaggttgataaaatcactagggcagtatttcaacccttgggctttggtacttttgtaccagccctttttggcgtaacagggcctttccaagcccagaggcattgatggtcttctgcgcatgagaaggcctcttggtcggattcatgcatctccaaggaggtataggagcagttgggttttgggtgtcacctagtttttcctttcttttattttgagcaggagtaaaggttttatcattagtagttccttattttttttgccgacacattccaccaagggatcatcgtctgagtctccctcatctagatctctgaacttactacgaaggtggaccatcgtcctctccatcttttgagagaacttttcttgatgggctaattttcactaagtctcaaacaactccttggacactcgtaccactttggggtcttgctcatagtagtagccatctttgtagtacccatctttaacatactctccatcgtcatcctcctcttcatcctcaacatctaggtcttcatcaacaccgtcatgttgtttgtcaaggttggcctctcgattgtttggattggatgtatccacttttctcgcattgctcagctgggtgaggcttggagacaaagggtttacatcttccataatagcgtctatgcaaccatcttgaggagtcttcttagaaactatttttcgtgtaaaaaccatggtagcagtaagacttttggtttacatctttcttcaactatcaatgaaagcacaaaaatgtttactgagattttttgaaactaaatatttaagaactaaagaaataataaaatgcaaaaataaagagatggagattttttatgttgtttgggtattaattaaccttagtccacgagtcaatttattaccccctaagggcgtatttgatgtgtttacaatacttttacagaaaaccctaattttgtactctcaatttttcttgaagaagaagaagacgaggagtaatattgatagagttttagatatgtagattctaatcccccttcataaggaaatggaatggtatatataggctaagtggcaggtatggatgcgcccatgacccgcctagggtttctactcaaagcccactaatggggtaaattacatgcaaaggagagctgactattgggtcccctaaaaacaattgtgcctgtgcgtgttgcagttggacaattggggaccgtttgtacgttgttcacacgtggtgctcaaatatttatcctttaaaagtagaagccacgtgtcgcccaaagtttctaccgtaatatccgtctggaaaaaaggtggtggaggtgtgtgcactaccatgcttggacggaggggacaagatctgatcctatgtcaattgtcacttagtgatctggcttgtatcaaaggtagacatttgcgacactcctaggtagtcgcatccccattaggccctctaagtacccgtccgggta

SEQ ID NO: 45997 - DNA, 3551 bp, Cannabis sativa
  modified_base (2115)..(2119): a, c, t, g, unknown or other
tatgtctatgtggcatagacccatgtgttatgctcacacgtctaattacaataaggccttaaaatggctcatctcggttctagttaccgagtccaacctgcttatacacatcatatatcactagggtaataaccctaaatcctagcatatacatataattaacatgacatagcatatacacatcatatatcactagggtaataaccctaggctgttaaaccgctcatgttagggtaataaccgtaatcccaattactaattactcacatatattatttctaatataagtgccaccgcgcatactctacgtgctaactactatcttacctgatgtcccacaatagtagagattccgaatccccgggtgatcctgaccaagtaccggtaatcctagtcacaattctaggatttagacctatagggttaatccctaattccacgtttataaaatatatacatggcattcaaaatatatttaatcacatagagctcagaacgagctttctaacggtctatagaactcccgaatcggagtctggatcacaaaattaagaatattcaaagttgcattagaatctgcccagaaataagggggcgggccacgacgctccccacatggggccgcggcgcctggaaccaaatcccgggctcccacacagaggcgggccgtgacgcccaaaagctgagccgcgacccctgggttcaaaacccagaaaacacaaaaaccagcaacgtttttcatggccaaaacacaatatttcaagctaaaaacacaaccatacaccaaattaaactccataataataactgaacatcacagagagttaaaacaccaatcatgcattagaatccatcaacataaaccctcaaagttgagtttaaaccctttccttgctaagctccaaccctagagcaaaattcacatgttcatccatgaagaagctacacaaagatatcactaaataaatccaaatttcagcatgcttttctaattatctcactcaaattaacaattagaaatccccaaattcacaatcccaagcatacacaacacaccctctactattcacaacaccaccatatttacaacatcaagaacaacccatatctcataaacatgcaaatcaatccttctccaaaactgaaaatcattaaaacaacatcaatttcagctactaaaataattagaaatcaaagacaaagaaactacctcaagtttcaaactaagattaagctttaacaccaccaagaaccaagcttcaagatcaattttcttttcaactcttaaaaatttgaaaaaaatggaggaaaagggggtgagagggggttcggctatagctggaaaaaaaccagaaattttcctttaattctcaaaataacctcttttctaaacaaaccaaataataaagccaaaggaccaaaatgcccttagggccaaaataaggcatactcatcaaacaagggtaaaaatgtcatttacaacataaatcttttcaaataaaaattcagattattcacataattaaaatgccaataattcaatccaaaactgtatttcgggcccaaacccggttgtgactataccgcaccattttgtcagaaaacacacctgaaaaggacaacacatgcatactatataataatatagttccataacacgtttttaaattaatttcatggttttaccattcccgggtcataattactaaaatgcctctagctcaccaacgaggtcctaacacgtcataaatcatataattctcatatattaaattatataataatgtaatttcaaaataatacacaattaactagttaggacttttctaatccattctcttaatcctagggtattacacaactccccctagaaaaagggtccagagttgagaacgaagaaattaaaaacaagctattactctccctttttgtttatctaagggccaaagacaaaaaaacatgaaaatatgaaaatatgtccaacaaaaacataaaaatgaaagagaaacttatgccccatagagcttgatcaatgaggacaactgcttggacatctcttgctaaacctcctccatggcagcaagacgattgttcacctgttgaacctcatgcttnnnnncctggacatctgcaggagcagaactcgatcttgcagcaacagcagcatcaactttaggccgcttgggaaaagctccatcaaaatactccgagggttggaagatggtgccagtgaggggaggctcaagtgtctcatgagagtaagctacatctttctgagaggacaaaattttatagattaagttaggaaaaacaagcttatgagtacgctttttacctctctgaaatgaaacaatctagtccaagattgaggaagccagatcaatggatgccccaaggtgatacgaaagagaaaggatgtcgaatcttgacataccaggattttgttggaatcgggaagccaattgctaagtgcaaacctcatgagtgatgcatgagcatataagtgagatgtgtaatacgaagactttgcctagatttccattcaactcgtgcaccagtgagttcagtgagcattagatgacgatccatggacataaccgcattggacacaccttcgggtaaatgtagagccctagaaatttccttgatagtgaatgaaaaccaatgcccccaaacatatactttaccaaaaaattcagagttttcatcaagcaaattattagtcaaatcgacatagaattttttgacaataccttctatataccgttcaaaaccagtaagggtattttcccattgatggtattgaacaaacttaacaataccatacaccctatgagcatacaaatcataattcctctcactttcaaacttttggataacataaatattctaatcacgctgattatcatgatagtaaaatctagaattgtctgcttgagatggagaaatattattaggagatgaactctgcataggctgcttgcctttggcagcagcagaggctttggctccagaagatgcacgaggaggtgctggagcaaatttggacaatggtggctcgggatcgagatcaatttccttactatcagaggagacaccaaaatcttctggaagctctttttcagagggaatatacaaggatttggtttcagaatcttcagatggaacctccattgcttcttcttcttcagaattggaagaagccgaagggggattcaattttaacttcttggcaggaggaactggtctgtgctggcttcatttagtgcgaagtttgttctcgagagacacctgttgggcacgagtgcgagaggaagggcttgttggagttgatgcagcaacacccttacttgatgcagtagcacgaggaggagaccccttcgacgatgaggacgatgaagtgaaaaatttgtgtggtcgcacaaatttcctagccatttgttttggaattcgtttcggcttgggcttcacagtctgagattcacgctgaggaagcgatgaatctcatgggtttgatgcagttgcaacagcagggagcaagattggagcag

SEQ ID NO: 45998 - DNA, 1140 bp, Cannabis sativa
ggaaaatttacaatcacaaacactttttatatctcaattacaaaattaacgcccaccatctcaattccatataaataacgctgaataacgtttttttaaaattttgttttcttttctttgatttatttaattgctgaacttaaatctattatccttgctacttttttttttaattgttcaacttctttgtcttctccctttatctcaaatttcgaaaattatttatgatcacatttgttacttgattgaatttaaaaaagatatcattataatctttttattatgtgatcattttaaaatgtaaaagcagtttaaaaaaaaaaaaaacattaaattgctcataataccaatagtgctcgtatatattttctatttaaattaacaactcaactttatttaaaattttggtgaagtggacaacaaattagtttctacattactaaaaatatatcttaaataatattaaaaaatcataatataattttaaaataacaattggtaacttaaatatttacaaatctataagttatataaattattttattttattgtgatacatatgtttcttaataagtttgaaattaacataaatattgctcaaaaaataatgtaaaaaattcttaaataaaaaaaaaaaaacgtaatattttaaagtgaacaaatgtatataaaaatatgttattttaaagtgattcttttcataaaaatgtaacttattggtatactattgatctaataaagaactaaaaggtttcttttataggtgaaaagtaaaaatagatttttttttaaaaaaaataattttttagtatcttaccatcattataaacaattaattattttattgatatgtttattttttttttaatgaactatgtagtaagttttttataagctatcttttagtaatttattaaaattactctaagataatttttttttcttttttgaaagggaacgtttaaaatatactttgtttaaaatcatttaattactttttccatctcataaataaaaatgttactctattttatattaagctaatatatatatatatattatagaattagctaaaaataaaagaaactaaaaggatgttttcattttatcaatgatatgaaaatatatatttcttgtata

SEQ ID NO: 45999 - DNA, 1815 bp, Cannabis sativa
gttcgagcctagtgtgattccctactccttggggaacaaaacatcatcatcatttctttattgatcaccaacaaatggattgcaaagatattacaaagaaagttctcttaggaacacaatcgagttacaagactttaggaggaaagcttttctcaagtgcttaactctctctgtattacaataatgaactgactcacttaaagaataaaatagaaccttatatagtaaaccggccaatgacaacattaatggtcttgacattctgcaataccgagccaatgacaattatccatgtggcaaactgaataagacactagttacttgtaaccaattagcacaatatatgaatgcgtaacaaaccagaacaaactgaataagaccatatagttacttgtaaccaattaccacaacatattaatgtgtaacaaaccagaagagaaagctcttacctcctaaaccaaatttaatatcatcatcatcatcacataaaatcaccaaggcagtgttgtttgctttgccatttattttttattttatttgttcggagcatgtggtagacattcacacataattggtcaaaaagataagcttccttaatttctctttgtagagaaattcataggccaaatctgcattccagccagtccttgtaacattaatccagaagttatttcatctctaaagaaagtgcagaaccaaatacatcaatggtaaattgattaaaatatgtcatgatcatctacacttgattggtagctttatgcatcaattcgaagatttcttgtggaattttatgtgtacataaaatgccttaacctggattgtaatacacattacttataaactattgcaacacttcaaagcaatattagttaaatattgacaaaaacaaaattctagtaatggcttattataatcaagaaaaggttcaacattcacttttctcctcataattagcacattgtaggagaaccattactaaattttgacatagattcaaatactacatatatactaataattccaatcatcattgcaatttcaaaccaaacaaaaagaaattgtcatgctataaattctcaaaattcatgtgggaaactccaccgatctgttgtgtgaattctcatcgcccttcgacaacagttatgcttgtattacaagatgggggcttaagagcggaggaatgagctccttcccacaaatctgtgttagtaaaatagactggtggtttgggttgaggtaacattttctcgccactcaacattagaacaacggaagacatattaggcctatcattaggattttgttgcacacacaagagaccaatgtggatgcaacacattgcttcttccatgttgatgtatgaatcacttaacaagcaattttcaataagcttaaatgcattgccttgtttcatcaaagtccacgcctaataaacattataaaaatataaatgaaaacgagctaagagccaatgtaaaatttaataaagttttttctatttacacttactaatccagtgaggtttagaatgttatcttcatcataaaggcctctacttttctttccacttactatttctagcaccaatgtgccaaaactaaacacataagattttattgagaagaggccattggaagcatattctggtgccatataaccactgcatttgcatagcacagtgtattagtatgtaatatgtttatgttaaagaaactaaaagatttttcaagatgacttactaaggtggcgttaatacttttttaatcagttttctgtttttaaaagtagaaaagcgaaaatatttttcaaaaa

SEQ ID NO: 46000 - DNA, 1580 bp, Cannabis sativa
ctaaagggcgccactgccgcaaccttacggatgttacgttgagcaagcgcattaacaaacgcattcactactgaattgtatatggaagtttccaaacttgtgtacggaacaacgctgctgatcttagttccgccatcgccatttgcatcaatagatagcaaagaagtattaaccggcactggctttccgtcaaccttaattgacttcactccgatgaagtactctgatgatgactcgccttggaaacctcctatcagatttacagggttgaggattagcggagtgtatgttaaagacttggaaacgtcaattccaggagacaactcgtatggtccatttccgaagaaaacgacgccgtttgtgggtgacaagcaaaccgccatcttctttggaaagctgaaagcagcggagaacaaagaaggaagagcgattgtgttccttccgaggccggcaacaccgacggtgccattagagaggccttctaagatgaaagtaggagcacaagtgaagagaaacttgggtaccgaaaccactttcccagggcttgagccgttggttgattggatatagatgatgtcttgggaaagatcaccacttgtacttgtgctagtaaaagggttgtgaggaaactcaccgcatacatcttctgataggttaccgtttgttgagcaagacttggacttggcaaggttgcattgagctgatctgcatggtacgggctttttggttgaggagttgaaacccttttcgcaatccacccaaaggaattcgccgccgagatcaatggctactttgatctgaactggtggggttctttgcgtgatgtgggcaatgtattggtgtgtggcggtgtctttggtgactgggagaacaagtgctttgggtcggaatgatattttttgggatatggtgggagagataattagtagaaggagagaggtaaagagaaggaggtggacagagttggaagacatgtttgattgtgtgagttaattattgagtggtggagtatgtggaagactctttggtatttatagaaattaatattggcatgtgcaaatagaagagaggtgtacttgggtttcgctaatagtccaaggaggtggcggctcgatctagcatcaaataattaaaatggccaacagttctctgtatatagataattgatcttgactatatatgaattatgattcgagagatttatatagagaaaagaaatgtgtatgaaattatatatatccatgaagaagatttatgtatgaaaagttataacaaatataaaaacaaaaatatatttaagataaactcaaatatttatgatttgatgtgtaatattatcattaatttaatattaagttttcctttatttactttaataaatattatatatggctaactaattataaaataatattttatctgctaagcaacataattaaataattctatgtgctgtggccagttgtaaaaagttaatcattctgatgaaattaatgtgtattaaccaataataaattacactaagagttcgtttggaacgccgtattagatcgtacagtattgtattgtattatattaaa

SEQ ID NO: 46001 - DNA, 1109 bp, Cannabis sativa
taaagaagtgagagagagagagagagagagagagagaagagactgaatgagaggaaggagattgaatgaaagagatgtagctagggtttggttttattaattagtcggttatacccaacaatttaaaaccgtcaggtataaccgactattaaaaatcacgataaacccataaaatcgtcacgggttgccttctgagtgttctaaaccatcaagaataccaaaattttcctaacgaaacaatcacttaaaattgttaggggtggtccccgaaaaaaattatctttcagaccattgcgaattctagcttttgtaatagtgtaagtatatataatatatattttttcaatcttgggtataataggtggatattgggtattgtggacccaaaaatattctaaaatgtatacctggacttaaacccgaataattatgagtggtacttgaacccaaatttttatagtgcgaatttcaagtttcttggtatgttttggtcgagtgagctgggtgggtagcgttttgggtccaaatgttagccctagttggcaacgtaagtgttatttacccttaattattataaggagtattacagtcaacctccttctacaacctctctaccaacttccgtgcccgaaaacatttgtcgaaacattttttttaaaaaaaaaaattcatgtcgatgttcgttatacttacatcatcatccttgattttttttaaaattttcaaataatttacatgttaaaaatatgttttaagatttttgaactcgcacagtaaatcatcatatcaataattttgtttttggtattgtaaactattaaaattttttaaaaaattacagggatgatattgtaaccataacgaatattgttataaaaaaattgaaaaaaaaaattctggtttgtgatttcaaatagggttgagcatcaattggtttggtcagtttttttctatataaaattctaaaatttggttttcagtctagattggtacaatttgaaaattgactgaccaatctagaacttatcttaaaaccgaccgttttgaacatcagtttggttgatttaaaccgcccaaatcaaactttttttttctttaaaatataatcc

SEQ ID NO: 46002 - DNA, 1780 bp, Cannabis sativa
ccaaattcattaaaaatattggttgttaaggattttcagattgtgctattgctctatatatttcgcggtctcaagtgggaacaaattcaattcttttaagttatccaatcacatctgtccttgcacattttttcatcttcctctctgttttttttaagataaattcatttaattatttatttagtggctcaaacttattacctgacaaaaaacactatgactatgtgaaacttccaaggagcaagacaacaaaagaaataagagacaaattccttttggtaattttggtatttgcccaaataaattaacgtggacccaaaactgcaccctcatcatgtgtccttaaatttagaatgtgaaatactttcttcataaaacaaaggaagaagatattacttcttcattcatttaaaacaatttataccattattaaaaaaaaaaaattataccatttcttacacatatacaaaaaaaaaggtatttataataagaagagggtactactctaccaaccaatttcattggtatttatatttgtatgtatcattcctttctcagttttcttcaaatccaaacaactatattacatcatatgcatctttatgtaattatgatatctatgtgtgttgtttttttaagaatgtattgatgaaataatgaccaaaagtagcacatgataacttcattaatattaaccttttctaaataataatcaacaaataatactttgatgaatagtttgatgttttgattaagcaaatttcaatataccatcttttctttatcattgtattgtacatcttatattcaacacgtaattaatagcccttgtttagctgttaaactgtataattcccgattctaaaacatttccaatactaaaaaaatatatagattgagaaagattataaatatttattaaacaaatttactttcccaaattaagattaggtacgtaatcctagtaatattcgcaaatcccaaaatgggataaaataaacagagctgaaagaaaatgagtataggtaaaagatatagcagtacatacattattataggattttctaattaaaggaaagtaataagtcaaacattaggtaatcctaatttatctaatttaataatttatgatattaattcatatatatatatatgcagtagctgtggctgttactctaagtaaagatcaccaccagctggaaataaatcaacagctaaccaaaccaaaagattttgacgtgtttcctatcatttaaaccccaacttattgctataattacctaaaatttacaacaatataaaatcaagtcaataattatttcatcaacccgtacacataataaatatatattctacatctctctctatatatatatatgtaataataataataaaacgcgacacatacaatagctcattttacaatcctattgaatccaaattatgtctcctaattaacacctcattctcatatatgcttcctgtgaccatattggttactattttaatattcctcgtttgcttagagtacgtttggaaatagctgtataattactaggtagggtaattactaaggtggtaattacacagtgtagtaattacactatattttaaaatataagatgtgtttggatatgagatggtaattacataattcttaatatcttgcttggcaaaatagttagtaattacataagaaaataatatttttttaatagctaatatttaatatagaaattttttagtaattacacacttaattacattcaattctcatggg

SEQ ID NO: 46003 - DNA, 721 bp, Cannabis sativa
cgatctgcaagcctcatcgagtcgagtttcaagctcagcataagcgttggaagccctgtgtagcgtttgagcagctttccttctgttagcaatggcttctttccggtcggcagacacagaagccgccaattgacgaacgaattcaagcatttccgagatctggttcttaatttgaagcagtctaaagtcgaaatcgacatcgacggaagaagaaggcggctcgttcgaagacggaagatgttgatgatcgtcggaaattggtggattgtcgtcaaaagcaacagcagaagcattcctggcgtatccaattctcaaagcaggtctctttttcttcttatgattattattattatgattattttgaatttgattgcatgatttagattcagaaagagatggagatggagattcagatggagatggtgagaggatggttaggtcagtgaagagagagtgagattcagattcagattgagagtgagagtcagagtgggagggagagtgagagggatgttcggagattgggttgaaaagcaccattccttcgaagagggaatccatatctccgtctccatccatctccatggatgcttagctaagcttctcgaaccaaagggctatggctatggctatggctgatcctttttagtaaaaaaaagtatttgtcaaaaaaaaaaaaaactgaccaaattagaaccttttgttgagaatggcacttagg

SEQ ID NO: 46004 - DNA, 1820 bp, Cannabis sativa
agtttaaaaaattataaaaactgcatatgtagtttggtttgaaaaaatggctacaacttgcaccacccgcaccgcgaacacccctactactaatcttattgtataacccttaagtatttaactaatttcaacaatcctccacttggttaaataattattcctttctcatttctaaatagaaagtgttggtgcgtaaagcaatatctcttttgagttgaatattgccttagtaaaacattgcaaagccttatcggcgcgagttggtattcctatggattgaacctccaagtccttaattgataaaactggcagtattgtgctcaagtgaacttccacacaccttcacttgttctcttgtgttactcccacttttacacgcttagcactaatatggtcttacgctagtccattcatgaaccatccaaggagaaaactctactcccatgaaagatgacaccacctctaagttcatatatgtgaaattcttacaacatctttgctactttggagatgcttgtttctcacaaactaaatttcatttaaactttttggttaaccctctagtccgtatcaaccaacattaaccatccttagatgggacctatatatttttttaatgttaaaactatcaacctatcaaagaatttttcttactcattgaatttcttacccaatgggatagcaaattgggttgtcatcattggtgaatctattacttaaggagttttagtcccatccctctatatgtagaatgtactggatctcttgcaaaaatttttgtaaatggatctgctaagttttcacatgatttcacatatgaaatcgatatgattcctctttaaatcagatatactcatttcttgactaatgtgtttagacttcccattataaactttattataaacatttgcttgggtgacttaattgtcacagtgtatggatattgtagtaacatctatctcgagtagtggtatatctaacatgagatctctcaaccactaggtcttgttgttggttgtcgctagtgctataaactttgattccatagttgagtggcttatgcatgtttgtttcttagaaccccaagaaattgcacctccacctaaggtgaacacccaaccagttatggagttattttcccccacattcaatatccaactcgcatcgaaatatcgttcaagtgctttagaaaatccaaaatattggaggcttaagtcttttgttcttttaagatagccaaagactcttcccattactctccaatgttggccacttagtttgctagtatatttaccatgtttgccgaccacatattctatgtctgatcttgtacaatgagtgatatacattagactccctaatgcacttgcatactcaacttgagccaccactcttccttcattcttttttattttctctcctcgattgaatggagtgtttgcttctttaataccaagatgattaaacttgttaattatctcttcaatgtaatgagcttgacttaatgcatatccctcttgggttttcttaacttttatctctaagttggtgtcaaccactctaaggtctttcatcttaaaatttaaaaatataaactttttggtttctttaatgcctcttaagtcattgcttattatcaacatatcatccacataaagacataccaaaatgatcacattttcacaagtcttagagtataagcacttgtggacgatattgtgtttgaaaccattgaaagtaatggcttgattaaacttttcatgccattgttttagtgcttgtttaagtccataaagtgacttcacaagtcaacacacctt

SEQ ID NO: 46005 - DNA, 3981 bp, Cannabis sativa
  modified_base (3443)..(3456): a, c, t, g, unknown or other
  modified_base (3524)..(3542): a, c, t, g, unknown or other
ttttatcgggatgcatttggaaaacgacttttttgacctcttcctaagcgataggaacccgaagctcagcatggacaaagtcaggaatcgatttgtgcacacaatcaatgacctcaggacatgaagaattagaagcttgaaagagggatgtaaagtaatcaatcattacttgagaaaggccatgttcccaatcaacccgtaccccactctcatttttcaagcttacaatttggttattcctcttcctagtggatgtcgccttgtgaaagtaactgctattttgatccccttcctttaaccaaagttgtttggcacgttgcttccagaaagcttctctttggtcaagaacccaaaataattcctccttaacctccttgtgtctttgaatggaggcaatatctcttttgttacccagccgttgtagctctgttttgcatcgattgattctcaccttgaaattaccagtcacatccttaccctaaacacttaatttttctgcacaacaagctaattttcttgaaaactcatccccactaccactttcccagcagtccctaacgatctcgaagcacaaaggctccttgagccaagcattctcaaatttgaatttacgatttgaagggaagatactacttggttcaggttctaaaaaaataggacaatgatcggaagaggaaatttccagattagtaagagaagcaccttggaataaattagtccataaagagttaaccaaggcccgatccaacctcacctcaacccagtttctcgaccccctgcctttctcccaagtgaatggatgacccaaaagctccaaatcagtaagattgcagtcgtttaatgcctgttggaatccattaataagactttgcgaatacggtctcccaccacgcttgtcctcatgtctgacaatattgttcaaatcgccaatgacacaccagggaagagtaagatcagtagccaaagcacgaagtgaattccatgactgatgccaaagtccctgaactggttcgccataaatcccaattagtttccatgttcctctctcagatgcttctactaaaaagtctatatgactattataatagctaagaattcttccatcatcctgatgtttcaacaacaaggccaaaccctctgagcttccttgggcctcaacacaaaaaactccttcatactttaacattcggcccatgctttctaatttcactttgttacatttagtctcacataggaatataaaattgggattcttttgagaaacaatctcttttaggaattgaatagcccgttggttcctaagcccacggcaatttcagcttaagacattcataattcctggcggacctgtaaaacagaacctgccccaaacaagttttttgtgttactcttcatcacatctgtatccatttcatctccaattaaatgctccggcccattaacatcacaattgtctatacacccattaatctccactccatgcacgtctccaggcccattggtcaccccccttcagtgctcctccttttagtatccaaaatcaggatacttgtttccttatctataacactttcctctccaatagtatcttcaacattaacctcctctatcaacgtatagtcaacttcaacagctttttactttgataatggcaaagaatctgccatcattttattcttatcattactctccataattggttgattggaagatgatcccaaaattgtaagaagtaaatgactttgctgtgaattggtgccctgaacgtaccttgccggaccgcccacgcttgctctgtttttggtctccgctgccatgttctcagagaaagcgacgcctcccgtttttgtggcaacaccagaccttaaccatttctcaccaatagcataattctttcgtcttggagctgcctttaattccaacaagtatggcttctgaatttgttcaatgggggtatggaaaagttgctcacagaacctttcggaatggccaagaacgccgcatataaaacaaaaggtgggcaaaccttcatttttgaaatgtgcataacaacatactctcccttgtttttccaccttcttttttcttttcaatgggcaatcaatattaattttgacccgaacacgtaagtaatgccgccaaacgccaataaagttgttcggatcggccttggtaaagatccctataaagtttccgagatcacgcacaacacgttctagcatgaatccagttgacaagttatgtatttgaacccaaaaatcaagcttattcagggtgatggttctcgggttctgaccttgctgaactctttcaaatatcaagggcacccgatcaaaggtccaaggactcccttcaatcactcgttcaatatcaaccttatggtaaaattgaaaaagaaacaaattgttgtcaagttccttaacatacatacctcttcccagctgccatagagttgccattttattttgcatagcttggaaatccacccctctattggttaagaatctgcccaccaacaactacctatcatcaatctcctgcagatcatcaacacccccctcctacaccaaactatcttcctcttcatcctctattcgaaaacttgcgtactgatcctcaatatcagttgcatgatgattctcagattccatgattaacaaatcaaacaaacataagacacaatcaaatgtaattgtaaagagaatatcataccatgtcaaaagacaagactcattgtactatgaatgatatttaaaattataagaaatgtattattatgtcataatagcaaaaaaaaagtatattgtgctaaaattattaatatcatatagaatttaaaaattacaattaaagtctcgtgaaaaaaaaaatgaaaagtgtatttataaatactagtatcatatcttattttctaatttttacgcaatgttataattttttcttttcttttgtaacgactttaaaatcatataagaggaagttaagagtaagtggttaaatatttttcaaaaaagtaggaaataaatcattattaaagtactttctctaaaaatatatagaaaactcttgaaagtttaataactactagtagaactatatttttgcaaattgtgaactaccattttatctttactccaacttaatttctcagttttttatctttcatatatattaagcacttatttaaatcacatacaatacatttctatatgagttgaacatcattcttaatataaattgtttgtattagagtctaataatttatgaataatagggtaaatactattttggaccatgtatttttcaaaaattaccaattgaaccttctgttttgtaaaatgacaaaatagatcgtgtattttttaaaatggtacaaataggaccctgaattaattttttgtcaaaataaaacttaattgtaatccgatctaaaagtgttatgnnnnnnnnnnnnnnattttctgtatctgttcgtattgggaattgtcttcaagttggttaaaaaagttatcaaaaattaagcnnnnnnnnnnnnnnnnnnnattttagaaaatacagggtacattttgtcatttaacaaaacaaaagatccaatcgataacttttgcaaaatacaggatccaaaatagtatttaccctaaataatatcatatttaaaacaaaggaatacttgaaacattaagatagaaaaaaaaggcttttttattgatactttaatagtcaatacaaccaaaatgtgcattatttctggatttcttgccttgaactttatctgttcttaagttgttcttgactaattgtagcatagatagttctagggtttggaactttaaccaacgtttaactataacatctaattctctgactgcgtatcgattttgacctgaactcatgcgttcccattcattcattagattctaaaaattaccaggtaacatccgatgttttgaacttctaggattggaaattcaaactttgggt

SEQ ID NO: 46006 - DNA, 1349 bp, Cannabis sativa
  modified_base (1259)..(1259): a, c, t, g, unknown or other
agaactcgagtgagtttctatgttgcttaaatttttattcagtttgttctttgtttccttgtatttctgtaagttgtttataggcaaagcaagttgtaattcttttgctgatgcaggactccggtacttgagaaggcctctaagtcggtctgggatctaattttagacaataatggactgggtaaggaaatcagtgaaacagttgaaagggtattttgtcgattgagtggtcgggaacctccgttgtttcctacctccgatgctgaaactcaaaccgataaagatgtcacaattgagaaagcaaaagagaagaatgatgagaatgaaatggagaaatcaaatttggccccaaagaaaaggagttataatgaaataagtacagcagaagaaaatgaattaacaagcaagcatgatgattcttcctctttagcagaagaagctagtaaatctccactgaaaagttccaaggcatgaactcttaaacattttgagattttttggcaacattacatgtgtatgaataggttttgacatttgtatttattccttctgtaatgattttaatccagctcaataattttttgaagagttatcttgtttgttgaaattcctgaatttgtctccgtaattttacaggcctcaccatttatttctatataagcttaagctatataagctatataagagttatcttcttttcctattacagctgaaatttgaccaatatttatttagtggattctatttctacaaactaataactttgctattaaaactatcaaattattactatcaaaatgaagcaatatataagtaattaagcagtttgaaatataacaattatatgtgtagaagagttttaggggcatttttttttttttaagatccatatctttaaatttaaataaacatcttaataataaaatatcataatactctcaactatcactttacttgcacttaaacttctaagctcaaattttaacagtaaaatctttcaaaatactaaactgttagtaaatttaatgggtcatctatatttcacagttaacggccaacataaagtgtttatgtgtacaccttgtacacgtggcacatttatattggtacacacaatattattatttaaaaaatataaaaattatttcaaattttataatatttttttatttttaaaatatttattctttatttttataatttcatttagtttcaaaatgagttttgaaaaaaataataataataatattaggtgtacnaatataaacgtgtcacgtgtacaacagtatacacataagcagtccatgatggtaagtaactggatcacaccttacatttgcaacatgtac

SEQ ID NO: 46007 - DNA, 4828 bp, Cannabis sativa
  modified_base (31)..(32): a, c, t, g, unknown or other
  modified_base (75)..(82): a, c, t, g, unknown or other
ccataaataacaatgataaattatttaaatnnctataaataatttcctgattaatcataaataactgctaatttnnnnnnnnactaagcgggctttacatatatgtagacggtctttctcgattttatcaaccctccttgtatttttcgtttaggaagacgacttaatggtttgcccctagtggcctttttgtaaagacaagtttttaaaccacttgggttttctcttatcttaaatgccttgtactttttcgttagaagttaatataattgcgtgtccttgcatttttatttacaatgtaaacaattatattttgatcaaatgtaaagtactctaaggttttttcattgctcgtaatcttcctgtttaagtagttagttatctaccaaactttttgattttcgagcagttgtcaattctgcctcgctattgcagttataatctgccttaagcaaacttgaatatacttttaatcattttatcagtttgtatatttttgatttcttgtgtgaaaagttaggttatctatctatttactaggtttaagtactttatcaagacgtctcgacgtctcgtttagtactttccgggctcgtgcgaaccgttaatattcagctttatacgcgagttatgagttatatgtcatttatagcttttgattttcctttcctatcaaataggtttttaataaaaaattatagttgtttgatcccttcttcgtcaaaaaggtttgatcaggatgctataacaattcgacccctctcttatgaaaaaggttttgtcatgaagttataacagttcgacccctctttcatcaaaaaggtttactcgagaacctttaaaaaattaaaaaaaatatatttttgactattatctaaaataaatttataccggacaaattcaaattataattgagtgtcattggtgatgccagtaataatatagaattatttaacattatactttgagtgtaaacattaaaggacatatccatttgagcaaagaaatacaatatgaatatatttattcactcgaggtccatttttcaccattatgtcacattattgtattattggtaatatggacaggtaatctttttgggaacataatgggtgagttacacgaaaagtttgatttttggcgtcattaatgtcacattaattatgatatctcattggaaacttaatgggtgggttacgtctatttcttggaattattacttaattaatttataagtaatgagtaagatttttcttcattaatatccacataatctattggctttctcaatgtgtttctcacattatatttaagtggaacaacttttctttcatttaacaagtttacaattggagaaaataacattacatcaaagattgaagaagtaattcgtgcgagatctatattctcaaacaaaaaagaaatatacttaagtggagagatggaagttctacagggtgaaatagtacatcggcttagaacaatagaccgagacttgttcgcaatgaaagaggtggttattcgtaattctttctgtccaaattggaagcatccatctcgagagattctagaagtccgtgatcttcaacgagaatatgataaaaaatacattgaaacgattgaggaggaatggagctattggacgttcgaagaagtggatattgcacgaaaacttggttatcatgataacttgttgttatcgttcctaggatataacgtgcacactaataaatttattaacccttctcgctaagcttctaactttgtcttatttttacagtttgaataaatattgtattaaaactttttttaaaatgaaaagttcttttgaaagtattcgtatatcatttgtttaaaaacttgcatataaaattttaaagaaagtttaaatgtctcatcactattgccataagaatgaaaataagaataaatatggaatgaaataaaatttaggcgggcagtaaaaaaaattgatcaaaaaagtattaattgtagaatgatattcctaaacttcaatatgcaaccaaacaaaagaattgaatgaagattgtttttctcttcattccagtccattccattcaattacctccaaacaaatgtcaccttaattggtgggttacacgataagtttgtttttggcctcattaatgtcacattaagaaatgttattgggaacttaattggagggttacatgaaaagtttatttttttgacatttttatttaattaatttatattcaatgactaagatttatcttcattaatctgacagaaattgatttttgggaaactaatttgatactcaattttttcggtaattatattttatagcaccaatatattatggggaactactatatttaaaaaaaaaattatatatgacactcttacaccaataaattaaatactcattaatgactcacagaagggtctagagatttaaaatattaggcataaaaaaaatagcattaattatattatgtagacaatattaaataattaaatatattttcttggaatgataaagaaaatttcaaattgttctatattaattgacaaatattttcttttctttttactcaatgtaatcattataaattactaaaacctaatcctaacatctccattgtataagttttacttacatatcaatgtcattacattgttttcttgtcaacaacaaaaaattagagttgaagatgaagcataacatcatgcaatgtgagggtaagtattgttaattagttttctcctttaaaagtgaaaacacaattcttgaatacagaattacatgcttttcgtgaagatatcaatggtcgactcatcaaaactcaatatgaaagacagactttaagaatgagctttttagaccataacactcgaccctacaaggaaacatcacagtatcttgctggcttgttacaagttcaaggtgatttatgcaaatcatttatcaaagattcggaggaggaagacttaatgtggagtaaaaaattattccttgtagacagtgaaatcaattatcataagacgttacttttcgttcacatgaacaagtagttggttataaagctttcatctaaacgtttatggtacaacattgtatgtctttgttaatgttttttttgaaaatcggctacttttgtcttaaaaatatttgactaaaaagcttgtgcgtgatatcctatttatttaacatataaatcttattaaatgatccttcagcttgtaacttctaccaatattactttcttctaaattaaattcccttatgaattggcccaagttacaaagtattaggaatatatattacgataattaaatcattactaaagaaacacctaacattacatttatatataaccgtaaaataattacgaaagaaccgcctctctttttatctgtgtatcctctttcctatctcctctcttatttttttttttcattttcgtagccatggctgatgtattcgaagaatatttgaagactatagacatggttatttgtaaactccaattccttttgtcagttggctcacttctgccttcatctcccatttctgatcacgaaagtcggctaccctaccagttttccaccaacataacacaatgtcgaaggggtctcactgttgcattcattcaatcgttgaattaggagatacaaaagtggatggatgaaaatttaagtgtcaagaagttagatgaagacattaggaaaggtttagatggttgtcacaaggaaaaagtgatgcaaatgctatgttgtgtccgtgatactgaaactctaaagatgatagagaatgaggattgcgagaagcatttggtcaagttgtgtaactattaccttggatacggaaccaaagaaaattgattgctcaagaaggctttcatatattatgtttatatttctatgttttttgtgtgtgttttttaatattttaagattaccaatatttatcaatttttaatgtattttcttatctttatttaataacaaaactactattgttgtatatatttgcagtgcacattatcaatatatttcttagacaaactgtgtttattttttccttaatatatgtatttgctgtcaaatttttttaagtaatgataaatattcttttttacaacttttgatatgtgaactactctatctacatattacaatctttaaattatggcacaaatactatctaattgtactacctaccaaatattgaattcgagaaaattattttttaatattatatgagaaatataaaatgaagcctttaaacaaagttatgataattttcaagatccccagctttaaacaatgcataaatgtataattaaatttcaattagggaaatctttctaaaaacaaaaacaaaacttgatatatatatacctaaaaacaaacataataattagttcatttttaattagaagaatttaaaaaacaaacactgaaagtataatgtagataaactatctcatacctacaaatgagacaatatttgctagtatttagccacttcaggatacattctctatgatatgggtgtttacaaggaagttgtgtaacttcttcaccatcatcaatattctcacaacaaatagtacataaaaatatttcattgttataaaaaaacttcaccaatttttcgatagagtcttcactgtcagctacaaactcgattgcaacgtcttcccatccatcatcgctatcactagttggatcactgatattatgttcaggaagaacataaacaaaaacattaatgtcaatcttgattactttccactgtgctgacgacataataaacaagaacataaatatgataagg

SEQ ID NO: 46008 - DNA, 766 bp, Cannabis sativa
aatggttgggttttctacagtggccgaacaacattgttgagctgaaatcttggtgctcgaagccccttactgatctaagaaacagagttattaactctgtgattacaacggctgtttacttgatttggaaaagtagaaataggtgtgtttttgattttatatctagctcgattatttccctttgtagagagatcaagagtcctgtgaagtggagagttttaagcttacaaaattgtattaagaaaaaagatgcaatatatgtaataagtgttattaagggatagtaggggtctgggagtgatgagctccttatgtttgcattgtttctctgatttagaataaaaaagtttcttttgttaaaaaaaaaaaaaaacagtgtacgcttgtaataaaaattgtgtatcataaaaatatgctttctttccatacaaattgtattaaaatttaaatattattttgtcttactattatttaagtgtcagtataaattagcaatagtaaaagtgtaaatagagtgtattcaaaatttaatctcatattgtattaaaattattaaatgcatgaatacctaaactagcaatagtaatgcgtgattaaagtaaatggaaaattagagaaaatgaagtccattatataatttttttttttttgataaattgtattacttccaattccaaacataccatttacaaactaagcatcaccttataagaggcccaatctagtccattataatattaatattaggaatgtcaatctgggctat

SEQ ID NO: 46009 - DNA, 2837 bp, Cannabis sativa
  modified_base (1804)..(1809): a, c, t, g, unknown or other
aaaaaaaaaaaaacttttttttggaggagaaagcaatttgactaaataatgtcattcaaagggtaaaaaggttttgcatctatctcgaacaataaaataaattgtgaatatcatgcacattgttacttagaatttatctcaaaatactcacactcagcagttcaacagcaagttaaatgacaataggatctatactaccaaacttgccactctaatcactttcggaggttactgtttcgcaagaatttctttggactggtcatctcgagaatctacttggaggataagaggttcttgtcccttcttctccgtaagtaaattcgactcgaagaaggtgtagaaggacaagtagagcatagcacattgcacaaaactaaagtccattgcatgcgcatttaatgtggcatgcagaagatcatccagcacattactctaaaaagacatgcttaagaatttaaactcataattttctgatttcacaatgatccatacatcaattgacggttacataaatgagctattaaattataagcaaaaaataagtcagtctcaccaaacacctatagcaagcctaaaagcacatcataaaaaatagacaatcatgccttatgatcaaatttgagaaattatgtaaggcatagttcacacaaaacctaataatctaaatatcacacatactatgtaaatactctcattttacatcaaaacctatgtttattttattagagcttttctaatattcacttctcaaagtttatattagaatcataaatcataattaagatggtcagtctaaaacatgtatcaaaataaataagtacaaatcacaataattcaaaacaaaaaactaacaatcacattaacaaaattggaaagacaccattcaacattcatcatattgttaaattgtgaaataagttcaatatctccatgttcaaattcacaattaaactaaaaacggaaattaacatagaagaaataaaaaggagaaaaaataaattggtggtggaatggatctaggttgccacgctcgctctagctgtattcctttttgcttatagggttctatttctaagtcagcagcttttaaaattcaaaatctcctttaatagaaccaatttaaactcaaaatatagatcaaaaataaaaaaaattacccctcgagtccgtacggacttcgtcgctgcaaccactaatggcctcgccgtgacgacttcacaaattcaaaaaatagggtttctgccaatcgtcttgtcgcaaccataagtcgtggtcgtcgcatcgagaagtcttggctgcggccctacgcttcctcgtcgcggcctttgagcaaccttgatatagccccattctgtcttgatctcgctgcagcgagaatgcaattacatcctgaatttgtatttctcatttgtctcgcctcgattcttttttaaatcttgacacacttgacttgtaacaaccacgggaacctaaaaacacagaaaacaatcataattccatcctaaaagtattatcaacgactaaaaacaactataaatatcaacctgaaacttagactaaaaatagcataacagttatcacataaaaattaaaatttgagaattaaattatataaaaccatataaagtagatgtaattgaaaagaatcaccctaaactttaatcattgttgatttcaccttaattatttattttcttttttttagtagaaattaaacatctttcttatttttattgtcaataaatagaattaagaatttaattgtttggtaattaattgcagtccttgtgggatcgacctcacnnnnnngagtctattacttgtaaacgatatttatacttacgtgttcgaaaatccataacaattgatcttgaacaaacccactttgactttgagcaatttacgcaagtatacacatcaagaagtactcacacaaataaggtcaaactatagggaattgaaattaattaccactaaattagacttgtatttctatttggttaaacaaaataatcttggaaagaaataataaaaattaacagaaaataaataaaaaaaaaaacgactaatgttgttcaaatatggatgagagatgaggaatatgaatcttgttgaatcaatttactcaattgttaaatgcaatttactagtcttttttctttaagtgttgacagattatataaaaataaccctaactgttcaaagatcattaaggtcctaaactatacatcatctattgcatctctgagatagaataacatatagtttgcattaaaaaacaatctaaaggtcacacaagctatgtgaatactctcttttacataaaaactgatgtttgttcaattagagcattccttatattcacttctcagattttatattaggatcataaatcatgttaaaagtagtcaatctaaaacatgtattaacacaaatatgaacaaatcacaagattcaaaaagaaacattaacaaattgtaataaaattaatcaatattcatcatattcctaaattgagaaattagttcataacttcaacaatcaaatccatgtttaaactaaaaatagaaattatcataggaaattaaaaaggaaagaggaaagaacttgatggagaactcgatcggatcgccacactcacttccaaaatcttctttcttttatcgtctagggtccttttctgcatctctcctattaaaatcgcaacccctttttataaaaactcagtttcacaactcaagatttacgaaagtacgaaatgaccataattgcacgattatggcaccacggtgaaagcatagggtgccgcaatgcctggtacttttcgaaaaaccaat

SEQ ID NO: 46010 - DNA, 2596 bp, Cannabis sativa
ttttgtatttttttttttaaatttcggttttatgtaaatttttcaatattaaaatgtctaaaaagtctacagataatatttttatacttatatataacatagagtaaaaaaatacattttaaaaatcatataaaatatggtagaaaaaaaaaatacacacacaagcttgctagaaactgatcattttttttttcaaaaaaaaaaaaaagaagaagactaaaagctatttttaattcaaattttaagtggtttaaaatattctcaaatatgtcattatggtattcacccatgccttggatttggtctatcggttattagatttgttactatattcactttgcgggaaaaaaaaataaaaaaagattaattattatataaaattacactgttttcacataaattaatagtatcattgtactaaaaatatatgaccctaaatattaaattatattcataataatatgagaaatgctaaaggtcaccagtgatgcttagagctcttatgtgtcaatattattattggtccaactaagtatcggatcttatataatttaatataatagcttttagaaagtatcactaatcaatcacaacacaacatcattacatatactggtgtcatatagcaatgctctaataatataacatttctaaataatattcaacaccactaatactctatctctatctctacacgtgagatactccatatctactccactaaaaatttctcgaaaatgtcatgactcactaatcaataagtacttatgaaatattatttcattgttaaaaaaaacaagatagaaataactaatcaactattggtatatcatttcaacaatattaattacttggctaaaaccctttatgagtcggataatggatgcaatcttttatctttaaccattttatgagactttagtgctatattacatcattactattttgtttgatatatctttggaaatatatctctataaaatatcctatatagccggatcttgtgtatgtgatattttatcttccaaaccccaatatatattaactcatatggatattgttgcttgactttaagagacaatctgtcctatgaaatggatgcctaacaccctaagttgtagtaattataattgtttattaatatcaagatatgatcaagtttaatgggcacgaacgggaactattggtcaacttttttaatattttcgccaaatgattatgatgtgggaaaaatatataatattaaaaacttaattagttcctacttaattttttttattagatatttagttaattaataataacgtttcattgtttttgcaacttgcaagttggatatcaaccatatgcactcaagctaattaataggagtgaccctatgaactcaaacataactagttattaattgtttaaatggagttgtatatatatacacaaaaatatatctatatatatttattaataattgtggcatgtttatatgacctccatttatctaatatatgagacttaattaattttggcttctcaaaaagttgtgttttggaacatcacaaaactaaatttggataacaaaactaaaaatatgtaatagcgaatgaaatacgttgtaattaaggtaaaattttagcaaagggggcagtttcttgaattgtttgtatatatatttatttttttttatttaaaaaaaaaataattaattagtagaagaaagcctgaattcattgtccatttacaaataattaagtataaattaaaaagtgtaattattgtctagatagcctttaattgatatatgaaatgaagtgggtgttacttaaattagtttcctcttcactcctctaagttctataagaaatctatttgagtcaaaatactcgaaactgacacaaatcaaaggtaagaaaagatggaacaaatatatattatatatatatatatatatatgttaagcaaaaatatattaattatatattgtacttctactttgtcactacaaagctaaatcttttgaccaagaaattgagaagcatctatacattgggctccaccagaggaaaaaaaaaaagaatggggtcaatttgctgggaaaattaaaagggtatagagggagagatattattcttcatctcacgagtcatataaattaatttaaataattaaatagacatttaaaaatggtctaaggcattaaatgttttcaatttgaagccaaaaaagaagacaaaaacaacaactggagagcaatatacccaactggggggagaagagaggcccagtttatgaacgtttctttctagtgaaataatattggcttggcaattggcgtgggaacaaataataatgagtataatagtctctaataagttcatttcaattcatggctatttcaaactaaaaaaaaaaaaaaataaataaataaaataaagagagagaatttattttttgtcctaccaattccaaagaaaatcaatttctctagctggctgtgtcttaatttctttctttcacgaaactaccactaaataattacatttgttttcatattccatttttacttcacattatgatgagttggaataataataataataat

SEQ ID NO: 46011 - DNA, 3210 bp, Cannabis sativa
  modified_base (2871)..(2876): a, c, t, g, unknown or other
atctatattaataagtaaatttgattatattgagatgagttttatttagggcataaaacccaacacaaggttggtttcaatcctttcaggtactgtaatcattgggccacttatcctaattttaagaagagtgttctaacttgctgggataagcaatcagatggcagaagtctcaagaggattgttaaaaagatgcttagagttaaacatgcgttaaagaagtttagtagacatgaagttggagatatcagtgaagagtacaaacaagccaaagatgagtactgcagaattcaagaagaagccgctcctaacccaggagatttaggtcttcaatcggcaactgatctaaagcagcaagagtatcttaaagccaaaaatagatataaccagttcgttggtcaacagagcaaaataagatggttgaagtttaataatgagaattccagcttttttcatgctactatgaggaagagaaggcttgaaaatagaattacaacctatgttaaggatggtaatatagttgatgactatgaggatgttgtgcaccactttgtcagccactttgagaatttcatgggtagtagaagctctgcctcgaccattatagaagaggattgtattaaacatgggaattgcttgaatttggaacaacaatctacgataatctggcctttctctgtgggggatgttaagaaagcaatgtttagtatccattcatccaaaagcccggggttggatgggtttggatctagcttcttcaaggacttgtggagtgagatagggaacgaagtctctaaggctattttggatttctttgccactgggtacctgccaaatgaattgaatgaaacggtgatctccttaattcctaaggtgtcagatctgaacacagcaaaggactatagacctattgcttgttgcaatgcggtttacaagtgtatttcaaagatgatctgctcttggcttgctgaggttcttccatcccttatcaaaggaaatcaaggagccttcatcaaaaactgtctgcttgcccacaacatcatgatctttcaagaccttctaaaggggtacacaaggaagaatgtgtcggtgaggtgtatcttgaagattgacctaagtaaagcttacgatactgtagactggcagtttgtggaagccatgctcaaccagctttgtttcccttctcgatttttcaattggataatgaattgcctgaagggaactaggtaccatctcttaatgaatggcagaatccaaggtaacttcagaggtgaaaaaggtctccgacaaggagatcctatgcccccacttttgtttgttttaacaatggagtacctatctagactgttgagtttctattcagagaaagaaggatttggctatcaccctttatgcaaccaccttcgtttgacgaatctttgttttgcagatgaccttgttctttttagcaaaggcaacttgaattcggtaaaaataatttaagaagccttcactaaattttgtaatgctacagggttatcagtaaacaaagctaaatcgtagatcttctttggtggagtcaaagaggacataaagctgaagatcctggagcttgtgcaaattgaagaggggaattttcttctaaaatactaatggttaatctccgaacaacaaaatggaaggcttcagaatgtggtgtaattcttgataaagttaacaagaatctgaactgttgggcaagcaggaatctttcgtttacaggtagagctcaattaattcactcagttctgcttggaattcgtaattactggatgagcatctttataatcccccaaaaaattgctgaagccatacacaaaagttgtcgagatttcctttggggcaagaaggagaatagaagcaaatttcatttagcttcttgggagaaagtttgtctccgtaagaagttaggtggaatttggtttcgagaagggaagaaatggaacaaggctttgatagtgaagtacctttgggctatatcgagtaaacaagataatatgtgggtgaaatggattaactcgatctatctcaaaggtcaatcaatttggagttaccacacaaagaaggatgctagttggtacttcaagaagttgttgaacctaagggtatcaacgagtgaagctgagcggaaccttgctgtgaatggaaggaaatttcatgcctcaaagttttacaatatgcaggtgaaagagaacaaagtcagctatgctggtgcagtgtgggataaacttgtgttgcctaaacataggtttatttattggcaagttgtgaacacttagcttattacccgagacttgcttaatagaattgtgccaattccggatgtaaactgtcctgtttgtgatcaagcagaggaaaaccataatcatgttttttttttactgtcccttctccaaacaggtggctctcaaagtgaaagagtggcttgggcaagtgcattggccggtttttgtcaaagacctcagcgacagttgctcgacaactcagcgtagccaccagaacagagtgataaactttgtgattgctgcttctttataccagatttggttaaatagaaatgattgtctttataatctaacttgtgccaccccttgtaagattagtagagttgttagaaccttggttaagataagaattttatgcttaggccctttcaaagagggcagaatgacaaggtatttacttaatgttgtaaggaagtggtaggttgcagctgctgcttgttgctagctgtggcctttcggctgtgtagctgctggtttcgtccagcttgttttgttttgttttgttctggttttgaataaaatcttccctttgttcaaaaaaaataaaataatttttcaataaatattnnnnnnattattcaatttaagttgtatcaaaattaatttaactagattatcgaatgataaaactcgtaaccatgatcaacagtttcatttgatagcactgaacacaacaattatatgaaaaagcaagagaagcatttgatacaatctctaatagaaaacagaaatagaattacagcaattaattaacacatcaagtgactactataatcctaactaaaaatttaactaacatcaaactgtttttgtcctttaacacaacctgatactttaatgtaatgaccgctttagtaatgtgaattagaaaatgcaattagcactaatttttattatttttattatt

SEQ ID NO: 46012 - DNA, 2244 bp, Cannabis sativa
  modified_base (106)..(118): a, c, t, g, unknown or other
  modified_base (815)..(818): a, c, t, g, unknown or other
gacacaataaacaagaacataaatatgaaaagggtttggatgaatttataaatcaaatagaaatgtaacagataatatgaaccaaaaaatacacaaatgaatgaannnnnnnnnnnnntctttattgatattgaataatagagattacattaaaatggagtttaggactggttaaccgtttcaccaagccgtttggggaatccaatttacaggtttgggaaattttcagagccttaattttgatgtttcctccatatttaggatatttccataccttttatcaatagggaaacttttaattttgagtttaggtctccagaaagggttttagcaagttgtttctgtatttatgtgattatgacatagggcatccattttagtgcgtaattttctattcaagtggaccagcacacttgaatttagaaacaaagtaaggctagcatataatatatttatatatgaatatgagtatgtgtaatatatgcatgttgattatgtgattcgtatgctaccaacaatagtacgatagcggtgctgagtgcattggtacaatgtatgatgttcaacaggtacaatacggtgttgccaacactaatacatttaagtacattgtgcatgttatacaacacttagtggtactcgtggtacggttaaaaccctaccaacactagtacagtagcagtacgtagtgcatgtggtacaatgatcgtaccttagttaagaacgttcttactcatctgttaagccttatggataggtgtatgggggcctagatacaactcagtaatatatattgtatgttatatgcttttctnnnngagtctatcgactcacagatattgcattcatgagtaggtaaaaggaaggataaagctaaatagtagtgagtgcagagctcagggattataatacatgtcgatacggtgtgacattgagtgttcggtctcaggaaagtgtgacagctaggttaattatttcactaggtcattttgggaatctagtttaccagtttgggtagttttcaaagccttagtttttatgtttccgtgatatttaggatacttctacgctttttattgataggaaaacttttagttttgagtttaggtccctagaaagggttttaacaagttatttatgcatttacgtgattgtgacataaggcatccattcagtgtgtgactttccattcaggttaactaccacacttgaattcggaaataaggtaagactagcatagaatatatttgtatatgaatatgagtatctgtaatatatgcatgcttatcgtgtgattcgtatgctaccaacactagtacggtagcgatactgagtgcattggtacaaagtatgaagttcaatgagtataatactgtgttaccaacactaatacaattaagtacgcagtgcttgttgtaaaacactcagtggtactcggggtatggttcaaacgctaccaacactagtatagtagccgtacgcagtgcatgtggtacagtaatcgtaccttagttaagaacgcttttactcatctgttaagccttatggataggtgtatgggcgcctagatacaagtttgtaatatatattttatattatatgcttttcttactgagtctatcgatacaaagatattgctttcatgagtaggtaaaaggaaggctaaatttgaatagtagtgagtctgaagctcgaggatgattgtacatgtcgatacggtgtgaccaggagtgttttttcttgggacagcatgggcttcattttgtagtcgttgtgcgacgtgtttataaaagttattttgaatatgaatgtaaaattttaaaaataggatcctaactttatgtatgaatatatgtatatatttataaaagtttaaatttaaatcaaaatttaaatttatcacgatttctgaaaaaacccctttggtttgcaaaggggtgcactgtaattaaaagcccactatagcgggtctaactattagggtgttacaatttttggtatcagagctgccatgtttttcatcgaagaccgtcaagacatgtacaatcatcgtcagagataagctcgactcatggttgagtaagcctttacctgtttagtaatttatttgattagaaaagtatgttaataatatgttggctaattatgatttttccccctgaactttgacatatacgaaatcatgccccctgaacttttaaggtcattaaaaatgccgcttgaactattgggattgttgaattt

SEQ ID NO: 46013 - DNA, 1796 bp, Cannabis sativa
aaaaaaaaaaaaaactcttgctattttatcaaagaatatttctacacttcaaccgttaacaagttcaaaatgagaaaccaattttcttcagtctactaactaaaaatcaaaactctttcaagttttctatccaaactttattgtaaacatgcaacgtgaaatttctttctaacaaacttattagtaaaatggcctaacaattttcaattaggtagcatacataataagccaaattgtagaacacaactctattgcattataccactcttgatgtcaattattatgcccagaaaaaataatttcattcacagtcaaagcaacttctaaacaaaaataagctaagaaataaacaattaattatcaatataagaaattaaccaacccaccttagaaagaagccacccaattaatttaaatttattaaaagtcatattataaattgttttatttagctcatgttactagtaaaaatgtctttgccttagctaatttttgtaatgaatagactatgaaaagtcaacccaatttgcctatcaagactaatttataaccaacaccaaatatcaaagatgtaacttactcaagactaatttaaaacaaaaggattccgtaaattcaaatttgcttgagctcccatataattgtacccaagtgtcactagcatagccgcatgtttgttatatgtacataattaataataattataactaatgttaatattataacaggtacatgatacaaaattaattaatattgtgagatgtgtgtgtgtgttattttacagaaggattgactataggttcttgattgaatgtggtgtcgtttcagaaaaccacatgatgagcttttcgtatggtactcgtactcgactcaagataaggattcttttacccaaatcattggagttggaattggagttagagatagagatggagattattactgtttaatgatatcaataagtcttttttcttttgtattcttccaatgggaatggttgcttgtgggcagaaactttaagaatgaaccacaacaaattaatgagaaaatcagtgtcacatgaagagaggtgacaatacacaacttacaagaattcaactccttagctaattaaaaaaaaatcatgcagaatgaaccaaaacaaattaaacacaacaatatgcattgaaaatggctaaaagcttcaagggcaataagcttatagaaacctaaataagaatttatcatgattctacaaagattgaattatcactcaaaaaatccaaatttcatgcttatagaatatcatagcaaaaaatcaaagatatgaaagctattaactttcagcacagtcaggcaagaaatgaagataatcaaagtgaaaaaaagcaaaatagcacctctctaaatcacaaataaagctcattataacaccacatatatatatatatatatatatactaacatagatacaccattgaataattcatttgctttctcatgtaacttgtaaaagattacacatgtgtgctttcatgtttttttaaatgcgtggaacaaaaacctgtgagcattttatgttttaagcaagcaactaagctattcaatagcaaaaatacacataaacaatccgattattatgaagatgataccatattgaaagtctaataatagaaaaagaaaaaaactaagataaagtaaactacttttctcttaaagaaacaatcataaacaagacagcaactgattaaaataacaacaaataatcttaaaaaaaatgctttggaatcctctaggtttctctggtctctccagtc

SEQ ID NO: 46014 - DNA, 4283 bp, Cannabis sativa
attctgagcctttcaaattgcccagccaaccatgacagcttcttcaaccaaccccttattgcctactgccaacacctccataaaccagtcaaaaaaattggttgctgctgaatcaccaacaactaacgccgatcggagccaacacgaatgagcaaaggagcattgaaccaaaacatggaaaattgactcttccccatagttgcacaacacacagtgtaaggccacaggaacatgtttactataaagttgagtacgtgtaggcaaacaacccgaaagagctttccaagcaaaatgtaaaaccttaggaggagctttaatcttccacaacattttccaaacatcatcttccatggatgagttccaactaccattgaccgtctgtaagtgattataggagcttttgaccgtgaaaaaactagctggatccttgttccaataccaactatcactcctaagacttacactcaaaggcacttgtttgatgagctcaacatcacgggaatcaagcaagtcctcaataagctctaaatcccattgtctactatctggcttcatgagttgagacactttataattagccagtgccagatgattagataccacacacggattagtctcagacaaaagccaaggtgtgttaagacctcagtagatgaaccaggtccaattctcctacgggcaccgtctctaagcagcgtttgtgactcaaagatactgcgctatataaagctcggattgccactcaactcggcctcccagaatgaacagttaaaaaagtaccgagccttatatatccgacccacaagggaatcttggtgcaatcttatatataatattattatgctatactacaaaaaatagtaaaaattacatattttataaatttatgtatacttgaataaaaaatatttgtaaatagaaagcgcttagacctcaagatcatactaggaatattttaaggtaatatggaaatcttcacaatactatatctaatatctatattatgagcaagaatttagttagccacattatgaatttttatatatataatttgtgtaaaaatatgacagtttttacggagtaaaatgttaaaaattatgaagaaaataatataaggtaactggttatcttttaattactataacagtaactaattatcctaaattattttccctatattttttaatttttaattattttttccataaaataatttttttaaaaaacaaccacaattttttaaactttgctcgaaaaacacccctataacttaattagcaaggaatgattttgttaaggtataataaaactctatggactataaaatttttattatttaattgaaatattattttatatataaataaattatcctatgtaataatttaagtagtgatcatccaaatattattgttttttgtcagtttcaccatagtgatttgaaaaaattaaagggtaccaaaacaggaagaaggatagctctctttcaaacaataaaacttttttgtttatgatatggcttaaaatgtgctctacattcattttctttttgtcatcgcaccaaaaaaatatttataaattaaaaaaaaaattagtaacaaaattttaagaaagacatgaaaaattacatacctaataaagtaatttttagaaaataaattataattaaaactttgttagaaaatagatctaaaatacatattatactctatgaattaataggatggaaaacacaaatgattttatgatatcgtatatgagataagatgactggtatatggttttccacaaactaatcttctctctatgggttctcactcaattgatgggaatagaggagaatagtggttagccttggggaccaaacccttatgttctttatatagcaaactaattagagccgcataaatcctaattaggtttactattgggtattatgcattacaaaagtcataccaaataagatgtctattgggctcattaaattagattactattatttagcccaatttaaaatattagctcaaataaattgtcttaatttgtaagaccgcatattgaattattaaaaatatcccaacaaacttatatcttatggaaattcttagatctttgaataactaagtaaatgaagtgaagacatatctataagataaatatataaaatttaataaacacacaacttaatgataatattaaattaaaatatgaatttttatttcaaatgttaaaataaaattccaaaagataaaattaatgaaaaaaaaacttatctttaatatcagatctctcaagctgaagatgtcacaattacctcacaccacttttataggaagaatctaaaaaatagcttaaaccacgtacaaaccaccatatatggtaccaaacaagccacccagcaccaaaaatattaattaattttaaaattcaccaaaattatttaaaaattaaaaactaatgaatataaggtacatatattttaaaaattaataaatgcaccagaattattaagatttttagcatattagccccataatatatgcacgacttaacaaattagttcactaagtcaatgtatgtgattttttgtcaaattttttatagaatttttttttcgggtaaatatcattttagaccatgtattttgtaaaagttatcgattagactatttgttttgttaaataacaatcagaccctatattttttaaaatggtaaataatattataatctaattttttgtcaaaataaaacttaataataacctgactggaatgtgtcttgatcaccatagttgttacaattttttcatctgttcatgcttaagaaactggcttcaggttgattatattaaaaaaatgacagaagttgagctcagaattttattttgtaccattttgaaaaatacacggtccaatttatcatttaacaaaataaatggtgtgattagtaattttcacaaaatacatagtctaaaatagtattaacttaaaaacttttagcataataaaaatagtagcaatatcggaacacaaacatgttaaatacattgcttcaattaattaacatcaaaaccactctattgtgatacgactagttgattctattttctctcctatactactctattgtgataagaataccgttgttttcttttcaaaaaaataatgagctagtagtgcttccaaatatatagaaataaagtatctcgcagttagagacttggtcaagaaaggagacattatgatagaatattgtaagaccacgtcgatatttgtagatcctctaaccaaaggattaagtgctatgttatttaataaactattattgatacaggcattttgtaaatttttgttccttcgggttaatgggagttcttgttctatcatttgagattatatttatatgtaattttcttattgatgttatgaactacttggtttgttttgtgggccaacaattttttaattattggatgtttatgctttcaattatattttcttatattctcaagaatgatgaaattgaatgcatgtagttcatatcttgctctgattattttctttaaagtttatttacttaatgacaatgatgttttgttggcttaattttttaagcatatttagtgacactattaatgagtgtatggttaatttcaatgacttatttatgaagcatcacgatatcagtaaaattgaggatactgataaggatcttatgtcattttaaattgattacatgttgaacttaattccttatcacattactaaacttattaaccatgtcgatttaatactctagtatttgtaattatgaacgactttgttgatttaaaaataatatgattgtcatagttcagtatcaaatgttaaattcgactagtatgttgagatgctatcaaagagctattatttttaaaatggccacaaatattttcctattgttcaactcatgattcgtttttaaataaaattattttaatacaatatatataattaaattaatgtagtctaagtgagagatcgttagactttaactttttctttgggctacattaacttttattaattttattaaaatttggattaattggatagttatttgttgtgttagcctatattgttagtgatcaatagttagtgggcttagcatttgtgtgtgtaaagtctagttgaaacaaaagtgtgtgcttttctagttaactaaaacgtacctttgatgagcaaattagggtttgtagctaagtctcctccctaactctataaacatattgttggaaattatt

SEQ ID NO: 46015 - DNA, 1126 bp, Cannabis sativa
tcaccaattcaattcaattcagatagtgaaatgttcttctcttattttctctgtttttttttttttttttttgtaaaactaatatggtatcagtagacattccttttcaaattaagcttcaagaaatcaattaaagtccttcaagaaataaacaacggtgcgtacacgagctacaacaacagctacttccactgatcaagatcgttcaatgcttccatagttccgccaccttcaaccaattccgctagcactctgcctcagacaggatctccggttccaatacctcgataaggacatcgatcatcctacatacaaagatatctgacccccatactttctcaataatacggaccatccatgattggccttagcaattaactttgatcctcactgatcgcaatttctagctatggaaattaaagagacttcaaaccctccattagcgccaaaaataaaacttcttttgtggaaggtacgttgcctcaaccttcccccattgactctctttaaagttcttggaaatgtaaccaaatggttatgtcatgaatcctccattccatgtcacctgaataaagagtggtattatgtatcttgatactgcagtcgatatgtggacaattcttaacaatagattcaatcaaggaaatggtccaagaatctttaaactcaatgagactttaacttaccttcatcaaggagatgaatatgtgagtgcctatttcactaaattgacagtattgtgagacgagatcaatcaactcagccctcagatcaattgcacttgtgctgctccaactcaaactcaagatcatctcaatcatgatcaagttttacaattccgcgaaggcttgaatgattcctatcatgtcattcctgataaaatcctcttgattgatccttgtccaccactaaataaagtcttttcaatggttatccatcaagaaagacaaagaacactcagaaatggtacgtctcactcaagctcttactacaactacaaacctgattcttgctcctacaacaacacatgttaatgctgcagcaaatcaagcatccaagaacaaaaggcctctacctcatggtattcattgccaaaaacctagacattacaaggataaatgttact

SEQ ID NO: 46016 - DNA, 1063 bp, Cannabis sativa
ttaaggccatagatactctagttgagtttacaaacgagagttgggtggggcattgtagtctggtagaattcgcatgtacacttcttcatggagatcacaatgaagaaatgcattattgatgtcgagttagtgaatgttccaattgtacattgcatctagtgcaagaaatatatttaatgtactgaacttagctacaggggcataaatttgtacatagtctataccttattttggttgagtcctttagctaagacgagctttgaacctttcaacttctccttgcatgttgtatttaactttgcaaaaccatttacatcaaatggctttggggctaggaggtagtttggttactgtccaagtgtggttatttttcaagagcttgagtttcattatccatggcttggagccaatcttttaattgggaagcatctgaataggagtgtcgttcaagtttaaagtaagctacaagaacaacagccttgaattgtgggctgagttttgcataagaaatgaactattcaatgggatgagttgtggaggttgtatgacagacatagtctttcaaatgaggaggtatgttgatatgtcagccaatttttgattcgataggttgtgcatcattcgtttgatgtgatgtggtaaaagagttgttgtctcttgatggaggtttagtagtggaaactggttaaattgtcgaatcaggaggagaagcagtgacttgaacctcaggaatatgtactggtgtgtgatcaacactagttatgggaggcgtggaatcttgagttagtggttgataaagtggagtgattaattgttgaaagaattgatgtattttagtttgtgaattttgaccaatgagagggaaaatgtttttatggaagatgacatctcgagagtggtaaatttgcttggttttaatatcaagaagagtgtatgcatcatgccatgagggtagccaatgaatatggagggacaatttcttagtgagaatttgtgtcttgtagatgttagagtggaagcataggctaagcatagaaaacatctgaggtgatcataagtaggt

SEQ ID NO: 46017 - DNA, 1166 bp, Cannabis sativa
caaacaaccgatgttgagagccatgacaacaaccttagagtccgaatggactttgatctttgaaacattacgctgacgggccacttgcagagccaacagaattgcaagcaactactaatttgtaaagtttcaggatacaatcaattcttacaacctaggccaacttcttttttggcttacataaataagtataatctgccactccttaccatagaatggatctacaattagagtttatttgcttagacataagtataatttgagcccaataagaatggattgatactagcacaaaattaataagtgtaatattctagataccatattctctataatctctgaacattccatatatttgaatctgagtctctttgaacatatcaaaatccccatatatttgaatatatggcagccgactttgaataaaattggaagcatctaacaccctctgaacttcactttgctccattctaaaataatagattgctaattttgccttactcggttgcaatcctgaagtttgagaaaatagttacaacctctaaagcagtaagtaaatggatctaaaatcatctttgcaaaataataatacatcatcggcaaaataaaggtgatttaatttcaaatcccgacatcgttcatgaaacttaaactcctctctttgtcccactttcttcgttttccttgataattattacattccaaaaactaacaaaagatgagacaatgaatcaccttattgaagatctcttttactttcgaaaagccatggaattgaccattcatcatcaaactaaatcttcgagttttgatacaaatcattaccagctgaatgaatttcacaaggaatttgaaagcatgaagctccactcgattgtatcataagcttttcttagatctaatttaatcatacgattcagcagagaattactactccataatgtctaaccaaatcctggcagaccatcacagtatatgcaatgaatcttccttgtacaaagccactctgattctaataaattaattctagaagcacctcccttagtcttgagcaaatcaacttcgtggctactttttacacaacattgcaacatgtaatagtatgatgctcacttatatttgtatattattagtagaaaataagttctattttcaaaaatatacat

SEQ ID NO: 46018 - DNA, 2879 bp, Cannabis sativa
actttcagcataatccaatcttgtccagtctagtccaatccttttcagtccaatccagtccaatcctgcgtaccaaacgggcccttagggtaatgaaaaaaattaattcaatgactcctccagataacaactactgacgtcttctgtgggatgacggtcgatgatttcggccacctccgccaccttcgttcctcttgtggacgatcaacgatttcgaaccagcctaccgtcttctgtgggcgcatatcttaggtgaacaacaactcttcccacactcgtcccttagtcgaacggcgactcaatccaatccgccatgtatggttgataaggtgcccaaggactttgccatatttggagaatgtggtaatggataagcatggtgattgaatatggcaaagataaacacacatgtatgtttctcttaatgcgtgaatttgatttatatttcttttcatataatagttacgactgtaggaaattgatatgcctatactaagtgccatgaactcattcatgttaaaatcaattaaaagtcttactcaaaaatcatattggtattgtgatactctcaaaattatatatccttttactttttgtttattctcattttttattctttcttgtttactttattttgtgtgcttaaaatatttctctctttatgtatcttttgtgttgttcaattgaaaaccttaaatatttttttctttaaatatacaattatcaaatgtctcagtgcttcttgtttacttagagaaactagagtattcatgtctaatatgtgtttttctttacatatacaattatcaagtgtctcagtgcttctttaataaatttgtgtgttcatagaaagtatttcatcatgtcatcaatgatcaatgttatcaagtatgactgaaataatatttataatcaatgaatctagttgtcatttgatgctaaaagtggaaattattgattggaaaagaacttttttgtagttgctttaatattagaaatcaagcttacactgaggtcattaacaagattataacagcacattgccattaccttgatgttgggtaattacttgccacttaatttatttttcattttgtgatttgaatatttttattatgtgattttgattatggtattgtgtagtgctggaattggtttgttgtcattgatggttgccagggcaatgggttttggagcctcaatgcaaaaggagaaggtaacaaacttgtgagtctttccttccaatggtaaagataatgagaagagtatgaggcttaatggtatggaaaagattcaacaaacgctttgatgaacttaaaattggtaagatatatcttcacaagcaaatgtgtttctgagtatacagttatgttaatttgtatatactttgctcataattggttgagttgtgtgaattgtgatatctttattttcttcattataattgtttaaattgaatttctgtgtagacaagtgagatatttgactaggaattattggatgaaaggcttataccttctctacaacatgccatggaatgttagtagtggaaaatctatcagcaattccataccaagcaactactgatggccaagtgattgagtccatcattgtagttgtactttgtttcaacactttatctcttgtcaaattcttgtatcaaaaatgaatgttaaaaaaaatgaaaaacttaattaactgaaggcaaaacatgccacttgatatgtgttattttatttccattttgattgatgattttgaaacaattatctcagttatgttgcttgatataaattttttatctttcttgagctataaatatttaaaggctttcatgttttattgtgttctagatttttgtttcatcatttcatattcaacctcagttggtagaaagctcattcttgtggaggcttcctgattgtcataacaatgaagcaaattgacagtgttattcaactggtgttgatagtatgttatgtgtaaagccacaacaatatgcttatcgttgtgatacaatagagaaagaaataaaactggtaattaactatatcgtttgatcttcaataatgttcttggaattagacaaatagtttatttcttgctcgatttaaaatctacctaactgacggaacccttcaaaatttttgaaaaaggtcagacagtcatggagaactcaatttagtacaaaggaactattgattgtcaaattcatgctaattataaaataaactattaactccacataataaaatttatcacgacatgactttattgtgtaattatagtgcttcgacacacgttattaggtaaacttcgtatcataaaataattgtgtaaacgtcgtgcctcaaataaagtaaaataaatataatttatcattaaaaagataaactattactttaaaataaaggtaaaggacatgttttatttagataaacaccgtgcctcaaataagattaattaaaatatatttattattaaaaatgtaaactattacattaaaataatgtaaacgatatgtcttattcaggtaacttacatgccttaaataaaataaaccaaaataatcattaaatatgaaaatcactaccttaaaataaggtaaacaacttgttttattaggcaatcttttgaccttaaataaggtaaacaataggctttatttaggtaaacacattgcctcaaataaggtacatcaaaaaaaaaaaaaattatcagaaaaaggtaaaccactactttaaaataaggtaaacaacatttttttttattaaggtaaacaccctatcttaaaataagataaacaacatatcttattaaggtaaacaccttgcttaaaataaggtaaacgatacattattaggcaaacttcctgcttt

SEQ ID NO: 46019 - DNA, 758 bp, Cannabis sativa
tcaaggtcggccctgaaatttgttggctttaggaaaataaaaattatcaggccttaagaaaataaaaattattgagccttttagttaaattgtatatgatatttttgaaaattattaaaaaatatatatatttttaaaaaagaaatatttttttttgggtctttgagctaggtaagctctaggcgcgggtctaatttatcttacctcaagtccaaccttaattgtctttgagctaacctatacttccattgcaaataaagataataatattgttgggaaggtcactatttattttaatcaagaaaattaatcaaaaaaattcatgcatgcacattataaagttcaatgtttgaatagaagaaatgttatttaagtttttttttttaacaaagatgagtaatataattagactaaatttatgatgacaatacattattaaggagtatcacacaaatctttttattacaacatctaaaaattcaataattattaatataatgtcttaataattatatatcccctcatctgtctacctttatgattttttttgaatttattacatcattacatactaggggtgtacgtcggtcggtttagtcgggtttaggggtgagcaacggtcggttttgtcggttttttacacataaaaaatccaaaattcagttttccgtttttatggttcgaatccgaaaaccgaccgaccattataaaaatataaaaaaaccgaccgttttaatccacggtttggtcggtttaaa

SEQ ID NO: 46020 - DNA, 2621 bp, Cannabis sativa
actatttttattgttctcttagttgatatagcttcaggtataatatttgcatccccattttaggatttttttttatctctcttatttttctctacatttctcttctatatacgcctccttcatcttcttttttctcttattttttgttcttcttcttgcttggtctcgacactattctgaggtcatcaattgcaagccattccattttggattgtgttctagttttaaggtgctgtaaggtgcgtgtctctttattactattattttttgtattgttcatctttttttaatagctaagatggatagttggttttgtggtatttgtagccggttgagggttagttgattgatgattttgtttgaaccttttttgttttttggtgatggtatgagttcttttcttgtatataaatatatatatgtatattattgcatttagttgtttttacaaaaaaaaaaaaaaattaatgttataagagagagaggaatcatgtaatggaaggaggacttacaatattttttttgattgctttaaatttgatctttatatgtaacaccttactaagaacccatacgaatatatgatttgattattttgtgggcttataaagtcttttagtgtttcagttcatatgcttgacgagtttgagaatgggtataaccgcgtagtgagattaaaaaatcatgttaatgtgtgatagggtggtgatgttggggaccagcatcgatttagaatatactactataatgaatctcaagcttgtttggcccaataataaagaaacagctaaacagttggagttaaaagataagaagatagtgacagaaattgtgtgggtgtattttgtttagcatataagaatctgttcttactaaatatgtaaatattggggttaacgttgatcaactaaaattattatagtacacattaagaaatgagcatgacgaactagagcatgtattgtgttgtatttttgtagaaactagttttaaagttatcgttttgattaattatgttatggcgtttgataaaactagtttcaatgctttattttgatttattattttaataaaatgtctctttttttttttttcaaaattaagttggtactatagtatgcttgtttaccataatcttttattactttttccatagaattttatgaaaagaattctatcaatttaagtgtgggtttgataatttgaaactacatgataaaaacttttatattgtttcaagtaactagttattatgtgtttgtttttaatttatttatttcatgaaaatagtttcttcttgtttgatttttaattagtttttgaatgtaactcctttctgcaatttaattttacaagtcatttgttaagaattcatatgtaggatatgtatttttttaagtaactggtttttgttgacataactaattaattcaaaattactttgcataaccaatttttctatgttagatatttaattggttgtttactttgtggaaaaaataaatagtttttatgtctcaaaattttaattgattttttaagtaattagttttttaatttaatttgatatattattggataattagattttatgtctcaatttttgtttcctttttattttattgaataactgatttttatgtcttaattatttttattatttaggtttctttaggtaattcgttgatgtgtgtgataggttttttagttgatgtgtttaatagttggtttgttgttttatgtaacagttttaattttttttgttatttcaggaaactggtttcacaaggttcataagttcaaaactggtttcacaggtgagttctgtgatggggttgctccattttataatgttattgcatattttttattttaagtttctttttattattttgtttctaagttcgaaattagttttcacactaatattttgtttttagattattgttgtgaattgtgtattttttcaattatatttgtgagtatttttttttcatttgattaactgatgaaactagtttctattatttttattataatcatttatgttttattttcataatcttcactgttattgtgtgacgaaactagtttttgtttagtttcataatgttcattgtggttgtatgacgaaactagtttcgacttatttttttagtttttgttgaggtggaatctaatacctctagtaaaaatgcaatggaagatgttgctaaatatttcaagcgctgactttgagaagaaacgtcctccatattaagaagaagaaaaaaagtaatttcaagtatgtttatttttttctaatttatcttcgcatagttttatatgtttatttgcataaaagtgttttttaggtgtcttatatcagttcaatttcttagttgtttatttatagtttttaaaattggttttttttaataggaagctagtttttttaggtgttttatttatgttcaatttctttgttagttatcctaaataactggtttctgtgtataaatattaggttttttaaatgtagttgaggtttaagttttttatagttattttaagaaactggtttcattgttcaaaattttaatcagctaataaatgtattcgacttctgtgagatagatttt

SEQ ID NO: 46021 - DNA, 1496 bp, Cannabis sativa
  modified_base (277)..(288): a, c, t, g, unknown or other
  modified_base (1319)..(1323): a, c, t, g, unknown or other
tcttgaatagaaattctactgtatatggtataatgtcctaaaccattactatacttttaattcaaaattttaccaaataataatatgtataacaacatcaataattgtaaattgtaattaaaatcatcaacatcttcttaaattaacatgcgatggtaagtaataaatcttcatgattttcaaatttttttctctctcaaaaagtgtgtaattttatcttcattaagagggaaaaagagagaggaaaaatagtgaaatttattattattattattannnnnnnnnnnnttattattattattattatccactaatttatttttcaactttgacaattgacaagcctcctaatctagctaacaaattacatttataatcctccaacagactgaaggtttttctgaactgactgttcacaatgcaaaattttaaggcatgtggaacctcattctcgccccaacctctccaacttcggtggcacctccgttcatcggtttcaagctttgcctaggctcaacacaaggtgtgctagtaacattagagaagttaaaacccaactaccaaaccccaaatcaacttatgacgaagagatcagaggtatgattatcctaacccttaatttctcgcatgaagtcttttctaatcccatccttaatggtttttacatcattacgtctgcacaacacttaatgtttagaaaatttaaatacaaactttccagttttccttagatttaattgaaatttatagtgtgaacatgggaaatcacaactttctctatgattgtgagcatgagtctgaaggtagtcaaaggtatctttctagcatgcatatagggtgtgttgttaactctattaatgatcttcatacagtccttcaacaaactctcccttgttttacttcttggctaaattttggacctataaataggtatctcaattttaaaactttttccgaatttgttctctcatattgaacaatattgtcccacatggatcaaatgcaacaatattgagtcatatataagaacatggactactccactcatcaccaattggttttaagatggaaacccatgattctcaacatggtatcagagccatatccctaacgggctttcgatccacacttatccagatggttagccagccgcacgagatccagatgttgtaaagatgcttgagatctgatcaaaaataagtgaccaaatggcatggcttgtgataaggtgattcaagattggtgaacaaaaataaccaccatcttaaggcgggatattagagaaccttgtcctaggattaaatgtaaaagtattgagnnnnntataagaacatgggctactccactaatcacaatttggttttgagatggaaccccatgattctcaacatggtatcagagccatatccctaacgggctttcgatccacatctatgaaagagttagccacccgcaagcgagcaaaatggtactcctagccgcgaacaagaataagc

SEQ ID NO: 46022 - DNA, 1597 bp, Cannabis sativa
aggtaggaatattattttcaccttaacgtagagatatttattattttttagaacttataaataatttatatctcaactttatatgtatatgtatttatggaatacattttaacgagtattatcagtactaaaaaaatttaactatcaatattaagtttaaaaatattaatattatatattatatatattgaaaaaaaaataagtatggtgtaatttatttttatatataaaaaattgtatatattttttcttaaataacaatgcatattataattaaagtattttacctattttttttaaaaaaaattaaataatttattatacttaaacatcaaacttaaataattagttatatttgtatatttattttcttatagcgtataattgattataagtgaagttatcaaaatcgttaaaatattttgacaatcaatgaaaaaattaaattgagaaataaattagttggtgaatcaaaattgatcatatataaaataattatatttattaaataattaatttagaatcaattgttatgaaaaaatattttctaagtgtgaaaatatatggataaaatcggtgtgtgtcccttcaatggtatggtagtgtaatttgtactatatctacgtttgaaaagaaatttttggattaaaaaatgttcttattctttgtcaatacaaagaaaagtataataaaattgttaacatagcgtttattgacctccacttaaagttgaccaaatttcccaagttgtgaaaagtatctaagcttctgtgcatttaaataaatcaattaccatgattctaaacacttaacataaaatgactaattggctatggatagtactaactttagtactctttctagttggttatgttctaagaaataaaaccaatgagaagaagaagaatcttcctcctggcccgaaagggtatcctctaatagggagtttaaacctattaggagaaaaacctcaccgagatttggaaaggttgtccaaaaaatatggcccgattatgcatatgcgactcggcctaattccaactattgttgtgtcttcccctaaggctgccgagctttttctcaagactcatgatctttctttcgccactagaccggttcaccaggccgcccagtacttgtcgtggggccagaggaacttgtcctttggcttgtacggttcttattggcgcgacatgagaaaaatgtgcactcttgagctactaagtagtctcaagataagcacttttagagcgatgagaagagaagagattggtcattttatcgagttcataaaaaacaatgctacttctcgtgatggcggggttgcaatcgatttgagcgctaagattacaacatgtaataccgatatgagttgtcgaatggtgttcgggaagaagtactccgacgaagagtttgatcctaagggttttaaggaaattatcaaagagtttatgcacttggctgcagctcctaatttgggagattacattccttttcttgctccacttgatttacaaggcttgacaaaaagaatgaaagctgttaacaaagtgtttgatgacttttttgatgtgatcattgatgaacatattcaatc

SEQ ID NO: 46023 - DNA, 993 bp, Cannabis sativa
tttttttttttgtaattgatttattttaattctgatgtgatctgcgttattctcgccagctaagatttgtaatgtccaagaaaaattcgtaggatgaatttgactttgatggaatctagattcacaatgttgattagataaatcgggacatcatttgtacattttccatatgtgtttagacacaatttcattacttaatgagtttttgtatggaaattatttaataacatctctttgtattaagaccttttgagcttggttttgggtgtcatttatccctataaatatcacctaaacctacaacagaagattgacctcttccacttattactttcgtataattttaacaaagagtgtttcttttgtaaaggatagttgttatgctattttttggtgagtttgggtatctttgtgattatttttgtgtgaagtaaattctaaagtgaagaacatgaagaacaacctttgggagaatgttcatttaagtcttgcatttggaggaagcaatcacaactatctttgggagaaaatttctacaagtcttttatagggaggaagcaagcaccactatctttgagagaaaatttttataagttttgcatcgagaggaaacaagcattcatcaagtaatttgaagggacttcaaaccgtggtgtcttaatgtaataccctaaagtttaataatcggattagcaaccctaactaagttaaaatgttaatgaggaattatattattatataatttaatatgtggaactagtatgatttattgcattttaagatcctgttggtgtatcaggggcatattcgtaattttaacccgagaagggtaaaatcataattttataatatattgtgtttatggactatattattatatagtatgtttattctatctttctctaggtgaatttgacaagtcggcacggtgtagtcacaatcgagttttttgggccgaactgagctcgaggcccaaaatatattttcagaatt

SEQ ID NO: 46024 - DNA, 2005 bp, Cannabis sativa
ctattattgtaattttctatcattctttaactttgaagccaaaatttagcattaatacatacataaaatataaccaataaagtgaatatctccaaatcaagtcattgttcaccccaaatattattgcaatgataaaatcgtacaaatttcgttttgaatttattaaaaaaaatatttaaaagtagttgatactacgtgtttctgtcaagattaaatgatctaaaatttgagccttatatgtatcttgtttaagacaataacaaagtttgtactgacaaaattaaaaaaaaaattataattttataaacattaatgattatgccgctaaaaataaatattaaatttatgtcacttacaaacttgaaattttaagtacttgtgttactatttaccttattattaataaccaatgtagtcaacgtctctaaaccttccaccgacaatgacaaagagactgaacgcgagaagcaacagaaagatttggactcttaagttgaaaatgactttctttgtaataattttattcttaaaggtttttccgatgatcttcatgattattataactcgaataaatcaacaaacgaaatttgggaagcattgcaaaagcaatatgatactgaagatgttggaactaaaaagtaggggtgttcgtggtacggatggtgcggttttttaccttttttttttaaaccaacccgcacatacatttttctaattttctgaactgcacccgcaccgtgaaactaaaaaattgtagaaaccgcaatgcaaaaaatagtacagcgcggtgcgatttttgcggtttggactatcaccaaataattaaactattacaaatatacaacaaaccttgagcaacacttgtcaaaaacaccataaggcttgaaaataaatatgaaaaaaaaaagtttcaacaatacaataattagtgggctttgagttgaacattcacatattagacctaaataaatataaaaatttgtattctaataatgtacggtgcggtgcggtttgaaccgcattcaaaactgcaaaccacaaaccgcaccacgcggtttaggaaaaattcaaatcgcgaccgcactgtaaaaaatttcaaatcgcatttttttactgtgcgggcggtttgggtggtttgatgaatacccttaataaagagtatgttgttagttgctacctgaagtatcaaatggtagacaataaatcagtggaagtccaatctcacgagctttaaaaaatcgcacatgagattatcttagaaggtatgactttagattaacagttttaagttgttgtattaattgaaaaattacccccttccttaaaagattttaaaagcactctcatgcgtaagactaaagaatttttcttaaagagtttgatcgcctattttcatttttgtgttacaactgcaacaagacgggtgatatggcatgaaagtgcaagaacaagcctagcactactccgcaagctaacttgactaaaaaagtttttgtagctatgatttctgagatcaacctagtaagtggatcagaagggttgtgggtagacattgacgcctctcgctatgtctgctatgatcgtgctatgtttataacatagcacagctgctgatgataagaaagtattgttgggagattcccacaccactattgttgctggaattgaaaacatggaactaaagtttacctcgggaaagatcttattgctaaaagatgtaatgcatactcctgagatgaggaagaatctggtttctgggtttcttcttaacaaggatgggtttactcaaacaattggagctgatttgaacaccatcactaagaatggtatttttgtgggggaaggattatgctattgatggaatgtttaaattaaatgttgaaattaataaagtttattcttctgcttacatgttgtgtgactttaatgtttggcattctagactttgtcaagttaataagcgtaccactaagaacatgagtagtattggtttaatttagaaaat

SEQ ID NO: 46025 - DNA, 1544 bp, Cannabis sativa
cataatgatattcctaaagtcaaaaaagttattgaggatatcattgcagatgaggcaaaaaaggccataaataaagacaaatgttggctggaagaatgggcccgactgcattcagaacctataaatgaagagacgaagctagaaatctactttaaagtagtcattctggatggaagcactccaggtgctagcatatttggaagaggtaactctctgtctcaactgttctgcggtccacatctataagacttaggttacattgatcaaagaggatttgatccctacttattagaattagacaatctttgatatcgcatgattcattactatgatagggtagatgaaatggtagaaagtccaaaccatttcctttcgccttcctaatgtcttagagtaaatcattttgtcttgataaagagtttaggtttcttccactacggtagcttattagaccgagaggatatttcgttatttacttaaggggatccaaaatacagtcgtggtaatagttggattcagatttgagtcttactttgtttgttgtttaatgacttccatgcttatgatactgcttccatatatttagtcttcatgttttatttgtaaagaaccctcagactgtccaaatgggtgtactcgaagactttatgaatagcgttgaagtccgaagtgaggaggccagaaaagttgccaaacctaccaagcggacaagtaagaccaaagtatcttcttaataacgaagtaaagaagcagcacccccagtcaaggtgttgaaggttgtttcagatattcgtgtcctgaaggctagtgagtctcctgcccttcaggtggaaccactacaataggttccacttattgaacaacaaattatctctgtcgaggaagatgaagaagatgatggtgagagagttgtttttcccaagtagatacctagttccactcttgacaaggatgggaagaaagctaaagtggatgtcatcaaggagctaaatcaatgtcagaagaacgagagagaagaggctgagcggaaggaggctgagaggaaggaagcgaaaaagaaaaagtcagagctaagaaagagttcctggatcaataaagagatttataatcccaaaaggactctagacccaattccaaatcaaacgttcaaccatcctccaggggtatgacgcttcctccacttccttcatccacttcgtcttttcctgtcgaccacttgagcagatgaaagaacatcaaatccaaatggaagaggcaattcaacttttcctgaagtgaaatcaactgagatttaacaaagaaccaatgtaattgctttcaaacccagagctaaattgttcgacaaaaactcggttactgatgctcatgcttcaatcattgattgcttagcgatctcataaaatttctagccgacgattggaagtgacttgacttcgtttgtagcggatctatgggagaaaacatgtgacacttactgccaactgggtgcagagaagtgggctacagtagccaaccaagatctgactttccttgcttattctctt

SEQ ID NO: 46026 - DNA, 2146 bp, Cannabis sativa
tgatgatgataattattcggttctgcccaacatatctctacataggaattttgagataatagtgaatcttgagagagtttggatcttcattaactttttacagtggctgtatatggtttatggaaatgcacaacagaaattgagctggctggccaaaagtacacattcatattagagagaaattatagactcgagagagagagccaaaccaaaagataggtctgtttgcagagagagaacatgggtatacgtacgtaaatgaggtcgtataggtggggactattcttagatttccaaatcttttttgggatcaagccccaaaacctatataccccacacacacaagactgatcatcacgtgatccaaacacgataacaccacactactcactctctatggatattcatgtgtatttatatatacatgtaaatatgtaaatatgtgatcatatgtgtacaaaagaattagtaccaccaccgctaattataaattatatgttacaattcatcagtacattttataacatacttcaaaatttatttgtaataatcttcaatcaaaaacggttttatctacattaacatatataaatattgagcttattttgaaattggttaactcctaaccccttagtacaaagagcattattttcatatcattctcattagtgtttttactctatcttttgaaatatgttaccaaaacttaactaacttaactttctctattcggtaccatacatcatcatttttgttgaaatatatcacaaaaatctcattttttttttcgttcttttaaagttaaaatttggattttctcgactattataatcagtcagctaatgtattgatgtcagtctctataatcgttacatattcgactgtcgcaaaatagggtagaataggcgacggtggaaaactatcaaaaacaattaccgatgagttaaaactgtcagcaatagtggagactatagcttacggtttaaaaccatcggctatagtatagcctacggtgtaaaaccgtaggttacagtattatagccaacgattttaaattgtaggtgttgagtcgaaaagttggattagacttctaagccacatccactcactatagattggcaagaataaaaaagtaattaattaattgtaagagatacatgaaatttatagtaattcacttcttgtatcgcgagggtaattggagctatgtctagtttgagtttttatttcacacaagatggtattatagaaaaaagctaattgttagaatctccaatttcaagagagaaaaacgagagagagaagcttcaacttgttagtagttttctgaaagtgaaaaatgagtttaaggagctctccttttataggtgaatgagacctacaaaaatagagaaaaaaaaatataaattagatgtttttgaccgtagatgatgatctaatagaaaaaatttgcttctggtggtgatggccattcttttggagcccggcaggtcccgctgcaggtaacccagggcttattttagtaactcccttgagggtaaattttggtgtcgatagcctcaaagttgtgattgaagtgtgagacatgacttgatagaacattgaattaacttcaaaattcaagttcaatcgcatcattcaatcgcatcaatcatcgcatcaatcaaacatcaatcaaatcaaaatattgagtgagttatggttgttttactgaaggtagttcatgacctagcgcccaggttgacatatgacgtcaacttggacaatgggtaagtgtaaaaacgtccaagggatgtactttaagatgcctaagtaatattttgacatcacttagtttgtttctgtattttggtgaagctagtcacctgttcatggatgttgctgtcatgcgaaaatgagggactcaaaactcttcagttctgagagagtttctcatgttggaaatgagaaatgcaaagttatgaatttgacttctctgacttcatggatcttagttattgtgaaaaactagacagacggtcaaacacaatcataataagataggcagaacccagtgcaccacgctatttgtcaacctgggtgctgggtaccctattcctgagctcctagtatcttgttttgatactttcaaggttctttcacttaa

SEQ ID NO: 46027 - DNA, 2526 bp, Cannabis sativa
  modified_base (1516)..(1517): a, c, t, g, unknown or other
  modified_base (1964)..(1964): a, c, t, g, unknown or other
aaaaatatctgaaatagagtaggcaaaaatgtgagtaagcagcgtaaacatagcctccacatgttcttcatcttctttcccaggtccaccatcctctcttccctttccaaaacaccttttacctaacaacattctctttaacactcccgccacaaaatgcagtgccgcaattctcacattcaccactcctccttcactgctcttcatcgttccattagctattatctggttataaacaaagcgaatgagattatcagcttcttcatttctcatttcgagaaacaaatcaagagtagaacgcttcaaaacatgacacagaagaactctcttcatcttcttccaatggtcgctggagggagacattacagtggttttgtaaccacgagaaatcatacaagtcaccacagtatcaggtcttgaagcaaacaccgcgtcatgtttcttcaagaactctctagctatctccggagaggtaacagtgatcagatgagtgtttgctcctagacggatacatgcaatgtctgtgttcaactcctccataacacggtggagccacttaaatgccggtttgtttagcatcatgctaacaaagcttccaagtactggccatggagtagggccaggaggaagattagtagtagtagtagttaacttgttcttgatagtaaacaaatatttgagtagtaacaagaataacattgtgataagcatgacaataacgaaagtattataggtagcagtacaattagagagagtgaaacctttcattattatataatatagagatcgagagagaagaaatgagaagtgttgtagattatttatacgtacattatatcatgaatatatatatatatatataatatggattaattattagttatatgataaggaaggtttttcatacgtaggaggtgaataggaatagtgatatatagtgatcaatgaacccacgtataaaatacatccacaaaagaaacgtattttaaattgacattatccatttcttttttttcattttagtataataattaatctgatcggaaaattctacaatacagctcttaaaattgatatatatattgatatattcttatttattttggcatccgagagactttttttggtccaattttttatggctgtgttcattattttaattatttaagacattttataaaattttgaaaaattcaaaaaaaattatacgcagaaaataaagttcgaattgtctattgtacgcgtgaatcttttattttatacacgtgtgaaataaattatttgaacattattttttatattataaattattcagaatttttcgaaaatttacaagatgtcataaacaactataatgctataaataattggagtaaaatttacacgggtgcatcagtgtacacattttatgagggtgtattattgtaaaagagcattgctattatggactaatagtacccaacaacttctataggtggctgtttaacgcctaaatgtgacttctactagcggtggnngtagtatagatcgggcggtcaatttcacaggaatgtgattatagacaaaactgttagtagaaaaataaacacaaaaggttaataaaaagtaacaaataagtaaccaaatgagtttggagatttttattttggtattaaatatcaaaagaaagcaaataaaggtgtaattaatagtaaaagagagaaaggcttcaagaatcatccatatgcttgtttagctattttatactcctttgattcacaaagttgacacaaataatataacattaaagttcattatattttgagtatacaagttcttgaaaataaaagaaataatttactcttatgtaaaacttagaaatgacattatacatcaagcggtaatgtaataaaagattaaacatactaaacatcaatatattatttttactaaaaagtaacacataaaaagagcatgactaatcntacatatttttagtaaaaataatgacaaagagatagagatggagatggtagtgatagtgaaggaaatgaacattattattacttttattaatttttagacacatagggagaacatgactaaacatatatatcatttaaccaaaagtaaataaaaataaacataaaagatagaaatgagcaatactatccttactataatcactaaataaaaatatataaaaagagcatgattaagtctatatatttagtatacatggatgaagaatgtaaaaataaaagtagaatataagaacttgcattactcaaattaatatcacaataagtgaataatagatacaaaataatctcacgttgcatatagagtcatctctaacctttcaagaaagattagactattatgttcatcattctcataaaaactttagaaagaaatatgagaaggaaagtgaagaaaaatttcgctataaattttcttacactaaaaattatacatcttacaaactaaaaatgagatcatatttataaagttacaaaaaagactaaaatacaaaataaaaataat

SEQ ID NO: 46028 - DNA, 2707 bp, Cannabis sativa
  modified_base (899)..(900): a, c, t, g, unknown or other
  modified_base (2659)..(2660): a, c, t, g, unknown or other
atcctctgcctcaattccaactaagccaaacaacaaaatagagtcaacattctttctcataatactcatattaaaacaaaaatcaaaactttacccaaaaatttaaatacaacccagtcatcttagtctccaaagattcataatagatctagaaaacccttaacaacaaaaattgcaaagcaaaacgctaacaatcttccaatattcatggaaatgaagttaaccaaaaataagctattttccttgtatatacacagatataaaataacataacctaatataaattaacaaaacaaaaatctatggttccataaatatgcaatctcttactattattattacaactaataatcctcagatctgttattgcgaacagaacaaaaaaattgacatttgatcatacctgaactgagaatttttttcaaatcagtggcggaaggagcagcgtttccacccaaaacggctaacaagtaagcggcgatgatcttcatcttgatgaagttatcgagaaagagagctgaagcgagagagagatatgaggacgagtagagagagtgctttgctagggttttgaagattcgggcctatttataataccaaaccacaacgcaaaacgacgtcgttttagtccaacgttattatcatttattttctgctgaatatatggaattaatgttaagagcatctcgactgtaaataagttgtaaaaagttaaaatatagtttatttaataaaaaatgtgtttcaatgttgtaccaataaataatgtgaatttgacacatagtaaattttgtgttaaatttagcacaatatttattatgatgtaaaatttataccataataaatgtactatttttttatttgtatttatgtcttttttattattttattagtatatnnaactatcacattaaattatgaaacatttatattatttttttattatcttagatattaaaataataataaaattgattataaagttattagattttatttttttaaataaaacattaattaaatattaaattttacatcaaaattttgtaattgtacattagatcataaagctaaaatttagtgtagatttactacaaaactgctttttgtgctaaatattacacaatttttgcatttatcattagagatggtctaaaaatatgagttggctaataaaatgtccatgccacataattaatggaggtgttgctactattttctattttttttttaaaaaaaaaaagcataagaatggagaatttattcaaacaaaaccaacaatggctagagcaatagtttacacaagataattacaatatctgaccgaataaggtgatccaattttttaagtctagatttagccttaaccacctatttaatggaattcactaaaaacatgaacattattacatctatcatcaaaataacaggtattccgattacaccacaacatactcaaatcttggctaaaccaacgaacccatttacccaaacaccaaattcaagcgaccaatgcaaaatccccaactaaaggttaacagcctgaaccactttttgagaaaactagaaagtaaaaaatagatgttgatgactctcttgctcaacactacaaacgggagaaaaaatcgaatcaagatgcataacccgaataagtttatctcttctaagcaagttttcattcatcaattgccaaactatgaaatgatgctttacacagagcggggaattggcgaggagtgctcccccctgccttattattacgatacttcccctgttccaggtcccctgtttcacgactgttacattgaaccttcttggttctgtttcgattctattaagagctaagttagttaactcaactcattactacatatatatatgtactctatcttctcaataagaatatacatttatatcaataaagatcacaaagttgtaatagctttctttcctatactctgttttttctcatatggtatcagtagaaactattgccactgcatcaatggtgtgacccaccactcgtcctcaagatggtgttcccctatccacaactaagcacaatccattagagtctaatcttgatgcaacttttgcacaacctgtcattgatacctctgttgcacctcgacgaaaccctgattcaagatctcgaagccagaataatcatgataatcttgaactagctcactcttcctcagatctcgttgctaatctttttcaacctcctgttcaagctcgtagaacttcatctcttaatcgattggctcatgaagacgtctcgagtcctttctttctcagcaccgcggatcatcctgggttagtcttggtttccaccatccttaatggcgccaactacctgtcttagaaatgaggcattacaatggttgtcactgcaaaaaataattttgcattcatcgatggctctcttcctcgacctgctactagtaatcccctccttcattcttggattcgttgcaataatatggtcatgtcttggcttgtgaattctctttcttctgagatagcacagagtatcatgtacttcgatcttgccacaaatatgtggcatgatctgcaagaaagatttaatgagggcaatggaccttgttcttgggttttgtgccctaaataaaatacatttcaatataatcagatnnactaattaataaagatcagaaatttcattttatgttgcatggttcac

SEQ ID NO: 46029 - DNA, 2105 bp, Cannabis sativa
aataaataataaataagaaaaaagaaaaaagaaaagaaaaaaagagaaaaggaaagttggaaaattttggaggagccggcggcgccttcatacatcattacaaatatgacattttattacctcctccattattatacctatctatataatatatatattatcttcttaattattacaattaacatgtgatataatatctaattaagttcaaatggatcaatgatattaataatattaatattaagtgtacttgattaaattgcatcaattgaatggtattagattttttaaaaacttatgttactatagccgagtgcggctacatcctatgagaacataatatatgtatgtgtttattattattattattattattaaggcacccaatgtggactgttataaatgtcttaatttcattatgtattttttacatttaataattttattatgttttgggatgggaggttgtggtgtggtggaaagtctagtctatagtatgtgtactactgtatatgtgtgtgttctattattattaattatattaattgtcacgtgtttggcgactgcactacccacattactttcctagaaatatcatacaccataaatatctttccacattattaattattagtatgtgattttatttatttatttttggaaaaaaaaaatattcttcttatgtttgttttatatatgactgttttgagtattaattaattatttagggtgtaagagaatcttgaccacttatgttagaacaccccaaaacttttcttacatatttttttttggtagcaatgttcttgatgctattaatagtcgatttggttgttctatctcaataaagttttttttttcattcaaataaataaataaataaaatactagtgcgaaaattggcgatatattaatttttttaatttatttaatatatagtctaataatatatcactatgtgtttttgaattgatacttaatgactaaaaaaatatatgattgcaacaaaatcataagataaaatatttatgctactacttcttttattagggtcatataggtaataattataaatattaaagagatttcgccgcaaagatcctttaagaagtcattccacttctttagagcatctacaataatagtattttttaaaagtactaaaaaaatttatatcatctaaaaatataatattttatttcatatctctttcatgttattttaacactcttaattttaaaatacactaataatataatttttttttaaaatgcaataattataaatattctacatttcattaattgaatatattaggcgcccaatatattaatatatatatatataaagtgtaataaacatggtttattaattatcatttatcaacaaattaacccccaaaatatatcaagctatttaatagagctctcatttcaaacttatagtcatcatatttttcatgatcatgatgattttgttgaccttaaaatataaaagacaaaagttgatttgtttagatatgtatattcctaatgaaaaaaaaagagtattgatattaagtaccagtagtgtctagtacttttttgatatatcacgttacgattaactagcgatactccctaaaagttattatattaaattatgtgaaattcgatacttaattagaccaattgtgatactgacacataaaaaagtgctaagcaccactaatactctttagtatttctctacaaaaaaaaaaaaaaaaaaccttaatataaaggaccaaaaaaagaagaaaaactctttttctcggtgccttcgtgtgccactttattaattattatattcaaattgttataattccataaagataagtaattactcattattctcatgaaatgaacctccttttaatgtgtcacctcaaagaaaagtataaagacattaatttaatgtggtcaacaaattgtgtaaaaatttgccatttatcaaattttaagctaatcgacatgtaatttaattattatatttgttagccaaatatatagcacatctccacctatacatatatcaactaatatagaaaaagtatatattttttttattttacaatctacttcttg

SEQ ID NO: 46030 - DNA, 1472 bp, Cannabis sativa
taaattatgtattatttttaggtacggagaagagatgggagctgtgttgttgcaggcaggtatgtacgtggggctaatagcagtgacaagggtgtcacggggcaacatgtcgaagctatggtaccgtggggtgcgtgtggacaagaccaaccccttcattcaaatgggcctcaaattattagctgtttggtccattattgcagcctacgctgtccctttcttcctcattccatgtaccattcaccccttgattggctggacactctatttgcttgcttcatttgctctttcctctgtttccatcaatgcattcttgctcccaactcttcccattttgactccttggcttgccatttttggggctctttttgttatggcttttccttggtacccagatgggattgttagagctatttctgtgtttggttatgcatttttgtgtgccccctttttatgggcatctatagttagagttaggatttgtcttacgaactcgtttgaaaaagatttgttttttactagattgggtgactccaccaccaccacgtccccttctgggattaacaagctttgttaatttaatcaaactaattaaaacaaaaacccaaccatttacttaatttatttgtaatatatattgatcaagcattgtaaaagaagaaaaatatatctcattgaatagaatcatttttaatcatgtatttattctctcattagttttttctatttcctaaatatcttgaatatcagtcatacttggatatattatatagtcaaaggtggagtcagaaaggtatgattttttttttgttgttgttgttaggcagaattattcaacgtaaatgtaatgtttgtggagaaacttatatgtcagtcaatgatctttttagactttgattttgttaccaatttgatttatagaaaaatacaccattttatttgagtttgtaattaatttcttttaatggatatttcatgatggaatgaaatgtagtatagggatatgcccttcttggaaatgtcctcctaaattactgtcttggaatctttcttggctcttttctttcattaatcattcttttcaaactcttatttgatgtgataaagtatttgagaagtgttggtaaaccaaatattataactttttacttaatttttgttatcgaaaatacatgtgtttaataatttatttaaatttttttttaggctaattaatattttttttcctaaactttgacatgtaccgaattatgcccctgaacttttaaggtcgttaaaaatgctctctgaactacggagattattgaatttaaggactttttgtctaattttagtaaaaaaattctaatatggatgaaagttcaagagacatgatttagaacatgttaaagtttgatgggcatgattttgtagatataagtctgggagcatggtttaacacataaacaatcactgaaatagtaaaattgaat

SEQ ID NO: 46031 - DNA, 3732 bp, Cannabis sativa
aagtttttctttaaactcattgaattattaccaaattaggcgttattggtcattagaattttctgtgaatttttgagtttcgaacgtaatgattggtgactttctaacacttagtatccactacaacttctgtttcctgtaataaatatgttctttcacatcttatttgctcatgataacaaaattacacaccttaagaataagaactgaaagaccactttagtctagatcagctaatcaagtggttggatgtgcattgtgtataagtggtctggggttcaaaccccagctgggcaattaacaaaatgggtaattactaatggtttcttataaacataaataaagggctgaaagccaatgaagaaagctttaaagggcattattctgcttgtttatgttctgtggctacagagtttgatgaataccattttatatgttattagagaaaactataaagtaatgttttggaggaagttttcacaatttagcaattaaatttatttttatgttttagctcagtagtgatggtagaaaggggtttgggttcgaactttggacctctttgtttctggttcattatgtgtaccaagtgtgctagttgtaaacttgtgtataaaaaaatattttgcacatgaactgtaaaccactcgagccaagtatgatctccacggactaaacaatgtctatctattaatgttcttcagggtaagaaaatttggtgtatgcttgatttttgattgtatcatattcatgttattgttctttgtaggattctttatactccttttctccattatatggtttgtttattaataaaccccattttgttctttcacaaactcacaaatacactttagagtttggttatgctgacagctagcttgttttgaaactagatgagttttcactgtattctggatgtaaaccccattcactaatgttttcttcctctgtccactctttttctcaataaaggttttgtctgaagatttgcccaatgccattgctaaaatatccttccccaagtcaatgcgctggaattctcaggtttgtacaatttaaagttcaagttgcttagtgaaaacatgaatgttgaggtgttagtttcattttatatataattaagctaactacttgacttaggtttcacatgaatatattacagggatggagtatgggggttgggtttgttttggtttcttgggctttaagtatcatcatgatttttaggatgtacataactttttttgttcttcttctctattaatcatttctcaatattataaattataaaatattgaattaaatgcctattaggcattagctactactgatttgaggatacaaattcagaagctcaagaagtctattttgttgttagacaaattttagatgtggtcattgttttgctaatgaaccagttgaagattacggggataaatagtttagattttgaaattcatttcgagaaagcatatatgacaatgtggagtgagatttcttggattttgtatgaaagaagaaggattttggagtttgatggagaaactagataaatggctgttaaatgtttaaataaagaagaggaagataatctggaattgtggggtattggctattatgtgaacaatttgattgggaaaaaaatatgatcgtatcaagaaaaagagaactcgctagataatatgaaattttttaaaacattgggttactgttgaagattacagagataaatagtttagattttgaaattcatttcgagaaagcatatatgacaatgtggagtgagatttcttggattttgtattaaagaagaagggttttggagtttgatggagaaactagataaatggctgttaaaggtttaaataaagaagaggaagataatctggaattgtggagtattggctattatgtgaacaatttgattgggaaaaaaatatgatcgtaccaagaaaaagagaactcgctagataatatgaaattttttaaaacattgggttactgttctgctcaagagtgtaaaagagtttgattccttctctccctccctcttttttttttttttggttggtttgttgagagaatggaaggctttgttttatcttattgattttttagagttttggatcacgagtaaccatcaactatcagtaaatttgttaaacatagttggcaaatgctttatatatatccttgctggtgaaatttgttttattttcagatattgaaggttttagaaatacgtagattggtttccttttgctctacttttatttgataagtaacggatggcttgtgtgtacttctgtttttatgtaggttatgtttagcagacccattcgatggatattggctctccatggagatgtagttgtgccatttacatttgctggaattttaaggtaaaatataactcaagattttgttttccaatctttctttctctttttttttgatgtttttaataagattttattgtaatttttttttacatcacattgcacttgcaatgaatgctatctgtcaagtcattggcaatctttcttgtctgcttaattgagtctcacctcattgcgtgtgaagatgcattcaatctacataattattacgggctaagcccactatggtaaatgcatagcagatttcacctcagttacggaaacatgttgcagattcagtagtcatgaatataatttttgcttttgtgcttattacagagtattcacttgatctatcttatttcttattagttgacaatgttttggtgtttaatgtttttctaagtgtacaaattattgctcaactatgcatgcatgctgtctgttttggtgtatttatacatgaagatacaatgcttatctaaaaatttgtttatgctattacagcgggaacaagtcctttggtcttcgcaactctccttctgctacgtttatggtatgtgagaacttcccattatattaaatttctatattcattttcttttactgtagtcattgacctgctgtttgtttttctctgatttcatattaatccatttgtttcatattactttgacaaatggtaatatgaaactacaatattaagaacaatatcaacactcagccacctgtatgaaaattgctgcctctacctaatatacttggatgaacattattgcaggtagaaacggcagaatcttatgtggatcagataaaaaatactggaataaatattgaaattgaggtaccagattgtgattttggccttgtaaccttctagtgtttactttctcttgtcccaaaattttgttttatcagtgatgatacattgaaatcttttttctcagaaacggaaaaaaacaattttggagcagtccaatgcactagccaaaagtgtagagggatgtgtggtttttcaggaaggcttacttatcgaggtaggcgaccttttcatgttgatggaactttgtttggaatgcattcttaaaaaagaattatgtagataaggcttcgagttgtactattctcgtaaaaagaaaaaataacaagaaaacatattttaggttgcaaatctggttgaggcccctgttcccgtccttggagaattcaaagagtccttcctagagcttccaagtgatcttctgactatggtaagttagaattttactaattggttttcctcaccacgtgacaaaatgctttgtttctcttgtattacagtttgcttttctatgtaccatatttaatgtag

SEQ ID NO: 46032 - DNA, 1231 bp, Cannabis sativa
  modified_base (1175)..(1187): a, c, t, g, unknown or other
tcattttttaccaaaaaatattttatgcaatctggtagggttttctttgtgtatttttccaaccagggctcaccaatcctttcctgggctagggcatggccctagtcgggagaggagtgattttcatagtataattctttatggcggatctccatctttcaaaattaagggacgatttcgtctgtggcgtctctccctctgttggcagttttttcatctagttcaatacaatctattggtttttcattttgatgggaggcttcggtggggtgggctttgaatctgggttgatggctggtcggtgggggttcgagtaatggtttgacggtggtagggttagttcacagggtaggggccatagtggtcatgatgctttgtgggtgcccaaggctgtttggcttctctcatatgtggggtcgaggaaggctttctcaaatccaacagtgtgatcatgggttttgttgccattaaagaagagttgatataattggtgcttgtatttctttacctctgtttagagttagttttaatttctttacttttaatatttttgagtcatagatgttttttattattatttaataacgatgttctcacatcgtcatgcaagttttgaatagtagttggtattgctaagaaggatgactttgattctcgttggattgttggaattcctttcaacaattgcatagagtctagagaacgttttggtctcttctcttggttattaaatttggaagattcctagatcttaattgattctgtgtttttgtttcgtgctctggtcctttgtgatatggtctcataacatagttggtcttgttaattatttttcttatttattatttgaataatgttgttcctaatttttattagaagatcattggtaggtagattctgtcacatgttcatttggtttaaaaatctagtttacttcactcttctttgatgcttgatcactaataccttattgaatacttagttgaagttgttgttagattttcttccattttattgtaaacgacctatatttgttgattttgctctatgagcactacaaaataaataactacctttagtgatatttttttagttacaatataatttgttgtgacgattaaatgtgattaatttttagttacaacaaaaagctacttgtgactaaaacatagtannnnnnnnnnnnntgttactaatttagttttaatcataacaagtattgtgactaaaa

SEQ ID NO: 46033 - DNA, 1270 bp, Cannabis sativa
ggcgtaataagttgtttaataatcctcagttacagaataaatactaagtttaatttttgatggtaataatacctaaattatatttctggaacttttgtaaatatttaactgtcaagtgtcaagtcaatggccgtgtggtagtcatgattggtcattggaatcaaaaggttgtcataattttcttattagtatatttatattaatttttaaataacaaatttaatgacgtagaccaacttaacacttgatagtcatatacttaccgaagtttgagaaatataacttaagtatattattaccgtaaaaaattaatgttaagtatttatctacaattaagaatatttaaacttaagtatttatgctgtaaattacttaaaaaatatatatatataattttttttttttatttttaggtatttctgaaataattcataacctaataatctttctattatttatataatggatatataatgtaattaaataaataaataaataaataaaatgcttaccatctggactggtagaaggaaatgcattattgctaagtgctgtgagaattttataatgtcctctaccacttgagacttgaggaatagcacaaatgtcaagtcttttgttagcattgaaagatggtcccatgcatacatacaatacatctttttctggattttggttccacactggtgcgaagatgttgtctgggccttttgtctataatatataaattaattaatgttaatcataaataaacttttaatcaatatttacacatgaaatcacacattagaattttttttttatggaggtattcgttatagtactcacaacattatttttgtaaatttttaaaaattttgaatagttacaagaattctatttttgattttgtaaactattcagaatttttcaaaaatttacagagatgatattgtaactataacaaataccgctattaaaaaaattaaaaaaataattcgacgtataatttcgggcgtaaaagttgattaaaaagttttaattaagactcctcaataaacaacttatgcttatatataggttgtacctcatgaacaatacgcaatcctttgttatcggctacccacacagctttgaactcattatcaacaaaggcaagctttgagccatcttgagaaaatgttggaaacactcctgaaaccctaaacaaccctacatcttcttgtggggactcaagcttatggaattgtctttcgatatcgtctccactctatatcacatatatatatat

SEQ ID NO: 46034 - DNA, 2671 bp, Cannabis sativa
  modified_base (26)..(27): a, c, t, g, unknown or other
taaacacttattggtttaccgttgtnntgacatagggccaagatcatcagggatatttcttcacttgggttggccgacatgcatgaatctagattaaaaataagaaaaataatacaattaatattgttgtgaattgattgatattgagattaagatatggttaatattgatatataataaaagattgattgattaggtgatgcgatatgtcgggtgtcgtaccatattatgtacaggcgacagtgatatgagaatgtcagactatggcatagactgaaattgttattgggtttctttctagcggcgtaccttattaggtacaggcagtagtgacatgtgagtactgggcgtaggtacgggctcgtctgattaggcgatcgatatattggtgccaggctgtggcacaggctcacctgattaggtgatgcaattatgtgatatatgggtgcaagtttttggcacaggctcacctgattaggtgatgcagttatgcgatatttgggtgccaggctatggcacaggcttgcctgattaggcaatgcaatacaggattatcagactaaagcatcgacttgccttattaggcgatgtgatgtaatgaagatggttactttatgagataatatatataatttatattattaaatgaatatgatttctaatattggtataatagttttgcattaccaaatatatgtatactgatatttattcgtggcagatgccagaagtgatttggatctcatcttatgagtaatgcgtgatcgtttgattcttattgtctgagtataaataataatatttgaataataaattatatgattattgttattacttttcttgttgagtttttgtgactcacaggtgctatatggtgtaggtaaaggtaaaaaaaggctagatcaaccattagatgatagtcttctccagcaatgtacatattgaccccaccagcctatgtgatgagttgccaggaagtttcttgggctagctgtatctgttgtgtattttgattttgtgttttgaattgttgtcgtatatagtcttttgtaaacattttataacaaggatgcccagaacgcgtttttaattttgttatgatgcctatttttagtattttattttagccaagtttttaatatcatcactgtttttaatatttaattaatctattagcaataaactagtttattaaatctcacatgtggcgtccctatgggatagggcgttatagctgtcgttggccaaccagacttgctttgtgtagggtccggtcacccattgctcctttaatgctggccagacctacaaagggtagggtttggccgcccgcaatgcttccatggccagccagacctacaaagggcaaggtctagccgctcgcgactccccagttgattgatgttggttatgcgttgatggaagatagatcacaccaattgttggagtttggtggctctaggtgtctgaaataatcagtttgacttcacgaatctctattttgggtgtttccacccgctgttggtccttgtcggttgaaaattaacctctcggtgcctcgctccccttacggaggaagtgttgtcctctagccagcccagggtgctcctgctggtggctgatcggccataggctgtacaatgggtggtgatgttgagctaaagatccctggccggccccccatgctgttggttgtcggtatcgatctattctcgccattagacctttgaggaaaggtctgtcctccctctggcagagaagatttgtcctagttcctgaggaaccaagttggttagcttgtcgatagaccctttctgatctatcaaccagtcttccttgaagtggatctctaataagatccttgcctctcccttcgattctctggttgaatcaccttatcaaattgttggcctcttatatgtggtgatccaattctacttggtgagatcaaaggatgtactcctagtcatccatccatctcaaaaatttatgtctctgctgagtgaatatatcgcagttagtagcacctggttcttcagttgggcttgcatggcctacaacttctctgagtctggctaactcgagatcttctcccaagtccacatggggctcgttaatcgcagtctcaccaattattggtcctgtctcttctgcataatactggagatgagacccggttgctgttcctgggggttgttgcccacgagtccttccttcagtgagaggcgctaatggtgggtcttcccttggaggtagagggttgctatttggatccgtcgggatgctcatatccgtttggccagttgtagtagccaggcttgtggtgcctattgtggtaacaggattcaccacatttgcagtgttcatggggattccagttgtggctggaacatgagcattttgatctgcagtctgtgggtcttgagggagacatgaagatgcagatcgtgcgactggggttcttctcgtgttaaccatggcgtttgatcaaatacgatatccacgctctcaatgaaagcattaaactgttgacctcaaaacgtgatcaaccgacagcggggtcatgtggatctgatgcttgctacatgttacacaaatagaatgataaagaaaagaacacacaaattttttataaaggtttgccccatgtgatatcgcgtagtgatctact

SEQ ID NO: 46035 - DNA, 3639 bp, Cannabis sativa
  modified_base (3078)..(3084): a, c, t, g, unknown or other
ttaaattaaataattttcataataattatttaaaatttaaactaagatggaaaataaattttatttttttcaaaaacaatctaagttataattttatatgtattaaattaaaatttgtatttggtttatctaaattattaattttaattaaataaatatataaattaaaataaataaataagaaaaataatacttaagtcgtaaattaattgaattaatttaagatccacttaagttagtagtttttcatatacttattttgatagaaaattaatatttaagtattaaacattaatttttgataattaattttatgaaatactaaagtgatatgaaaattttatatttaggtagaaaattaatttttagacctacgtaaattaagtaattttgataaaaatttatactaaggttggaaaatgaatttatttatttttcagaaattccaaagatagtaatttttattaatatagattaaaatttatgcttgggatataaatttaattttttataattattttattcctaagttagtaattttataaataaatatattataataaatgacaacataaatagttgaataaaaatactattttcttcagataatgagttttaatttaaagacattcgatctctattatttgtcttacatgattattatttgtactgggatatatccctaataaatagtcatccattagataataaccatgtaacactataagatctcgaaagacaaatattttgtatattcatattttatagtaagctcaccctaatagtgactacttagaattgggttaacaagtatgaaacattggtagtagctcataaaatgagataaccttgcaatctgcccaatacgggacaacgtttgatttttaatttgatcgaataaaaagttgctaaaatagtgtcttttttagatgagctaactactctatttaactgatgatatctttgcaccgtgcccaatacaagacactatatatcatttagttaaaaatcttaaaaaatttgagatatgtttggttttagtatttttttatatctttcatatttaattatgtgttcaaaattttttgaatatgtgatttgaatttatattgaaccaacattgatttttgttattaatcatgtagaattattttcgaacaccattgttggtctaacttagttgattgtttttaatgggattcatccccaatagatggtcatccattaaacagtctaaaggtgttagatctcgaccaatagatgtttgtaaatacaaaatctagttgagtcatcacaaatagatgacaacctagactagtatttacaatactgaaataatggagaactaataaaataagagtaactttgactcttgcctaaacgaaacattattggatttttattttaattgaaatttctctttagttttcttcttatccttttcattaagaaattcttagaaaaagtacatcattagagaataaggtttataaatgtatgcttatgatattgctatattttcttccaagaaaatgagtgacgcggatgaacatattctaaatattctatcgagaaatgataaccaccctcaaatcttagaaaaaatctactgcttaaaaatgtttacatacaaggcaacttagactttgagttgaattagtattttagattctaaataaaattttaattttagtttccaaaatacattaaacactatgatacagctttcacaagtttttaatatccatttctttcattggatccaaatagtattaaatgtatggaatataagttttgaatttgtgactaaaatccatttgaactattctaaaaacatttgtgtaactagacctaggaatcacaaaacatcaaaagactaaaatgtcaataatatatctatggtatttacatcttgttcatagtagttttgacaagattctctgcaaagagaaaatgtgccaatatccacttggaagtatgtccatctgcatttgaacttataaatgtacattcaaaggtggatatgagtcatcgttaaatttttagatgattattctagatatttacgttatgcatagaaattttatatgtttgtgaaatttcaaaagtttctagcaatggtgaaaactagtaaggtaagtcgttaaaaatcttgcgaacaaataggggtgaagaaatatttagttatgcagttcaaagatcattaagttaaagtttgaattatatccaaacttacctccccagaactttggtatcgcattttgatgaaaatggtagggtctattattagttactagcagttgcctgagtccttctagggatatgccttggagacagcaaacgacactctatgtcgtcccacctaagtctgatcccaagacaacctcagaatgatagaatggtcatatacttagtgtacactattactagattcagggatgccctgatcatgaacttaaggaaggctagatttgccagctgaggtttgaatgtttgatagctattataaagtgattagaggtggaccatactatgctcattaagaagagaaagtgtttgtttcaacaaatactactcatataagaacatgactatatccgaatacaaagtagcaaagtagaggatatactagttgattcaatcccaaagtgttccatcatcttataccatataagatagtctcactgtctctgttgtattgacacaaccgaagagtatacctagttgtttacttactctggtgcaagcaacttactttagtaagatgctagagtattttttcaatgggtaaccctaaaggaagttatttgactcccatacatagagtatatttatctaaggaacagttttaactattccagaaaagataagagacaagaaaataattaagcatcaacagtgagaggcctcatgtatgctttaacatgcattagacttgacacccgttgtttagtaagagttattagtaggtatcaatataatctacgataggaaaagtagaagacaatcaaataaattttaagattaaggaggatctatatgttagtctataatccaggtagctaagtgttttaaggnnnnnnnacattgaagggtaaaacggtaaatttgtcccttctcaatgtaaaccgtctataaaggatcattgattgtttagattaaaataatagataattcatatcatatctatatttgatatattgagcattctatgtaatcaagattgcaattttgaatctatagtggagtcaggaagaattaataagctaagaaatttacttagtaaattttgaatttacttattaggagcttggttacataggctcatggtttacatattgtttgggacaatatcatatttagactcaattaattgatttaataattcaattagaattcgaagatagattgtgtcttatatgagaattttcacaaagtttgggcaattttgagaagaaaagaaaaatagagatttatttattaattaagatactttgtgggtctaattaataaatatatataacttgtattttttatttgataattatttataattattaaaataaaatttggcatttaaataattaaaagagaaatgtggtaaaatagaaaaaggcacattgtttcattaaattgaaa

SEQ ID NO: 46036 - DNA, 1847 bp, Cannabis sativa
gggggggggggggcacgtgggattttctaaagggacgtgcaactcttatcctatgtccttcgccattttgaacccatatgggaggccgattgtgtgttttattgtcagagttttgtagttgcattcatttgtctttgttcgacttgctttgactggtgctaaggctccttccgtttgatatttgagggtttgggacaactcaatgttgtgtatcttttagctttgtttgttttatcttttaggttgtttgtaataatggtatgttttgcaccctgtgtcttttatgatgttagctttgtgtatactttgtgaggtttgtccttcttttttttattgtggattttgagctttttacaatcgacgtgatttattgtttatttggtcatctcatggtgaaatttgtgcattctcgttttttcctaaccgattgggttttgtttttgtttaacctggaataaaattctattttcaaaaaaagacaacaaaataaaaataaatgcatcttataaaaaaaattgatttttgattattttaaacataaaaatttaaaattatttttatttttgagtttttgtttttttaagctatttttcttttttagatttttgagtttttgttttgaaactaaaaaaatacaaaatgtgttggttagtttatttttttcaaaaaaatatataaaaaattttgattcttaattttcaaaagtaaaaaataaaaatatttttcacttttctagtgaaaatattaaaaaaaacaactttttatacaacgcaccgtgaatatatatatgttatttttggtaagatccatccctttaatttagatgtaaatcatgtaatttaggactaattaaagtatcgcaatcatttctatttgattttgatatttattttaaattatttaaaatagtgacagcaaatactatttaattctgacatatataataaatataaatgtcgttgattatctaccgtgtgatcaaaatgattgacgatcaacggctcagaagatgagagggattgactccgtcgtttagtaacaaagagaagggactacaaaaagtcccctgtaatggaacgatcaggatccacagagaagagcccaaactctctctctctctctctctctctaggaaagcactcacagacctagtctttggtaccttctttcaaagatttttgttcacataagataatcctaccacatcactatcccttccctaactccatggcttgatttttttatttctcatttccttcatcatcttcacacacaggtacctctctctctctctctcatcaattatttcttattttcctttcaattttccgatgattgttttactttttctagatcggttctgttgacatcagtttttattttctcgtattaagaaaaaataatgaaggtcgactgattgggggaactatatcggtacttatttgtttgttttattttggtcaatttaatttgctgttattcttgtcaatggggttttttttttttctttcatatttgtttgtttttttagatttgtgtgtttgtgtaaatgtggttaaatcccatgtttcttattttggatcctttagttatttgttgttttagaaggttaaaaaaagcttatggaaattgttgtgcttgttggcatggtgggttaggtaccaaatagatccttatttgcatattctctaatcatagcggtatcttcatacctatttagtgcttgggaatattaactgtttgataggataattctcttattacttgagatacacttaatgatttaagagttattgatgatagtgttgactatgcatctgaaattgcttcggaaatgatagaattgt

SEQ ID NO: 46037 - DNA, 2160 bp, Cannabis sativa
actacaaaaaactgtttttattttttgttttgagaacataattttaaaaacaaaaacagaaaacattgtcaaacatgcactaactaactgaccaacagtcagtaactaaccaaataactaacaatcaaaatacttaaatcgtaataagtacagcttaatacagaaaattaaaagtgacttaactgtttttctaacacctaattagtatctcggttatgagactacaactatggtaacactttttcaaaaatataaactcttaaattatataaatgacatgacctactaaattgtagacggtttggagctttgtcttcttaattttatattatttagttagaaaacaaacgagaaggcaaagtcaaaactgaagatttattcaaataaaataagaaaaactctcacgcttgtcaattttgttatgatacgtaatcctatgattgcgattcattaatttgtgtgtacatatgtttatagtaaattgattacttacatgcaagaaacatgcatatatacataacacgtagttatcttaaacatataataatattgatctatcaattatcctccactaaaaaattaattatagcattgacctaaagaaacggaatatattcaaacaaattaattatttatataaaaggctagatgggcatgagctttgatgcaacacaaaacaaacaaaggcagtaaaccttttatatataagcttatggtgtgtgttttcatataatcatgttaaataatcaaataataagcaaacccatatcttcgtttcttgggttctcttaatattaatttccttctacttgcaccaaaaacaagtctcagctcaagaagttggtaattatatataatcttaatctcaacaatatttgatttcatagatagcagtgtgtactgactattgatatggtttttatatacatatatattgacatataaatgcagaggatgaaagtgagtttgattatgtgaatgggagtgagaaagggccacaacattggggaaatttaaaggaagaatggagggaatgtaagcatgggaagttgcaatctcctattgatctattgaatcttagagttaaagtccttcccaaatttggaaatatactgatgaactacaaacctgctaatgccactattaggaacagaggccacgatattgccgtgagaaattaaatttaaattaattcctcattttcttttatatttatttttaatgggaaatttggtttggtataattaattaaagtacttgacctttgaaaacattatttatttttgccaaatactatgccataataaactataccataatggtttattctatgtatattaatactcgatatcgatattctcatcataaacataatatgtatgatacttatgcaaggttgtatgggttggtgatgctggatcggctaagataaacggcataaattacttgcttaaacaatgccactggcactcaccctctgagcactctttcaatggcagaaggtgatttttgtttctaattcctctgaattctttggcctatcttactaattctcatcaatcagtgccttcattatctagtaacaacaacaaattaaaagaaatactagttaaatacaatgctgtggtaattaattttttttcttcttacaccattgaaataaggtaattgtctagtattatatactagcaaggaggattatttgcgttttccaatatcgctttaatatataatgacataatgaatttttccaatctaatcctattctgctctcccaatattacttaaatatcattaatttctttttcctttacttatgagatttaatgtggttttacaatacgcaatacaattttatagttgtataaatagatataccttaacacaaccttatcttattttgttctttttcataataaccttatcttatttatactaataagttggcatataaatatataaaaggtttgagttggagctacacatggttcacgaaagccatgaggtcaatggagaaactaaaattgctgtaacagctctcttctacagaattggcaagcctgatagatttctcaccaaggtttattaatacattcatataataagcttctaaattcatatataaatataaatatattagctgaaacaataatacattaa

SEQ ID NO: 46038 - DNA, 1711 bp, Cannabis sativa
aggatgttaatgaaacatacatgttagtaatctagatcctggtaaaataaatcccaacaactggtcggccaccccttgccgaccatatggccggttagcttctagacaacacaaggtcggccagcctgcatcctaagtggacttggtaggactttcgtgcacaaccttacacgtggactacaagttagactgtgaattaggccataatagcccacggaagtagatagaaaatacctattattaaggggcgttttagtcttttgtattttaccaatttaatatataaatatctcttattttgtctgctaattagggtttaagctctcctatataaagagccttaaagcaaccctaaaaccctaagtctcatttgtagccataaagctctaagtaggataattcacttcatttttctctctctcacacgcctactatagcttctctctacacttgagatttgccacaattgattcctactttgtaaccttaagagtgctatatcaaattctacctatagtgatttgaatagtgttatctctcggtatcaatacaactaaaagaggagtaagtcatgacccgctaactaagggggtcaaacctctataaaaatccttgtgttctttactttgtagttctaattgtgtaacacatggcaagcatcagtttaatacgactccgctatcagttggtccatttctgaggtcaacaatagtgatgtaaatttctcttttgctctgttgaatcttctcttctttatgttttattctctatttctctttttttaggtcttcaattattgctgccggagacgaacatcatttggtgttttgagattgatttgtggagattaatcaatgaagaagagattgatcggtgtttatagattttgatcgtagagagaagagatcggaatgagagagagagagagagagataaatcgtagagagagatttaaagttatttattttggtttgtttctaaatttaaaagaaaaagcttgatttaattttgagaaattttcaaaagttgactaaaataataatttatttacatttttatagtgtcaggcgtttttttttttcttttttacttctttcttgttttgttttttacttttatacggtttaagctacttagggaataaagaatgaggcgcgtggacctcattttctgttagtgggaggaaggcacgccaagtggtgtatttataagatttcttattttttattaattaaacttgttaaaactttttttttttggtagtgagattttaaaatatttgaaaagtcaaagtaatattaacttaattagtttttcttaatttatatataattaaattagctatttaagaagaaagaaagagatataacgtatagtataatagtagtgataatttatatataaaaataaataaataaatatattgacattaattttaacaatataaaatgttaaattaattgttcaaattgttgactcaacatattatgatttgtatattaagtacacgtatctagtatattttatttagtttttcaatatagaagctaaaaaaaataatttttttatataattctatttaaaataataataataataataaataatattatactatttgaaagtacttgtctttttaaataaaaatcattatattatttatttaaatattttttgactttataatataaattagaattagcttatattt

SEQ ID NO: 46039 - DNA, 1736 bp, Cannabis sativa
  modified_base (1667)..(1671): a, c, t, g, unknown or other
  modified_base (1698)..(1711): a, c, t, g, unknown or other
aaggagtttacacaattggttcaagaagaatcaatgtcaatgacagagtatacgaccaggtttgagcgaatggccaaattagcctcaggtatagtgcctacagattacactaagaaggaaaagtacttgggtgggctaggggcctgtaaaccatcgagcaacaattttcactcaggttcactgacacgcccaaatttagaattaaggtaagattagtataataatattatatgtgattacatatttagtgtgcatatttatgaattcctgttagttaatatatcagtaatggcggtgataatgtacatagagttacactggatatcgaaggatatatgtttggcataagtattgattgatgctgtcacattggtacgcttagagtaccgactataagctaatattatggtaaatagtactatcctacgaacgttcaagactcactatgcgtgggatgcatgataggattataattgggtgtatggatgcctactaatcatccggattgtgttatgttatgatcatgcttttcttactgagtctgttgactcacagttattgtgtacatgtgtaggtaaagacaaagctaaggttgagtagcagtgagtgtgacagatgaagattgtacatattggggcggttagacctgaagtgtttgatctttggggtagcaggcgttatttggtagtcgttaggtgacaatttttgtagttatatattttgtaaaatagttgtaacttttaatgacgggatcctagattatgtaaagtttatttacttaaagtttaaaggttaattatgaaaagttttaattaaacacgatttttaataaacttgttggttagcaacaatttgcatagttagtatttaaatcacgataacacgcctaatctagtagggtgtgacaacactcatttgtggtgtggccttttgctctgtgatactcacattccttattctagtaatgttattccttcctctgtgcaacataggctgaggctttctacagtggaccatattggatgttgctctgtacgcattttctcgtgtgtctaccaaactggtatactatgtgtatttggggtcgtattccttcctcgacttctttgaagaatcaatacggttattgcctttacctcctctttttttttagtatggctcacattagattctacaacgtctattttttcctgttcgggagccacactgcacccgatctgtgccgcctggtacccaaaaaaaagggtatgtgtaggtgcgagaccagaggtagtgggtccataaaaagttagagaaaactaagtttcgagaagagtcaaagttggagccacaacttgatggataaagctggtgcatttgcagaaggggctagatactaagggactccaaaggattgtatataagcgtcctcatggttaataatgccttgggcctttgacataaacttagtaaatgtcttagctctctttatttgcatctttccccatagcaaagaactaatagtcaatccagagtgaagggccatcaactttatgtcatcactaactttaattttggctgtagcctccatcctcctctaaataaaagcctttaggctttcattttgttgctgtctgacgttgttgagagagccaacctattcgaaatattttactaggatctagatnnnnnaccaagtatgtttgattaacatcctannnnnnnnnnnnnnacaatgaaaataaacacataagagt

SEQ ID NO: 46040 - DNA, 3786 bp, Cannabis sativa
  modified_base (2474)..(2475): a, c, t, g, unknown or other
aacatacatgatacatggattatagtctactcacgaacacacagagataaacgtactattatcaaggatataaattctaaaactatgctgctctctgtgaagagcctcccgttactagggtcttgtactttgatgcatggtagattaatgtactggtcacgtgagtcgtgacgggaaatttgtaagatttatacttgaaaaacaccttcaattccactaaaatccaaaaaattgtttgagattgtaaggccatgtggcatcagggcccccactccagaacatgtgtgatagttgcttgtatgccttttcagatggatgaccagaatcaaagaagaagtaatcaccaacatcatcacacaactcaaactctttctctcctctcatcccaccacagctataaactcctctgtataaaccactgccacaacatcccatactaccatccttgaaaccttttcccagaaaaggaaaaatgaaaaatattagctaatgaatttatttaccaattaatgaaaggaggaaacaagtcatataggctgtataagagctttaccatatttggaagggtcatcaattcttttactcatagaagtaaacaaatcataaattgtgtagttgaaactattatgttcactctgtatcttttttaggactttaggaagtagtgcattgtgtattttagccagagatgtaatttcatcatagcaaccactttcattatctggtttaagcattttgagacttggaaggcaacccaatggtggagcatttacaaacccaaatttccttcctcctcttttgtatatttcctgatcaaaacaaaaaaaatatatgcatcaacttattaaccataacccactttcagatatacgatcatgaattcactagagaactatataaatatgtagtaacagtagtatccattacttgaagaacttgggtcacattgcctaaaaccatgcgagcgtattctttattaaacttgtcgtcggaaacagtggagttagctttaaaacggtcactgtaatcgttgacacccacgctaaacaagtaaacagctgcagagatcaatttcttggcttttgcagggcctagtgtttgactcaaccgtttcttcactttcttaaagtactttagttgagtatgaagatcaaccacctaaacagtaataatgtacccaaacagaggattcaaaacgaattaactcattatatgaagcttaaagaaggcctggaaaattaagattacttacaaaaccttggtgactctcaacaagagctccagccccaccggaggcaaagttcactccgtatgcatagttggaaaccccaggctttaaatatgggggaattaagggaaggttggcatattcacctaaaaaaagtagtaataataataatagtagtagaaagaaaaagatcatttttttagaaacatatctactaaataaagtgatgtattgatggatacagagttccttagaaatcttactgataaaatcagggattagacggccattggagaatctaccggtgggaaaacgaaaaaaagtcttcccataaggatagaagttggctctgtattcattagtagtgttgatgtaattgttgttaccggggtcgtatagtgaatcgccgaagacgaagagggccacgtgtttttcaggcaactggggatggacgacgccggagactgaagggttaagaaggagtaaagataaaaaccagagaaacgttaaggatgttaaccgcactattgtcatgtctcaatgtgagtcgctctttgttttgtttcattaaaacgctcaatgtgatctcatttatgaaggactagggaatcaggatatcgacgattagtctagtccattcccacggttttcatacacttctatttttagtctttctagctattttttcttttttcaaatcagcatttccctttttttttttaaaataaaatactaaaaaagaaataagaaggtattttttaaattcacacatattgtaagagggggtaaaacgtcacatggtttggcctatttggattgccaaaatttcaaccatattattatatactttcatacattgctaacaaaaaactataatttatagataaattaatcaaatttgttatgataatataatttttagcttgtacatgtagttaaagttatttgttatatatagtttcttcaattgtggtaaattagcgttacatttttagcgttacattaataagctatttttcatttttagaaaaaaagaacgaaatgaaatttatataaatgactaatttacggcataaatatttaaatttaactcttggttgcagataaatacataagtttaattttttatagtaataatacttaacttatatgtctgaaactttagtaggtacatgtccgttaactgtcaagtcaatatacatgtgtcatttttttattggtatatttaaataaatttttaaataannaataaaaatttaatgacttggactaatcaaaaactaccatgtgaccattaacttgacacttcataggtacctacagaagttctaaaattataacttaagtattattattgtaaaaaattagacttaattatttatttacaactaaaaattaaagttaagtatttatgctataaattaatcttttcctttctttaaaggttaaaaataaagacgtccttgaagatatagataaaatcaatgcccccaaacaaggtcgggcctgagcttaggcggactaggcccgggcttagggcccacccagttcagggtctaaaaaaaatattttctctttaaaaatataaatattttttaataattttcaaaaatactatatatttttcaaataaaagacccaataattacttttctaagatcaaggcccataatatatactcctctggctttactaatcatgattaatatcacatttcgttgtaatacagctgtttacttgtatacataggaggacctagggtgttgagggagggctaaagcccacctgaaatttaaaaatatgttaatataccgttcttattttttatatatacatagtagttaaatagaacaattagttaaaatactttaaatttacatgagagaccatgttttaaagtttcttatccctttttttctacgtgtatctacattttatttattaagaaataaatgaagtataagattcaaactataatcaaacttatgaccactagaataggaggatgttgctaaaccatcatttcacttaaatttagctagttatttattgttttggattatattaaatatataactaagcctaccctaaaattcaattcgaggtccgtcactgcttgtatatatattacttgtaaatataattaatcagatattaatatcacatttctggttttactcatctgtagtacttttatatattacatattttcctttgtactaagacaatgtgcattaatttacatagacgttcatggattaatacgtacatgcacacagaaataaaagttacttatttttataaaggataaaatattaaatactaagactatatatgctcctcctctatgtgaagatcctgccggtagggtcttgtcctttgatgcatggtagaatgtatattgggcactaaaattcaaaaaattgtttaagattgtaaggccatgtgacctcagggcccccactccaaaacatgtgtgatagttgcttgtatgccttttcagatggatgaacagaatcaaagaagaagtaattaccaacatcatcacacaactcaaa

SEQ ID NO: 46041 - DNA, 2090 bp, Cannabis sativa
tttttttttttgtataaagtgtaaacatttcacatatttttgaaaatttattatacaaacccaattgagagtgagagctgagaaggctagatagatttataattaactttttttttttaaaaaaaaaatatatatattttaaattttgagtgtatcgggtagaatgcatacccgctgatgtatagccttaattaaatttataaaaaaagaatcaaataaaatatgtttgtgttttgtcctacattgctcatgtgtgatttatgaaatttatattagaataattaacaattttgtctcctgaacttttgacaatattgattctgccccttaaaatatatgacttgttaagaatttttcctgaacttttacatttacagaaatttagtccttctgttaggtttcctcccaatattccatttaaatgctgacgtatctttgtaaattaattatattgcccccaaaactttcacaattatcaaatcgtaccccctcaaaacaaaaagaaaaggaaaaattcaatatttttttagtaaatcctaagaaattattttaaatcttaaaaaaatctttttgaatgattaagaaaattaaaaaagaaatcaaaatttcaagactaattaagtgatttaatttttttttattttttattaaaaaattcatttggatataaaaagaaataaattaaaaatttaattcttgtaaagactaaattttacgggaagaagcttgatcctatttttttcccctaataatctagatttgtttaagtaagcataacctttttttagtttaatttctaacattttttcaagattattttatgtatttattgaatttttaattattttctttattttttaagatatgtgtttataaatataaataagtttgattttttctttcaaaaatcttagtttggttaaataatttattgaatttttttaataattttagtttaattttttaagatacgtggttgtaaataaaataaagtttggtttttttttttagaaataacttagatttttataagtaaacttaatatttttttttaattaatttaatatttttatcagtttttttaatactttttattaattttctcagaattaatttaatattataaattttaaaattaattattttaataaaaggggtaatattttgtattagttaaaattcaagggtttaacaagaaaagaaacaaaatctaacaaaattgacataattatataactgttatattttaggaagaagtattagcaagtcgtatattttaagggcaagatcaagtagtgtcgaaagttcaggagtaaaaatactaattattctttatattacacttagttactaactttaaccccgtaatataattttataataattagataaatattatatttaatgtgattaattcgtatatataaagaattgtaaaaatgttttgattttaaaacgtgtttgaataaaaaataaaaagtaatttataagataactttgaagaagttttggtatcctaaattgttgagtttgaaagggattttgaaaaactatttttaaaattataataatttaaaatttttaatttttaaattattaaaagaatatctttatattatccaaacatacaaaaaaagaagttaattttttaacttaaacaaaaggaaaattaaagttagtacgttgtataccaattaccagatatatactatgcttatgccataattagctaaatgatctagttataataataatcattttgaattttttacatgatattaattcataatttaaatagtttatacacatgttattattaccttataaacttaatgtttacatatttcttacattaaaatgtaccactgatcactttcactcaaataatttttatacagtacttttttgtacatgcatgtactttcatttatatatattagttctctccaatatacttatattaatatatatgcccactttcatatataatttttgcattttacttcttctctctttttttgtgttttcacaaagttattgtattttactttcttcgatcaattaatatatattttgattaatatatatat

SEQ ID NO: 46042 - DNA, 2265 bp, Cannabis sativa
taattagtgggctttggattggaccttcacatatttgacctaaataaatataaaaataggtatttttatattgtgcggtgcagtgcagtttgaaccgcatattaacaattcaaaaccgcactgcaacgtgcggtttagaaaaaattcaaaccgcgaccgcaccgtaaagaatttcaaatcgcatttttttacggtgtggtgcggacagtttgagcggattgatgaacacccctaaatttcataatagtgattaccaattatcctttcattaaataggaatttgtaatgagatagactctgctagggttttcttcacttctccttagcctctacttgagattcccttctgatgaagtttcgccagccattcttagccttagctccgattgagctttgatgattcacacactcattttgatttcaatagtaatattttttgtccacttgagcttttctcttcctttctgtttaaaaccttttgtggttgcaggattgtcagagtctacagggttgccatggtttgttggtcgtctgctcttgtattgggtctcttccaattactacttaagtttgtagtgttgtctactctatttttcggatttcagtttgttggtggctaggtgtttttgggtcgttgggtctattccgttgtttgaggttaggacaatggtagttttccagatccttgggggcagatcaatggggcattggacaagtcgatgtgggagctttcggcttctccatcttgattgcaggggtgattttgggtaacatgatttgcttagtggatatagattagattgttgtttggtgttattttaattggatgttgttgttgaacttgttatgctttagtttttttatttaattgttagaatctgtagcttctaattcaaagatacacaattaatacataaaggcaaaattatggtatttttgcaaatttagttatgcgtctatgactataaatgataaaaataaaaaactagagtctactttgactcgatccaacccaacaccacacacacaagtaaaataaaaccctagcctaatctgagtaaacactcaaaatgttcgagattcaatctagaacctcattctccctcactgagagaaccctagggttccaaattagaaatcgcatcaaatcaaacacgaaatccatataaaaaatacaaaccaaatcaagaacacaatgacatatacacaactacacaaaataatgagagctatggttcaaggaaacaaatagaaagtagattggagacacatggtttgatctcagagttcacccttactaaagggccatgtctccgtcaagctcgcctcaaagtaaagtgacccaaccataattaaagtctatgatccttacccaatatgcaatgctcacttactttattttagaataataggttctgctcactcattagttgcaaacctctttcaccgatgtgtcctagccttctatgtcatagggtagctttacaatcctcaagaaagtttgttcctgtgttgtggcaattggatactggttcccctttttgatagtaaagacctccttccttgtagcccttcattatggtcatagagcccttgcttagtgtcattgtacatatttcaatctttctcacaacaccaaggtgctcttaaacacttatatatatatattaagtttctggctaagttaagtacaagtcttacccctattaaaaaccttgccacaccatcaaatactctaaagtgtacaatacctgaaccctcaatgtaacatgtttgatgattgcctgaaaaggcctttccactcatagattcctcgaaattagtaagtaagaatttatcattattcatgtgaaaagtacaatctaaatcaagaatccattcatttttaaaatcaaaggcatcaatataaatttttccacttttataactatcacttagattggattcttggtgtttttcttttattgacgctgaaaagcgcccaacaccaactcgttagattggcgagatgaataataagttttaagtaactaatttagagacacaaaagttatagtagttcactccccatgtcgtgatggtaatggaggtacgtctacttcgagcttttatttctcacgagatggtaataccagaaaaaggcaaagtgtttaagctctggcttctagagaaagaaactagaaagagatgctttgacactatgggaagttttctaaatatgaaaaatgagctaagggagctctccttttataggtgaaggaggtc

SEQ ID NO: 46043 - DNA, 2431 bp, Cannabis sativa
aatatgttggttaggttgggcatgacaatggattttgtttcaggaggataagttgcaacatagccttctgagtgaccaacaccaggcatataaattgcagacaaatatgattcagttggagaagaagtaacaatttttataccttcgcgtgtggttgtttttgctgcaattttaataggcactgctgtagaattaattgctgcctttttgagggattgctgctccatgatattgtgttcatattgaagaggaaatgttgcaaaaagtgctggtgtaacacccctaaaagagtctgctagtttggatttatggtggcccgatgcatcaattttcattgtagtggaatttttatttgctgatgccaaactcccaaaagtgccttcctcttcattgtcatttcccccattgatcagatggtcagcaagcagtgcatgagatgcatagtgatgtgtttgttgttggtctgaagtctctccatagaggagttttcttagttgtggttgattttctgagtgtgagggctggaatggtttcagataatgtgtttctagaaaatcgggtaagcaaagtccaagcatttccccttgagaaattagtgcgataccgatcataaccaaaaattggtaatgcagcccctttgatcttaggaccataagcagtgcgggttcaaaaccattatccacatgttctagaaaagtcgaacatttctgatatggatggccgaagcggccacattccatgcaccagtcaggcagtcgttcatattgaaatttaacccagaatttatctttaatttgttgcaatcgaatattatgaccccttctaaaaggctttgtcacatcaagttttactctaattctcaagaaaggctttgccacattcaaatagtcattatatacatctaagaattcaccaataatatctctcaaggcttttgccaatcctcttgttttacttaggaaaggtaacctataaacttaaacccaaaatgattagaatttgagatcagtaggagtaacactttgtagagcagttggcttataaagaacaatgtgatgattttagaagtgccatggttctcttatgagtacactctctttgtctccttcacagccaaaagagagcataattagattaggttgtttttcagatatacaaaccgaatagcgcccatcccaatgtactttcattcgcttctaaagtgtgcccaaatacaattgtttcctggtaagtacagtagcaaaaagggtgtgatcattggaggaatatgattcctgggtgttatcatcatcataggaaaaactacttcatcttcatctcaagattaacaattcctttcattttatttgttaaaggatccatgatagcagtagtaagattacaatggaaaaaaatagctggtatggatgcggatcagttaagaagttattctgtaataaggcttgaaactgataaaaaccgtaaccttcagatcataatggacaaaaaaattgccttggagcataaacgacagacactcattattatttttgtcaaatatttttatattcttaaattgataaaaaccattaaataaacacatttttcatatataaagatacagctagattttttcttaaattaatctaaataaactcattctcgtatcgtattcctaacagcaaaaaaaaattgagaatcttctctaaatctcaatatcatcatatttatgtaaggactttaaccaatctacttttattttttctctttattacgttgaagaatataatagttaaagtagattggggagataaaataattaatgaatatgactttaaaatcaatattcactcttttttgtaatgcaaatctttttaattttagtcattcaaaaatgttttgattacatttgtagttgtcgtagtcattattattctcccaataaatttattttatgagttatatatacatagaagggagatgaggtaaattttaagaaagagagaaacaaaaaagaaaaaaaataataggaaaatttacatgaaaaacacaaaattttaaaaatgttacccatatacctttataagactactcctatatttttacttttgatattattttatttacattagtacctcttacacatgcatgatattattataccacctccacacactatctattttctctctttttctatcttttttttttttttttcggtttcatttcattttttattgtaactttttgtttcaaacttcttccacaatcaaaaccatttttgatcaaaaataaataaattgatttcgtccatcttcctcaactgccttcctccatcatatgaccacattttttttcatttcttttcttctcttttttttttttgttctataaatgaccattacttggtcttcatcttcccaacacaattactgaaaaaaccttcaaaaat

SEQ ID NO: 46044 - DNA, 2663 bp, Cannabis sativa
  modified_base (1895)..(1902): a, c, t, g, unknown or other
aacttcccaattagaatataatttacttggtcataagtgtattcttggatagaggttctactgtaattgaaatcaagtataatagctttaaacattcaaattaactctaaaaatacggatacacaattctaaattttatagctagagtatcatcatctatgtaattatttttgcttggacactctaattatagtagattactcataaattagtcttacatcacaaaattgttgcaaaaataaatgaaatgcaaatgaagtggtaaatttgtaattttcttcatagttcagagcttttttttacaaaatataatttagggggaaaatctctacaagcaacctagtttggggggtgaaaatttcatttatcattaattaagtgattaaataataaaataataacaaaaattgatataattataaaaaataataaaatagaaaaaatagaagaaagctcctaaataatatcacttcacttaatattaatactaaaactaaaaagaaaactttgcaattcatgtatataattagaaaaggaatgtttctttattaatggtattgattacataagaattattttaaaattgagttatatgattatatatactaatgtaatattagtaacatgtattgttatatatcttgtatggtatacaactaaaaaaatctctttattttatttgttttattacttctttacaaagatattatattgtacattcttaattagcaaaacttttatcaaagccgccttaacccattataacctctagagtgtaatgatgccaaattttgaactatatacaatattttaatcatgccttattagttagagatctcttatattaagataatatgcaaaacaaattgtctagagactagagcaccaataacatttttttttcttttttaattttttggacatggttttatttaattcaataagtattattttatttatagtgcatctcattaacattaaatacatattttatattttgaattcaatccaatccgtacaagagttttaatccaatcaaatctgcaaaagtacagattagatcgatttttttaaattgattgcttttcaatattaaattatttaataattattaaaaaaatattttttttacataactaacaataaataaaataaattattgttgttttatgtctccaacaataaattaaaataaataaaataaaaaataacgaatttaaagaaaaaaattgtacatagaaatatttaatttattttaaattatatgtagaaaaaaaattatatataagaataaaatatacatttttatattaaaatgttaattatatatataattttttaaaatttatacaaatatatgtgaattgaatttgataggttacttttatacgttaattaacatccaatttgtcaaaattttaaattttcgaatctagtttaatctaatatgcacaagtgtaaatatccacactttgcagattgaattaaattaaattgtacaatcaaatttgattgactattttattatattcctacttttggagtattttcactcaaaaaaaaaaaatattcctacttttggaatgatttgaaatgtaaatttaatatagcaatttataatataaatttttatttaaaattaatattttagttttatttgtaataaattaataataatttaataaagaagaagaagcaaagccgttatcaaagtcaaagagatcctgcctataaaacaatcttaccaaacatttacaatttgataaaagctaaaacaatatatgggatatatgttagcctaaaaaatgtcctcactcaccgtaccaaacataataagttattatcttataatgagatatttaatttaattaattaatttattttattattattannnnnnnnttatttttttttttttgaagaaaacagaactttattcaaagttaaaaaaaagactaaaaccttacaagttcggtagaagaataacacaaacttattaggagatgacataaataacagctaactacacactgatggtgaaaggagcaaaaaactcaagactcacacagaaacatttaaaggaataaattccaaaaaaatccaaagaccaacaccaaaaaaactaactaaactaaaattcaaaaaataagtaaacaaataagatagaataacttcaaggaactctccaaaacacaaaaaagactgcccgaaagtccaaaacaagcagggcaaaaacaaaggactgctgctaacttcttacgagaaaagttccctaagtctcctattatggttctcaacaatgaaagagctaggaaaaggaaagcacatccctatagtaacaccgagtcccctctacaatgagagataatttttagtatttcattacacaaaacaaattaaataagagaaatttgcggcataaatatttaactttaattctcaattgtagataaatacttatatttaataccgttaaatgttaagtcattattcacgtgttattttttttattagtatatataaatttttcttttctaaaaaattaaaaattcatgactttgactaattcgaaattgacacgtgctaatttactttatatttaacaactagttataaaaatataatttaaatattattactattaaaaattaaatttaaatatt

SEQ ID NO: 46045 - DNA, 1052 bp, Cannabis sativa
gtattaaacttgagcttataaggggatttacacaacaaacttattccaatataacttgtaaagcaacagacaatttcatcatggctaacgtgataggaagaggaaacacgtggacaggactggccttaggcataagcaggttaggcccgcacctagggcccactcattttaggaactcaaataaaaaaaaatacctttttaaaaaatatgcatattttttttaataatttttaaaataccatttatttttatagtaagggctcaatttttttttcttgcctatagcccattttaattgagggccggctctacatgtggatgatgtacaagggtatgttttccaaagtgttatgagaattagtaacacaacaagagccaatttgcatatgagtttttggctctgactatagattgaaacacaactacttaatccctcttttagggttttgcacagttgaaaatgaaaagtttttggtctacaaacacatgcccaataggaatctccatgattacttacattgagttgaaagcaaagatgatatgcaatggtatatgagtattaaaatttgcatgggaatagctagaggattggcatggttgcatcacaagtatctctcgatctgtttatcgtagaataagctcgagatgttcctcacttgattcttactacgagcccaagatatcaaatttcgggattacaatcatttcaaaccatggagaagtaatgtttgtgtactcacagtgaagtgtatgagagtctgattttgttaagaaggatgtgtatgattgtagaaccgtgctgctcaagttgattactcagaaggaaactggttcctgctcttgctctgagttgtgttacctaaattagtatatccactataaaaattttctattcataataatcattaattctatagctaatttgttgcaagaaatcttaaacaaacacaaagttttgtaattaacaacattacataaaccattattataaggcactttataacacccaacactcataacataacaaatcattattgatgtcttgtctcaca

SEQ ID NO: 46046 - DNA, 737 bp, Cannabis sativa
gagagagagagagagagagtcgtagaagaagaaggagaaatatatattaggttttgtatttttattttagtttgaatatttaagtggtggtaatggtggtgggtggtggcaaaaatagtagtgttggtaggaatggtggtattgtggtggtagtggtggtgggtgggtatggtgttatggtgaaaacaaagaaagagagagagaaagagaaattaagtttattatgattattattattaagagttaataaaaaaattaaaatattttttgattttaatttattttttatttttaaaataatatacattaatataaatgtgatatgtgtacttttgtgtacatatgtacatgttcccgctatgttagatctttgttactagccacataaataaaatgataaacaaacagaaattgtaagacgacactttaaaaatgcaaccaaagcatgagtttagtaggttttcgtactagaatttaagtttagaaggttaaatgtaaataaatgagagttaagaaggtttatcagctgccaatcatttaaaaattatttgaagttttgcatcttactcatctattttaaattattttaaatttttcaaaatttgtgaaagggagctcaatcttctttcattaaattacatataatcttataactacaacttgttgatatctgccaacttgttcactagctacccaacatttttccttttaatatataaaataaactatacattaat

SEQ ID NO: 46047 - DNA, 2194 bp, Cannabis sativa
aacataaaatatatatagtggacaccatcattaaaattaaagaaaaaagttaaagatagtatgatgatgtttttacacaaattaataatgaaattattagtttaaagactatgcatggatctcattaccatgatgatcatcatatgtgataagaattctccacatatatataactaatattaatgcttttaatagtataaaacttattattaatatttataataatataataatataatatatattcgtagttaaaatacttaataatatgctagcttgcaatattttattattctttaataatttaatttttttagttactaaagtatccaaattattacttataatacaactacatatataaattattttagtataataactgcaaaaataatcatattatttgtagaattcaaaaacccaaattattttcttggtcctattataataacttgagtatttaatttactcgaaaactaaataactaactattaagcactaccaaattaacaatttaagtagtaaaaaaatgataattttatacaaacattcacatataatataatacattataaatgttataaacataatataatcaaaattaagattaatattataaattataataattaattgagagacttgcctgaaaaataagatgaagatagaagaaaactttggctcgagtggatccactttcttctccacttgaaattcttattaatagtattccaattggcattaaaaatcccattgaaatccatagaagaattccatgaactctaatatgagatatcaatctaggactcaactgaaaatacatatataatttatttaaaaaaaaacaagaagacatggatccaagaatgaacacacataatttataaattaaattacatatatatataagtgtgagtatatgacttgaaatcaaattatctttcttaatatatattatataaactaagtacctcattagagttgtttttgaggctcttgttgtgaatggtatcatcatatgaaatgcagcaaactaatggaagaaaatattggaagatagtaaaagaagctagcttcccaaaactcttcattctcaattgatgatgaaagtatacactaagaaaaacaaaacttctcattattattaatatatagagataatattatatatagccacattttctttctctctatcctctttactttacttttatgcttatagtgacttttttagtgacacactagacatatacttttagagaaaaaattaataaggtaaagtttttgaagagagatcattacattagttgcatttaattagttagagataaatataatttaaacattcttgatatatattaatttgtttatagttagctagatttaattgtatacttttttttttttttaatttgtaagagtattcatctaatttaatctgtattattttgcttagatatagtttatttgataattggtaaacatatttagaaagttattatgtaaatagaatcgagtgtaattcggaataattataaggtctaaggtatttgtttagctaggtaacacaataatataactagaggtaattaatattgagtctcactcaactactctttccaatttggaggtaattgtacccatgtaattgaaataattacaccgtgtaattgtaaaatattactattttcaaatgattaatgttattaaactatgttattactaatttagttataacataataaaaattcatatgcaattattatttcccatcgcttgcttgtgccacttgcatcaatctattgtacttagacatatgggccctgaagtttgttctgccttagtatagatccatttgtgatatttaaaaattctccgacagttgtgcctctatgattcttcttaagcatgtctcaagatccccatcttcttagtcatatatggctccgctttgttttcgggttaaatagtccgtaaatttagtcaaagttattatctaatcttccaatcgtctagtgtggtcatccatgagctcacatccacggattttgtcattgatgctgaacctgatgtctcatctacggggcttttcctttttacctttcactttgttctgctttgcattaggcgatccctgaggtccaccatcgacatgccatcttccgagtatctctttcacttccatgctctagtt

SEQ ID NO: 46048 - DNA, 1587 bp, Cannabis sativa
gagagttacaataaattaattgactttaatgacaatccacctaccccatttttcacaaatatcataacttcttttttttactttaagtaatttatctgaagcataagttctgagcatatatttaagtattgttcaaatagcgttgaagccataaaaataaaactaaaaggaaagtcattcatgctatatactttaattgcaaagcatttgattatctaaattgagtatgacaatgatggtgaattcgaaactttgagcaatctaaataggaagaaagtcatatttagatatctcctggatcttgagactaagcatcaagttttgtctatgtatttgtggttgacacaactcttcaaaggagaaaattttccctatgtgaagaaagttgaggcaatggcgacagatattgctgacttattggggaaacaggaggcaagaaatgcaaggaaaccaaagcctcaacagaaggccgattgttatgagaggccattgtcactcattaaacaatatgattaggaaagacacaataaattcataccacaaaaaagcagtcagagaaagtaattgcttagcttgtggtcagtgcttattatttgtagctgactaattcagtgttcaaaaccaatgaagtttagctagtcaagcgtaatctgtagtgctgtattttagttttggtgaagacatactagcttgtaaattgaaatttttgtagttgaaatcttagatagggcataacaacatgtattatcaaaatataagagcttgatattttgttctaggctgtgaatactgaatgcaaaagccaatgttcattaaacatggtgtcataaatgttaagaatactgtaaattttaatttagccctaattaattcatgagaattaaacaatagaattgtagtttaatggaagcgtaccggagtccatagaattgattttgaatggtatgatcttccaattattgcatcaaagttttctctctggaacttgagtttttttaatgatggggattcaagaaataaagatacgatatgtgaagctatgcaaaaaattgggaccaatacgtgtttattaataactgaataattagtaaattaatcttttttgactatttttaatttggcccctcatcaaattaaaacttgtctaattggaatcgacatattaaaatcatgacaatcatgctcttaagtcaaactttattccaaaatagaccacataaatttaacttatttatttaaggctaattaggatttttgcctcgtgtaccaaattatgccccctcaacttttaaggtcgttaaaaatgcctctgaactattgtttatgtacttaatcatgctccctaaaatttaatatctaccaaaccatgtcccttgaactttgacatgtactaaatcatgtctcctgaacttttatccatattagatttttttattaaaattggacaaaagtcattaaatccaacaatgtcaatacacatttttatataaacaattgtgatctcaataatttctaacaataaacacaattttgattggcaagtactagagaaaagatgttatttatgaaggccatagataaatggtt

SEQ ID NO: 46049 - DNA, 2113 bp, Cannabis sativa
tttaaattttagatttcaaatagaaatttaattttagtttctagatacattgaacaatatggtataatcttcacaagttgttaatatctattttcaatcaagggatcaaaactgtatgttaaatgtagggattatcatgaattttattctgtgaccagaatccacttaaactgttctaagaactctttgttgtaactaaacctaagaatcatcaaaagaccacaaccacaatcatacatatatggcatttacatcttgttcatagttatttttaacaagattattctctacaaagagaaaacataccaatatccacttggaagtgtgtccatatgtattcgaacatatggatgcacattcaggggtggatatgagttattattaaattcttaaatgatcactctagatatttacattatgcaaagaattttgaaatgtttgagaaatttcatgaatttctagcaatgaatagaattaggatgtggatgtaatataacgaaatagagccactttgaggtttcctatgaaatgaggcatggaacggagccacgaagaaattctgagagttacaaaggaaacttcaagctcatatgggtcatgggtcttcttacaaccacaactcatgtcgtatttgcaagtcttgctaatcaattctttctttctctgtattctttgatgtcccatcaatacttagaagagtacctagtaaattatcactcacatttttctcgatgtgcattacatcgagattatgtcctttgatcattcatttcgagaaaacgtctatgaccaatatatctaattttattgtttaggacaatagaaggagtgtattcattgcaagtggggcaccccatgtaccctttcgtgctccaactagacattagagcataagtaaagaaatcatttattgtccacaacacaaccgcatgcatgaaaaatataattccattgtatgcatctggggtttgaacatctttctcccataactgattcaagtatatgaaaattcttatttaaacaccacatgcaagggcattcagataatccaatatgatttatgccgttcctaacaactgtaacaaactcgttagcttcactttgaaactcaactaagtgtcggttcgtagtcatctaacttctatcagtcacatcttcttctataaagtaattaacaaaaaatttaaaatgcaaaaaaaaaatatatatatatatatatatatgcaagtgtcctaatctacattctcactccattactaaaaaggtaaataacatatcccatttaggtttgtaatatagatatagtacaatctatgctcttaagattgctttatttttgtaaaaattttggcagcgcctccccacaattctcataagtaagaaaactaatagtaagttcgtcaacttataacaacgtgtaaggagacgacataccaaaatctctactaatgaaataatcaaataagcaatagatcaaacattaagtataaaatagctcaaactatccatgggaaaaaagtttggataatttggagaagcatatttaagagtccttactgactcatcctctccaaaaatgactattttgcccctaacttaaccaaaaagtatctttgccacctaggggtattttggtcaaatttaatacctcaactattcccgacattctcaatatctatctaagttgtctcgctattactaaaattactaaaccaattgaaaaagtgactttattggccaaatgtcgcgttccactgttaccggacataaaatatgaaaaatatgaaatttcatatataacataaataacacacatagaattcaaatatatctctataaatttataaatcataattaaaaaatctaatttctaaattaaccctaattatctgttaatatattcgcatactaaaactaagtggtctttacaattttcctaaaattaatagcagagtaatggggaaagaagcagaggtccttcgcttgggcggtggttggaggtgcgtacgtaggtggttagagttatttttctaatatatatatatatatatagattgtgagagagaggaaagagtggtgatgaggatgggggcggggcagaggggtcggggat

SEQ ID NO: 46050 - DNA, 1024 bp, Cannabis sativa
acccttaattttttaaaatttgtcaagacatgggctctcctctcctttggtttgtcctatttgttgccaaaacaatgaaacaataatttttgagtgtgttgttgacttaagaaaattcagtatgagtggctttaaaaaggtttggatcggataggaggtgcttcatctttctatgaagtgcctattgggttcatggatattcttggaaagaaagaggtggaggaatttttggtcctttgctaaaggatttggtataaacaaaattagtttatgcatgccaataaactccttaatgatgtcttggtgggtttttgggcgttgaactatctgtggcggtatcaagatgctcaacaaccttctcagagtgaccatattagaagttcccccactatgtcgagtattactattaatgagacttcactagctaatgataaggtgaatttatttgttgatgctaatctgaatttatttgtattaggtactgtcgtgtatgattagtcggggctagtaagatattctttgaccatgcctttaaaggcctcgattgcttagcatttggctgaaggtttttctatccttcaaggcatgcttctttgtattcgattcagcttcttaagaactgtatcaactttaattgtctgagagtttgtcaaagcattcagagcaaaaatcataaacaatttgaatttagaatcgtgcttcaagatgtttttcatgtgcgtaattttttttctattttcatttttcattgtaataagacaaatgactctattgctcattctcttacaaacctttgttttatctttggatgctctaaaaatttggtggtgagagctacctatttgccttaagccttagaacttttgactttgatattttattatcttgccatgtgcctaatcatatttgttatgatattttatttaagaaaataaaataaaaaataggttataacaaattgatagtagtggaaaatagaaaatgatttgcttccttctttcaactatatttcatcaatgaggaa

SEQ ID NO: 46051 - DNA, 1044 bp, Cannabis sativa
tattattattattattatataactattattattttttgtctcaatacaatacgtacgtatgagaaattaatgtctccatatgcaagttgaaggaagtggacaaagcaactatacaagccaaaaatttgaaacttttattaactttgcaatttttttatacatatataattaacaaggcttcacctatattacaaacttgatatttcaaaaggaaaaaaaaaaaaaacaactttgtaacaccgatgaatatgatatcatcatcatcatcatcatcatgtaataatcaccaagaaagtgattatgagtaattttgatcttcatttttgttgtaattaccactaaaactaattaatgacaaacgacatcatgagattcttccaattcgataccttgatcggcaagcctcttttccttgtacacgtaccatttagcacacaccaaaaaaatcaccatattcaaagcactcaaaatagccaacaaccagtaaaaatcatagagctttccttggttaagattatcagccaaccatggattcttctccccagtcaccgtatgaacaatagacaccaaaagagagctaaagaaaaaccctattgccagtgtactcagaaacaatccagtgctcatagtcttcatccctttaggacactctctaaggaaaaagtcaagttgaccaatataagtgaaagcctcaccagctcccacaattataaattgtggcatcaaccagaacacttttatgggaatctcagcccttggattgttggtgaggccatgcagccttgccacgttgagacgcttgatctcgcacaaggctgcagccaccatgccaaggactgagagaacaaggccgacccctacgcgttgtaatggggtgaggccttgagggtttttgagaaactttcttgcgattggggctatcgctcggtcatagattagaacagtgactagagtgctgccaacgaagaagcctgtcattgcagctggggggatttggaaagacttgccgatatggcgatccatggtttctgattgggatactga

SEQ ID NO: 46052 - DNA, 2932 bp, Cannabis sativa
gattatcacatcaacgtaaattcaatacagagaataattatgggacttaatatataatttaaaatatatgatcataattatttttaaccgtgatgacatcaccgtaattgtgaataatcatatatttaaaatttactctcatatacattaatagcagtacactagaaatatatcatataaacttttttttttaatgaaaatgctacttttattaatgataaagcaaatcaacaagtaaaagaaactgattactagctaatagggatataagaacaagcactttaagtcaataaaattatgagtaaaatctagattatataaactattgaactactaattactcattgacacctccaacttatttattgaatttttattagtatcgaaaataataaatttaaacaatatttactagaataataaatcctatattattgaattttattatatataacatgcatgtactatatagaatcttttgtttacatgaaataattgaagaaaagaattatctcaaaaaaagaaaaagaaaaacatatatatataaactgagaatgtacgtaaaatttaaagcgtaaaagagaatggagagagaaatcaataataataataatagtaaagaatagaacataaacaatatattataattataaatttaaaacaaaaataatttatggtatatactgcctttttaatttggatcaattcttcaaaaatttaaagattgatgtattttacagcagctatatattgggactatttataataaatagttaagaaatttaactaagcatcactattcatttttcatgatgtacagctatacacactgttcattctgatcaaacacattttattattatatatttttattattttatacgtacgtactcttcccttcttttttatttaaacaagtaaataatatttatttatatatgatgtaacctaaaagattgagataatattgttttgggtgatgatgaatatgaataaataataattatgatgtggaggaattagatgaaattgttgttattggtatgatgtagtcaaaaactagaactttgtcaaaggtatgagaatacaaatgtcctaaatgaagatgagcaggatgaaatgtatactcagctacaccttccatactctcaaatgtcgattcaaatatgtgagtgtaccctccatttccatgcttataatttccagggctcatctctaccacttttcccctataattaaattaaaacatcatgatgagttaattatatatataattaataacataattttagaattagaaatattaattgtgtatatatacatatataaatatttacaattgtagggttttcatggatggaactaaattaaggagattggcatattccttgttcatttgttcaatttggtcatctgagattccatctttgaacttcattatcaccaaatgcttcaccactcccttatttgctttctccatttattactatatatatatataatctctctctctctctccctctctcaataataaataaacaaaagaagttgatcacatattaatattacaatgtatgacttaacatatatatatgtatatataataaaagaatatgttaagctttttgcatgcatacctaacaattttttaataacttattagtcaagtagtgctgcctaacaatttattggaattaaataatctaatttatctctttcttaatcttattctttctttcttaagacttacaattttttttaaaaaagtaataaattctgcagtgcaaattaattaaattaaatgtggatataattttctaactacctcgagataaatcaagcaagataatttttcttcactatatctatatttaaaacaaatttatttgcaatatataatatctaacctaaaaataatataattaacatgcttctatttcgaaagatgatcacagtgtgtctactcatatttcagattgtacttaattttgtttattccatttccacttcttgagaaagaaaaaaaatctaataacttgtttctcttcctataacacatcatatcctacattaccttaaaatgatatttttcatgctatttttatatattttttttttaaaaaaaatagaatagagacacagatgggagtgagctcttagatacatttgattacctttagaaattaactaattagttaccaaaagtgtatgtatcttacatttaaaaataacatatatagtgttactgttgtacaaagtaacaagattttcattgatatgataacaatttagtttatttatatgttgtcctttttaaggcttggtaaagtaagcttggattggatatatcgttatacatcggattggaccgtttttcctggcagtgactcaaaaaaaatggcctaccgtttttagagaaacgacctaccattttttaggggtttttttttccaaaattctatttttggtattttcttgatatttagggtattgatagcatgtatgagtttggattaaagataagaaaagtatcttcgtaccacttagcatgtcaaaataagttacaattattattgtttgtgaattgattattatcaattttatagatatggtgattatcattatgtaatgaaaagattgtcttatagacaatggttgaaagattgttttattgaataactataagtcatgactataatctgaaattgttgttaggtttcttgttgtcggttacctcattagataacgacagtgacattggatgcctggtcaggcttgttagggttgctttattaggcaacaatggggatagtcactttataaagtaatgataatagcttttcttattagacaaatacctgagcaaaactagatgcttgtgtatatgaaattatctatgttacttgtctgctattatctagatttatctgaa

SEQ ID NO: 46053 - DNA, 1144 bp, Cannabis sativa
ggtcttttttaaatcgattccattggtaccgtttaatatttaccacctcaaaataatactagacacattaatatcccataatgatatttactatatatttattattatgtcctacatttgtttttttgcttttaaagattattattattattatttaatctattggaattattatgtattatttgctctaaagacctcttgaattattgatgtagtatatataacaaaatccatttcttaaaatttattttttaaatccaacactacatatttttcctaccttatattctttcccacacccaaaaaaaatcataccaactctctctttctctctctccataaattacaatcaccatatttctctctatatatacatatatattaaacatatagagagagaaagaaagaaagactcacaacatatatcgccatggatgaatcctcttctgaaatcacaaccccattcagtaagttaattataattattcatattcttcttcaattctttttcatactaaaaaaacataactaacataaatatctttatcgggccagttctgaagcccaaaaaggacgaagaacatggcccaacaagctcatcctcgttctcctcctccaaaacaatagtcgtttcagatgaggaggagaaagaggaagagacgaactcatcggtagagcaggtagctctaacggtgccaaccacagacgatcccaccatgccggtgttgacttttagaatgtggttcttaggaacactttcttgtgctctcctctcatttctcaaccaattcttttggtaccgaaaagagcctctttccataaccgccatctcagcccaaatcgcggtcgtcccgctcggccagctcatggcatctaagctcactcgccgcacattcttgaccggaactagatgggaatttacactcaatccgggaccttttaacgtgaaagagcacgtgctcatcacgattttcgccaactccggcgccggcaccgtctatgctatccatatagttacggtggttaagattttcttcaaacaacacattactttttttgtgtcattaattgtcatcctaactactcaagtaagtaatagtattaataattaattaatttgaaatattataatttatttttattt

SEQ ID NO: 46054 - DNA, 1888 bp, Cannabis sativa
ctgccaattaaagcaattacgaaaacaaatatgcttcgattggctggtatggcaggagaggttatagacatccaagacccggatatcaatcgtattacaattaacggattctttaaattcacagtaaagagctccattcaatccaaacttttcccaggatatttgtttcctcatgaaggacggcgtagatggcttcaataccaatatgatcggctgccttatatgtgcttcaattgtgggaagattgggcatgaattgtgccaatgttctgaaatttgggctaatgtgattaagaaaatggagaagtggctccggcttatggtccgtggctcaaggtagataagacggggagaatagaatcaaataacaaaagagagccataccagactaatcaacacgatagctagggaataaacatcatacccccatctcaggtgatagaacaaagttccaaagagggagaggattcactccagcaagcaaaccaaatgaaaggtaacccccttcaaactccttacattaataattatcaacaatctattacacacaaaggtggaactattctaaccattaactctattcctccttatgataatcgggatgaggattgtatccaagaagccctgaatatcaaccagacacagactgaaatgggtatccggaaaagaatgggagaagctatggagtatgaggcaaccaagagtccaaacgggaataggtcttgcaaagcccgaaccaatgagattggaattgcggatttgggatcgaatggaatcctctttgatgtccccgtgacctttgatgcagggaaaaacaatcagcagaaaaggcagcgggaaagcgaagaaaatttgttccaaaatctgggattcggtccaagattcaagcacctgagactaaagaatggggaaccagatttgatgctataacaagggaagtttctatgccaaatgattcaacctctgagcagattaatgaagaagaaaactctgcggggcagggtcgccgagaacaatgaattcccttatttggaatgtccaaggtcttggcaacccttggacagtgactgctcttgccactcatgtaaaagactttaatcctggtattgttttcctttccgaaacgcgttcgaaaagccattacatggagtcgatccgtattttgttggggtttgaggggtgcttttgtgtggatgccaaaagaaaaagtggggggctggcccttctttggaaggctcctttctcggttcaattaaggtccttcaatgactaccatattgatgcttggatcaatacggaggatgaccttaattggcgttttacaggattttatggggatcctgatccatctcaaaggagacactcatggactcttctgaaaagacttgctataaacaactttgggctgtggctttgtggaggtgatttcaacgaaattagaggcattcatgaagaaacttggaggaggagggaaactagggtacctaatgaagaattttaatacaaccatagacaagtgtgctcttcgagaactagaagtggaaggcagcaatttcacctggtgcaatggaaggacagcgaatatggtgttcgaacgtcttgaccgggtgatggtaaataacaattggtggaagatatatgcagtagccaaagtgaaacatttaagtagatggtgttctgatcattgtccgctattggtcacctttaattccatgtcgaatgaggaggagactaaacaaagatggggatctaagttccactacgaaaaggcttgggcggacaaggatgaatgtaaacaaattatcaaagaaaattggcaacaaggttctactagtgggtcggctactgagattggggagaggatccatctatgtggcaacttactggaa

SEQ ID NO: 46055 - DNA, 2029 bp, Cannabis sativa
gtagaagcttttttaattgctctgataccatattaaaattgtatgatgtatgagattttatctcaaaattaattaattataaaaagaataatctataaatcttgtgtgtagtattatctttcacattactaatgtgagaaatatatacgagcttttatcaactcttcctacttggttcatatgtgaatgattataaacccacatataaaatatatataagtcttttctctcacctgagagtgttggttatccaacttgacagaatgtctcttcgttaaactttctctagacaagttttagtggtgtctctggtcaagaaatttttcctttttaaaatttcctctggtcaacttggcttttctctaaaggatactgttcattagttcaggtgtggtagttatggggcataatgtggaagattcacgtgaacaaagtaatatgggaactgactctggtacaagggctcctgaagttaatacgaatagtaattattctcaaccacctcaccctcttgtcaacaggaaggaaacaaatgatgcagtaaatggggagggagaagtgactgcccaacataaagattcggatgctgacctaaaagaggatcttgaagtattacgaaacaactttcttgagtccaggactcttgacttagaacctaattttgaacttactgccgagattgttagtacaggagttctagtcagctttcttgatggcaagagggtttctaaagctaggctaaaagccattctcagtcagatttggaaactcaaggggctctggaagttcaagacaatgaagccaggagtttggggtattttcttcgataaggctgaagactgtgctgaagttcttcgcaacagatcttggatcatcaatggaaaactattaatcacacgggagtggcttgaggatggagactggtacaatgcagatatgagaaaggcgatgttctgggtcctggcttttggactgccaactccttatcttaatggagttaactctcatacagtggcaacaaaagctgggagatttattcggaatgatcaagtcgatacaaagacgaatatccgaagaggttttcttaagtttcaagtagagattgataccactcatcaactatcttcgggcttctttctggacattaagaggggaagaaaggaatggatacaatttaggtatttcaagctccctaagttgtgttacaattgtggttatcacggacatgataaaagaaccttctttcgttcaacgacatttgcatatccacatgtgggggcaacggttccaacttatgggccgtggatgaaggcggaatcggtagtgtttagttgtttcaatactagaaatcaacttgaatatttcagagaagaagctggcaggactcctttgccggagcgaagaccaccagtgtctggcgcaaatatcaaagataaaggaaaacgaccggtcgctgcaaacagcagggagccgtccctgcaatcggcacctattgctaaacctataaggaaagtcataagggtcaatgataactccccaggtgccattttggggaaaaatttgaaaatagtggaaaaacttcctccatgcccgatggtcaatagtaagcactctaatgctggcacacttccttcaacaagtattaacaggggaagaaaagctcggtcagtttctcctaggatacgacaattacacaatcaaggtaattcaagtactctatctgaaaatgacattttaaacaacttttcttcaaggccccctccaaaccctgttgataatgggattctcacaactattatggcccatattgggcccacttatgagcaaatgatagagaaaccccatgttgaattatgttcctctaggcagcctcacaaacaccctgagcccactcattttccctggcccatttatactgaagaaattggagggtaaaattaccaaaatacccctaggttatttttttagaatttaagtttctttggagggtaaattagtcattttgttaaatgggaattttgacttttaa

SEQ ID NO: 46056 - DNA, 1926 bp, Cannabis sativa
aagattaagcgatttgttaacctcttacttttgattccaagggaatcatgctagccaaatattgtgcccacttttaaggaccaattttctccttaagacttaagctttgaaaattaaatcataaaagattcttttttcacacaagtcaaatttcactaattttgataccaagcatattaaaattaaacattgatttaaaaaccaaacatgtctaaactatactcttaactttagacaccaaatatatctaagttacactttattttaagacatcaagtatgtctcaaatatacatattttaagttttttggacaccaaacatgtctaaacttctcatgttggagtatcacccccacactttcacatttcatattaagataccgttttgtatcttgatttagaatataaatgacctatttttctctataatttctcttaaatattaatttcactcttgaaattattttcactaaattttgacaccaaatatgttaaaattttcacatatgcacatagccaaatttgatttaaaattaaataaattaattaataatgtctcgattcattttgattaaatttgtagctcacccctacatttctaccacaaagtgaaatttttataagaatcgcttttcaccaatattagttatctaaataatctccatattatttacataactctagtttaagcatttttctaaaatgtctcttagagatcattattagaaaaatgtcgtttaacattcttagttttctcaataaaataaaaatatcaaattcacatcaccacttacagaataatgtgattatttttacttattattttaaagttatttcctcaatgaaattagcccaaatattacaccaaagttagcgaaattttcatcaattttgttcaccactttattttttaagattaaaaattacttcaccaatcttgtaatcttttcatatttttgaatccactatgattcaattttatttgagtctaaaactgttcttcccattttatggctcatttcataagtttggattcacttttggtccatttgttcttgctaggacaagacaaatctcataaatgtaactctcatagttcacttttcttacatcaaaatgatataattatcacttttaattctcaaaggatgtaacttttcgaaaatcacaatttcaaaatcactattggaaaatgaattctatattctctttatttacaatatgaatgataataatctctacataataaatagtattattgtatcactatcaatattattattatcatactatataattcatatattaaatcatatttatttactattcaatatttcatatgtaacaaacacacaatattaatattaaattcacaaatacatatgttacatctctcatttacctataataaattgttggtttatctcaaaaaaaaatatatatataatatattgttggtcttatggtactaaatcaagtacgcggtagaagagtttcgtattatctgattatcattgtaccatagcctatagaatctctatatgtgtgtacattaaatcaaaataataaaaataataagtttagagtatacatcttaaagtctattaaggtatctcttaatctagttgataagcaatatgtaatttagactcacaccagtatcttataaattgatccaccacacacaaagaatagtgtgggctattagtataaagtgtataaccttgttcttgtagagttcttaacacatgagcaagaacaatagagaaaaaaaaccaatctccttttctctctgtatatatcaaaattttactgtaaaggaagtgttataatttttcaaatcaaactcctatttatagtagttaaatctctttaattaaattattatttaattgtttgaaaaaataaatatctataactgaattc

SEQ ID NO: 46057 - DNA, 958 bp, Cannabis sativa
  modified_base (39)..(55): a, c, t, g, unknown or other
atccgcacaagtgtggatatccgcattttgcggattggnnnnnnnnnnnnnnnnnggattggattggatcggatactttctgaacacccctagattaaaccatgcattaataatggatcgagtactgaaagaaaatatatagagaaaatgtagagagcaataatgtgttcgatggggctatgggacatggtggtggtggcttgatgagatggatgtgattaaaattttgaaacaaaaggatagggatgatcatatttgagagagattggtgcaactagctatatatatatacatttatataaaggatatgccaacatgttgcgggattcttggtctgtgctattttttttttagagatgctcaaagttgatcattataaacgatcctaccatggagtatatatatatatagagatatatatatatatatatatatataaaacaatcgaacaccttcactgctataatatacgcgtgtatatacgtacctttttctttacatatataacatggttctttttcttttgtaaaactccttaaataataaattattctttatcactactattaattaattattcctccatatatcactcgctcgtttacgtggttattataatagccatgcagaaagaaagaagtcacaattgtctggaattaaagggaagtttaaagtagcgtttcagacatttaggaaagaaaaaaagaagaagaatgctttacatattttatcgatctttgttcgtatattatatattttcttcacaattcaacaattatgtagataaagttttttctttttagtgggataatcaaacatgatatcacattaggaagaaaatatatggaaggatgagaaaattcaaaaaaagtgacgtcatttatataataatgactttcaagtgattaagggaacatgcacattgcacattacgtgtacgcgcctaatataactagag

SEQ ID NO: 46058 - DNA, 3508 bp, Cannabis sativa
taactattaaaactttatcatagaattatgacttaatagttagaagtgtttggacaaaaatttatatactagaaacattatttttgataatggatcaacatattaatttgagtattactatttatcattagtaatttctttttataatttattaaattaaaatatataagctctgttgttctaaataatatatcataataaaattcattaataataatatattatctcttgtaatgttgtttcacatagattatgaggctttgcagcaaggttccccttgaaatttaatggattataaaaaaaaatatatttttagtttttatttagcataaatataatattttttaaaatcagaaaaacatgtgtaatttttttaaaaaaaaaattagcccttaaactaggtgagccctaaacacaggctaacctatctatgcccaagaccaagcctgagcatttagtatggggttaattaacttggtagaaataaaaactaatttaattttcaattaaccaatgaatttatgttccaaataggccctacttaagtttcgtattctcttaatctaagtaccttataattctactctgtccaagttcaaacttacataacaataaaagggacagaagaacttccatcagttcgatttgaatcattattattaattataatcacaaaatattaaataaaaatgaactagaatttttcaagtacattgaaacatgtacgtatgcaagggttatataaatgaacttatgatttaatttttttaaaaaataaatatgaacttatgattgagtttcaatattatattattttatcaatcttgggaagctattttattattattattattatccatcaagaattaaaaactaatttgtttttgcaaactgtatatgaacaaaaatgacagaaggtttgatatgatcatatatatatatgtatattaatatatttatgtagggtttctttttttggagttgagaaatgatgaagtgtgtatatatacagatcatgagtttatatattgacattttgagtatggaacatacatgtggcctcaacacaaatttggtggcacagaatggtggcagaagctaacaaatcacaaaatttgtaatagtgaaattattattgcaaagtcatattgggaatgttttagaaggtccattatataattatttgacattaatatttgacaaaggtatagtattgtctattgttgtggggtgttgtgtgtcttgtctataacctctataatataattgatatgtttctttgtagggcaaccctaaagaaaattgagcctcaaaataaggctagggtttttgcctaagaaaaagtaataacacatccctaaatttaaggcaagttagggactcaattaatccctactcttgttgtcttgctttgctttattggcttcacaaataagttttaccttcatttgaaaattttcaagttgccatctagattgatcgcccatggtggctgaccgacgtaaatgcatctctcatgtgcatctggtggtgtgtagagccgagtttctaaggcaggctaggctcatgccaggggctcaaaaaaatatatttttctttttaaaaatatatatacatattttttcttcgtatatgattttgaaaatactacgtatttaattaaggggccaataaattttcttttaatcaaaaaccaccgcatcacagggttgaccttggacaatattgatcgaaaatattttttttattaatattatttatcaaattagatataatccatttttaatatactactgtttactgagatttttgccaactgatacgaaatacaataaaactaaagaaaataaatcaaaatgaagaaatagagacgatgattttctcgtggttggaacgttaaagagtcttagtttacgagttagttgtattgggctaaatagccttggatgtattatacaagtgttcttagaatggcttaagaaccctagacgttggcatagtgtttgaatcacaatcttccaaccctttgcaatgaaagtataatgttgtatttatatgctaggatccgagtatagtatactcgtgacctgctagggtttgcattaaacttgatctaccaatggggtaaatacacttgatacaatgactttgggcccatggaatgaggccaagcccgtgaggccgtgatctttcgtacgaataggggtcacttaatgttgacaggcagcatgcatgcaccgttttcgtacactcttgtgtcagggaggtgactgttggacatagggtatccttctcttggtggtatatgcactcctttggtttgacgcaaggacaaggacttgatcttgtggaattcggcatcagtggattgccatgctagtaagggcttccagagctcctcttgggttgcccttctagatgtattcctatctgctcatccagaaggctatcagagaacctttctttattttgggtgagatgtccttctggatctagagaggtccagattaagatatgaataatttgtcatctggacaaatatgagacatgaattaagttctcttgatagattcgacccatgaacttgattggacctgagattgggtctcagtaggttgtttcttagagaacccttcaagacgtattccaatcgctcatctggagggtcttgatcgcttctttttttaagtggggtggggcaccccgaacacaaattttctatatcttggatggttgtgaggcccatctctttatataatcttggcccattatctcattgaattgtttagcgggcttaatcaattaattttgtattgagaatgtcaagtgtcttctttgtaaaaatataaataataactacaatatacatagatcaaaattaataaatactttccttttataaatgttttataaagattaatgatttcttctatactagttatacaatgtcccttttaattggtttggtgatctgcaaaatttgttaaaaaaaataagaataaattagctagctttttctacttcaaaattaatatttattattagaaaaagaaattaaaagaagcatcacacttattgagcaaaatgttgctaaattaatgcttccatgtattttttatagctagctaagtctagtgaagtgtgtagggcatgtgtgtgttttcacatatataatgtataaatttgtgtgtacatttattatatagaaaataatgcattattggtagttagatccataattggctatttattgaaagaattttggctttatagagagaagaaggaagaagtacttgcaacttgtcaaaccaatatatattaaatataaaaacataaaaataaaataaaaataaagagtagctatagatatatacacatggatatttatctatatttttagacaagttctcaccactttttcaagtaaggctgcactgcatgcactaagattttattttatatagtactagtttttaagttaatgtatagtaatactctttgcattaat

SEQ ID NO: 46059 - DNA, 947 bp, Cannabis sativa
tcatactacactacctaatatccatcccatacaaatctaagttaatacaaatttattctcaaaccattagaaagtttgtggttgtaaaatattgaaggagaaagttttcagtaattcttgtataaataatacgttacatgagtaccattcactaattgtagattgtagttaattgtgataatgtgtttcataaatgaacatttgagattaacattatttatttttcttccatgaaaacgtagaaagcaatgtctgaccaaatatttgtaatctcactattaaaactaatgaggttcatgttagttgttcgtaaataaatatattgatttcaagagatccataaagtttatatttttttgtcagacaaaataaatgaacatttgtttggttgtttttccttatttttcttttttctttgccttcagatgtaatattaaatattccttattcaaatactcaaacaatggtttaattccttttccttcctcgaaacatctccatctttatgttaagacataaaggaaaacaaatctgacaagcaataaagataattaaagttgccatattgacatgatatacattatgaaaaacattcaagatataaaaatattaaggatcggttgaaatattcgtttcataaaaataaattataaaacaccattgaatgggataattgaacaaaaaattgtaatattatcttataactataataaattacgaaattaaaatcaatatatatatatatacatataaaagagaagtataggacgctgacatgatattttaaaatcactttaaaattatttttctcttctcttcttaattctctcaatttaatattttattaaaacgaaattctacaaatttatattttactattattttaataatttttctataaaaaatgtataaatctacaaattgatattttattattattttaataa

SEQ ID NO: 46060 - DNA, 1566 bp, Cannabis sativa
taattttcttattgttttcgtgttgtttctatgaaaaaccgtaaatatataaaaagatgtctttaaacgtaaaaatattgtaagttttgtacaaaatcgtgaggattttaacacaaaatagacaatatcatactagtgtggaatttatagtgagatggaggcccaacaaagtggaagagtggagctaacacaacctaactatattaactaactcaagacaccgagctactaagcaataacatagctgacaatatactggtttcaaaactatattgttaccacctctacatatagtattatcgaaatcacttaatatataaaatatgtatataaacataattatatactaaaaaaataatcattaaagacctaatcaaaatatggtacgtatgagcagagaagaatgttgaaaatctgaagtataacatttctgttttcagtaatatcattttaagaatataaaagctggatcattgaaggcttcaacatgtttaacttggagaatgagacacatgatcatttgtctttcgattgctgacatagtcgactggttgtgcagaaccacaagattggtgctgatttctggtattctgtagtttatcatttttgggggcctccgaatcattctttttggaacaattcgttccaattaatggtgcattttactgtacataatattaaacatgcatgaaattagattgtattgttatatgtaggagtcctaataaaaaaaaagttttgttgactctctttggattgagaatatttgtaggcaatttctgagctaatttctcggcttgctcttttctttgagaactttttctgtactgttatttgtaggcaatcaatttactttcatttgccaaaatataattttaataataataatctttgttcatcattaatgtatttttttttcatacaattttattagtatttttttttttttttaaaaaaaaaatcaaatttataattagtacctatactacttttactcatttatatcatcttcttttcatttcttattccaagaggcaaagaaaagaaaagacaaataacaccacatattataggctccctagaaaaactaggtgcacgttcgtatagtcatcagagaagtgttaatacacaataataatagagcacatgacattaatatacatatatcacaactgtcaacattgagttttatcttatgtatttattacatgtggttatagagtttggttgtatggctttcatttctgttcttagtatttcattagagaaatgctattgggtaccaatggttcttagcattctcttatgtgtcaatatcgctattggtctaactaagtatcgggttacatataatttaatataataatttttagagagtatcgctagccaatcacaacgcgacatgtcgagaaggtactaagcactactgatacctaatagcaatgctctttcattaagttctctctttaaaaggttatttcagctcataggtatatttaaaaccaattaacatgtccattaacagtgctatatgtgataagattaaggtactcacgtagctttata

SEQ ID NO: 46061 - DNA, 2408 bp, Cannabis sativa
tactcgatttatcactttattacttgttacgattgcgtgcacttgcgtatacaatttttcacaacatcagcatagtattaataaaccatcgataaaacgtaaaaaacctagcaattgctagaaagtcagatcttggcttttcaaacaaacactacacacatatagcggaataaactacatactattctaaatgtttaagaaattgttaagaaaaaacttacccattataatagtgaatgattcttgagattagggtgtggttcgactatctaccagagagagagatgatgtagatagagagaaaagtatgagagagggagagacgagagggggagaaaaagggagtgaggttcaaattttgtatctatttttaattaaacaagggtaaaaaggtccaaaaatataatcaaagatattatttggcataaattaggtgggattccaaattttattatgaggtgtatttttaattaagaataaaaaatgaaattttcctataacaaaagtcatacataactacaatatgcacaacatcatatgaaaataaatatataacagatataaaacatgatagagagcaccatcgagtctaaaatactctatatacttttaatgggtattacctataaataggtaaaattagaaaaaattgagtttttatacttaatttttctatctaattagaaaaatctcttactttcacatcgtatagcaggttgaggttgttccatagactgaaaaaaaaattaaaaaaaaaaagttgagtttgatttaaatatttttatatatgaacatattttgatatagcgacaaattaagtagatatttttttgatatactcttagggatttttttatttttatacttcaaaatagttttttttttgcattttttttttttttttgcatttttttacagaaattcacataacaatctacatagtaactaaaggagcaacctaaattataaccaaaatccatatagaaaccaccagagtaactactggagcaatccaaagtgtaatttttttttttttaaaaaaaaaaagtcaaaaaatagtatatggggtaattttttttttaattaaataacaaattaagtatagaaatttaattttctcctttattatttgtaattagatcaaaatttaatggtttaatatttttaaaattaatatttacagttaaatttatgtaataactatgagtaatacccattaaaaatgttatatatacacaaatctaactaaacacaaaattaaggcaagttggcaactatacccaacacaatctttttgcctaaatatttaatgctcatctaaaaacccaaccaagatcaagtggtatcatgttatcaacttaacactaaatgatagattattattaattatgtgcttatttgttagttagtttactttgatgttggtcagataataaaatgaccaaataacgatggagaaatactataaaaggttaggaccttctaaaatatttaaactattttttttatatataaatttaaatatttttatatttgaagcttttaattgtcctttttataatgtcgtgatgtttttttttttttaataactaaactcctgtacctttttactttttgttttttctaatttcacttaacaaaaattttagtttctttttagttcttaattaactaaattaataaaaaagtaattatctaattgttaccaacaagcaagcactaaattttgttatttaaataaaaatgaaacaaaaaataatctccctctaattcttttcttccaataataacaatagaaaaagttttatcaattttggttattttacatgactataaatataagtacaccttaaaaaataattacatatattagaagcaaaattacatatatatatatatatatatttattatatagaatctattattatatctaataattaacaaatattaacaaatcattttgaaaaattatattaaaaaaaaaaaaacttgaaaagtcaaagattaaccatcaatttgccaaatcaaattagtgagaaagtaggtattatatacctaacactcattttacatatgtctagacatttatatgtatagcgttgttgtgtgtaataagttcacttgtagtatcttgtacatacataaatatatatatatatataggtgtgtttgtgaacaattatattatcacacataccacacatacacaactcattattatcataataataataataataatatgaatcatcttcgtgctgagggtccggcctccgttctcgccatcggcaccgccaatccggagaacattttaatacaagatgagtttcctgactactactttcgggtcaccaaaagtgaacacatgactcaactcaaagaaaagtttcgaaaaatatgtatgtat

SEQ ID NO: 46062 - DNA, 1137 bp, Cannabis sativa
  modified_base (590)..(593): a, c, t, g, unknown or other
agtgaggctagctttcctgaagacaggacctgcggtggacatgataatcatccgaaaactcttttctggactcaactatcattccgcaagactctttctgggatggacaagttagttgtctagaaacaacatccggggaacacctaacttttcaggaacaacttttcaagaatgatattgaagaccttttcatttgaaaaaactagtacttccttataaaagtgttactattcatctcgagcaacatgacatattcgaactagttgagaaatttgtaaagtcgtcgagcaataacttttgtaatcctcccaattagctgaagacgtcacattacttgagaggctcaattcaattaggatgaattgcattttttattatatagattcaattgtagtatttaattttatttattttgaggttgtgagtctacatgaaaagaatatgtgttcaagagtaaaatgtgcttttaatcaagatcttcctcaagtgagaattgctaaaaagtattattggtgcctaatatcttccttggtatcatatcgctatttgtgtaattaagtattgtgtaccatataacttaagaaaataannnntaaaaaatatcgctaaccaatcgtgggacaccatctatagaagttgttgggcaccattgatacccaataacaatgctctcctcaagttcaagataaggtagctaaatgttaaaagtttgattaaaataataattaaaaatttaaattcccaaatagctaaggatattaacaggatctccaaattatggagctaatataattatattcaatctcttgcctcaatttttgattagaaacccaaacaaggtattataaaagttggacctattatctaaatatagggtttgcagcttcgttcctcttttacatcaaacaattaataatagttaaataattatacactaatttcatagataaataaaagtaaatattttctctatctcactttttaccaatcttatctcactaaaccaaacaattgaaggtggattatacattatggtttgctcattaaaattaccacattcattattcttagccatagctatatataattaggtattagctaccaatttttcccttctaccaaatagactagtaggat

SEQ ID NO: 46063 - DNA, 752 bp, Cannabis sativa
cagagatgagctgccccgggatgaatgcactttgagtgtcggctacaatggaatgacattacaagagtttaaagacaaactaaatattagaattataatcatgatttcattacaatattaatcacaacaaactaaacatgtcattaattatcaatttggaccacccacacccacacacacacctgtactatttattttgatttttagaattcaattcttaggaaagtaaaaatacaaaaattaattaaataattcttttaaatattaaaaaattagaacattaatttttaattttaaaatgtaaaaatttggttttaaattgagattaaaaggacactcatgatgtctagtacccttataaaatgtcatatgactcaatttaatattaggtcctatttattttagtttaaagtcccatttggggcagctttttgaaaagctaaaatagctttgttgacaaagttaacaactgcctgcaatggtggagttcaaaacttctctctcaagcttgtagggctacatagatttgtagtttggtacgatctatttcggtctatagtaagttggcttttttttcttgccaagaccatatgtgattctattgataaagccactagaaagttttggtgggttgatactgataatatgaacgtgtatctcgctttgacctactatgactccttatgcaagccaaagacatgtggtggtttgggtttttggaaatgtgcagatttcaattgcccttgctatcc

SEQ ID NO: 46064 - DNA, 3395 bp, Cannabis sativa
gaactttatatgtgtttgaattcttttgttttagaaatttatatttaggatgttaaacaacatacatgttagtaaatctagatcttggtaaaataatccccaacaattactccctgtaattgagtttcttaagacatggtgtactatgcaagtgttaaacagtcaagtggtaatagataaagtaaaataaaaaaaaataataagtattggaataaagttgtattaagttagaaataatttctgatttaactaaaacaaaattctaatcacattttaccgaggcttatccatattgaaatgtcaccctggaacgaccaactaacacactaaagctaaatgctaaaaataaaaaagaagaatggactcaaagaaggtcctggaagcctattatgtcaacaatagcttcctccctaccttcactctccccaggaggtgcatcacgaatagaaggaggtaagtctggacgcttagggttgtagacttgaactcctaaagtttcttcgacaaccagttcaccaccattcatagtgaagtcgatttccttgagatatttcgcattaaaatgctgctcacactgcctaatgaagtttggcacatttgtgtcaagaaagccttcccagctgaacggcctagctctaccattagcagcccaagctgtatagatggcattaaagcacaagccattgtagaaagtgacatcaagaagggcctgatcttcaagggtggttacttttctcttcaagaccttgacttggtctctcatatcatcagccacagtggtgagcttatccaaggcatcacgaggaaattcttcaaaattagaagttttcgtcagagtagccgccaagttcttctttaaagtactttcctgagactttgcacctctggacgcttcttcaagcttggtcacctcactctcaagagaagcatccttttccattagaggagtcacctggtcttcaacagtgacaacacgatcttcagtgaccccaagcttctcagcaagcttcaccactttcttatgatcgttatttatggtgtaggcataaccaatataagcatgaagacaagaaaacagtatcaggtgatgataaaacaaaataaagttaaagttataaggagagaagacaaagcacttaccccaaagatgtcggtgaagcatctttgagcaattatatgcagaggcttggtgctaaccaatcgctaaaacaaaatgttctcaaccctagcaccaattagggcctcactattcacaaggagctaggagccttgctcacgcaatttctccaccaaatatgaactagagtttagagcagcatgttcagaatcatccagagagaggtcaattgaagatctctcatcagcactggcggtattagacttctccctaccatagtcgtgagcaggaagagcgacatcaatagttctacccctctttctgaccttcttctatgaaacagcgaggcagtaggaatgccttgaaccattcccttgtcgaaggcttagtctccttcaccattagaatcttcctcttcaagttcaaacaagatgccatagcagccaagaagctcatattgtctgcaaaaaagaaagaccagaggttggtacaataaagagaaacaagataacaagttaagaacacaacatggagcgtcagcaacctgatgattccttatcgttctctaggcagtcctagcagaggtaacttctctgtcatccgatctaagaacacagacattctccctgaatattttgtgtcattttgaacaaaggtcacttcttctgtcacagtttgagacgaaatgatagtagcactctgagcatcttcatcactttgctcgagtcgcatgatccaagacttgtcagggaagctagtgtcactatacactctctggcatgacaagatcaacctaattttccaaatatttctagttttaaagaaggttcgaccatctctctcacattcatcaatttcaagcaacatggcatcgactctcctcttcatgtcaattagaggagcaggtattttgaaagaactggcttttagaaggtaatgtgtctcgacagacgaacaggagtatagaagtactcttggtagtaaaggccacaattaatcttggttatgagttctatgaatgggccgaattgaaagaagtggtaatagccttgatctctgcaggttggacttttttttcaagtcacagagaaagtttatctcatgagaagttggaataggtcagttcctaaggcactaaaatataaagaaggtggctagaatcctatagccatttgggtttatttggtaaggacaaacacagaagaagtcaactatggatataaaccatggaagcaagggaaagtaagcaccccgcattcatgtggaatcttgaccaagcactacagcaagtattataggaacccttgggagcaccatgttgaggcttctgaacaatagtttcaggaagacagtaatcatcccaaattgtttgagcttaaagctcaatgagggtactagacacaagaggcctaagcttaaagactcgatctattggatcatcaccctcaatggcatctttgagaagcttagttgccatcacttttccatcacgcaccttgtttaagttcttaggcttaggcacagtcaagttaactctaataaactgagccacatggcgcaatcttctgcttctcttcatcctagccatctcaagttcaacaattcaagttgcttacaactcaaggaaagtcaaaatttagttgaaaagggtcgaagtagtttggaggaattcttcaaggcacaaagaaggtgttttggatttttggaaggtttggaaaattgtttcaacggtttttacaagtcgaagagtccttggaataagatcaacaaaggaagagaagaagaaaaataaaaaaaaaaataaataactcggcatgtacttcaagaataaaaaatgtttttctaccatgaagtgaagtaggcttgaaggcttgatgaagatgaaatccgaaggttctcactgaatgctataggcatgtaggagagatgagaagttgtgaaaaaattagttctcaactcatttatttatagctcagtccaatatcttaatcctaaagttaattggagtctattgaatttaaattttttaaggaagaggtaaataataagtaaaagatataattatatatttttccttctctttttttaaatctaatttcaaattcctaaaatttaaaaggtaacaacaattcctaatgctattgggattaagaaaaaattaaataaattaaaggaaaaagataaatgataagcaattgaccaaaagtcttttctcttcttcctttctctctctaatttcgaatggcatctccaacaaggattaggattccaatccaat

SEQ ID NO: 46065 - DNA, 2134 bp, Cannabis sativa
cggcatagtgtccaaacttcctgcgaaaacacaaatatttcacagtatatatataattaaatatacaacagctatatatataatgtatatatacaagttcctacatagataagtattttaccaaagtatatttataatctcaaatttatattttcaattgtataaggtataccgccctagtagtgacatattagtgactataattttaatcacaatagaaatattttgaaaataaatgatcatattaatttagtcatatgattatgaaatcaaatttagtcacaaattaattgttacgtatagctatttattatatgttgatgaaatttgtaaaatgagactaatactaaaaacacataaatttagtcgcaacaaaattttttttgacattggtggtgtagaaggagaccaggattttgacgtggttggagatagaaagaatcggagggtcggtcaggtctgttaggcgagagagaatgaaagaattagagagacaaatatactttttgagagatttttgaaaaaattaaatgggaatggtagtttagataagagtgagatcattatgataaaatagtatagtataattaggggtgttttttttaagtatgaattatgaaatttctcaatatataattatatatctatgtatgaatatctatgacgttaataattgttagcagttttttactatctttattaaagtaaaataatattaaattataccaataataatattacatttccaatataatattttgtagcaaggcgcagtgtatattaatattagtatatttaacatttctcatagaaaaatatagtagatgcatgtaacatattttagagtactcgatatataattattatggatatggaaaactatgtactaattaatatacccatatataagtaaaatatatattcggagaataaaagaaaaatagacatacgcaacatgcatgtgtgttagtataatatataatgtcaacaattcacacgtatatatgaataaagtatattaaattgagcagtttttctgggattatttcaatacgatatatatttataaatatatatatataggtcctattgaaaaggcaaaatctggacttttctgttcaaagatctaaggcagctagcagagattgaataaatataaataattaataatgggaattaagaaggtgcaatgttttgaccatattaattatatacagtagcttgacaccatatataatatatggccatatacatatctatattattatattatacgtgcaaatgcaaatgcatgcagcgtgcgattttactaacaaacaaaagctttcaaagttatagcttatatttgaaaactgtaaaacttattatatattgcatgcgaagcagttttccatgcatgcatgacacaacaaccagataataatggcttcataggaagattttcattaataatcacatcttacattttgatatatataatatataatcgtaatttttgctttcttaattaatatatatatgttttgtatcagaatttctttacttaatcccgaagttgtaatacgtacatacatgcattaaaacatgtttggtaataaaattcagcactagcatgcacactataaaaaaaaattattttagttataaaaatcatgaacatatatgtgatcactaaattaaaatttaaggtagtaattaaaaaaatttctctctaaattttaacatgtatcaaattatgttttttgaattttttgcgcgctaaaaatcctcgtttaactatggatattgttggatttaagaacttttgtctaattttattcaattttactaatattgtctatatactaaattatactctctaaattttaatatcttttatgtctctcaaattttgacatgtatcaaattatcatacctcctgaactttaatttatgttagactttttttactaaaattagacaaaaacccttaaatttaaaattcttaataattcatgaggatcttttaacgaccttaaaagttcagggagcatcatcatctagtatatgtcaaagtttggggagcaaaaattctaattaacttaaaatcaatagctaaaactaattttgtcaaaaaaaattataatttattgtg

SEQ ID NO: 46066 - DNA, 2462 bp, Cannabis sativa
gttaaatacttaaatatatataaatttttttaggtagtttctacaataagtataccgacgatgcatcctttatttatttagggaattacttcatatattatttttttaacttctttttttcaaatttatagtttggatttctaaagtggttgcggcgctagttgcagtaggggtttttatacaattttttattgcaatttaggttgcaggactagttgtgatagaattttctatgtagaatttcgtaaaaatacaaaaaaaaaaaatattttgaagtataaaaataaaaaaaccctatttatttttgcatttgagaaattttctaattctaattttttgcttaatagtaaacgttgtaattatttatgacattttataaaattttaaaaaatttacagaaatttcatatgtctataacatggttcaaataatttgttacatgcgtgattattttattttatacaagtgtgaaatagactgtttaaacctactttttagtgtgttcaattttttaatctcttaaaattttacaaaatgtcttaaactatgaaaaaaaaattaaactaaaaaaatattttggatgccgaaacaaattaaagtatatttttttatattatttagcaaaaattttaattcgattttacaaaataataatttttataaaaaatcaaaattaatttataataaaacattaagagtgaggagaactcatgcttaatacaaatatataatgaaatttaaaacttaaataataaaatatattgtttaacaaaaagaaaaatatattaaaatttcgggatcaaataaatgaaagaatattcaacaccattctaatataagtgtaaatcttaatatcataagattgatatatatattagtgtatggtgtggaaagttgttatcaaataattttctagctaatttatgctatactatattttattagtgaaacattgaaattgaaaacatgaacaaaaatacatgctatactataatgctatttgatgggagggtaggtgaggagaggagatggggaccacaattttgttaacttaaaaattaagatcaagtgatggacatgtgtgtgtgtgtacatgttaataataataatcatggttgccattaggggttggagaaaatggaagacaaatgtgattttatttatatattaattaattattttgattcttacattttataaatatatgtatatatttatatttaagtaggtttttaggggcatcactttcccactttttcatgttaaggttattctaaactaaaataactatcaaggtagtagttttagttttattaaattatatataatacgtgttaatttattttattgaaaattgggtctctctatcaagtgttcatctcgtggttttaggggtatttacttttggaatatgcctgctttgactgagatctttagagatgattatgtactataatttggtgaagaaactttaggacatttttggagaaatgtgagggatgtgatcttcctcgtgatggtaatgaaattattcgtaatcttgttaatagagtcctgaactaacaattgcttatggagttcgaaaggaagttaaatttaataaattacgtgtcacttcatttcctcgtcgtttaatgaggaaaacaaaaacatttcttcaacaagtacatttttgcaaccttgaatgggaagctagaccaaataaaaaaaatcaaactcatagagctttgtaacataattattttaaatatgatgttgtaactaaatattgtttcgaatagtattttgatttcgtaaatgttttcactattacattttataaatatatattatgttaaaaagaattagtagcatgagctcaaatattatttaaatgtatcatattattatttggttatttgtacaatttaatatcgaattatatatattttaaatttcagaaaaataatagtgtgtggtgacacctaccttaagttgtcattttcctttggtgagttgacaaaacaaggtcactatgaatctgttggactatgatattgtagcaatgtatttgtgtgtatattattattctatacatacttcacttcaaaaatggcaatgtattttgtttttaagcattataaataataatatatgcaaatactttggtaagtggtctagatctagatttatagtattgactaataaataaaatctctaaaatttattgcttttaaaaatgaaaaattatataacaaataaagtataataaaataaaaaccatggggaaaaagggtattttttttacattagtaatttttgtttttgtaatggtctgaaatctgatcattagattgtaaacgacaaatttgaatggattccaattagatgagaatgctcacatcacatgggtacaatacaatacaaagaccacacaagacacacataaaattgaaaagcattatttaaaataaataataata

SEQ ID NO: 46067 - DNA, 2260 bp, Cannabis sativa
  modified_base (204)..(216): a, c, t, g, unknown or other
ttattattgatttatgaatatgtattattataattttaataatttttaattgtataaatatatttattgattatttaaattttgtatcaatgatggtaacaatttaataaaattattattatttaagtcttttcaattattcttttcttcttattattttgacatatttgaaaaaatatgtataaataaaaaaatatatatttnnnnnnnnnnnnnatatattaatataaaactatttaacataaataaataaatgaataaaatactatcatttaagagtgagaactttatatttttaaaaacagaaaagtttgtgaatcaatttgctaaaaaataaaatttaaagatcaacttaccaaaacttatgaattttggatcaatttgtcgaaaaataaaatttaagtatcaacttactaaaacatattatacaaatatgccaaaaaaatgaaagactatatttttcttttctttagtttctccctaccaaatatagtcaaaaggtcacttagttacggtttaaaaagttcaagcaagatgaatattcactccgataaataaatgaacttgttcaaagatgaaacaacaaaacaagattcctgtcatatgtatattatgaacattgacataaaaaaattactaccaaaaacattctgtgttttttgccccattggaataataatctccattctgacattgtggattctagtgtaaatcattcaagtattggtacacacttcccaacccaacatttaagatttttcaattaagaaaaaaaaatgtaacatgtcatttacttttcttaatgaaaaaaacaaaggttcatggcaccactagtttccgaccaagagaaaacgttacacatcaccttgtttacaagaagaaatgtctatacagcaaaaatgaataagagaatagtgacatcccaagtactagaaagcatctatatatgtcaactatgtgaattatcaatgtacaaacacattcatgtggttacttcttccccttccaccaactgcacctgtaaatagtagacattaaacccatcaaaatctgcataattagatctaaatgcaaatagatcatttatgataaaaggtccttccaatcaaccatatgataaaatattgttctttaaaatctcaatattttctcaaatgacagatggatcatagtcttaacgaaacatgaaacaatgtaatttgatgatgataagagtaaacaatgtgtcaactcagtcaataatagcataatgcatcattcaaaatctttttacaaacaaatccgataacgaatcatattgatgaacttacctagaactgaagtgggttcatcattgtttccaaagttgaattgaaaattcttctgattcttagagctgaccaagtaatcatactctttccgtacaataggaccaagcccggtatgcacatctttccacatcttcctctgttcaacaatgttcacaaaccttagggcttccatttctgcccttgaatacatgctcttgcttctttctcctttcttcacaacgacatttttccttcctttagtcctgcttggagagcctcttgccacctttttctcaagaaagtctatctttctattcttgttcacaagaccctttgaggatttggatggagcaaccgattccgtcttccttccaagtttggggactgacattggtccaatcaaggcggtttcatcaaccacttgaatctccaaagaacatctcggatctccattgatcattttcaaacgactgcccaattcattgtcgtttcccaagaacttgttgtcgacaactttaacctcatcttggaaaccaattctcatttcatcactcaatatagaatcgcctgccatgagaatcgaggcttcaatttcctccaatgtcggtttctttcccaagaacttgttgtcgtttccgtattcgaagtctttaaaggaatcagagaacgagctttctttaaggcaaccaagatcagagacaagacccaggtcgtgaatcacagcagattcttgaatggtttgttcagaatcagatgacccggagctggaatcagtagttagacagtttgaggacacgaaatgggtggtttcgtggtatggaacgatgtcgttctgggagttggagtgaattaattcgccttgtttgagagtgaaaactttctccagagattgagtatctgcttccgtaacagtagagtgagaatcagagagcttcacattgaagcatgcagtatcagccatggctctacta

SEQ ID NO: 46068 - DNA, 3179 bp, Cannabis sativa
  modified_base (3111)..(3116): a, c, t, g, unknown or other
tacttgatttttttagcgacggtcccccgaaaaaagtggttttaggaccgtcgcaaattctgacgtttttagtagtgtatttacttggatcatatagcttaatcaagttttaatttttcagactcttttctgtgaaaaacaataaacgtttccatcaaaattctaaatgctctaactttaaggcatgaaaacaagatatggaaattattttaggcataatgaatttggatttatgcttgcaagaagaaaaacctgctgatcgtactgataccagtactgttgttcagaaaactcttcatgcacaatgagaaaagtcaaaacgtcttagcctcattgctataaaaggttccattcctgaacatctattgagtggtttgcaagacactataaatgtaaaaaaaattaatgttgtagaaaaactatatgatactggtgaaaatgctgaagctggatatcttatggatggaatgaccaccattaagtatgatgaatcaaagggagtaagagattttattctaaaaattgtgaatgttcaagccaagttgaaagatcataatattcctcttcctgactcttatattattcattgtgctcttcatgcacaacctgtctcattttagtgagagggagtcaaagcttaaagtgggcacttatcttaaagtagacattatctaagttggtacatttattcttaaaaaatactctaatgttaagattattttgaacgatatattttacgttcctacttttaagaggaattgacttttgcttgcacttttagttaaacaatgatattcttttctttttgctgatcataatgtttatattatgtttggctcttgattattggagatcatttttactctaacggtctaaataaattgtcattgcctctcttagcttcccattttatattacgaaaacatctttattgtcatgacacaaaatattgggtcatattttcaaaagaaaggattgatcgtttatttaaagctagaattattcttcttctttatgcttctggtagggatacttgtgttgattgtactcatggaaaattgactaaaacaagaaaaaatactgctaactgtagtcaatctttactaaaaattatccacaatgacatcagtgggtcttattccactacgttgtgcaaaaataagtatttttataaatttcatagataatttttctcaatatggtccaccactttattaaagaaaaatataacgctcttgataaactcaaaatctttcgaaatgagattgagaaatagttagtaagagtcattaaacgtttattcggattgtagaggagaatattatgattgttatacagaatctagacaacgcatgaggcctttcgttgagtatggcgttgctgaaaggagatattgcattctcatggacatggttagaaacatgatgagtggatcaaatctgctagagttcttatgggttaaagtactcatgactggtacttatattttgaaccgtgttccaagtaaatttgttcccaaaactccttttgagttgtggatagggagaaagcctagtttgaatcatcttcatgtatggggtatccaactaaagtaaggatttatgatcctaatttgaaaaagtcagatccgagaacagttcgctataatatcattgattatccaatgcacacaaaagactatcacttttactgtcctgctcgtggtacgcgaattgttgaatcttagactgctaaatttttaaaaattgatgttgctaaaaatattccttaacatctcttgaaatgggggagtcatctaagtgaatttttattcttgtgtcatttttaagagataataataatagcagtcttcttcctactctagctgataatgcttccattattgataaatatattgctcttgatatcgaagatgacaagggtcctattacagatgaagggtgtattattgacaaggggcctaatattgaagaaggtcctgttattgatgagggtcctaaatataacaaaaattccaattatggaagatgtcgttcaaaataatgatcaacaaatagaagctattccagaagtacctcctctaaggaggttttaaagacaaaataaattaacaaggtgtgatgatataacaccctgactcccaggaacgtcacgtgtgtgcttttacaaacttattatcactaatctattagtttaggaaaaaagtgtggttaaattttaaacttttggttaaatttaaactaaaaactttcattgtaaatacggttgtaatatggggatcccctgctaataaagttctttttcaattaatttacaatacatctattacaaaattaacgttacatttctaaatatagaaaaaggagtcgatcctgcttcccagaagccaagacaccacgactgatatgtacactgctggatgacctctggctcatggctgaacatggctgaacacatttgcttttcttcttacctgcaccacaaagcatccgtgagtcatagtgactcaagaagaaaagctactagataaagaaaatcgtggaaagtgatagcagatttcattacaacagattatacataccaataagtcatactctttcaacgtgcatatgcaattcaacatctatacgagcaaacttattacaaaattaaaagtatttatagctatacataatcaacaacctcggtgtttcataaaacaccctaatcatacattgttataaacacttactttcaatgcttcataaaacactttagttcactcattaatacatccacataatttcagtgcttcataaaacactctaatcacacatcattataaacatatattcttacatctctatgccactgagactgcaaggaaagtgatcaatttcataagtaatataacattcattcaatcatattataataaaaatatactcaattacaacttaacacataataacactcttgatcaatttcacaacatcgtaactacataattttggtacttcataaagtacccctaccactcgttaagcacgagttacatatgtcactattgttgcccgatacagcaaacgataagtaagaaaccaatttgcggtttcaggagtaattactcannnnnntaatgaccgtttcttttactcgatcataatcgagtcacaacgataataatcgtttcatatcat

SEQ ID NO: 46069 - DNA, 765 bp, Cannabis sativa
tatatatatttttaataaatcatcaataataatagcatgcaatttaattaagacatctcttcagatacgatcaagattataatttaaaaaacgagtcaaataatcagtcgcctaattctcaagtcgtttcacaaaaaattaaaataaaataagatgaaaaagattacttacctatattttgttttatccaccatttagaagacacaacagtagaaactgttgcagcaagttcattcaaccctttagcttagcagtcaactattgtgtaagctacataactgcactactaacaacctcttcagtcgcagagaacttattagtctcaaccactaacaacgatttgatggcgcgccatcaaagcacaaagaaaaattaacaacgaaacaaaacaaaataaaactacatcacacagataagactaaagcatttaaaatcatatcacagaaaataagtcttataacagtagcaaaaattaaattacaatagcaaaacacaaccccaactacacctaagttcaaggaaagccgggccagacaaaaaaaaaaaaaaagacaactaataactataaattaaatttaagaacgagaaattctaattttttttccttattaataaatcattgtctcttttcaattctcatttatctttgagaattaaaaattattatcactcattctaacttattaattacaacacctcaaagtacatatatatttatttaatcactaattattaataaatctagtgactagtgagtgtattata

SEQ ID NO: 46070 - DNA, 4807 bp, Cannabis sativa
  modified_base (4109)..(4110): a, c, t, g, unknown or other
  modified_base (4275)..(4284): a, c, t, g, unknown or other
ttatggctctgctgtatctaggagatgctacttgtgttgcggatggctctccccattaagtacccattaaaccctgcctagattatcaagatgcctccgcgaggaacttttgtagttatgtctgctaatccaggaggttaacaaatcttcttctctaatcatgtcacgtgtctctttctcaaaaacacagataatatttaccccaagctttcgagactctctcagttctgggaacttataatctttcctgagaaccgaccattggcacatgttgactgttagaattgtagacacatctttttggtgagctgtaatccgttaaaggcagatggaacacttgctaacgtggcaatcatgcgacacattaagtgccctagttgattccttacgagggtgttggggcatgtttgtcaaaaaaaggtgaaactgacggcggggtgatttaaaaagacctgcgttatggcttgattgacatgaagcaaatcatgaaaaataaatgcttccagccctttcaactccccagctgttcgatctaacaagggatttggaccgttgcttttaaaaaagccaattttcttcttgaagtataaatttacatcaacgacgttcttttcactttttccacaccaaactttgaattttcccctataaattttctctctcgttgttcttattgcatgcaagaagagtgtgaaagtttgatccaacaattgctccatctccgcgtgaagctttttccagatattgaaccctttcaaatcgaccaactagaccccctgccagatgaaggattcgaatttcatataagttgtgaccgccttatcgactaggtttgaaaacttcagacgagattcttcgacagcaatccatctgctttccagtcaacccgtaagtacactaactcctagttgaacttttattatttcatatctaggatagaaatttcttgttcaagctaggactaggatgtttacatgttgaatagcagagtaggatattcgaaaggtatttccctgttttaggaaaatctgttctaagaattaacttgttgtgaaaagtgaacaacactgtctgggtattttttctgatcatgtgaggtttcataagtgcctgtatgtatatagaccttagggtttggtcgattagggtagaaatttggaaatattttcttttattagtcaattgcttcaaaaagcctactttctctttgtttttgtgctagtagaaatggacctaacctcagatctccaattgagtgggaaccactgagagtgcgcttgttgctcttgtaaaggaagcactcacaaaaggaacccaggctacggttcttattgaagcacccaacaaacaacagctatggaaatcgtcccagaggatgaacctattgtggagggaggaccctctacgaaggccaaaggaaaaaggagcactaagacgcctccagttgcacaggcttttaatgactccatctaggagatggactagaaagccaactgctttcgcttttatggaatgctgatggcctatgttgatggcactggtgttcgctacattccagggttgatgtggcacagactatctgccacaagagaatcagtgtccacaagtattgaggcattgagtgcttggagttggtcccacatttctaatggagcacatcttcccttaaggacccactttgcaagtctggcagccaaaattgggatagctcctttctagctaattctgtcgtcgtatagactactagctgggtggtatgtcttttagacgataaataagttggaagtaccttcctcggagaagatcctttacttctaaagtgtataggctaatcccatgaggtaaaataagaagaagctgggcttcttcaggttggacaagcatccagactcctactgcccagtcagccacacagaccgtactcatgatctctgagagtactggttcttttcctccgggttccctgtaaaaagggtgccttctcttcaaaacaacttccagataccaggtattgttgccactcagccttgattttcatttcttaaattttttttattttgattgatttgttgatgtcttttaactttcaccagaacttccttccaaaagcattaaaactgccgaaataggcaaaaaagaggctcattacagagctttctttgcggagaagttaaaggttgaggattcagttacgacaaaattgctttgtagatctggtttaatcccgcagtttcaaaatattgatcatgttaacctccagggacaatgccaggctccaaaagaggtgaacgaagccattgcaactgaactagccattgctataactgaggcagccacagaggacaaactcctggagcctaattggctaatctgccatccaaatcctttatctaaggaggaggaaactgctgagaggtttactgcaacgtaccgagatgtagagactccgagagctagcacttcgagaagaggtaatagaccctttcgcgtctttcgtacccctagcctttatcacatgtattgggaggattagggggatttgataaacaatttttgaacttagaccgccatagatatcccatgaaagactacataggcataaattggtaggagccttagtaatccaaaggtgttctcagacaccgttagggtggattccttcatggtcatgtcgctgcctaacttcagggaatatggaagcttcctcgatcaaggaaacataatctcctttgctcgtgggcaaccatataacaactcactaaatggttgcacccacgcacaagtcttcttagtggcttttgctattttacaactgtgcttttactgattttgacttggcttgtatttctagttgcttatattgcaatcatgtatgtagatactttggaattcaggatgttgaaatccgtgagtgacaaaattaccgcgaccttggccaaagccaaagataccaaagagaaggggaaaggtaaggccaaatctcaggcctccatgacccgaaagccacgtcctctctcaaccatttctcatcaaacgtccgggagatttctccccctacaaaggaaagctctacagctctgggttcttcagctcccgttggggtggagaaaactcctgccgccctctgggaggcgtccaacgtaccagttgctctgtgggagcaaacctttagggatattcctccaacaaaaggagtgacttctgacaatcaaatgagtgtaggaggttttgatgacaacctagacgggattgtctttccccaaaaggatgcccctgtgaatcccaaatacaaatggtcgactacttcactgagcgaaggcgctaaaaaggaaaagtcttcaattccaactccaactttatctaatccatcatctacaacaccatcaccattgcaatcttttattcgatcaagatgagaactcgacattgtcccgtttaggcgagagtcaaggtcattcttatcctatgagcttctaccgttatttcatattttgtaaaccctactcttagcaatcattattggggtgatcgttactaagaataaaagatttataataatacttatctttcgagattctacggtgttaaattgctaatgaataatcatgtattagggatgaattttattaaaacaagaatcatgaagaacaaccaatagagatcgaatatccttaactaaagctcattattttaaagatctgtcttttcatttaatatttattttagtctatttcttttaatatatatttattttattaaaataactaattaataatatatttaaatttatttatttaactttaaattaaaataaaaagaaaaattatgttgatattttatataaaaaaattaaatttaaaatattataaagattttaaccatatttttaaatttattattatttattttatattttaaatagaaatggttataataagaaattaattgcttttcgttttagtatggtaaccgattcacacaccatatttttcgtaaaatttgaaaataaaaaatatttatatcaaatttacgaatccaacttatatatagacacactcaaatttagttatgtgagttttaattaagaatatagtaaattacaatatatnnattattagatacgttacttaattaaaaaaaattaaaaatttaaaaaatacgtatatataatcacattcaaatgacacaccaaaatagcaatagtaaaaaaaaattaaaagatcaaaatctcaaatcccatttcaaaaattaaaaaaaaaaaatacattacctaannnnnnnnnnttaaacatacatgtattgcacttaacatcatctaattgaacttaaaaaagactaattatacgtgcattgcacgtaacctcaacatagtacactatatatgtatataggatttttctaaggtggagaatttaaaaatattccatttgtaaggcatttaatagtttgttctaattgggcaattacattgtaatgccatggtcttgaatacaacatatttaaactaggattgattaaaatctttggtcttattcaaaaaaaataattcaatgagtagtgcttgtccatttttacttaatatttagtcataatattatcattttattacagttatgccattgattaaatcacttcactaatttataaataattttatatttatttttaaatgtcacatttttttttacaattttaaaaaaatcactaccgtataaatacatagattattataaattctattaaaaaatttaatagaatacacacatcaaacatggccaatatactatatatacaattataataattc

SEQ ID NO: 46071 - DNA, 3347 bp, Cannabis sativa
  modified_base (43)..(81): a, c, t, g, unknown or other
aaatcatgtgaaccatgcatcattaaatgttatttctgatctnnnnnnnnnnnnnnnnnnnnnnnnnnnnnnnnnnnnnnnatttagggcataaaaaccaacaagctcctcaatcgaaacaaaccttaccaggaggacaacccatcaaataacactgaacaaaatataatacagccaacttgactgctagatcatcattgtccctataattgttagccgtaaaggaaacttggatagaagtcttgaaattttttttcttgccctttaaacaatgttcaacaagcatgtttttatcatgcttgtactaaaaaatatcagactccacatggaaatctagaatagttactcataagtaaacttctcaacactaaatctaagcaaattcctgccgcagaacccaaaactccaacttatttagttgttaagcctccctcaagaacaaaccatgtatgagttggaagtgaatagtgtacttgggtaaacagagaaaatgaccgaatattgtcttgggaaacatgtcaagttgggttggggttaaaatgtgtttgatatctttgataatttcaaaacatccaaaagtgataacttttgaatgatagttctaagaacgcctatacttacaagaccaatcctataggaaaacaacatgcaaaatctgttaaaacaaacaaaaaatatagcaaatataaccactaaaaaaacaaaaaaaaaaatcacatacctcaacaaccattttaccaggaagctcctctaaaataatatcaggaagaatattaacaacaagaaatttacccttgccctacaaaaaaacaaatcaaactgaaaaaaacaccaagataattgttaaaaatacaaaaatcatttaaaagtaccaaacacatacacataaaaatataaataacacactaaacagtgttcattaataaactcaaacataattatatacaacttatcaaatatgatacacataccctaaaaaaactcaaaaacaaatgacttaccttgggaacattaggtatttctaaaaactcatcttcaagctcgaaataataattagaatcttccaaaatatgtcgaggtcttttagacttcctcgtggaagaagattcaacaactgacttccatttaaaagcaatcgaagatgtaggactaggtgattctctttagtattctttctccccgtaggtaatcaaggtaagtttgtttgggattttttttttggacttttttaactactggagaggaagaattagaacgggttacaaccatagaaataaaataagatgaatatttatagaacaaaaagcaacaatggttgggagaaattagagtgaaaatagtttttgagaaataaataattgatcaataactaactaaaaccaacatacaactgcaatctacacataaaagtggctaaattttttaaaaactaaagaaaaaaaaatgaaaagaagatatgggggtaaagagagtaattcatcacttttttttcttaatttatttgttattaaaaaaaataaaaaaaaaactgccacaaacgtgacaagcacagttcaaatcaaattttattaatttttttttttaaaaaaaaataaaacaaaaacatcctaaggtgacaaatggcataaaagggaattaggtgtatgggtgcctaattacatgtcagatatatattgtatgttgtatgcttttctttttaagtatgtcgactcacagttctgtttctatgtgtagataaaggtaacgcttagaatgaatagcagtgagtgtggagcttgggtgaatattgtacatatccaaatgcagggatggtcctgaaatatagtgggccatagaaaaaaaaaattgggcccttatttaaaataaaatatggtatttaatataatcagtgaaaaaaatgtgtacttttataaggggaaaaaacttttttggacccctagtctaggtgggccttaggcacaggcctagcctgcctttgcctaacgtcgtgcctgtccagacggttagacctggaggttcaatctttgggacaaaacaatcttagtttggatgtcgttagagatacttatgaattttatgtacttggtgtatgttttgggaaataattttgggatctcagtttgtaaatatttttgtaattatgttatatgttttgtaaagtttaaattaatacaaaaaaattattaaaacaacacacacaaaataataattgtacatggccctaactagggggggtcgagatgagcatgcatccaggtggtgcattaggcaccacccgagtgatctctgtacactctctaaaagaagaagaaaaaaccaagtatttaccttcataatttcccatatcactttagcaatctaaaatatgcaaagaatgagtaattatgtataatttgggcccaagtgaaccaaaaagcttatttggtcgctgagtgtgtttatctggttgtgattaccagggcaactacataccgtgcagtgttttgatcatatctcactcgacataactcgaattaatacaattccaaatttattgaaaagaccttttgatgagtgtcaaatgtttgtatcaaaatttagactctttcttatcaagaataaattgcaatctgaagtacaaatttagggtatcagagcacctaaatttgatcaacggacctcatttgatctcaaaatcaatagtcaccattcgaaactagatggaaaatctcaaccatccaaagatagtgtggcatcattcaatgatctcaaatcaactagaaagaaataaacttagattgcaacctctccaataaatgggaggctgattcagttcattttttaaatacacattcattctattcagagtttctctctctaaaaatttgagctctcaggcattcttttttactttagatttgtgctctaagtcagatttttaatactcttggctaaaaatattagattgaattatgctctaagtgtcttttgatcaataaaagatcaaatatatgtagtcctattaccaatgaaatgaaggagtaaattacgataaaaatatggtgttcatttttcctttacgctcttctcaacaactatcgcttatcaaatagtatttttgttggccatttttcagtgtcaataaatctataatatacttgatcaaagttaattaaaaaatacttagtactaaaatgtgttaaatgaatgtgctataaattaagtatatttatgtgcatcgccaatgcatgatgctacaagaaatgtttggcataaggacatcacttggaaatattctagtaggttgcttgtgtgatgtagaatcaaataatgatgaggtggtagatgagataaagttcaattttatg

SEQ ID NO: 46072 - DNA, 1530 bp, Cannabis sativa
  modified_base (609)..(609): a, c, t, g, unknown or other
ctgacttccattctaacggtcataaccaaccttcatgattaacggtcactccaacagtcatgactttacatattctccattaattgagtctcggtatttctgtgtcacgtactgttactcttgccacgtcatcatttgtcaaaatttgggtaaacataaggttagaacactcttctttctctctctaaaaatataaagctcttaccttagttaattttcttatattctcttgagcaataaaaatttaaagtagacgtatttttattgctgccttgacacgcaaagtgaattattataaatctcgcgtctctcatttattctacttaacttctattttctctcgccaatctagcaagcgagtattaattagttttatgcatcaagaaaaattcttatagatgtcaaaatagactaaaagtatatcgaacaaccctattataaggagtgtaccataaaattatccaatttattataggatcatgaccgagtatgaacccactccatttcaacggtgtaaataggttacgttcttacattggctttctattatagtaaagacacatatgtgagtgactagctctctctataaatttatatatatatttatanatatatgtatatatatataaattagctagctacaacaatctacgtacaatgaattgacctgcaccaaaagagatatcaggtttatcttttatctttttcctcatataaatacatatacataaatacaaatacattaatatatctctattctctatacgcgcataacatatatatatatatatatgtagtatgttcgtatgtatatgcatacatttgtgtattggttataattctttgaatatagtatacttcgaaacacactaaagattttacattaataaatggcggtggccttcttcatcttctctctttttcttaagtgtagtctcttgtcaactcattaataacattatatatgtacatatatacatatatagattcggataataataattcataaaagtttttttgatgagcaataattcaaaaaagttgatatcatgttcatataatttagaattatttctgtgtggtgttggttcataccttagccgattacttttcttttaatattaatttatatagatattttgtgcaagacacaaatacataattttatagtaaagttatgtatttttatttttcaattgttacactaaataatattatatataatttaattaaataaataatatattttttatagaaaaaatgtttaatataaagagctatgaagtattaaaaaacataatagtaattaacatgaaaattaaattaaaatattttttacaaaataacaatgaatacaaattattaataaaatatattaaaagtaatgaactaattttttattttgtatagtcatcaactatataaagataacaaatacaaaagttaaaaatgaaaggtaacaacataatatacatggcaaagtatattaaggccactatattttatcattttgtatttattattatttgg

SEQ ID NO: 46073 - DNA, 1568 bp, Cannabis sativa
taaattggataagcaatttacctttatactagaatggaaagttgtcgttttgctctaaaacaatttattttaatgaagaatgttctttgaagatactcttgggaaaatcaagtccctttttcttcatttggaaaaggaaaaaaattattgtggttttacttttgggtagaatatccttttctttcttttgtctggttctttgtcttctatgaggtttgaaattcaattatatggaatcaaaggaaaaaaataatacatgacattatgtgtttagtagagagaggttcaaattcaatgatttagaaatagaaatttatatagagtatactcaatgggtcaattcactactaccaacagacacatatggaagttttaagatgatgttctattagtagtataatgtttcacatgcatttattctaaagtaggttaagtaggttgaaatttaatactttaatcattaaatttctcatataatgaatggtgtgaggtgtaatatattcactcccttttgttttttttttttcccaaaactgaaatgacatattttattaacaaatgttatttggtaattttttttagcacaataagtgttgctaattaattacaattttttctaatttaatttaatttttctataaaaacataccaaaatattttccatttacactggtattcttatttatcgatttttttttttttgaaaaataattagaaagattgtagagcttaaggatatcagaaattattattaaagttgtaaattattcaaaacttttcaattctttaccgatgatgtgattaccaaaaaaaaaaaaaaaacctcaaacatatatattttatcgatcaaagattaaaataaagaaaaatactaaaagacactagtagtgttttataccatttaaaatattatattgctattagaataaataagtatgaagccctacataatttaatttagtcactactatgtagtattgaacattaaccgataacacggcgttatttctaggaagtgctaaattctactattacttaatagcaatgctctgaaataaaaaattgttcgtaaaaaaaaattggcttaattaattatgttacatatctatggggcagaagagtatggtattcattattatttgcttctcttttatctttttcctccttaaaatgctacgatcataggttgccatattttcctatgaacattgaacatcatttacttttatttagatgaatgaatgagtggatacttatgtacatgaatgttcatggcccacccataaggtatcatgttacacccatcaatatgacacgtgtacaatcagactcagtacatgggtaggaaattgcccatgagctttgttattagttttgctactttcaactatcaaatacatacatttttttaagattagtaagaatttaagtatgagtatgggcaacacaaaaaaatacatgtcgatcttaagggaaatagtctttcttattaagactactactaagcatggcatttgagatcttttattatttacacctgctattactataatatacaccatatgaaa

SEQ ID NO: 46074 - DNA, 2390 bp, Cannabis sativa
  modified_base (35)..(59): a, c, t, g, unknown or other
  modified_base (2351)..(2364): a, c, t, g, unknown or other
ataaaaatataatatataatccaattcaatataannnnnnnnnnnnnnnnnnnnnnnnntacgacgttccaaacgagcccattatacaccttaaataattaattacacgcaatgctcgaaaaatttaaaaactaacatgcctagaattctgattatttaaacttttttttcaatactgtaaatattttttcaaaatgttcttagaaaggcatatgcaatacatgcttgtgatatataatacacatacacaatattttgattataatttttccacatatattaaaattttttaaaaaaaaaacgttgctggcaatagagaaaaaagtgatgattctactatgagaaattaaaaatatatattttgaagaaattaatataaataataaagaagattgattatttattattataatgagaagtacacttacagttttaggcttttgtttattcacaacaattgcctttgaactgctcgcccaggactgaggtgtactatttttgctgcctttgaactgcttttatattaatatatatatatatatattattaatttatccaatcatatatatgatatttttcttttggagaaaatacatgacaatagatgatggaagagtggatatataattttagaattttttttttttttatgaatgaaaaagctgaagaataaaatggcctatgttttacgagatttttatataatttatttatgatattattacattttatttaaaaatatattcatattatttttgcacatatattaattatcataataatatatagattttcatgataattccaaatttacacttaataaaatcacatctaaaataaaattaatgaagcaaattataaacaataaaaaatcagaactgttgaacagtaccatataaataaatttttctttgttaaaatatagtcaaaatcttgttatatatgaaatttgaccagagacaaatcacaaaattatatattctcttaatttttaaaataaaattatatatgatatatattaaaaaaaactagctcaaattcatatgtatttattttacctaattaaataaaaaataatacaaaataagataggagcaaaaatcaaattaattaatgttatgttatgtacgtaccttctgataggtaacatcattattagatgatgattgatcttgcttggttttgagcctaagcattacaattggatccaaaaactccttgtgacaatgcttataatgtccattgtaaaaacatttagggcaaacattgaagaaataatcgcaattgttctcgaaaaagcatttgacgcaagtaaaatacattccaggaatgaaattattttcgcaattggttccttggcaaaatggcctaccgctttctattatgtacaaaagagttatgatatccgcgaaaatcaagtgatctctccctcttcgccttagttggtcaaagaattttttcgaaccaaactgtgaaaacccgacgatgttcatgtacttggagaattcttcgaaactaatcttgtcaggtactttagtttccatttcttcacaaaatgctttgattgctagctttgtttcatgtttgagaagatcatagtatgcggttgccgtgtcatgcaagtcatccatattattattgcaaaccctaattaactactattaatatctctatatatatatggcaagtagttactatatatgtatatatatttagttttgagcttaatgttttgctatttatgttgtctacatgcattagctatattatatatagtgagtttggacgcggaaaataaatttatattaattaatattaattaggagtgccgcgtaactcaaattaaaaaattcagatacaatttcgtgtatatatatttatattaattttatagattgagaaaacttctatggtgggaatttatagggacatattttaaaccgttaattatgtagaattattgatcttcagtaccatatttattgtatatacctagctatacacaattctaatctaattcaaaagagtttacgtgtttaataaattatcaaaaaaaaaaaaaaaaaaagtaacctccaatgacaaacatggcccaccatcaaacaaaaatctgacactctttgtaaaaaaaaacacataacctgtataaatatataaaaaatttctcaaaaaatatatatatatttatatatataaaataaaagaagaattacattatatacttattttttatttttatttttattttattactctttaatttatacctaattttatagattatatttctattatatgcattaaaaattttaatttaataagttataatttgtgacagtcagtagtcccgnnnnnnnnnnnnnnaaataccgggtaagctgtgcaatccc

SEQ ID NO: 46075 - DNA, 2195 bp, Cannabis sativa
ttttctttggactaccaacgggccgtctcaagctaaatggaagccatttaacttaataagatattaaatgtaatattttaaaaaataaataataattaaaacacaaaatataaaatatattatttttaaaaaataaatttgaaattttttgttaaagggatttttagacttgggcgtgagctcctactgacccacccttgaaccgacttgacaactagcacagaattttgatcaagtacagctagtcatgtttaaaaatctcaaaaatcaaaatcacatgttatacatctttgaaacgtttgcttcaatgacaaataactcaaaagttgaaaatatagaactagatgtgttatacatagtataacttaatttataagccaattattttctatggaaacagaaagccaatattaatgatataaaatatttttttaaaaaaataaaggacatgcaattgcaaacaatgtaacttttggttcttctacatataaaatattccatcaataataatctactattaccaatgatgtttttagactcaaatttagtgttctccacttcacatataatctttcattttcaaatcaaaactaatcataccaaatatcgaaattagcatatataatgctaaaaagtcacaacaaattactaatttataattttgaaataaaatgagagatttggcattgtattatagatatatattttttttttgaatagcattgtattatagatgttaatttatgattaaatggaaataacatcataagataatttatctaatttagttttatttattaatttaaacatcagacgaataacaagaaccgaccttagctcagttggcagagcggaggactgtagtagggaaacctaatagatatccttaggtcgctggttcgaatccggcaggtcggaaacctttttcatattttttaggccttttatttttggtgggctgaaagcgcggcccatatttggcccatcaagggtttttcgagggtttattattattattttattttttaataaataataataataacaatggcagggtttagggcttcgccaaaaacaccaaactcaaactcaaacccaaagctaagctaatctctcctccgccatgatcagaggcggtaagagcttcgtttcggcaccaccggccttctccaatgacgctaagcgtatcttaatctgtactggacctaccgtctccatcttcagcacctctactggcttgcaggtttgttttttaatcttcagagttttattcattggttttcatgaatttgatgatggagttttttatatttagatttcttcgttggagggacacacggcggcggtgacttctgttttagtggtaccggcttcgagcccggccagcaaagttttgtgtttttgttggactgcttcgcttgatggtactattcgttattgggattttttggcaccggagttgatgaagactgttgaagttaaaatgcctatttactcaatggtaagctggtttgagttggtttagtttggttttgtggaaatgagaagtgaggaaaattgattggtaaggttttttgaatgtgatttttcaggttattccatctttattagttcaatcagataaagacaaggaaaatgagtctcctctttttgcatatatatctgttgagaatagtaatgtgcaagaaaagaaggtcaatactttgtgtggacagattaagaagtttaacttgaccaaatctcgtatggtgggtggagttgttttgagagaggtatggctttttaactcttttctgctctatttgtagtttgcatttatctgtagatttgacattggtatgaacttcttaaaggaacaaatggcgggtttcgatatgatgccctgtagtcaaaattttggtttagttagatttgtgagcttgttctttcaaaaagataagtagaatgttaagccactaacaaaataagtagaatgttaagcaacaagattagttgtgggtcctgtacttgttctacgaagatcacatgattcagaccatttgtcataataaaaaacaatggaggactttaaggtgactattcacctaacgcttttttgtttaattgtgtaaaatggatctggtaacccatttgaaagggttacatcaaattattcagtcttgaacttcagtaattttcatttaatctctatttac

SEQ ID NO: 46076 - DNA, 1291 bp, Cannabis sativa
ttgactcttcttgttcaatatcatgttatggatacaagaactgcttgtatagcacttttttttttctcaaagagaagttaaaattatatgcaataaagaaaattcattaaagttctgagctatactgagtctctagtgtttatatgcctatgagcatatataaaaaaagatccttccttttacatctcaactaataaaataagagaacagcagtttttacaatttgaaattaagggtattattgcattaaagtgtaaggagataattcctctaaaacattttgttagcatcagtaatgaagttcttttattgaatcacacagatacaagctttgcaatcaagtgtggaggaccacagatgttaggaaatgatggcgtagtgtatgaagctgaagagatagttcttggccctgcaaagtttcaagttagtggcagagagaattggggagttagtaaggttggtttatatggtgataaaacaggtaaactagatattgaaggaacccaggaacaagtcacatcaaccactgagaagccagagttcttccatactgcacgaatgtccccaggatcactaagatactatggtctcggtcttgtgaatgggctttataccgtgacgttgcattttgcagaaattggttttcctaatcaaagcacaaacttgtgggctagtctagcaaagcgtgtgttcgatatttatattcaggttagtttccagaagaagaagaagaagaaataagattttccatatttgtgatcagctcaaataatctaaaagttcttcattttcttcttagggacgccgcttagagaaggactttgacatatctaagaaggcaggtggagttttgaaagcaatccaaatgaagtacaaagtcaatgtgacagagaactatatcgaaattcacttgttctgggctggtaaagggacctgttgcatacctaaagaaggttactatggtccattgatagcagctgtccatgctgaggcaggtaatgtgtacccttaatctcaggtggttcaacctacttcaaatctcctatttgatacctgaaaatgttgtgcatattgatcagatttcaaagtatctaaaggagaaaacaagaagaagacagggataatcgtcggtattgtagtccctattatggttgtcggtctagcattgctactatttgtatgttacaagaggagaaaatatgatgaagatgatgatgaaggtataagtatattggtaggatcagatagctaaagtcaagtatattttatgtgcatatcagtatttacatgt

SEQ ID NO: 46077 - DNA, 1356 bp, Cannabis sativa
atagaactaatggaggaagtggaagaggtctctatagatgacaaagatcccaccaaggtcatcctggtggggaagaacttgcctcctgtagtaaaagaacaagttgtctccacaatcaaggcaaataatgatgtcttggcctggagtcatggtgatattaatagtattagtcccaaggttatttgccatgcatcgaacatagatcccaacgctgaactagtttgaaagaagcaaagacctttatatccagcaaggtcggaggaagcaaaaacagaagtggacaaattaacaaacatcgacttccttggggaagctctatatcccgtatggcttgccaacccagtttttgtcccaaagcctaacagaacatggaggatgtgtatagattttacagacctgaacaaggcctatcctaaagactgttttcctcttctacacatcagatggttgatgctaccttgggattttagttattgacctttatggatgcgtactccggctacaaccaaatgaaaatgcacgtagctgatcaggatcacacaagtttcaaaactgacaaagggatctactactacaaggtcatgccattcagattgaagaatgctagagccacttatcagtgaatggtgaataagatgttcaagaatgtcttggggaaaaatatggagctttacgttgacgacatgttagtaaatttgaagacgtttgaaagccattaccaagatctataagaggcttttgccatcatccaagagaacagaatgaaattaaacccaaacaagtgcacctttaaagttttttcagggagattccttggttttatagtcagctctcgaggaatcaaggaaaactcagaaaaaatcaaagcatttatagacacgccctcacccaggaaacataaagatgtctagaagctgactggaagaataggagcacttagcagatttgttcccaaatccatatataactacatacaattattcaacgtactttgaggaaatcacaaatttgaaaggacaacagaatgtgagatagccttctagcagttgaaagaacatctagtgaaggccccaatactgtccaaaccagtcgacagagaaccattatttttgtacctggcattgtctaatcatgtcgtaagcgctgcactagtgagagaagaaggaaagttacaacttctagtatattacataagcaagatactgctggatgtggagtctagatatcttatgattaaaggggtctcctttttcttattgattgcttcacaaaagttaagaccatactttcaggcccacaccataagggtactaaccaccctctctgtcaagtgttactgttgactgaggttttcgg

SEQ ID NO: 46078 - DNA, 805 bp, Cannabis sativa
tatatacacacatatatgtgtgaatttgcgccctacatttaattatgattgtcagactttaaataaatttaaacgacaaggagatatctttacatatagtgtatatctgtgtgggtcattcctccactttactagtgctacagctataattggtttttttttttcgaaatttttacactggaaaatgtgaaatctgatcaccattcagtaaagacacagaatttactataaatattacatattactttcacagagagagagaactatcttctgatctattggtcattataataatttgcaaataattaacaagaatagtagacgaatgaaaatgactgctactgctaaaaattttatctgccaaaactggatgcatgcatgtttttcagtgcagaaaaaaaaaaaggaaaaagcttataatatgatacctcttgtctatgctgatcagatcaggagttaatcaaattaattagctatataggttttattttattatgtaatcaacttaaatgataattattacaaattgttacacttggttattattggttaaattcaatataattttagtatttaaatgtagtgtctgaattttttattattaggtcgttaatttttttttaaaattattaaaattattggatttaagagtttttattcaattttactaatagattaatcctgacgttaatgaaatttaagaaacacgatttgataaatatttaaaatatttaaaaagcatttgatagatatcaaaatttgggagtaggatttagcagagacaattgctacattagtaaaatta

SEQ ID NO: 46079 - DNA, 2623 bp, Cannabis sativa
tttagggcataaaatcccaacaacctacacatgcaagcattaactgtgagtcgacagactccgtaagaaaagcacataacataaaatatattatcgatttgcatctaggtgcccatacacctatccacaaggcttatcatataagtaagaacgttctttactaaggtacgatcactgtaccacatacactcagtaccgcctagtgttggtagggtatgaatcgtaccccgagtaccgctaagtattgtactacatgcactttgtacctaaccgtacgagtattggtaatactggattgtactctcagactgtactacatgtactcagtaccattatcatactagtgttggtagcttatgaatcgagtaataacatgcatataatgcacatattcacatatataacatgttatatgctagtcttacctcgtttttgaatttaggtgtgccggtcaacctgagtgaaactgatgctcgacgatttacacgtccctaagtcacaatattcataaaactagtgagtgacacgctaaattacttttcgggaacttaaaatcaaagctaaaagtttccctatcgatggataacatgataataccctaaatatcgtaaaaacgagaaaatctaggtgccctaaaatgcccaaccggaaaactggttctgtgggttgacaggggatgaaccaaaatttcggttcctacaagtccatactgaactagtcaactggttggggcaatggggatcaaaaaaattctctgtaataaacactctcattaatacagtgactcgtgactcgtgaactaatgctcattaatgctccaactacgtaaaattcttctctcctagcattcattaattacttcacgcaactttaattaatagttgccaaaaatctcaatcaacaatgatgattcttttttttttttttgaaaaaatagccacataaacatgatatgtgagccacttttatgtagaattttttttaaaaaattattatctattaataaattttaaaaaattagaaaaaaaatatgagaaagtaaataactatttatgaatttattaaaaaattaaaaagaaataagataattaaaaagagaataaatagggttattatgagtgattatagagtgttatatcatcgtcttatatctctatcatatatatagataagaattaaaatttatatatattaatggatattaacaatgaacgcgtattattagaaaaatttaagtttctatatttaattttacaatctaattaaaaaaatctctcatttttacattatatgggcagagactgttccatcgtttgagaaataataataaaaaaagctgagtttgagttagatattttttatataaacatatttttggtatattgtaaatagagatttttttaattaagtagctaaattaaattcaaattttccttttattattgaccattgaatcaaaatctaattgtttaatatttttaaaattgatatttataacttattttagtaactattaattggtattacctattaaaaaatatttcgaatatttgtgagggtaagtaataaaaattaagataacataagtaattatattataggggaaggattttatctatccagaaaagtttattttctaacttaaaggcatgcaaaaatttcaaaaaaaattaaataataaaattttaatatcagaaaaaaaaaactcgtacctttacattttctgtcgtcccaccaatagaaaatctaccaatatgaaaaataggaatcatatacaattttcatatttaaaaaattagaatacatatttatatttaccaaatattataattataatttgtattaggataatttttacttatatacaagtaaatttactatattacaaaaaatgtgaaaaaaaatataatgacatagttctatacaattttaatttatttactttttttgaaaaaaaaataaatgcataaagttaaatatataaatacataaataaatatttatatattaatatattactaaaataatatgtttactaaaatttaatatgaaatttaaaatatataaaaatatatttataaattttgtttatattttataaataatttatatatatataaatttattaaatatttgattaatatttataatgctattgaatgtttattatgataatagttcaatatattcaacattttattagaagttcataaaaaattttaaaaataaaatacttatttttttttttttaaataaacactcatgtttaatagttatttaaaattgtgtttaagaaaataaataaaactataattaaatatgacattgtgtatagacattttgtttatattattattgataatgtttattaattattaatttaatataattattataattttttttgtgataaaattattgatataatgtgtttattaaaatttattatataattttataaataaaacataaaatatttattatttatatatatgtttgatgtatatatgttgattatttattttttaatatataatttatatataaaattaagaatatatttaagggtaaatactattttagaccctttgttttacaaaagttaccaattggaccctgtgtt

SEQ ID NO: 46080 - DNA, 1105 bp, Cannabis sativa
  modified_base (884)..(888): a, c, t, g, unknown or other
cggtcggcaaaaagaaaaagcgcggtaggactttaaaacgatgtcgtttgaactttgaaagaaaactgtagctaggtttgcacttagaccgatggttggtggcgacaaatttacacgttggcgaaagaggataaggacacaccgtcttcgaggctctgtacgcactacagctttgaatagtgctatctttaattttaacttttatacttgatcagtattattgtaccttttatttgggaaatttagatagattattaatttttatcaatttattacatttgtactgttaggtggtatttttattttttttaactgtgtatgttttttttatacgagagtataacctttttttttatacaaaagctttttatttttttttacttaccccgtatctttataagattttcccacatcaaaatttaatttttttattagaaaagttgattggacgtgagatgtggcaaaagttacaccttctttatttttttttttaatttaaacggatataaaaattattctttattattttttaatatttaacaattattatacaaatcctatttttcaatatgctcatcttcttattctagtttttttttttttttttccaatcaaaaacttctccaacccttcaaggacttcacttaaatcctcattctctctttctctttctgcttgatttgaagttagaagagagatttggattgtttggctctctattttcacatgagactaggcgatgagttagagctttaattaaggtcaaggattaagtatattatatattatatagatatgagaacactcttaatgggtattacccaagaatgggtaaaattaaaaattttgaatttttatgtttaatttttctatctaattaaaannnnntctcatttttatatcatatgagctgagattgttccatcaataaaaaaaagttttttaacaagaaaaataagaaaaaaaaaagttgagtttgagttaaatatttttgtatgaatatatttttgatatagtgtaaaaagagatatttttttatatatatatatttttaattaggtagttcaattaagcatataaattcaaatttgtgatttcattattc

SEQ ID NO: 46081 - DNA, 1185 bp, Cannabis sativa
  modified_base (90)..(104): a, c, t, g, unknown or other
tgcaatcaatgtaaggttttcttagacccttatgtgcttatttcattattttagagaattcatatttagtatgttaattcaacatacttnnnnnnnnnnnnnnntcctggtaaaatattcctaacatggcctagcctattatgccatatttgaaacatcttattactggtttggctacaatctttgttttctaaaattgagacattggcttgggcagggacaaacttgttactggctccaatttcttggtttggattgacacttgacaccagatgggaaggccgaagttggacatgagaatcctcaagagaatataggccattcttgtgaacactagtcaggagaatgttttgtgtcacctggtccttatcacggcaaaagtcagggtaaaattcaaagtatacattgttgtctctacaaaatttagagacactgagaagatttttttataactttgggcacatgcaaaagttatttaatactagaagatgataggaattggataaaaaacaagattgactaatgtgttcaatggacaaacctgtaccatcaccaacataaagattatcagggcaattatagctggttctattcattaggttctgaacatcatgagtgcaatggttggttgctctagaattggggtaccaatttgagtcttgagtggttgcattctgagccaaattggcttgtggttgattctgttgttatgtagagctgaaagccacacctgtgaagctcttatcaaacatgtagtagcaatcaagaaccatgtgaccaagtcgatgacacagttggcattgaacttttgaaggtggagcaggaaaccttccagctctcccagtgaaagatgttccacgattatatggattttgttattgtgcttgagctccattttcacgaatgtgatttccagtgtatccttttcttgagttattgaagttgctgcaatttggcataggatatcgcaggttatgattatattcagcaatgttggcttcaagattcagatcttgatcagaggcatgatcgatttcaattttagccagattcacactgatctcatgctcctgatcagtcttttcaattcttaattcagatgcaagcagtaggacttcgatttctacaatagtttagccttctatcctcgtgtttgaagagattatgaacgtgtcatactcgcag

SEQ ID NO: 46082 - DNA, 806 bp, Cannabis sativa
atcaacgttcaaaaagttgaaaatattatttattttttcctacatatcaattattactgggtatacttaattagtgtactgtaattgattatattccatatatatacataatattaataattagaataccacttaattaagcagcagttaattattttatgtgtaaatattaattaattacctttcacatttgagcgagttcaattaatattatcatgtaaattcaaaattattattaatattaaaaaagaaaagaaaagagagaagaataactgattttcttttattttaattgtttatttttagaatgatgaaagaaaacaagaaaatgaaacagtaaatagtaaagatgacaaaagagaaagaataaagggaaatagatatatatatatataggcacattcacattaggcattcattactttaggacatactttcagtttttgatgagcatgcaagttaagtgtagaaacagtcatcaacttttagtatataatttcaaaaataccataaatgttatacacaaactttatcacataactttattattgctgggtaaatcatccatatgtaataaccaacttacaaaagatatacaataaattatggaaaattttattgattgcataagtgccttatttttatgaaactgttatttttctttcattttgttaatatgaatttcatcttaaatttattaataaaatatttagaagtaactgtgtgagtgacagtcagtagtcccgtgatccgtaaggggaaatatcgggtaagctgtacaatctcacaccgcctggggaaggtca

SEQ ID NO: 46083 - DNA, 1616 bp, Cannabis sativa
taagtccctcgaaattttcattcgagcgacaagcataaaacccggttgcagggtggaaaaatttaatgtactctctatctccaccatctccatcatatgccttgattggcttgaacatggtacttgttgcgagcttaacatcttcaataggctctgcagcactggcttcaatataatactgctgatcactcaagaactgttgcaagggatccttgaattcgtgtatgctcaagtatttgttgttgtggcaacactttatgtgcacaaattgagcatctttctcggctgtctcgatttcgaattttatgtaacgacttgaaatgtcgtctcctagaaaattcaggaacgtatccctcagaccctttgctgtactctcttccttacttattcttttcaagtatttgtcattataaacagatttgataacaacaaatctgggaagtataaccgacattattgttattactccaatgaattagtaataataataagttgatatatataagtagtcagacggtatgtatttatagagagacacaaaattgtatcactggtaatattataaacgtataggcatgtattgatatcatcatcatcgttagtatatttaattaaagcttaacaacttattatatatgtatatacatgttatcaagattatttgtgtatttgtgaagatctataaattatacacacatgttatcattattatttgtgtaagcattaagatttataaattatacacagattcccaaaagccatagaagacttttactattaatacttatttaagtatactttaaaaggttttagtaatttagtcatgtctatataattttatgaggaggattgttagtgggtattagtggtgtaacaccttttatacgtgtcctcttgtaattggttagcgatactctataaaaattattatattaaattatatgggacgtgatatataattgcaccaataacgatattgacacgtaggaaggtgctagacaccaatagcatctcatattaaactatatgagaaatgctaaacaacaccagtagtgcttagcaccctcctacgtgttaatatcgttattggttcaattaagtattgggtcccatatagtttaatataataacttttagaaagtatcgttagtcaatcgaaacgcgacacatctacaaggtgctaggtaccactggtgcctaatagcaatgctctaattttattgagaattgctaaaagaccattggtgcctagcaccctccttggtgccaaacagttcagttaactgattcatgatttctgcagccgtgagtgtgttggcaaatcttgtttttaaggtatcaaccatactagatagcataaagtatcgagctttattgttagcattttaccaatgctcgaactttccttgactgccttggttgcactctcacctagttgctcaggagcttcttcagttaacataaaaagggagttttcacctatgagaacaatattaatgttctctttccatttgacaaagttagctctagaaagcttgttctcagtcaacagtaacacaattgggttgttcatagtcatattggaaaaaacaaatatcaataaatagaaatcaata

SEQ ID NO: 46084 - DNA, 1345 bp, Cannabis sativa
tagactagaccttccaagaaggtatcttagttctataatcatacaagcttccgtcaaggatagcctgtctctgaaagcagttctaataccgtgatttcggtaagcgtgttcttagaagacagtgaaattttcctttttatccaggcacacagaataagaaattgactttcttaaaatctttgccagaaaatcgtattaaactaaaaaaggaaatgacctaaaatagagatcaagtaattaattcataattaattgcccacaattataggatgcaacattgacaacttaattgtatcctatctcggagtttaagagtctttgtatgtatgtgtctatactggacttggccttcaagaatacttgtaatatttatttaaagtttgtaatgattttgagcttataaggggatttacacaataaattccacctaaatacccttatgagccatgatactaattcatactcttagggtcttagcttgatgacctctagggccagcttcctttgtcaatccctagctagttcatagcaagttcatacaatgcttgaacttatctcaagttattcctttagttcccatatcagcaaggctatgttcagtgaaaacttttttcactgtcacctctccctgagtcaatttgtctctgataaagtggtatttgatctcatcatgcttgaatctatcatgaaagacaaaattcttgcagagattaatacaaatctggatatcttaatagattataggaacactcttaagtaggttgagttcctttaggacacccttaatctatacaacctctttgatagcttttgtagcagaaacaaattcgacttctgtagttgatagagcaactattggttgcagctaaactttctaacttatacaatttccctaattataataggcagggtggaccttcttatgtctctatcaccaacataatttgagtcataaaatccttatatcaaagttgggttttgtgattttttgaacactaaaccaatatctatagttcctcttaggtacctaaatatcaattttatagcaagccaattaaattttccagggttaaccatatacttactcaaacttataatatctcaagtctagtacttaccaggttctttattacccataatctgtagcctttagtaccttcagggtaaccccaaaaaatatattttagagctttaggctctaacttaccattgctttggtgtgcataagcaggacatcaaaaggctctcaaatgtgatgggtctagtggtttaccaaacaacctctcttctagaattttaaactccacaacacttgatggacatttgttgatcaagtatgctattg

SEQ ID NO: 46085 - DNA, 2706 bp, Cannabis sativa
  modified_base (244)..(255): a, c, t, g, unknown or other
tttttttttttttttttatgatagaggcagtacagtgatggtgtattttccttaccaatctgcaatttaactttattatagctggtgaaacttaagagacaaagatatttaatattttattttaagaaaattaaggtagcttttggttggaagaaatgaaaatataggaatgagaatagaattggaatgaaattaaatttaaaatttataaaaaaattgataaaataattattattattattannnnnnnnnnnnttattattattattatttttgggttaattgcggtaatacttctaatactttcacttttcttgcgcttgactcccaaaactacaaaatcataagcaatttacaatttttattcattttaggtgttaagtgctatgttggattgtctacgtgtacatctatgtggatgtaatgtacatatgacacaattttatttggtcacgtaaaaaattatttaaaaaaattaaaaaattaaaactaaattaatttgaaattaaaaaattgtaaattgaaaaaaattgtaaaagaaaaggaagaaaaaaatatctaaggaaaagaaaaagaatatgttttcattgtaatttttttttaaaaaataaaattatgcgtacaaatacaattgagccacgtatacactatgtacacgtggacaatccaacatgacacttaatatctaaaatggatgaaaattgtaaattgctaacggctttatagttttgggggttttgccgtcaaaatttgagtgttgagggttaagtgctatcaaagtgaaagtattgggagttttactgcaattaacttttttttttttatctagctttgaaatgatcattcattctatttcaaaatagaatagtcattcctctaaaatgatggaaaagtcattctattggaatgacattctaatactttaaatgcaactaaacaaatgaatagaataatctttccattccattccattttattttatttttatttattttcagtcatggttactatgccaaaccttattgttttaatagcacttgaaaaattgaatggtgataatttcttaaattaaaatcaatttgaatttgatgttggtttatgagaactacaaatttgttcttatcgaggagtgttttgaagagctcattgccaatgccctaaagaatttatgggacaaatataatgcttggattcaatctaacaacatgacaaggtgtttcatgcttgtcagcatggatgacattatgcgcaaaacgcatgaattgatggagaatgcatatgagattatggattctttgcagtacatgtttgggtagtagtccgatcaaactaaacatgatgttacttgtagctacatgaatagtaagacaaagaagggtgtcccatgatgttacttgtagctacatgaatagtaagacaaagaagggtgtccttgtaagaactcatgtattgcatattgcagatgcatgaggcaaagatacattgggttgtgattgatgagaggattgtgcatcattcttgagtctttttctcattgctttaaaatgttcaccactaattatgtgatgaacaaactccaattcaacatgactaaattgttgaatgagttaatgatatttaagaacctcaacaataagaagagtgaatctaataatgttgaagcaaaatttgcttctccttcttctttagataagaaaaggaaattggatggtaagtacaacaacagtggtaagcgcaagaaagtaaagcaagcacctaaagctaagaagaagaaaaaaggcccaaagtccaatgacaagaaggccaaagacaagtgtttccattgtggcgtgatgagacactggaagagaagctataacaattatctctcagagataaaaaaagaaaggtaaatcttatttacatgtttatgaaactaatttataaatgatgataaatccttatggattgttgattctggaaccactaatcacatttttcttctatgaaaatatttgattcttcaaggaagctggctgatggagagttgaccatgcgagtggacaatgaagcacgagtgtctaccaagagtgttgacaaagcccgtttaaatttcaaaaataaatttttggttttgaacaatatttattttattcctgattgtatcagaaatattatttctttatctcttttgcatgaacaacattatcatatttcttttatggacaatgagattattattttaaagaatggaatgcctatttgttgtgcaaaacagaataacagactctatgtgcttagacttaataagtaattaattttggataatgaattgtttagagttgctacacctcaacataataagaggtaaaatatttcttaagatgatgaaacatatctatgacatgtgttaggtcacactggcctagatagaataaactgttttaaaatggtggtcttttgagagaacttgaggttgggattcttccggtttgtgaatcttgtcttgaaggcaagatggcaaaaatacttttacaaaaaaagtcaacagagccaaggaacaacttgagctagtacacactgatgtgtgtgaacctattaatattcaagctcgaggaggtttcaaatacttcatcacttttattggcgattattccagatatggtcatacttactgttgggttttatgccgtaaataaaactccatttcaatgtaatccattttat

SEQ ID NO: 46086 - DNA, 869 bp, Cannabis sativa
agtgaggcctttgttcatctttaaaaccaggtggttaacacatataaacatcctcatcaagcactccattaaggaacgcattgttgatgtcgatttgcctcacttcccagtcatgagccacgacaaaggtgagaacaacatgaattgtggctgccttaacaactggactaaacgtctctccaaaattcacaccaggtcgttgatgaaaacctttggcaactagttgagccttcaaccgttgaaggctgccatctgcattatatttaattttaaagacccatttgcacccaattatagtaaatgcatcagatggtggtacaagaatccaggtgcccttgcgtttaagtgcaataaatttagtggacatggcagcattccaccctttatgttggagtgcagctgcaagtgaagctcgttcgacaacagaatgatcaaagtgtgccttggccaggaacacacgaggtttaaaaatccctgatttcccttgtgtgatcatgggatgacttggagcaaagggagcttggattggttgtatcttagaagaaggagatgcaggcagattgatgtcaggttggcatgcagatgttggtgtggtaccctgtgctacatggtcaagatcatcgtaagcagggtaaggtatgggagagccaggtgaaggataatgctcacttacagtgtgttttgttgactgggatggtgatgttgcagcagggagggacgaagctactttagctccaaagggggccatgacccctcccaaaattttggacaaaaaaaaattttaaaacaattttatgtcaaaaattttattttttcaaaaatttatgtatttgaccccccttaatttctttcttttttttttttttttt

SEQ ID NO: 46087 - DNA, 1002 bp, Cannabis sativa
ttcatcacttttttaaattttcactcaccaacagtcgaaagcaccattccaccctccaactctcaaagggacaatcgactagggattctcaagcactaaccaaggtaaaaaaaaaaaagatcttttcactctttctcaatcttttccattccctcttctcatccactcattaaatttaaaaattacaaaacccctaaaaattcacatggtggttgtggcctttgcttggtgaaggaaaggagttttcaaaatttcttcaaagcttttgggaattcaagcaatttttgaggtaatttctaattctttttgctttcttgaaaatttgtgattggttttggtataaattgcatggatagaattattgtgaatgtggaaattaggattgaatttgtgttttcttgaatgtgtttggctatgtgttgtgggaatgaaatttggataggttttgaatttattttgaattggttttcatattagtgatgaaatttgactaattggaatttgaatttgcaaatttggacaagaattgcaaactttaagtataggtttggactatggaaaattggtcccaccaagtgtttgatgaaattcccaagtgagacaaacatgtgtttttttgtcactttgggtgctcgaacacatgtaatttgtacaaataccttgtttgattatttatatcgttgaattatttttgtcttgattgaatatttgacatgtccccatgtgggagttcttatggccgagaacttcaaatgattaagtcccattgttaaagtccattaacattgctctaagcatatagtcccttatgatggaccattgccacgtcatcactagtgccaatggtcatctccatggatgtgccattgtactacgtaagtggaggttgcgtaatgtcaggcataaggtcgcatgggcgactctgtctatttttccatgactttaggattaaacatgggctccaccaaacacaatagaaattttccttttcttttttttttt

SEQ ID NO: 46088 - DNA, 1041 bp, Cannabis sativa
tgtgtgtaagtggtatttgtgtacttttttttattttggctgtatatttgtttatttggctagcgggaagtatttaatatttattttttttgttaaaattaaaaaaaaccctttattcaattgtactaaagaaaaattgtgaaaaaaaattaaaagcttaatttggtacatattaaagtttaagaagtataattaatttagtaaatatcaaaatttaggtttagggacacaattcagtgtattgacactcgctaacaaaattaaacgaaattagataaaaatctttaaattaaataattttaataattaaaagaaaatttttaaccatttaaaaaatttaaaagtataatttaatatatagtataattaagtgataaaaattataattagtcttattttaacgctcaaatgcttatctaaagaaagtcaatgaataggttgacgaatataactccaatagttaaaacaacaagcaaattattcaatttggaaattttaggtgcaatagcataaaaaataagcaataaaaatcaattgaaaaatagtacataaaggtgttagctatgtcaaagcaatataaaaatgtatatatgatttttttattgaaaaatatatatatgatttaaccaaccataattcattttttttttttgaaaaaaatcacaattgaatgcttgtgtataatatttttgtgtcggtttaggaaacttacatagtagcctatcacatctaggtgcatcactataattcggtattgtagctaccactcaaaatattccaaatttatttaattcttgattttgatatttctattttttatatcgtgttatgtcgtgtttaaatcaaatttaatcgtaatttaatgttaatttaactgtaattttcgaaataatttagtcttatataagtcactttgtttatagtgactcatattctgactcggtatatctttagctagacaattaacttgttgattgaaaattcttctgcactagcgattatcatagtgtgaattaaatcactctctaaaaaacaaatata

SEQ ID NO: 46089 - DNA, 1271 bp, Cannabis sativa
tttttttttctcttcccttttgagttagtgacaactaaaataacaatttattttttagaaattaaatgaatggttactgttgatcgagattttcgacaaccgctaatcaagtattggtaagaataatttagaaatggatgaggattttttacgtggttggagcgttgatgaaccttagttcacgagtcacttttattaaaggttggaatgttctctagtttcagagaatattcagtttacagcctatgaagttcattgtgttcctgaatccaaaagtcccttttacatttattgtctttaggtatttataggagaggaatgagatcagaggagaaaagggtaaatctctcttttacctctaggcactatctagtctccgtagtaggagtttggtgcatgagacaaaatttatcccatatgcagttgatgtgacaatatagagaatatagctgccactttatttatataggtaaatgggttgttagaacagtatggtcttctaatgatgttaaccattcgttgaaccagtcgtctacagtgatttattttttagaattcgtgttatgcgaataattgagtctccaatagcttatgatccgagagctcgtgactttctggatggcaaaagtcatcattctctcttaaccactctcctaaaaagtgcgtgactcctcccaaatgcgtcttcacactttgtgattttaattaaaggatttatacgacagtgagtattaatctcatagcaggtagacccctttgtcacgcggtgcctcctgtactgaccacttgttttggtaaaatatatgctcaacaattacattaataatagaaataataatataatataatgggtaatatatatttgaaataataaaaaattaactagataagtaggattttaactccttatccctacaccaacaagaaacctcttcattatttcaaggtaaattttgaccttttccctcagctaagtatgctttagactccaaacaacctcaaaaacttatgttgtattccacgactaaaacactcatggttttgatatcttttaacaaatacggaaaaattggagtaggttattgccatacaattggggtcaacaattctattttatatttattttaagaattaattaatatttaattttgcaattgtacattggagataaatatagtataatttttatattttctatttgaaatggcctttatacaattgttatgcttgttataacttggtttttgggttgctataacccttttatgata

SEQ ID NO: 46090 - DNA, 958 bp, Cannabis sativa
gaacttgatattgtagacagtggccgttatgatgagtatgggtgggggaatgcgtgttttgagatgactattgaatcttttaagggtaagattgatgcatatattaggaatgttagcaagaaggataaggaaggcgagttttatagattattatgttttacttatgcattgcaagtttagttttttgagtattgtccatacatcattgaaaaactttctttgtattcaaacattgacatttttaggcttcttaactggcctcaaatgcagaagcttaaagtatttcagtagaaaatggacaatgtgaatagcatcatcttcaattggcatttaaaggaggtatttgtgtatttttttacttttgttttttttgttgtttcagtgttgttttttcattttttttttatgaattatatgtttattcacttttattcctttttttttttatatcttttttattttttcttcaagttacaaatggagaatatttctccaacttctgttgagagatccaacttgaatctggctaattatttttctggtgacacgaatccttcctttattaaggttaaaggtaaacgtaatcgtgaattcggttctaaatctgtggccaatgattatgtggaaagtgatcaagttggtccatcattgtataaggctcatgagcatgtaactcatattgagtacgaggatttaaaaaaagatgtgtctcttgttcttagccatcagcggattcttatgtctacttttgctaatttgaacaaaaagatggatactcttattggggtattatttttttgtttctatttttaatgtagtacttgtgtagtttctgtgttgttttttatttcgtttaggtttttattcaaatttccctttttcctagtcttcgtgtgctgcttttagccatcgttcgagccaaatagaggatgtgctttgctcctcagaaaatgatgat

SEQ ID NO: 46091 - DNA, 558 bp, Cannabis sativa
taggaattcaaagtatgttttggacaacattgctctattgggaaaacttatttcttatatttctttgtactttggaattttggttattcagatgttgagtttgacctattttaggttttacttttaactattctctaatacatttatatggttttgttcttgctcgattgtgttttgccttcaagcatttttcttgaaaattatttagaaaaaagtttagggtgtaattgatttaggatttgaaaactgttttcaaaacaaaatctgaatattattttgagttttagataaaaaaaattaaacatcatttttatgttttcaaaccatggaatctaaaaactctttaaatatactcttacctttttattttgaggttctagtctcaactaatcacatattcaattttttaaaattaaaaaacattaatccatactaaaaaaccaatcatatttttagaaataattttttacaaacaaaatgtaaatttttgttttcaaaacgtatttcttacgtagatcaattgccatccgatactcaccatttttactataatgccaa

SEQ ID NO: 46092 - DNA, 5336 bp, Cannabis sativa
gtagactcctgccactaatttttggttgagcagaatgtctacctggaatttcaagaagccccttcgagccgtaacctctctcggggctctgtcgaagtccacatattcccctaccttcctggcgataacgtccgtgttctcccaagtgagatatggtgtgggcagcccatgagcctccacccagtacctggccttgttcatatccgtgcgttcccaactcccatcttctggccaatctcttatattcaataaaaccccattcaccagccatggtcttttcttaagtatctccttcttgtcatcttcattgtcaaagaagaacccccatagacctggtgccatggttttcattctccacttccctttcagcttccatacattggatagaatttccttcactcttcctctagccacatctcttctcccaaatatctttgcaaggaccccttttctcgttatctcagcactgagttccacatccggctctagttccagggtcatagactcaaggaattgttgcctcatatcatctatctcccctgcctcttgctccgttcccccaatattatcgttcatcctctgcatcccttctccttcacctgccatttgactatcttccaccctcacctcttcttgtaatatcgtatctgttgtttgcctatccccagatgtctgagtattgtccattgaagctcaagttgagtatactgttttactgtttcgtcgactatggtaatggtcgaaacctcggactaccgagagcacattagagtgtattttatttacaacatttaggtaaaagttactgtataagcacgaacttaacgatcatcaatttgagttttatcaacaaaactctttcttcttccggttggttagttgcttggtttctttccatatgtttattattagtacttttttgttttttttttttttgaaaatagtctccaaatcgcctgatcaatggtgtgttttgtgttttgacactttgcagttcaacatatacccctactttataaaccaatcattttaaaattttgtcgtgaatgtttattttttttttgaagaatatttgtttgagccttcaggttatatatgaatatgaggtggtgtgagtgatttgaatattactcaatatatatatgggaaccgatttggtcacccctgacatgaagacataaaggaggaacttgtgccttccataaatccaaaccatccattatatatttataatcttgtagctgataaagtgaaaggaatgatagatataataaattgcacctgacataattgataaaaatatggacatgctataacataagggcacctaatatataataacttattaaaatatactttctatcaaaattaaaaaaaaaaatatatggtagcgtttaataacacttttttaattaattttttatttttaaaattagaaaagtgtattagtgaacaagaaaatagagtaaaaacagggaagaaaaaatcgtattgtgttattcaaatagtaaattggtacaagagcttatatagtgtgttaggtacaagaggttagttgcaactaactaactgacctaatgaataactaatataacaaaaaataacagaatcctaataacctctaatagggccccttcaaggtggtgtgtaaaattttttaacacccatcttggatacaatgttatgaaattgagtggggaagagaagcttgattaagatatctgctaggttgttttgagaagtgacatgattcacatgaagtgtactattggtgatcttttcacgaactgtatgacaatcgatttctacatgctttgtctgtttatgaaagacgggatttttagcaatatgaatagtcgcactgttatcacaatataaaatggatggcattttgatggagacaccaaagtctaggagtatggagatgagctaagtaaactcacaagtggcatgggccattgatctatattcggcttcagtagagaacctggagatggtttgctgctttttagatttccaagacagtagagaatgtcccaagaaaacgcagtatcctgaaatggatctccttgaatctaggaagccccccaatcagcatcagcaaaggcatggagtttgacgggatcaggtgttttagcatgatagagcatgcccaaccctggggaggttttaaggtagttgacaactttgattgcagcttgttaatgaggctgtcgaggctcctgaatgtattgactcagtttgttgacagcaaaactgatgtcaggtcgagtgattgtaaggtagatgagcttgcctatgagacttctatattgctttggatctagaagaagatcacctgattcattgcttaacttgaggtttggttctattgttgttgaattaggcttcgagccaaggtgacctgtgtcttgaagaagttgcatggtgaatggtctttgggagactgaaattcctttactgcatcgagcaactttaagtcctaagaagaaccgtaggcttccaagatcttttagtttaaaagtagagtcaagagtagcaataaattgattgaggacatggatgttgttagtagctacaataatgtcatctatatatataagtaaagctaaaaaggcatgtggtgtatttttaatatacaaggagtggtcacttttggactgttgaaaaccttgtgtaatgaaagtggagcttagtttagcataccactgtcgagatgcttgttttaaactgtacaaaattttcttgaatttaaaaacggcattgtgtggtatcacccctttgggaacgtaaccttgaggtagtttcatattaaacataaatcaccatggagaaaagcattgtctatatccatgtgatgaaggtgccattgtttgatggaagcaagagaaaaaagtaatttgagtgtattaaacttagctacaggagcataagtgtcaaaaaaatcaatatcttgttgttgggtatatcctttagcaactagttttagcctattgactgatccatctagattgtattttatcttgtagacccatttgtttctaattacatgttgttttggtggtatgtgacaatccaagtatggtttctttctaatgcatccgtttcagcatccatggcctgtaaccaggcagcttatttagaatcttcagcataagactttggttcaataaatgtgtgagatgcaaggatagcaaccctgaaaatgttagaaaatcgattgtaagaaacatagttagcaattggatagtttgttgattgagcaaccttatcacagatgtagtcttgtaaatatagaggttttgtaatgtttctaccagattttgaagtggtttggggcactgtggtatggatggggtgactgtgggcattatctgatggaacagggtctactgtggtgggagggttgaggattattgaaccaggtgttgcagaagtgatatctactggtgtaggggcaacaaaagtgttatctgctggtttggtagcagcagaggtgttatctgctggtttagtggtagcaggaaagaagttgtcaatgttggcattgggattgttatttgtgagagggtatatggactcatagaatataacatctcttgagtgaaaaatgttgttggattgaatgtctagtaaggtgtaggctttcatattatcgggatagccaataaaaatgcaagctttggccctaggagacaatttgtggctgctggtatggggagaagcatagcataaacaaccataattagatggtcataagagggaatcttgttgttcaagagttcataaggtgtcttatcattcagtattacagaatgagttctattaatcaagtaacaaaagttcttaccaggaaactccagtaaacgaggggtaagttggattgaaaagctagagctctagccacattcaatatatgttggtgtttcttttcaacagtggaattctactgaggtctgttaacacaagatttgttgatgtaaaactcatttgctagcataaaaggctattaatgtgagttcattggcattatcagttctcactgctttaatttacatttgtaatgaacattgacataagtaaagaaattaaaaatgattgatgctgcctcagatttagctttaagtaagtatatccaactgtattgagaatgatcatctacaatggttaggaaatacctatatccttcaattgattcaatgggataaggtcctcaaatattcatgtgaacaagatcaaagatttgttgtgaaaaattggtattagcgttaaatgacagttttctttacttagcaaagtgacagattttgcaattaaaaatatgagacaaattagaagaacaatgcaactttttattgagtttatgagttatttttcagaaggataaccaagccgagtatgccattggtttgtattaatatgcatattataagtaatggaatttgaaatgtgtttggaatggatttcctgctgaatgtagtagagatttccaagtctagtagcagtcccaatcttcaatatctatgagatgtcctaaatgtaacaatggttagaagtgaagtgtaaagtatgtttgttatcatttaggaaagagctaacagagaataaattgaaatggaactgggggacaaacaacacatttgttaaaataaccttggaattaagtatcacagttctaactcttccaattttaacagaattgacattaggtaaagtgacaacatcaacatgtttcttattgacaaaaaaagagaaacatctaatatcacaacatacatggtgggtagccccactatcaatgatccaaaagttgtaagggaaagagctaaagttaccaaaaaaattggtgacagctgcattagtttctggtgtagaagaaatggatggttgcagcagttgagtgagcatggaaatgatctgctagcattgctctgtggttaattggggggttgtggatcagatgatgttgtggaggtctgcattgtatgagggttggttcgagatgtggtggtggaatcaggcttgcttttgcctttggcagcagtctctgtgttctctaattgccatatccagggagaaaaccaatgaggaaataacatttatctcgaagatggcctggtttttggcaattggaacaagttggacgcatctttttattttttgtagtgaagttggctgcaagaataggatcaaggttgggtgtagaaggtgtagatgataaagcagctgcagcgagggggtaggtaacaccctaactagcatagacgtattacgtgatttttaaacatactgtgcagctcgatgctaatcaccgaggtttatggaaatcgtgatta

SEQ ID NO: 46093 - DNA, 803 bp, Cannabis sativa
aataagattattcatggtgatacacaattggattttaaatggcatggtcactaagtggtcaattgattatttatgtgtacacataaagttatatatgtagtgttgtcaccgaagttaaaatgcatatatgactgtttccaaagttgaattgttgttgttcctatttgcctttttggcaagtagaatattatatttgaaatcatattaaaatatgcatgttatacaatgttagttgttgcacttattaattggcaccattagttacaacatgtacttattatttgtttgagagaaagatattttactttattaattagtttcggtcttttctcttgttttttttttttcattatgaaacttttaaaatggtatgaaggctagcttaacaaagtgattgaaattttgcaatgtatattatcgtttgttgttgtgttctgtcaaagaagagtctccctcttactgttattatagattctaatgaaaatcttactgaaccatctgcagaaaatgcttttgccatttaggcttccacccgaaagagagaacgatttctaagttaaaacagttcatcaggtcttcttcatgctttgtagtttccatttccatttggggtatctatatatctatctgtggcactgaaaaaatacttatatatgatatcaatataggaaattgaatgctgagattggtttcttgtttgtgaatttcttatcatttatttaagtcaagaattaattttagattttgagtgtttgggatagattttgttttgtctaaaatcttttggtcttcttgttcttcat

SEQ ID NO: 46094 - DNA, 1023 bp, Cannabis sativa
ttttgacaaaataaaagcttgttgcaaatgtttaattttgaactttactgtgttagatggctcatgacatgcacgttaaaaatgctcgcgaagtccctgagtatgagattgatcccaaggagcttgatttgtctcagaaacccataaccaaggtagtttactattcattgccttcaactttgtatttcttgaatcactgagtctgccaggtatttgtttgacactgtttctagtagtgttttattatccttatttagtgtcatacttcttacaatcccagtctgcaagtttagagatcttgggttatacaacctatttgcaagatcttgtgaattttgcaataatgactaagtaccttaataagatgcatggtggttaaaaaaggagaagatttgacatatgctataatattaaaatatgaattttggagcatcatgaactaattcattttacttgtgaaagagtcttggcatggtgacagcgcatatttatacttaaaagtctcatgttagcacttatttgctaattccaaacttttcttttcaataacttgtattcaatcatatttttctttgatggtcagggaacatttcaattagcatcgtggcgtggaattcaagttgctgtcaaaacacttgaggaggaagtacttactgatgataataaagtgtgagttagttttcctctatttcttttatccctatactttcatctggtgtaacttaaatatgaaatttggtgttgaatattctttttgactgaaactattccctatgaaatgtagaaatgcattcagggatgaactcgcattacttcaaaagttgcgtcatccaaatgttgttcaatttttgggtgctgtaacacaaagcagtccaatgatgattgtcacggaatatctaccaaaggtttatcccatttttctcttaaaacaataccatttctatcactgtcttctgcaatatagtttattgtggcttgatcctgtctgtcatgatataagactgatttataaagtgaaaaaaa

SEQ ID NO: 46095 - DNA, 1349 bp, Cannabis sativa
gtaaatatgtaccgacccacctggcgcgtcactatatcataacccaaaattaaaaaaaaaaatagttatattaaatataattttttattcatataaaatgtattttttttttaaaaaaaaaaacaagagtacggctggcacagctgtaatatttattattttcattcccaaaaaatacactttatatcttaaataataaacaaaccctaggtcattgttagtagcagccatcctctttgctctctctgaatatttttttaaccaatgatctcctcttctctcaacagcaagaacaaaaaaaaaaaaaatgcagccgctcccttctctttcttcatctctcttgctcgatcctccatggcagcccgagttccaatttagccaggtgaacggccaggggacggccaggtgaacagccagcgaacatcctctctctctctcgatcctccatggcaacccgaccttcccattctctccctctcaaattctctcagtcgatccttgaagccagtactttcttgttctctccctctcgatcctcgacaacaaccacctcaaggccagatggccattgtcttccttgaagaccatcgacgatctcgtcttcttagatgaagatgctattattaattcaggtagccttaaatgtttacatgaacattttatcattttgacttgagatgaagaagtcaatttgaaatgcgtcaaggtttatctgtgctaataaactgaaaagaaaaaataaaaaattaaaataaggtagcatctgaataaaattttcagagtactactttttgagtggtacatgcatactcgctctaaaactgtatcctcttttgaagaactgcatctacattttagcttgttgataggtgtttatttatgacatgcttttgtattacctctagcactttgttagcatatccttgccattgtttgataatgtctaaaacctgctatatgtacatatttttttgttgtcctacttttactttttactaatctttatggaaatcttgcccttgcagattcgtggctttgtggatagattgattgagaggcacatggcgttgaagccaattttaaaatcttgatggccataattatttatcaacatttgtttctaatgcactttcatctggagagggaataaagatcggcacttggtttgaactgccaaatgagtttctaatggtacagaagtgcagttgaaaatttatcattgcatgttgatggtacatggtgtttcgtattgtaattgttcaaatctgctcagaacaatgcaaccacattgagtttggttttgatattttggttaatgttctactggttgaggctgcctttgttcttta

SEQ ID NO: 46096 - DNA, 818 bp, Cannabis sativa
attgtgtggtaaaaatgagaaaaacaaataaattagaatttaagtagagaaattaagataatgagtatgtaattttaaaataaaagtgaaatataatttttattgtataggtttggtaattttaccaaaccaagttaaatttctttacttcactgcgaccacatgtaatgctgttggcattttgtttaatcatagtgaagaaaggacgccatataatttagcagtaatgttaaaaaaaggcacatgtgacttaccatagcagaataaaattaaaaacaacacgaaaagtaaatttaaataaattgtgaaagttattacttgtaataatatggtcaggtaatcaagtgatactaccttgaaaattaaataatgtaatttaggggcaaatggaaaagaaaaaagaaaaaaaaaaaagtgaaagctagctactactattataaagatggccttcttgacttttagggaagaaaaaatgggttattatgtgggttgtcttccttcttctgataattatgtaactttctttaactgaatcatttggttccttgcttcacatttacgtttcatactcctattggattgaaggcaacaagaataataaaataaatgtaattgtagcatataaagttgacatagaggctggtgtagtaaatttttttattaattagttatatttaattaaggttaattagattatttttttctccgaattttaacatgtaccaaatcatgttctctgaatttttttagttgttaaaaattcctactgaaactattgagattgttagatttataggcttttgtctaatttcattcaa

SEQ ID NO: 46097 - DNA, 3843 bp, Cannabis sativa
  modified_base (1861)..(1862): a, c, t, g, unknown or other
  modified_base (3781)..(3805): a, c, t, g, unknown or other
tggagagacaggcccaggagttggcaagcctgcgattggcgagccccatctggacttaggagaagaccttaagttgcaagactcagagaagctataggtcgtgcatgcctaactgaagaacaatgcgctgctgattgcgctgtttttgctcagtagagatacgaattcgtgagatggatggatgacaaggattacatccttcgatctcaccaagtagagttagttcgtcacaatcgagaggccaacaatttaataagacggttcaactagtgaatcgataaaagtggccagatcttcccttgccagaaggaggacagaccttgcctcagaggtcaaatgatgaaaatagctagatcccagcaaccaacggcatgaggggccagggatctctagctcagcaacacccctattgtgcagccactagctggccatccatcaacaggagtacctttggccagccagagtaaaccacttcctccttaaggggagcgaggtgccctgaggtcaatcttcaactgaagaggatcgagagtgggtggaaacacccaaaatggtgattcgacgagtgaagtcaatcactttagacatctagatctgccaaactccaacaattggtgtgatctaccccctacaacacacaaccagcactagtcgaccgtggagtcacgagcggctaaaccctgccctttgtaggtctagccaaccatggaagcatcacaagcagcagaccttaccctttccaggtctggccagcaatggaggagtactgggcagccaaaccctgcccaatgcaggtcttgccggccaagcacagcaaccaggtgtgtgtaggcctagccggccaaggccaactctcgtaccaaggaatggtcggccatggtctacagtttaacacggggctagttgaccttcaccatacactttcctagggtacggacagccagcctctatgtctctagaatctacagcctccccaaggagggtcggtcaaacaagtccccacaacaatagatccttctgtgcaagcacagttggaccagctcagggacatgatacaaggcatagttggcccaaagccttttgaccttaaacttgattggtcaaggggattgccattctcagcatacataaatgccttgcccttacccaagttcaaaatgtcagtatggaagatgtataccagtcgataggatccactagctcacatcaattatttcaagatgcaactcgatctccagaaggttactggtgacgtgcgatgctgcattttcccagccacattgccgaaaatagctcaataatgatactttaaactcaccctaggaaaatttaactctcaagctgagttcccatgagaattctacacacaattctcgtcctcgagacttgtaccatcacaactagaagaccttgtcaaagtcaaacaacgacaatgggaacctctgaaggattacatccaaaagtttatggccgaggctactaaagtcaaaggccttatacaagaaggctgatatatgaccatactagggggcatactctcgttgagtgtcttttgaaaaaatatccaaaggatatctaccaacaacatgaaggagttccttgatagagctgatggccttatcaaacttgaagtagccacacgacaagcctagggaaggtatgttaacaacaggcagtcacgagacatccaacaacctcatgagtcaccaggcacacaagtagacacaagtaattctgcccagaattctagtggcaaaaatactaaaaacaagcacagcaccgacagcttttgaaggaacaatggcaaaaaggggaagttcaacacttttcccacgccacagaagaataaggaggagaagtnnacctgcttcaccctcctaacagagaagcttgaggccatcttcacggccactcagggaacagtcccataccaaaagccctttcttattaggaaagagatgggccatgacactagtgagtatcaaaacttgaagagggagattcaatacctaataaggtgtaacaatccccatctgcgtcattatgtgaaaaataaccagacctaggtgcaaggaggacagaacggagatctgatgccattgcctatggtaggacacctaagggtcatcactggtggaccccacattgcaggcgagaccagcaaagctatggagcgctatgctcggaaactaagtcacgagcctaaaagcgatatcctagctgttgaagaccgaagctctaagcaacaaaagcctacgaagcccacaatctccttcaccaaagaagatgctgcccaagtcagtttcccgcacaatgactccctggtcattactgtacaaattgggaacatgactgtggcaagatgtatggtggacaatagagcctcctccaacattattttcaaatcaacatatgaaaagttggggctctaacacaccaacttggtgcctttacaatcaagtgatgtatggcttctttggccaaggcatcgcacctgttaattatatcaaattacccctcatagtgggagaaaatccaaccaccaaaacattaacggtgcagtttgtcgtgattgacattcaactttgaatgccatgataggtcgaccgacccttaatgacttgaaggcattgacatctatctaccacctctgccttaaatttctaataaggcatggggtggcatgtgtgaggggagaccagcagtctacttgtcactgctacaacttggccctattcaaggccaaaaacgagaagatgcatgctaaaagcccagagaacgagcccaataaggggcaatgaagtctagcccaaggcagggacatagacatagatcttcgctttagggatcctacaggaagcttcagacctgtagaaaagttggaagaagtggaggttgatcccacttccccaacaagaagactgaagatcagtttaggcttggctctagaaattggatcaatattaatagaatttataagggcaaacttggacctttttgcatggtcacatggagacatggtcagaatctaccccatgcactcaacattaatccaagcatctaacctgttcagcaaaaaaggcagttattagacaaggagcatgcccaagccctcaaagatgaggtcaaaaggctgagagccaatgatttcataatagaggcattctaccctcagtgggtatccaacccagtactggttccacgacccaataagaagtggaaagtatgcattgacttcaccaacctaaataaagcatgtccaaaagactactttctgctacccagaatcgaccagctagtagatgccacagctagccatgaaatctagagtttcatggacacgtattcaggttacaatcatataaagatgcatccacaaaatcaggagcacactagcttcatgacggacctaggcctttactgctacaaagtcatgcccttcgggttggagaatgcaggggccatatatcaaaggctggtgaacatgatgttcacagatctcatcggccgcaacatggaggtgtatgtggacgacatgcttgtcaagtccaaaaaggttgggggcatatggaggacctatacgagtgctttaaaatccttctcactacaacatgaagctcaaccccctcaaatgctcttttggcgtaggctcgagaaaattccttggcttcataatcaacattaggggaatagaagcaaatctagacaagatccaagcccttttggacatgaagtcgctcacaactatcaagacatctttccttaatggaattcttgaagnnnnnnnnnnnnnnnnnnnnnnnnnaggctatgttcttccagggcaggaaaagaaagtttgca

SEQ ID NO: 46098 - DNA, 865 bp, Cannabis sativa
tagatgcatgttacttggtagctagttcatcatgtgcttaatcttcccaaaaaagtattctaatgctgactcatatatatgtgtacgctaaatgaaatggaattttaggggttgaatatatatatattgaaaaaagggcaaagccaaacgtaggttgtttactcattagaactaactttttgcactgtatgatatatggctctcaattatcagtttcttcccataaatattacaacatgggggccttttattttcaaccgtggaacatgcgtctttaacaatattatgcatgtgtcaatatacatatataaatatgttactttgatcatcaacgtgtgtcatcgcatctctagtccacagataaatgagagaaatagatatatgtcattactaattagggccaccttctataaagtatacataataatattgttttattgagttgtacatgacatgtacagatatatacaacttgttattcttaaattacacacgtgcatggtaacatacaaataggttcgaatatatgactcgttgaaatactacttagctaatagtcatcaattaattttatcccacaaaatttactatatgtatgaacaagtttataactatagtttgatgatcataacgttgttaattatttaatttctttctcaccaccaattatttaagacttttcttaaattacattgtaggtggtcaaaaattgcaaagcatttaccaggaaggacagataacgaaataaagaactactggaggactagaattcaaaagcatatgaagcaagctgatcatcatcatcataatcaaaacaacaacaatactcaaaatcatcagtaccatcaccatccccatcatcaga

SEQ ID NO: 46099 - DNA, 1515 bp, Cannabis sativa
attaaggttattataaaaattaaatgaagtgactcataattttattttaatttcgttttgttttttcttaagatttctttccacaagaaaactcggtcattttcttatttatttcttttatttttttattatttgcaaaagacaacaagaaaaagtatttaacattttattttattaaattataggttacgtaaccaaaatagttgacttaatataccattcacaacatcatgtactaaaaatactaattacactgtagtttaagctattatacattatcattctttttttttttttttgaagtatgaataattgttactacccaataaaattttcttattgtcttttttttggattattataaaaagacttaacatctcatctcatataactttcacttgtacaaaaacaaaactacaaaattcttcaaagagtactttgaccaaatgggaaaaatatgtcccatcaaatattttatacaaaaatttcaaatgctaaaattttgtcaccttgtaaaatattagttatttattttatgttaactataagatattatgccagctaatattgttccatttttttcatcgatatatattttattttttatttgaataattattatacaaaattattcttcaatgacaatttatttttaaagtatttatatatcattagaaattgagattattttacaaatacacaaaaataacaataaaaaaattataaaaatacagttgtatgaaatttaaaatatttttacattttttatgatttatttacagaaaataaagttttttgacatatttttatattatatatttgttaatttgttgttgatttttttattgttgttttgatgttattttcttttacttttatgtaattattttattgtttttgtgttattttttcagaaaaccgtaaaaatatgtatacaaaaatctttaaagttaaaaatgtaagttttttacaacaaattatactttatgtaattattccttaaaattattatatgtcaaaattctaatttgaaaactaatttttcaacatttttcttaaaaaaagaaaaaataacctatcaaaagttcttatgaaaaaaatatgaaaaccacttctcctaaaattattttttgaaattattttattattttatagatttaataaaatcaaagtagcatttatccaacggttaaaatttaggtaatgtgagacaaaaataaacatacaattttttttttgataaatttaattaaaacaaggtagcatttatataattactaaaaccctattgtggagttaacttgtatgccaaaaacacacatatatcacttacacataaataatatagaacaaaacacacataattttattttctaataaatttaattatactaaaataatatttatccaattattaactaataataataataaattagggtaccaattgttttaatgtgtatcaaatttgagtgtatattattacgagaaattttcaaaaattctttttttttt

SEQ ID NO: 46100 - DNA, 2603 bp, Cannabis sativa
aatcccaacaattacaaacttacgagctccaagattatacaaacgctgccgaaaataaattagaataattttatgcaataatataaaagatatcgtatcagtaatgttgagttgttagatgtacaaccaaagttgacattggctagaaataggaaccatcttaggtatatataaggatgaatactatcaccattgaaaaataagatcttttgggaaaatgcccaaaaactaatgcttagacacaatccacattccttataaataatttaatattcacatttaatttttttgctcaccaatttatatttgaattaccgaatctaaagctactgacttttatctcaattttcctcatgataccatataataagaatcacattccgtttaaaacttaattagtgattagtggagttcgtctatgttcatcattatttttgtcagataccatactctaatatatcaaaaaggaacagagtacataaaaaaaaaagttaactaatatatatacgtaacaaatgtgttgtaattaactaattaattaattattaccttaacttgtcccttaaaagtaactaccattgagtttatgtattggcgcaatgtggttttattacgcaaatctgcggaaccaaagtagctgaacacgtcattgcttccagtcacaattacaaagagggattttgagagatgttgattcaagccggaggctcctaactgtttgtttaaggcttcatgcacctttacaaagctacttacttgttttgttaagcataatgactggggttgaaagcacatcaacaatataaatccaatgttataatatttttgtggaaattttgtttgaaaaacaaattatataatttaatgtttttgtttgacttacatactgatgatttgtctgattaagaattccagaaccaccagaagcaaagtttacacctgttaggaaatttttacttctctgttctaacttgtatagggtagacagatatggcggggaatatggtaagcccactttttcagctgcccaaaaattacattaaaatatcaaatacctttgtatgacagtcaatgttcctcattttccggacattagaatttatttattttttggcttgaaactcatatgaaaatgaaaatagtattggaaataatatattagttgaaatataagagatcacttaccaagaagatcaatagcattcttgccattacaaaacctcccggttggttttttggtggggaagtctatgccattgtgtggaaaatttgctttgactacagaaaagacgaggtaattgttgttgcccacatcggctaaggagtccccaaatgcataaatggccgggacaaggggatatgcaaatgatacactagtactacttaactgacaaaaccataacaagaaggtgatcatgatcactaccaaaataatgttcttattagccattacaatggtctagccttctaggattacaattctgatctcttatttctttcttttgtcattaccatatgtacaatttcaaaaatcacaactacatacataaatactaattaattaatgttgtagatttgctagtgaggcatttaagggggtttggtatacgtaagcgagtggtgagtaaatgaggtgtagggttgagatttttaatgtagttcattttatatatttctgatctgttgccttggaggatcgaccaaaaatacattcgcattaaatatggtgttataagttttaattttgttagcatgtaaactgattatcacatatacccgttatatacatatatatatatagattaatatataaaagggagttttatacggaaacatgtctgtgagtggggtaaattaaccatcattatttggacacatctgatgagagaagatgataaagtaattattaattatcactaccaacatcatcaagtgccacccacattaaatattgttgcatcatcataaacattctataaggttctgaaggaaaagtcacgtttggacataagagcactcacatcaccttgtttattttattttttaatttttttaattaaatttctactttatttattttagctatagagcattgttctattcttttaattaatacatcacataaattatattttatctattttatagtaagcatttacattatacaatctatcaatttctctattttttttccttctattttatcttttaatatatcttattcaatttaaatacataatattaatatatacacacataatcatacataaaaaattatttaaaacttaattaataaaatatgtttagaaaatgaataataatactctacaacaacattattaatttgttgttttaaaatttatgtaaaataaagcattttctatgtcatatttttcttaaatttgtatccagttctctattttaactttaaataacaagaattttgatgagctatatttcattgcacatctttacttaatgctttcacatttcacacctttaatatcaatatataatttgaccaaagagttggccatccaataccattacatcggctggttgcctgggcctttgcaacgtacaaacatcaccacccctttgtt

SEQ ID NO: 46101 - DNA, 1128 bp, Cannabis sativa
tacattactaatatattatgcttatatatatcaattaatatatacaataatatgatcatcatacattattatttttttctttttgaccaactgaatttaattaatgtaaaactttgaaaagttgaatttaatgacatattcgtcaaaatattattttaattaattattacacgtttgaaaactctatatataaatgatataattaatataacatattctagaggaggtaatggattttacacattccatcaattattattattattatctagtcgaaaatggggaatagtactcttttatttgattcgaaattactaaaattatatgaagaaaataaaatatatataataatatgaaaaagagaataaaacgttgatagtgtataattattaatttattatattcaatattattgatattatgggtaataattcatttttaaaaattataaatttgtacttaaattattaaaagtaataataattttatatgaaaatgaaacttgtgatagatacttgtgaggacgaaaatgaaacttttttataagtatagagaataaatgttaaattttatgtgaaaataatttttagtgcattaattacaatttttttaattccctctcctctctataataaattaattatgaaaaagataaacttaatgtaaattgacatagaatctccaatagaagatgtaacgtaaaagactgtaaaaaaattaataattaatgtaaaaatgtgtgaaatttttttttttatggtgtaattttgtaatattgtacaaaatttaataaatgtgttaatagaaaattttatgagaagtatagtacttagaaaaatcaggagacaaaagaagaagaaaaaaaggtttgccaatgaaaacaaagtgtggatgaaaggattgaattgaaaaaaaaaaaattatcaagagctaaaatattattcttacaaaattagggttaatatatcaaattttaaataatgaaaaaacatttacttgcacaaccctaattagcattatttttaattagctatatagtttcttatatatgtactaagttttgcacgtctacttagttgtatttttagtttttatttttgttacgtgtatttttaaaattttataaat

SEQ ID NO: 46102 - DNA, 1337 bp, Cannabis sativa
atggaaagagatgtactctgtgaaaaatagctgcacacttccattgtggttctcagcacatgcatttaggagcacaatattatcttgtcaatagctgtgagtgaaggtactttggtacaatttcttttgttactgtacataaatttcctgccaaaaaaatttcttagaaattattactgtttcatattttcatgattaatgtcaaacaagccattgccttgggaggaagaattgtactgttccatgaaagctttgatatatgtacttaaatttacttgttgattctagtttcactttgtaattttgcttatgtaaaaaatcaataatcatatgaaatataaagtactcatttctactttcttaataaacaccctttttaggatcacatatgtaattcaatgtgattattgtttaaaatcaaagcttttttaggatctcttttgcagacacaatccaaagttgtaaagaaagtgtctggtttgttaaaagtgtgtggtttgaacgtgagtcctcctaactcttaacaaatcacattcacacactcacaactgaggccattgagtaggtttgcctttttagaacatctttactttagtgtctataaaacatgttttcaacacaagtgtatgcatattagattacactagacattgttccaacacgtgtgtatattttacaggtgattaggtaccttcattgttctgctgttgattacattggtcaatgttggtgttgtgtgtgtattattttgtgtctttgaggacctctttttcaactaatgacttgattaggtattgtgtactgacaaagttcatggagaacaaggtgaataatatcttatgataaaggcaaagatttgaatttttaatgattttagagcttgaacatatatgatcaatcttcattttcaataaaaagaaaacagagaaggttaatagttgaggtgagtgagatggttgaagaggagaaataattggtaagggagttgatacctcctatcccattgcatattagaataaatattttgaattgaatttacaaacaattatctaatttcaaacaaaactttatatgtatatagtgtatttacatcataaaaatgtgaatggtttatataaaggttaaattttattttgaattttgtgttttgcaaaagttattaattggcccatttgttttgttagacgataatttagaacatgtgttttgtaaaaatataatgataccactgagcctgattttggtaaaaaaaaaggtcgtgttatgaataggatagaaattgaactacaattgataattgttatagttacctaatgtttggaacttgaattttggtg

SEQ ID NO: 46103 - DNA, 1733 bp, Cannabis sativa
tttttttttttgagaatgatgatatgtagaataactttattttaacaaaaaatttctttgataatcgtagttggtaaggagatcatgaccatggatacgttttgtagtcactatgatgcacacactttgtatataacagtgactaaaatattcaatatttctaaatgttggataatatatatatctctatattcattttgttttgtgtgtggtaaatatactaattaattggctctaaaatgttatatttttgtaccctatcttttcctttaggagtaaatgtgactaatcttttcacaatattgcccaaaaaatatttatatatatatatattcaaaataatgcaattttataggcaatatagtagtgatggaatgtagagaagtgctagaaaactcactttatactctattttgcactatctcgttctatcattagacatgttcttttatttattatttgattattttttaaaatataaaaggtttgaactaattaatgtcatttttcaagcatttatataaataggaggttcaaaatagagtagaaaaaagagttccttaggatagatttctcttggatatattagaaaaaataaaataagtgtaatattttatatattaggtatatttaccacaaaataaaaaatcatataaaaatataatattgtaaaacattagatattatttgaacctggaatcaaagtcaaatttatgtatgatatgagggagtcgtgaaaataactgcatataatgaaataaaatataaatatgagagggagaaaaatcaatacataaattgcattaattaattatgtttacgtgtacagtcctatctcatagaaatatgggtatgcaaagagatcacattatacaaatgtgccaaagatttagtccgtatggcggaaagtttacaatggacaacagaagctatagtagtcctacttcttctacttcaacctttaaacacccaattacttcctcaaggtattatcacacacgatttgttcagattaatttacagcactacttttgaaattatatattcttttatatatctctcttctctttctctctctagatttcaacatccttgggcattaggagtcaatggttcgttgagtagtgcaggtttgaccaaaaactccatatgtgaaaaagttatggtccaaaatggaaacaagataataagaccaatagttagttcatcacataataatgataataatattaatatgtttggtgtaagagatgcaataacaagaactgttccacttagaccgtgtcaatttcttgaagagaagaagtggcctccacgagatatgattatcccaggaactactaatcatccatctcacctcaaattttctcatgccgattgtaataatatcatcagttcgtatgtttcacacaaagcaacccattattatttcagattaattaatatactgcatcatccactatattataagtactgatttcttttgttcatttcccacagctatgaacccaagttaaataccttttctcagcttgatgaggtaattaattattccctttttttatgtatatatcgacatattcatttgattttgataagaatcatggtgctttgatttaatatttttatatataatcctcagatcttgtctaataaattttaatgtgataataataataaaaaaaaagtgataactaaaaagatctaacgttattattcaaaaaaaaaaaaaa

SEQ ID NO: 46104 - DNA, 1194 bp, Cannabis sativa
  modified_base (949)..(950): a, c, t, g, unknown or other
agaagttaggagttaggactcagttcccttgaactttcgttcaagtaacctctagagtggtctgtcctttttagttggcttccaagtgtgggaataatattgtcaaaaaaaaaaaaaaaccacttcaagcaatatatctatattatattatgtgtaaatgtattttataagaatgacatagaatttgtaatcgtttgtccgcacgttatgtatgtgtacaaatttatcaattaacatgccatcttagctagctgtattgtattttgaagcaaaatacttggttattatataataataatatactaattacgaagaaatacatgaaattccattcagtgccttgtttctttaattttaataccctttaatatataaagttttgttcattaattttagcacaaattacttaacaaaagtgtcttatgagtagcccaaactaatcatgtaaattactttttgagtcattaatatttatttaacaaattattttttaacatgacacgaatccacattagttcggaaagcacaagtataactaggtatgaaaatataagattttttacacaaaatattatattttttaaaaaaattatattcataacggatttcttacaattacactatctatactttattttttttcttcaaataattaacaatttttcttcctgaactttcgataatactgattttgcccctaaaatatacgacttgttaagaattctcctgaacttttatatttatagaaatttagtctttttgttaggtttcgtctcattattccgtttaaatgttgacgtgtctttgtaaattagcaactttgccctctaaattttgacaattatcaaatcgtactctctcaaaataaaaatgagaaagattcaatattcttaatctaaaaaaaattattttgaatgattaagaaaattaaaaaagaaattaaaatttnnaaactaattaagcaatttaaaaaattatttattttttattcaaaaattcatttagatattaaaaatttaacttttataaaaactaaattttacgggaacaaacttgagtctattttatttttttcaaaaaatgtagatttattttaaataaacataacactttttaatttaatttctaatttttttcaaaatcattttatatttttattgaatttttaattatttttttatttgttaagatatg

SEQ ID NO: 46105 - DNA, 920 bp, Cannabis sativa
  modified_base (329)..(341): a, c, t, g, unknown or other
  modified_base (893)..(895): a, c, t, g, unknown or other
ctcaacattcaaagcttgatcatccgggacaagaaaatcaatacccaactccccatcatcctctccctcaagtgaaatattcgcatattgttcttccacctcctgataggatgtactactagaagccatagcactattagaaccgaaaacaagactcaccaaattgaaaagaatactctcaccatatcaatagacaagacatcaatgggaatacctaattattttcaacacataaaactaaaaattcaaaccccataaaacactaattggaattacctaataatagtaaaatagtaaaacactaattgtactcttgttattttgttgtnnnnnnnnnnnnntttgtatattattttttttatgttgttttgatgttattttcttgttactttcatgttaacttttttttatttattttcttgtatttttataaaataccgtaaaaatataaaataaaaaactttgaccgtaaatatgtaaaacattcatagaaaaatagtgttttatataattattctaaattttaatatacctacttactaatattattaatttaaataaaaaaaacttcataatttgttataacatttataatactcattttgatttaattcaaattaatttctgttaaatgttgcttcaaaatttaatttatttccctttttgtattgtcttttgaattataaagggctcttcctttttttacccttctacatgaaatttcaatatggtttacctaactcaaatttctaaaattcacaagtacataccatttgatatttattttgtgatttccatttgatatttattttgtgatttttatatttagctatgattaagtagttcattttatatttttacaaggctaattagtaattttttcccccgaactnnnacatataccaaatcatgccccttga

SEQ ID NO: 46106 - DNA, 1387 bp, Cannabis sativa
ttgatgagtctagttacgataaatgtaacgaaggctgctttggtctcatatttgtataggagatggactagattgtctaaaggagatgttttgagaaaaattaggaagtttgtgcgcacataaggttatcaaatgtaattatcattagtattaatttgtagcccaagtaggagattattgtattattttttaataattcaatttgcgggtttacaaattaagacaatttatttgagttaatattctaaattgggctaaataagtggtctaaataaattagtccaataaacatcttatttggtatgagcttcataatgtgtaatacctaatagtaaacctaattagagtttatgagactctaattagtttgttatttaaagaacataaaggtttgatccccaagactaatctcaaccactttttctatattctcatcaattgagtgagaatccatagtaatttatggaagatcatatattcacaatctcatctcgtatctaatatcatgtaatcaggtgtgttttccatctaattgattcataaaatagtaattatgtggtcataacattcatagatctaaatctaagtgacaaccaagaagatttatgtggtcattacacttaattagggaatttcaatggtttataacacgaactgatggttgaaagttagatagttaggtgaagtgggtttcacatgaaatggacaatattcttttctcacataattatatgttgaaacttccttttccaaagtttgttttgatactttttatttctcgtagaagaacaaaaactcacatgtgactttctttgtttctcattctacttacttttcatatgtagatgactaaacactatatcgattatgctattaataatcatcattatataaaatttgacatcattactcttggtcaagagcttatcaaggaaaactcaaaatctattactcttattataattcaacaaaattatggttgaatgtttttttcttggggtagaatgtggccttttttcttttggtagggagggtcgaagtggctttgattacttacccaaatgatccaaagaagttgcttttgtatttttatattttattttctgttccactttttataaaggtgctaaaggaggttgcaataatttatggggaaattatgacttctaaacaaagcaagcgaagcgaattactcttagatgatattagcaacgaattgagttgcctataaattcttttttccttctattcattcataattgagattcttttgtaatcaaataataataattaacaattattttaagatcaatgaatccaacgtagaataacgaaaatcaatcatttataatggacaacaaggcccactcaaacatggttttatcta

SEQ ID NO: 46107 - DNA, 1736 bp, Cannabis sativa
  modified_base (1254)..(1264): a, c, t, g, unknown or other
ggttgacttttgcgtcggtcaacaagtttgaccagacgcatcgaccgacacaaaaacccctttttgtagtagtgatcagacctaaaaaattttactccaacgagcttttaacggcgactgaacgacgaaaggagctacgggaacctccgagctcgtggtttgaaactcgtaaaaggccatggtagccttgcatccagagaacaatgttgaggccccttgtggcatccattttttatagcaagacttcgtcggcggtgaaaaacatcgagccctgagatagagagagatttggggctttggagttggggtcgtggcttaaacgtttgtctttccatacttcttccatggctatgggaggattgagtttgagaaaaaaaaaaaaaagaagaagaagaactgaagaagaagggtcgagtgaggctggaggtagaagatgaaggagaaaaaaaggaaaaaaaaaaaaagaaaaaaaatatttttaattttaattattttttattaaaattattatttggaccaataatgactcaacatgtgttaattatgaataacctaaagaatctgtcaaatttaggactaacagacttacaaaatatgtatatgtgaccttgaggattattgtcgctattttttgaggttgacgactaatccgcatcatagtgaactttttaagtacttttgctgcaaatttcctttgattttattctctgagcctagtccagtgtactagtattgaaagaatgttgatactgaaataactttgtatggatttttaatttttgtattatttattttggtgctgtaaataatactatttttgtataagtgacaacttgttattgcatctctttaaaattaggatttaaaataattaaattggttttttgtttttgtttttttattttaattttaatttgcatcacaatgactttaaattgtaaagtgttataataaagtacactgtgtgctacgaatttcttaagtcgtcgtaaatctcaacaccttgataatggtatcttggcatctctgagtttgagcaaggtgtgatatgctttttctgtctattgcaatctttttgttgagcattgtaaaaaatatacaacagaaattaatcataacgatagttataacattttttataaaataaatctttttcttatatatgccgtccatacaaatttcataataatataaacatgtcatcggagtctccacgatagaaacgtttccaatatatatatacatatatatatnnnnnnnnnnntatatatatatatataaataaacagcattcacaacgtcaagcaacaactatatacatagaaagagtaataagagacccacacaaattaacaagataaagttggtgtacaagagattgatatgaactaaggtggtgtttggttaaaaagaatgaaagtatagaaacagaaagaatgagaatagaaatattatggaatatataaaatttaaaatacataaaaacaaaattaataaaaaaaattattaattttttttttattgttatattggaatagtttttttttttttttaatggaatagtcattccaccaaaatggtggaaagaacattttattataatgtcattctaacactttaaaatacaacaaaacaaagaaatagaataaaaattatttcctttctattgcattttctatttcatcacctctaacaaaacgccaccaaattcttaagttttttttttttctttttaa

SEQ ID NO: 46108 - DNA, 1862 bp, Cannabis sativa
ctcattagaatcttggtcattactctcattagcattaacttccacaaatttctccccctgacgatttctctgagttgtctacattcgcatcccatgatctcctccataattccttccatcaaccccaattacagcagggacattaaacaccatctcagccatcatactccggttccgatcaccaccatcaacagctccttcctcctcctcccgccctgtgcgcaaccattgggctcctatcaaatagtttttctttcgtgtaggcgctttcatccattccacatacaatcgtaccgaatcatcaaagtgttcctcaaagcgctttggacaaaatctttcagagtggccaataaggccacatatgaaacagaacataggagcatgttcatatttgaaggtggtccaaatccattccccatttggcttaatcagcttcttcaaaggtttttctatgtcaatagtgactcgaactctgagataatcccgccaaattcctacaaagttcttcgggtcagacttcacgtacgttccaacgtaattgccaacatgtttcactacccaatcagacataaatccatatttcaaatcatgcaattggatccacatatccaatttatgcagtcgaaccaaccgaggatcttcccccctcttcaatcgatgaaaaaccaattgaatacgattaaaagtccatgggcttccgtcaataacagactgaatatcaatttcatggtagaactgaaaaagatatcgattggtatccaactcttttatgtaaacacctcgtcccggttgccaaagagacgccatcatgtgtctcattgcatcaaagtcgatagttcttccagtgagaaactttcccactaagcaccatctatcatcaaaagcttgctcttcttcttcattctctccagttataaggactccctcctcttcctcctccaattgaatctgttcatatctgtccaccaaatcgccaccttgctgactacttgaagccattcgctcgatcaacacaaccaggaaataaagccaaaataacacttttactaataaactttcaaagtcttatttttactattttgaaaaatacaaagtccattttatcatttaacaaatcgcaggatctaatcagtaacttttacaaaacatagggtctaaaatagtttttacctttaaatatttaaaattataataattataataattttttaatataattatgagtaaaatattattgaaaattatatgaatatatttaaaattataaaaaatatgtatatactttagtaattggctcattaattgaaaattaaaatacgaatttaaaactgaatatgaaaacagacaacacaaatttaagcacgacacgaaaatacagaaccttcaaaacgtactgagtctatcttttaaaaatattggcacctgacatacaacatattctatgacataacatattttaaaaagtaccatataatatagattgggcgagcacgacacacacgaatttaaacagaagttatgaaacactaaacacaactacttacttaaccacttgaggccccgtttgggggagttttttaaaaagctaaaatcacttttggaaaaagttatgatttaatatgtgtttggtaaaatttaaaaaataactttttcaaaaatttaagtgaaatttatagcttttaggaaaagttggctcaccctagctttgggattttagcttttaagggaagctacaattttggttttaatgaatttttaacttgacacaattgcccttatctaattttaaaattccccatttaccaattaattttagggtttcttacattctttcaatttcatccttattcaaaaaaaaaaaa

SEQ ID NO: 46109 - DNA, 739 bp, Cannabis sativa
ttttctttttattaagacactagtttaagttacttaaggatgaaaagggtggctgcctgggtttccttctcttgtgtttgaccaaataaagagggatcttttatccaaattttagggattttgtttcatttctttataatattaattaatttttttaagggatattaatcagtttttatttattagtgatataatggtgatttgtgaattagtttactacagttaatttgcgacgtggtccatgtgatcatagttatggtgcacagatgcacctacaagaatcaaagactaaacaagaatgcattgataaaatgaaaatggcagataactagacttggacagtaaatttaagcgagtttcaatcataagttttggttagaaacttggatagaagcagctttattcgctgtgatttttttattgatgattgacaatgacaagtatagtgtcacaacaggagccctaggttgtggtagatatgtaatctccgtaacttgagtgatcaaaaatcacactttgacccttgaagataaagcttataaatgatcattttatttatatcacaaaatattaatttaaaagtaatgaattaactcatatattaataagaaaatattagtaacaaaattaggaccacctatcaatataaaagaataataatatccccacagttatgtaatcaccaaatagataaatttaggtgtcgtttggtaacacttttttaatcaattttctgttt

SEQ ID NO: 46110 - DNA, 1522 bp, Cannabis sativa
acaagattgtctggttcataacatgggcctccctcttgaatgggcttacaatcagccattccaagcccacaggcccaatccaatgcattctgaagatcaatttgagagactccagcatgggccacacaccatgttagcccatctagaaatgttgtgttgccttctggtggtgataatgttgttattggcatagctgcatctgccttctcttgcaccaccacacttcccattatcacaactacaaaaattcatataaagtaaaaacataattagttattcactgatcgactcgtattttgactttgtatatctttcggctagataataaacttatttcaatctaacaatgaattgctaatctaaggccaatgattgagttttggtaagatgaatctaaacattgcatagaaaaatatacaaatgttgaactttttcactgttttaatttttaaatgtacttttgatacatttaagtgatgcctaacgtatgcatataagctaattaataaaaaaagaacttaagaagtaaagtggattttgtattttaatattcttataaccaaccataagattataagcaatatatgaaatattgatgaataatacaacaattccttttttttcttttttgtcataattgaaaagagagggaaaataagtcaaacaacctatttaatgaagcaaacaaatttatcaatatctttatatagacatatctaaagcaacaaaatggaaataagaactgaaaatggcatataatattaattaaagctatgatcatctagtaggacttgaactatcaccaatggctttataattagctatcaaacaagtaactttggcaaaaaatgtgttggtgaaatattaaatgggataagttgtgaccatcctccaaatgttgatgtttaaagttcaaacaataaaaccaaatacgtgaataaataatagaaaaacacaaaaaaacaactttttcaaacctcattatcattaatacaatctctaagcatcatataaaataaagattaaatatgagcataactacccaaaattttgagtttgtaagtaaaatagaccttacaatatttaaaaaactctaatttttctccagaaacagacaaaaatgacaatttttctaattggtgattatactcaaatctttgaatactcttgcaacaagtatccctaaaataaataattaatgacaagcatgaaaacaaggtgtagttcaaggacaaaagagttcatctcaacctttccacttaaaaataaatatataaaatacattcataatatttttcttccctatactaagacaaaataataataataaaaatacttggtttcttctatattttgttttcttaaacaaaaacatagaagaacaaaaccctcttaaccctgacagtgtcagcttctgaacaagaagatcaaccaaatgaaccaataaaataaacacaaacatattcaaacacttaaagacattatactccaaacattatttaaacatttttttttaaaaaaa

SEQ ID NO: 46111 - DNA, 1367 bp, Cannabis sativa
ccatttggggtgatttttgggtaccctgattttcatgttttcttgatatttagggtatgtcatgctatttatcaatatagaaacttcaaattatgagtttaagtccccaaaaatgttttagcgagacacttaacaattttacgttaatgtgacttagagcttccaatcatcgatcgatttttctactcaggttgactgacaaacctgattacggaattgaggtaagattagtataactaatacacatgcacatgtttagcatgcttttcatatagtacaaactagtgctgccaacactagtacgcctagagtgttgagtgcatgcggtattagggctagttgtacttacagtacgaattaatgctaccaaagactagtacgcctagggtactgagtgcatgtggtattatggctagttgtacttatagtatgaattgatactaccaatacaaatatgcgagtattaaatgcatgtgttattatggtaaatcgttgtacattcaagactcattcatatgtgttggacacgagttataaactcatgataattaagtgtatgagcacttaattacaagttagatatatgtttgtattttatatttttcttactgagtcagtcgactcacagatatattttcatgtgtaggtaaagacaataccaaaactaaacaatagtgagtttaaagctcagtaaaaattatacatgtttggatggttagactcaattttgttagttaggcggcccttttgttatgttatattttgtatgtgtttgaaaaatagatttgaaattctaagatttgtaaactttatgtatatttagtaaagtttttatatattaccaaagtttttattaattacaattttatactaaatcatttaattagtaaaaattagcacaataattaagaaaacacaataacgtaccttagctagtaggacgttagacaagcaatttaagctttggacaagattgtaccttgccttcaaaatatagtcccgacacgacccatatttctatatgggcggctaggattataaaaaatatgggttggaccgaaccgatctgcccatatgtatagttatagtagtagcattacacaaatatgtagaatttaactatatctatagttattaggcaatattaactatatctatagttattaggcaatattggtgcccaaataccaccacaagatagtgccttgtagatagtaatattcacaacaaaacaagtgaggtctgatattgagctgatactattctcatgagagattaaagaaacattaatttttttctttttaataacgaaacaaaagttagtttccattacatgttaaagctaataataattcaaaaaaaaaaaa

SEQ ID NO: 46112 - DNA, 2064 bp, Cannabis sativa
  modified_base (44)..(78): a, c, t, g, unknown or other
atttttgtttttcaaaaacaaattttttaaaaacaaaaattttnnnnnnnnnnnnnnnnnnnnnnnnnnnnnnnnnnnagtgttaccaaacggcaccatagcactatcatatttatcaaagtgatcaacagcaagagcaataaagtcatagatacttagtcttttattattaatgtaaaaattaaaatatggagaatgtttccaagccttcttagcactcacacaatcaaggaaagcatgctccacagtttcccacttcaaatgacaaagaggacaaatgggagaaggtataatgtgtctaaagaataaaaaggaggcaacagggacagaattagataacacacgccacaccaagtgtttaactttggaaggaacagatgcaaaccaaattttagaccagaaacgttcacactaatcaaaagatgatgtagaaggaatatccctagaagtaacagctaagtgatatgcagacttaactgtgaaaaggccagaggtattcccactccatattagatcatcactacaaccatgaccagaaattggaacattaaggatatgatcaataagctggtcatcaaagaattggtgaagcttaaaagggtcccaagccccagatggggagagaaagaacgaaagagtagagtcagagggagggggagatgaatatgacttgatcctacagtttggaagccaatgatcttcaatagtgcgaatggtggtaccattaccaattttccaaatgaggccttgcttcattaaatctcttccccaaagaatactgcgccaagtataagatgggctatgaccagggccagcatcaagaatagaagtatgaggaaaataacgagcttttagaactaggctgagaagagaatctggacactttaagattcgccaagcttgcttagctagcatagtttggttgaaatgagttaaagacctgaatccaagacccctaacaaacttagactgacacatcattctgcaatttttcgagtgcactttacgaacctcaggagaagaaccccaccaaaattttgaaataagagactctatttctctgcaaatcttagtagggatgcgaaagcaagacattgcataagaagggattgcttgaaggacaactttaatcaaagtctccttacttgctttagaaaaccatttatggtgccaggagtgaataatagaagagattttgtcttttaaaaggtgaaagactgatattttgcctgagaaagacattgtggtaaaccaaggtatttagtgataaatggcttatcctcaagctgaaaggtcctaaaaaacagatccctaatatcattttgagtattaggtgaaaacaaaatagaagatttagtgaaattaataacctgccccgaagcttgagaatacaaagaaagggcctgttgcaaagcatggcaagaatctcgatcaccagcacagaaaagaatactgtcatcagcaaacagtaggtgggagataggaggggcatttcttgaaattgaaataccatgaagcaaacccctatgatgataattactaagaatggctgaaagcccttcagcacacagaataaacaagtagggggacaaaggatctccttgtctgagacccctagtgggcttaatattgccatgcattgatttacttctaatatggaattaaagtagccaaaaatattcattcacttgatataattatatagtagaattcacattttttttaccttatcacatatcgaagaaaatcaaaactaaattaaataattatacaatttagtgacatttcaagaaaacaaaaaaggaaaaagatgatctaatttcaaaatatatacatatattcattcttatatagctaatatttatttgtttagtgtcaataattttttttttcttaattatttttaattgattaaatagatactcatattgtagatatatacattgtcacaacaatttattattgtgaacacaattatttatttttctaaaaaatgaatggaaatgtaatacaatgaatatatgtttgcaataattattttatttcatactaaatacaaaattc

SEQ ID NO: 46113 - DNA, 1114 bp, Cannabis sativa
  modified_base (1039)..(1065): a, c, t, g, unknown or other
tttttttgtttgtttttaatcatgtaagacatatagaacgaaaatccagtgtcaaacgtaatatattaaacacaacatttttgtacatctcgactgctccaataaaacaacactaagttaatatatatttccagaatcaattaaaccaaaaataaatttagttttttaaaaattatgagtctgtaaaatatataggtggaaggtggggagaaaaggagctgatcaaggtgacggagataggaggcaagtgatcgatatcaatgacagagaatagagacgtagggatgaggaggaatagagaatagggtttttgaaatttgagtctggtgttaatatatattacattacttttcatacttggatgctcccatactctagttatattgactaaaaatttacctaacattctacttctctcaacacccataccaacaattacaaatcatataccaatgatattgaattttgaatctatatcaaattaatgcataatttttcttttcattttaatcattcttttaagagtaaggatataaatactcaaagttttgagtttgtaagcggcataaatttaattatttttttagcagtataagtacttaatgtttgtaaaatattataattttctccaattttgttagtatagacttcgttttaaatttattattttattcatatcgtataatcttaattttcttgtacatctttaatattatactttctccatatgcataaagaattttcagatatttaataattatattattataattaatgtatcatttatcttataattgtatatcatatattcatcttctctcgtatatcatatattctgtaatatattattcattaattacttgctttagggcataaattctaataagtttgtatgtcatgcgagagaaagaaaagtgaggagagagagaaagagatacacgggagagagaaaagactgaagaaaatgatttttttaaagtaggtctcaccataaatttgaatataatgtatatttatttttggctaattaggatttttnnnnnnnnnnnnnnnnnnnnnnnnnnntcatgccccctgaacttttaaggctattgaaaatgcccctgaactattg

SEQ ID NO: 46114 - DNA, 3815 bp, Cannabis sativa
tcaaattaaggacccaaaaattaatgaaaaatgataatttcgtaaatttttatgaataaaactatagactaaaaaaaatcaatattgttttggtacaaaagttcaaaatataaatatcaaatgaaaacaactcaccataactatcacaaatagtcccataactatcacaaagtccttagtactcatctaactttctttcttaactcttatcaaaatttgacacattataatactctacaaaacatccaatattgtaggtccaatattacaagaccttccattttttgagtttgaaagagaattcattcaagatctttatgcaactaactactaccacaaaaaacacttaaaaaaataacctaccacaaatgaaggaatatttagtcaaaataataagagagcttatgaaaattggccatgtgtgtcttatgatccattacaaattttttctactatgtctcctcttttgccacctgcatgtgttacccctctaatttctcctataattaatttgcccacaaacaacaccaacatcaatcattaatgcaaatctcatattaattatctcattcatcaaaaaaggaaaaaaaaaaaaaggtctcttggtttgattattgtgttccaaaagttgatcttcatcaacaacattaattagagaccaatcctcataagccttttgtctctataggtaaggaaaactcactatacttactcattgccctttctttaaagaaatatttatgaattgattattcatttattaattcaattattttgtttcaagttttctttttatttgctctttaaacatttatgagtgtcggcaaactatttttttttttctggaatttaatgtcctaattatcacttattactagctagtttcaacaaaagtattgttcattgagaccttgtaattaaatttacatgattaatataagaagaattttaatttttatagtttttatagtaaaagtttgcaaaattattaaagttattttattggaaaaattgaataaagaaagagaaatacttagaaagtaacaggttatcttaagaagtaattggttaccctaaatttgccaacacttataaaataagttagaaggtaactggttacactaaatttgctttttcccatatcttttaaattttcttatgaaaacaaaaatcatttttctacacatatataaaaactcataatttatacttaatataagtatgctatacctataccaaacaagatattttcagtactttttttcattataccattgattaaatatataaatagtgatcattagtttattacatatttatttatttatttttgtttgctgcatgtgatttgtgtttctgattcaccttggtaatgtaagttgcctggagtcaaatatatgataatttattttacctaaacttccaacaacatagtatattggtactaattaaaaataatacatacatatatacatataggcagttcaagtctcaacacacttgttaggtggctcaccctcacctcaccatcccaaatactgctagtagattttggtccaacatattaaatgtagaataaaaattttggtagtaaatccgtcaataaatggtcgttctagtaaattttttatttgtttcgacactatttttatagtcacagttgcatgtaactatttaagatcttccgtaaatttttagaaaactctgaataatttacaatactgaaaaataaagtttaaataattacttacacatatagaaaaaatagtcgtccgtgcaacaaaatatataaattttattttttatattgtaaactacttaattttttaaaaaaatttataaattgcttaaaataactataaaatatgtgatcatgaaaaaaaaaaaaaaaaaactaaaaaactctagtgcaaaaacaaataaggttctaacaaaataccacttaagagtacatagatttaccctaaaatataatatatacacaccactatattctatgttaataataacaaatagtgttcaattaccaatatccaccaatttcctctttattattttatctctttcttataaagggagatagattataagattagactacacacaatgtcataaaggtaattaaagtaagagatagaaacatattaatataaaatgatgccacttgttctcaaggccattctcatatagaaatatgggagctacccttcaaaactatgacccataatgactttaatttctcacttggatttttgttgtgaaatactattatccatccctatctttttcatattgacaaccccacatttctctttgagtaatatttcccaacaatttgaagtggatatacttgatgtgacacatttttatttttttgtgacatttcatttaatatacatacataattgaaattaagagttatagagacaaactacaaagggtcaatcaatttctctagcttcaaaccaaatacaagatatgacccttttttaaggctatttaattaatagtaacatgacatgccatttttttctaatcaccctccttcttactcaacaatatacaatcaagttattgctaaattgatgatgtgtcctaaatttttctcaaatttgtgatttggtgagggtttatatctaaataaacaaacaaaaaaagaatctaaaataataaataatgatcacctaggtatgtgtatggctatgatgtttttgatccatatgattccaacaacaagattgtgtgtcattatatcttataaaaattatagatttagattacttgtattgttggtatgcttagaagaaatctactccttgaccatgtcccacatagtgatacctttcttgctcaattatctttcctccaatagaagagactttcttccttttattccactaatgtaaggtaagaaaattttgaatccattcccaagattccaactcttcccaatcaacaatctctattctctctaattctttacactatttaatggtgtagttttccacaatgaaattattctcttttttaaaaagaaataaataaaaatctaatgaaagagcctagctcactcactcctagtcatttgactttattattcaccatttagaaatggcccaccatttaaaacaaataattattttgattgaataccaacaaaaactagtgtttgatattaaaaagatgatgggtgtgatattatgatcactctatgtttgatattaagttgttgtttgtttatataatacatctctcttccttccatacataaatttggcctccctttgtatatgtatttatacaaatatctaattttattgttgttcataataataattaacctagctaacaaattaataaccaaacattccttcaaataaaatttatttacattttcttaagtaaaccaattaacttaaaacacaatcaaagaacaaacattaatatagatatagccatatttggattccatgcataatagtcttaagtggggtcattggtcaagccaattattcaattatatatatttatataaattttcaatataatattattatgtgaactttataaataattaacaattttttttacaatatttattaaaataaattatatgacactcaatatttataaaatccataataatactatatatacatcaatagtactgttgtaatttaacatttctctaataataatattaaaatattattatttaacacatttttttttttttgagaaatttcactgttattatagattgaaatcatttataacaacagagaaaacaggatagggaatttctcctacccaac

SEQ ID NO: 46115 - DNA, 1232 bp, Cannabis sativa
tatagcaactaacagagcaatctaaatcgcaacccaaatccatatagcaacccacataaaaactgtcggagaaaccaccggagcaagccaaaccataaatttgaaaaaaaaaagttaaaaaaaataatatataaggtaattttcctttattaatcgtgtcaacactaaaacacaaacccaactggtttataaacgggttaacctgacccaacttatttaacctgtatatacaaagagtcatacttaattttagtttatttatcaactcattaacatttatataatatgtttagcatgtttacaatattattatcgcacattaagtaatttaacatatttttatcctatttaactaaaaaaatataatttacatgcaataagtttaagagtgcatactcttatataggtcattattgtgtcatttttgtttaataaacagattagctatgtcaacgtgaacataactcaaactcatttaaggaaaacttaaacttgtttatttcgtgtgagtttcaagtcgtgttactgtgtctaacccagggccagcccaaacattttgggggccttgtgcaaaagattaaaattgggcttttataaaaaaaaattgtgtacattaagacctccattgctagttttttacttcttttcttttttaaagatatgtttctaaacttttaaatataaattttttaatgtatttataataataataataaaaattcttataaaaaaatgggtctttacaaatagggggccttctgcaatggtcaaagctgcccaaagcttgggccggccctggtctaacccaaattctcactcctacatttaatatctaatctgatttaattggatattcgaaataatatttaatctgataatcacaaagttattattggatttgattaatttatacatacccacattttataattagagacttacacaaatttttaaaattttttcaaataatttacaatatcaaaggcaaagttaagcaatttattaatttagagtattggagtcaaaatttgactagcttataacactcgtatatcaattggcctttcctagacatgaataatgatttaattcttcttaaaaatataatatggagagtttataatgtggagacatgcattttgctttcattagtaatttattttttaatttttgatatttaatgaaattataatccaaatttttttatgggtaaatactattttagagcctgt

SEQ ID NO: 46116 - DNA, 1571 bp, Cannabis sativa
aaaaaaaaaaaaaaactaacacaacataattttttttttgatgaatcagaaagttgtattgctccacaaacgatttatacaatgtaatagcacctcaaggaggcctaaaaaaacactatacattatttgcttaataattacaattgattaaaccactcattatccacttgagttattctttttggaaaaacacatgatattctagttttaatcattgtcttcaatatcttctctatggaggtcgggtctgcctttgagttgttccataatatttcattcttggcttcccaaatcaggtacaccaaaccaacagtagcagctgaaaaaatattcttcttgaatcgggttttatttgttctttcaatccatcttaaggtgccttgaagactaactgtgtgtatattccagttcagccacacctttatcaattgtaggcactgttgagagaagctacattcaaaaaaaaatagaagggaagttgtttcttcatgagagttacaaagaagacaacttggttcatctatcattttgaacttgtataatctctcccttatcttaagtctgtttagtgtagcaatccataacataaaactatgtttaggaatgttcaatttacaccaagcaactttgctccaaaatactttttttttttaatttttcagcaagcattttatatccagccgagatagtatactgttcatttgtaaactgatttgaattgcgtaatagtttgatcttctctttgcaatcaacaatcttcttgcaataccagctgccaaaaattagaggttgatattcccaccagtcggcatctttaatgtatacatgatgtatccatttgacctataggttgtccttttttgttgcaagagaccacacatgtttgagaatagcagccttgttccattgtgatatgtttaagaaccctaaaccaccaaccttcttaggttgacatagtttctcccaagctacattacccaagccactcatattactttgtcccttccataaaaaagttctacaaatgctttcattctgaacaataattttcttgggaagcactagcatttggcttcaataagtatggaacgtaagcaacattgaattaataagtacaattcttcctgcatatgagatatttctagtactccacattttaaatcttgctgtcattttttccacaagcaaattgcagttagccgttgatattctttttgagcatattggcatacccaaatatctgaatggagtatgttgtctactgagatccgagatgtcaagaactctctttatttccgcttcttccattcctgagcattacaagtctgatttctgcgtattcgccttcaaactagatgaattcaaaaaaagtttagaaccttgtagcattaagtatatgctcttgaaatcacctttgcagaataatagaacatcatatgcgaaacctagatgatttaacttcaaagtactacatctatcatggtagtagaaatcctttctttccccaattttctccatgattctacttaaatattctattctagtacaaaaagcaatggcgacattggatc

SEQ ID NO: 46117 - DNA, 1533 bp, Cannabis sativa
attatttctaatacatcttctttatgagattaactgtcaaacgtaatatatgaaagaatatacatgcagggtcaaattaaaaaaattgtggatgtacaaattaaaaatttgtagattttattaaaataaatcaagaacctcaatatatataatatatacattggtctaaaatcccaaatagaatcaaagacgaagacagctgaaactttaattgctctactgatattattttaaaaattgaaataaaaggtttaatttagtaaattgaggttccaatttaaaatcaattgatactaataataaactataatgttatattctcaatgcaagtttatatattattaaaatattatattattaacgagatgataatttttgtatatatatcattagggttgagaatggtgaaaaataaatcttaaagggaatgaaggcaatttaaagtatacaatacaaattatatacatttatactatatatgtatatgagtattgttattagatattggtagtgcctaaaattttttataaatgacatcttacgattagttagtaatatttttttacatttatttttttaaattatatatgagacataataagttacaccaacatgatatgacatcaaaaatcataataaatattactaattgtaataggtaggtaccataaacttatcaaggtctggagaattagtggtggattggcagctgttattgtaacttgtattaatattagccttcacagcagcttctccatcaatttcactcaatcccacctgacatatataatcaatatattcagaatgtagcaatgaaaatatgcatgattgagaaaatagaatatgataaggtatatataataagatgtatgagattatccatcacaataggacaattaatgataagagtacttcatgtattttattcaagagtatttatggtatttaatatatttgtaagatgtaatataatttaatatcagatcttacttattttattttaataaaaattatgaaatactattaattaactaattatagaatatcactttataatagtgctagataccttaatatctcataagaattaatacttgcatttttataattattccttaattaacattaattaattattactctcttcacaaaccaattacctcatatatacattttttttatttataattatgtccttctgtttgttttatttattatcattattatatgaaatcatgaaataattaaagaattaaagacaaaacattaataatattataatagtgtaatttaatattaaatctcacttattttattttaataaaaattattgaaagtggttaaattttgtagggcaccacctaattaattgtggtgctatagatttatctattaatcaaatctatttcatgctaaattaatggtgtgaaactatatgagataaaaacacatatatatttatgtatgtatatgaaaaaaaaaacactacataatcaaactacatatatgcacccctttcaaaaaaaaaaaaaa

SEQ ID NO: 46118 - DNA, 1820 bp, Cannabis sativa
  modified_base (30)..(42): a, c, t, g, unknown or other
tagggtgttaatcaacatatttgtgagtannnnnnnnnnnnnggtaaaataatttccaacaagtggggctcaagaggccttttacacgctaacatgctcaagtgggtggctcggtctgatgtatgcttaagagggcccgtgcgtctaatgaggaggatgctgttgttccttcactctcaatctctaatgaaatgccgaggaaaatgaatttcattagctggaatgcccgaggtttgggtagccctcgagcattccaaaatctctccctgttggtgaggcaacaccaacctattttgttttttgtgatggaaaccaagctccttgtaggccacggaatgcatatcaagattagtttaggttttgataatgtttttgaagtgcctcggagtggtttagggggaggcattttactcttttggaacaatattgttaatgttttacatttttcccttaatcacatagattgtaatgttaatataagtaatgacaatttttggaatttcactagtttttatggctctccttactctacttctaaaaactgcacttggactcttcttaatcgtatttttgattttgctccttatttgcctttgtgtatcagtggtgattttaatgataatttttcaacgtcttgattggtgtgttgttaggagctcttgggaggcgctctttccctctgctaccttgatacacttggattttttttagttcgaatcatcgtgctatccaaaccattcttgcagaaataaacattgctcctagaaatcatggtcaattctttattgaaaatcactggttttctgatatggattttttcagagtggttaattcctcttgaaaaacttttagccatcataataccacatgctctttagctgacttcttaagaaatcaaaataattgtgtggctaatatcaaagagtggatttctggtcaaaactctcttaaccatcaaatttcttccactcagattactcttgagaggctttatcaaaagagaatacctaatggtgatgacctctcatagattagagctcttgagtcctctatcgagaatttgttgcataaaaatgaaatttactggaagcaaagatccaggattgactggctcaaatctaagggacaaaaatactaggtttttccatcataaagcctcgactaggaaaaaaaataattccatttgttctatcacccttgaggatggcactatcattaaaggtaccaactctatcatccctcttttcaccagtttttactctaacttgttttccactcaaggtgaggatcatgcctctatcaatgacattttgtgagttaaatttgctggtatttccaaatggaacataggacatgagtagccaatggaggaatcaacctaattgattcagagaaaaaaattttgtgatctagtgttagtaatggtgggacagtttattagtattgtctggaatcttaggtaaattgaaggcgacgattatgtgggttaatctaatcactaccaatggggaaatgagatcaaagggggcatgagtcaaaccgtgacagtcaaagccccgtgctccgtaagaaaaaggtcgggagctatacaatcccacatcgcctggggaaaggtcgtatgtgatgatgtcgagactatggtctgggactacctatattaacaaggtgcatcttgttttcggtggcccatcacgaaaaaactccacagttaagtgcctttgatctggggtgatttcatttcaggaagggtgacttcctagaaagttttcccaagaagcgtgcgagtcagaacaaagcacgttgggaacacttgagttggc

SEQ ID NO: 46119 - DNA, 1210 bp, Cannabis sativa
gtatggtaggcagtattgaatagtatggattggtgctaccaacattaatgtgactagagtattggaattaggctggtattatggttaatcatactataggtacaaatgttcggatctcaatttgcgcattagatgtggttagtagacttatgataactaagtgtatgtgctctcagttacaagtcagatatatgattgtattatgattgcttttcttattgagttcgttgactcatagttgtttcactatgtgtaggttatggatagcgaaatttgtcagtggtgattcgagggctcttgcaaagattgtacatatctgggcccctagacttgaagggttgagatctattggagattcgctgccgtaactaatatttttttgttagacatctttttcaaaatattatttatatatgtatttttttaattagagacaggattctaaacatctaaataaaatttgtttagtaaatttctaattattacgattttttttatttaatcacacatttattgtaaaatttctttcactagcaaaggtcagcacagtgattagaaaatacgtaacgtaccttagatattagggaattacgtgacataaattctatgtgtctctctgttatgataatttcaacacgcaagtatatgtatcgctttcaagtaataaactcacaagagtgaagtcgatcccacaagaattgtagttaagtactaataaattaaatttctaattctatttgacaataaaaaactaaaaaaaaaaaataaaagcaactaatttagaataaaaattagcaatgattagagtttagggttattaattgtatctatcgtatatggcttaatataacttaattcataaataccaatttctatgtaatagcgggtttacttaaaataacttatattcgggactaggatatataagtctcaacctatatgcaattttctactttcatgataaatttaaacatataagaagcatttagtaaagaaaccttaaaatctatccaaatcacataggcactctcgttctatgtcactcggccaaggacatctcacctttgtagatctccttttcagctttctattgcagtttaaatcgcccaaatcaagttaatattaagggagttatactcaaaatatgaacatggtacaagacgagtaagacccacttggcgaagaagccttagaccatcctaagtcaaca

SEQ ID NO: 46120 - DNA, 2640 bp, Cannabis sativa
attcggttgcacttcaaaagttgatacgtgccctgcagtggaatatgagccacctgatataataaagttatatcattaaatgcaagataaaataactcattataagggtttaatagaaaaatattcacaactcacctgactataatagcttaagcaagataaggataaaaagttattaaaactgatattgacgagacacacgcgtaccttggagtacatagtcaaagaagatattcatttattttgagtagaataaatataatcacatggtgacctcggattacatataacaagacaatcacctcgcaatcataactcaaataaagagacataacgaggcgaaccatttgctaacacttagcatttgttttccacatcaagatggacaacgaggataattcatgttaagcgagatataatcatccaaatcagcattaaccatcggaaggataaaaacaaagagcagttgaatagttaagcagttatctaatattatcccacatgcaactcaatgaaacgtgagaattgtccacttttcatgaacaattacgttttaaactgatcacaaaaaagtaattgccaacctatattcctataaataggggcagattccacaaaaaaagggacggagaatttggaaagaaaaatattattttcttgataatgtattatgtactcaaataacattaagaagaaagactcgtggagtatgtaaattttaactgcaaaaccacgtaaaaatatctcgagttattaatttattattatttctgtaatatatttattacgtaaaggctcattaatttttggttaacaaaaatctacgttaacagtttggtgctttcattgagagccttagtgataaaactcagaaaaatccctccttacaaacaaaaatctatccatggttgataacaatcaaaatgatagaaatcgtactgaagaaactacacatcgccctgggaaagagccaatggattctcaaagaccccatactactaaaacatcacgttcaaggagaaactatggtggtaataatcaagacctagaaggaaagaacgaagataccaataactctacaggatatgtaccaagaagtgaggatgcatatgatccaactcggtatgtaccattagtagaattggaaaatagataactccaacaacgcttagctgaatttaactgatgaaacgctgagttggaaagagaggctgcatcggctagggcgactcaaggaaccaatactcagaatcaacatgatcctggggtgagaagaccacgaggcaaacctcgaggttcaagaactaggagataagaagcaaatcaaggaaatcccaaaaacacccaggaggaacaacctgggggtactagggatgttccagtggatgaacaacaaaataatcaagagcaacatcgagacgttcctcaaagatcccaaggatttatgaaccaagggaatgaacaaaatgatgtactataagcttctcgcaggaatgaggatgcgagacagccacgacctagggatcaggaaatcccttggggcaatgagaggaaccttgggactcaacctaggacaagtgggctaccactgaggcaccctcagcgcccctctcgatcagagagggaaagtgtatacatgtatctaactaggggacatgtatccaacctctttcaaaggagaagaccagtacaagtcgaagcgagttctagttcgtgacactcaatgtctcgaggacacagttgatcaggcaggaaaatgcgagaaggaagtagacctcaatgttatgccgattaagaaagcatgagcaatacgcgaagctatcaatatgagagttactcaaaaacgagatctatgagtaattatgagcgaagacaacatgatctttgcaaacatttgaatcgaagacaatcaacttaatgcgaatgaacaataggtggatcctatcctattgaaaatcattgagttggaggataagttcaggaagtatcaagatgggggacatgggaaattacctggttatgactcggatgaggagattgagccatttcatcctaatattttgaattctgaatttcctcagggattcaaaaaaccacatgtcttgtagtatgatgggactagggatccagtcgctcacttgaataactttaataccataatacgagccagtaacgtctcaaataatttacgttgcattttattcccgacttctttaactgggcagcgagtagttggttccacaagtttactcaccattcaataacgtcttgggaacagttgtccaaggactttaagaaatagtttcaagctactagagacaggcaacttgaagcatcatccctaactaacataagcagtaaccaggtgagtcacttaagccttacctgattcgcttcagcaccaccgctgtaaaggttagaaaattgaatgacagtattcagcttattgctcttcaagcagggatcacaaccaatctttcaacggctgggggcaagttgtaggatgacttacagggtcgcccagtaaggaacattaatgaactcaacgaaagagcgtaagtgtttgtgcgtaaagaggaagcaaggaacaagatgaagttactgaagactagctcgagaaacaaacccagcacaagtact

SEQ ID NO: 46121 - DNA, 1513 bp, Cannabis sativa
ttaatggcaccctccaagagattgtatacatgcaacaacccccagggtttattgattagaataaacacaatcatgtgtgactcttgcataaagcactttattgtcttaagcaagccccaagggcttgtaatgataagctaaaacaaacactatatcactggggttttcatgcatccaagtcagatacatccttgtttattcatggttctcatgacaatctggtttatctctttgtctatgtggacgatattctcatcacaaggccaaattcaaagctaatcaactccattatcactaatctaaatgatgtcttctctctcaaatacttaggtcatattcactactttcttgttgtgaaatatacagagatgatacaacaatgtatttaagccaaagtaaatatattgttgatttgttaaccaagctacacatggagggagctaaatcatgtctaaatctagctagttcaactgccaaactcagtcttcatgatccgtttgaagatattagactctatagaagtacacttggagcacttcaatacctaagtctaaccacgctcggtgttgcctttatactaaataaactaagccaatttattcatgctcttaccaatactcattgggaagcattgtttgcttcgttatctcaaaggcactatctcgaatggattaaagcttcaagcttctgacagcttaactcttcacaggtataatgatgctgattgaacaagttgtgtggatgacaggagatcaacagggggtatgccatgtttttaggcaaaaacttggtgtaatgatctgccaagaaacagcaggtagttgctcgatctaatactgagagcaaatttcgagccttaacaaatgcagcaaccaaagtaaaatggattacttttctcctatcagaacttcaagtttcattgtcacaagcaccagttttatgggtggataatcaaggagcaacaaccttagcagcgaaccccgtgtttcatgcttgatgcaaatacattgagattgacttgtatttcgtacaagaccttatcattgctaagcaacttgttgttcgttatgtaccctctgtggatcaaacagcaaatattcttacaaaatctcttactactgaatgctacaactatcttaaagacaaacttcacatgtcgaaattgtcatttcgtttgaggggagatgtaaaccagtaaatttgtgtttgttacaagttagttggttattatagttagttagttagttgtaatatttctttttcagttaaagattttgtcatttcccttggctttgtattgtgtactctataaagataattaagctaaccattgatggttaagctcttttggctattgttttgtttcttgctctactttcgtttcttctttttttctctgcctttgagcttcttcacagggtatacagtaaacgaggttcagttttgtacctaatttgtaattgaagtttgttgtaatgaaataattcttacttccaaaaaaaaaataataata

SEQ ID NO: 46122 - DNA, 6157 bp, Cannabis sativa
taaattcagatttttttttttaatgttttgtatggttttttttagaaaaaaaatcatatttttagttttattggttagataatatcatatttaataatatttactatgccatatatatcataaccttaatatagaacaaatttacttgctcccaaagtagacatgtaatgcgagtagttccactccttgatgaaaatggccacgtggtacatagaagatcgttcaacgataatgatggtaatcgtggggcgaagctatcaattgtgttggtgggatcatggttgcgtatgagactttggaattgattgggtacaatggcaatcatgggctacgaaattgaagtggcccaaaactttaagcttgatcaaactctattattggcccataatattacaagatacacaaaatgtgattgaatccttttatgctaggtggccttagaaataattggtttagtaattagagaggtaagtacgagggtgaggcatgtgattgaatttggagtagaagagtggacaaccaaggatacgtgtcgcatgagggaacaatgagttggactgggccatttgatcaacattttaagttggactttaaaacttcaaaaatgccaatttgtttatctctattccaactcctttctcgtcaacaaatttatgaaaaatacattttatttctgcaaaataaatataaactaagttaaaatcagatacaaaatattttacattaattacataaatataatgatttgaacttaatttattgagcacttaagaaagaataaaaatgtatttttcactaccaatcaggtgctttggatccacttccaccattctccactccgcctcgtgttggatcgtcatcttgttgtcgcaagactcagaaacatgatgatgaggacattactcgtgttaaggaccatagatattttataattgactttcaaactggaataatatttttctcccaaacttcttttaatattttactgtagcacttttgtttagttactaacttttcatcttaaacatatttttatagtagttcaagcgggatactatttaattatataagtgaatacagtttttttttcttttttttattttattatgtttctttcaaatataatttaatatttaaaattaatattaaaataatattaaaaattatttaagaataataaactatcaattttttaaaaacaaaataacaaaccaagcttttaccgacaaaccattgcgccgacaaaacttacccatccatcaatagaatatggcgggtaagggttttacaggaatattccaattaggtataaatatttcccgccatattccaattggcagggtaagggttttacatgcacatatatgcaccgataaaatttttacttgccaaataaaatatacacgcaaactttttactggcatagaatcgcactagcaaacccattttaccaaccaatgatcagatttagccatctattaacactgacatttgaatttttgccagagcataaactgtcagtataacctagttttgatgacacatttggctattgcacctgtaaaaactattttaccaactgagtattgcgggcaacttttgtcgttgcatttattcactaataaaagtttgccgacgggttgggcctagtcttaccagcataaatttaagtcgacaaaagtcttctttcttgtagtggaggttgagtgagataccttcatttgtaggggatcactaacaaaccctacgcctatatatagataatgataggctagggtttggggaccccgcttttgagacccctatatcacttctcattgacatggccacatgcttactgcatcccttgatgctcttctcccttcatcatctttttctttcacttgttcacactttgtcgacaccaagcctccatcatacaatcaccattgacctacacacttaccaggaataagagaccattctctattcttgcccccatcgctttattattcccaagaacattaccgccaccattattatcaagtttatgggtatttggtctcccatgagccttttattctgaagcttcaatttatatttcacttagaaatctctagttgtactattgcccataaacttttgagaacataacttttttgtgttggaattaattaataaaagaagtagacgtagcccctttctatcgtgatattggggtgaactactataaatcctagtgttcctctttattttgtgctatttttttagccaaattgattcatcatagtcctcttattttttacgatcttcttagataagttgacaaaaaatcgcgtcgatcgcgtcaacaatctctttaacagatcccaagtatgcagaaaagataacacttcttttgacaaatcttcttctataatattgcaagttgtttaatagaatgcactattataaacatcaattctaggttccttctatctgggataaaaaacatggcccgcgtcactttctccttggtataatctcttgagtattttatgaaaattgaaataatacaaaattctatttagtaaaaagattaactctcagtcagcacagtacacacttgcactattatcatttttactctggttcttccttccattttcttccccaacaaattatcataaaagtcaggaaaagctttactcacaacaacctgattataaatctagttaccgtgtgttgacctcgaaaagtgatcaactgacagcggagtcatatgtatctgatgctagtcatgtgttacacaaatagaatgaaagagtaaggaacacaaagatttattttagaggttcatccccgtttgatagagggaaatgacctactcttttagttgtattaatactgagggttaatactatttagatcacgataggtgggatctgatatagcacccttatagatacaaagtaggaatcagattggcaaatctcaagtgatgaaagtgcttgtatgggtttgtgaaagacagtggagaagagtgttatcaaacttacgcttagagcttagaggctagtatcaggcttaaattgaacttaggtttctaggttagagttaaggcctttatataggaagcctaaaaccctaatttacaacttgaaaccctacatatgtgtatatttaattaattaattacaaaagaccaaaatttccttaaacatagctattatttagcttttctactggccttttatggcccagttcgtagcccaaactatgttgtacacatgtggaattgcacaaaaaaccatacaggcctttccctggctggccgaacccctgtagggagtaggcgggccagccatggttttttctagaggctggctggccctatggccggcaagcttttaggaggaagctggtccgtcatttggtgcccgtttgagtgttggggtccccatttgctaaggtattaacttgaccttcttattggttagttctactgccatgttgcactaatttttttcatgtaagcattgccacatcaggaggataaaatttgggatatcattttcccccaagtccctatgcagacgtgtgtacggataggacttaccagctatattggtgtagttagaactgcagtagcctttgttaaataaaagttactacatttttagccttttgaaatacttttcctattctatctaatcttattcgctatagaaaaataactgttctaattgactctttgatttttaggtgaagtaagtgaagaaagggtcccacatgtagtatataagtgctttttggggtggaaatcttttttcacttttcagttattatattttactttctctcaatagaaattttcatttgaagaatctcatccttctctctatagggcctaaccatcaacaacaattctcttgagatttttatgtcattttgacgatcaagacttcccacattcttcctcaatagtttcttttagtgggtaagctttctattcctgctatttcacttaatttggttaattttgccatgaatgtatgaacattatttctggctttgaacaccctttgattcctatgttagattgttgtcttttcattattttgatctgcatgatagccttaggatatgtaatgtgttctttatagatgaaaagtatgaatgggaccttcattgtgattcttggctctttgagtcatgaagaacacgaagatcatgaagaacatttttgagttcttaacaaatcactattttagatttgtcccatccttggttagccaaggagttcttgttcaagacctggccggccaagggtgactttaaagtagtctagccagcctatctgtggcacatgtgttcttggccggctactaggctagatcatggggtctttccggccactacagcttggaaccctggccggccaaggccaaggctccaagggggcagccagtttctttccctctattgaccttgggtagggtctcgtgatggccttggaggcatgcatatacaactgttgcctgccttacttatttatgcatggttccccttgggaactctgcataaggctcaatagtgactccattatagttaattatataacttaggacttactatgtgtcttagttagtgtacttaagagggtacttggctgataattgaccttgtactttgtgatttaccttgaaggtacccttgggtattgttgggtacaatatgtttgtagctttgccaagtttctcaccttcccttatctcttctatgcaggtagcattaggtgtttgataagggaggtaacaaccacgtaggtcccttatttattctttaattatggccagaatgaagtagacttatcgtaaagtgcctctgtgcgaccccaatgtagtcagggtggctataagaggtcgggttaggatagtagaggaggccactcagcctcatgttgatattgatctagagaatgatcaggggctgagagctctgatgttaagtttgatcttgaggaggttgtgccagataggaggaggaggtacatgacctgtattttcctccttaactatcccatgggtctttatgacgctgatggcaacccactaattaggcttggtaaaccttcagtgcttggcttggatcatgttttgaattagtcttctgagcgtggcatgttgaacatgggaaatgttgccacaacatccacactttcgggacatcagtgcttactttggtatgtgcctgacacaaatcaccctaaaaagtatcaagtacctttcagtgatatttattttatatatggagctagggtggcctcaacctattccttatgagatcaggaattattttgatttgaagtttgcgtaaaagtagaacaggactgtgtacttctacttcagtcagatcggtcactagtgattgggtgataccaacagtggagccatgtcaaaagtttgcaggtacgccaagaagtatttcattgcttatgtcatctaaaggattggacactacgaattctgacgggtaccattcatcaaatgctctatccccacattgcaaatgagggatagggcaaaccacatcatgtctctctgtgtggagtagagaaacatactctggttgaccagtgtggccaactacttaaagtatggtttgtatcctcttgcttctagagttgtgggagtcccagttgcagagggagcttgtcttggagatggacaagttcttaacttggatgatgatgtacctttgtctcacataacacagaagttggagaggaaagagaggtccctctactaacgcttggccaacaggggtcaaattagtgatgcttctctctggatcgggcctagaggccaggcttctaagggacatgcttgccccttggctacgtctagagataagggcaaggcagttgtagaggattttgacagttcctcttctgagggtgatggtatttgatagttgataacataatcttttatattcttgtattgcatggagtgcttatgattgctttcttactttgctactttctttttccagatatatcttccacgatgagaggtctcaccatgggagcatcacatgagcccacgagatgagtgcgggtcaaggtggcccagacttctcatggcagaaatgctgttggatcatctttgcctcccctccaatagggcctgcacca

SEQ ID NO: 46123 - DNA, 2812 bp, Cannabis sativa
aacaaccgtgaaaacttaatatagtacattgtataaaacttatacaatattttttttgaaaaaaaaaaatacaatatttttgaaaaaaattataccccacaataataaagtaaaaaattaaaaattttaatatacggtataaaaactcatttataaaacaaccgtaaagcaacaaaataaaataattaaaacagaacaactaaaaaacaaccttgaaaacttaatatagtagacagtataaaacttatacagtatttttgaaagaaaaaaaaaacataatatttttgaaaaatattctaccccacaataataaagtaaaaaaaataaaaatttcaccttatggtataaaaattccttattgggtttttttttctttttcctagctttgagactcatctttgttatcgacacggtttgttattatttgattatttcctaataaaatttgtgcagttttctgcctaacatttttaggctcgtccctttgaaccattgaatgttattcagttttttaattagtgttctataaatataatattttaacaaaacattttttattttgtctactccatcaaataattcctctgtacttcaaattaagtttatttttttgatggaagtactttcaattaagttggtctagttatatagagcttccatagtactttgttgtaaaataacaggatgagtcagtcccataatgcttgctcatgaaagcgataagttgaaaaatatatatattttttttttcattaatcaaaaataattttatattatatttttttaaaatatattcactttttagtgaattgtttaatatactctcactatttaagtccaccatataatttgcattaacttacggggtttaatgagaatatcatctttaaaagtaagtatatcttacagaatatgaaaatagaaataaaaataaaaataaataaaataaaatgggtatacgacgtaattctcggtttttcttttattattattattgggccgacaacccaatccaagccgaaaatgggctgagtaggccggctttgggctagctaaaagcccattcggtggagaagattcaaacacttgtcgttttacattattctctcgtttttcctctgtaggcttggcttggcgccaaagcacttcagccttgtttaggtttcattttggagttgatacaattttctattcatatatctgaaatcattatcattttgctaaagctgattttatgaaattttatattatgtgtaaaataaagcttgaaactttttatatcatgatgaaaaccttgtacaatcaaatggtggaacccttagaaactgcagtccaaaattgcccaactcaccaactgttcgttaaaattcctcaaagactagaaatccccatttacaggttagaatatgggcaacagaggagggtcatcctcttcttccaatgtcaagcatttattgaaggttgagcacttagagaagctagcggttttgactggttgggaggtttctgtgtcttctttggctgcattctttggtcaaaaattgacttttgttggggagtctttgggtgtttctcaaaacccttctctgttttcttgccaaaggtatgttttgagtttgagttttattcaaatttgattgagtaataggagttcaaaccctattaagattttaaagattgattcattgtgtgtgttgctttgaattcaaatgttgtttattctttataaatgagcttaaagatgagaatttcatttattttcttagtagtgataagatatggctagagatgtttactgcattataacatgaaccgttgaaatagtgaattcacattcactcatgattagttggtttagtttttagcattttgtttacagattctgtacattaactaaacaactttttggtttgtagatgtgaacaaattcctcagtggattcaactgtacaattagaattgagaaaaataatggaaagacatttaatggggtactccaaaagggcttctaaaacaaattttcccatctaaggtcaaaaccacgaaaaaatcaaaatccctctaaatcaaattctctttaagcctgagaaattagagaaatgttaaagagaacttatggtgtctaacacaaaagtgacatactgttattggtgcaatttaatattggatctcacacattataggaaatcgttaaccaatcacaatgcgtcacatcagtatggtgttggacaccttaaagtgcctaatagcaatgctcgagaaattgggtgagccagctttactgccattaccagaaacatctggagagtttcctattaatgatagtcatgcaatacttatggcgaaaactgtgatcactctgttgaaagcaaagaaaagaaagaggaacagatcaatgaataagaaacaatctaaattcgaaaattgttttaatcatcctacaaatgcagaaaaatctatgtatctagcaaaagaaggaaaaaaatcatgaattactttaaaggaaattgctgataacaaatatcaaggtaagaagtaaaaaccatcacatagctaatttttcaattctagaaaacattttgtactacttgaattttgtagatttgattttgatgtgttttgataattcatggatcagagaaagtgagaatgattcactaaagtctattaataaaaaattagacttgagagtttgtttgcatattaatgattgatagagaacttcataatcactacaaaaatgatagaatggttacaaaacaacttcaaaaacaaaattagtttaagataataatggtgaatttcaaatgtat

SEQ ID NO: 46124 - DNA, 714 bp, Cannabis sativa
taacttgttagtaaatttagattctgatacaatattcccaacaaaaccctcctcatctattcttctcaaccttcctcgtcggagagggaatttgaattgtggaagcttcttcattctcaaccttcgagttagagatatacgacttaggatttagggattagttttaagatttgagataaaagtttttgttttaactcaaaacaatttaatcaattttatttttatttttttagttttcaatttattttagttatttgctttagttttcaaaataaattaaaaaaaaaaataaagtcgggaatcagattagaaaagtacacatgtactgttacttaccctaacagagggtggatgaaaaaactaatgagtttggcgagcttcaatatttttaccacaattttttaaagttggagccttgtatcaaaataaattttttaaagacttacgccgtaatttttctttatctttcaatattttgtaggtactaatatagagtctttttacttttcaatttttctaaagtttctattttatagcttactagggaatagattcgcgcttcgcgcggttttaataattttctaaaattttacattaaaaaaattaatttttggttatgaattttaagtctaatattttttaattattttttatgaataaaataaaattatataatatattatgtaattttttttacataattagcataaatat

SEQ ID NO: 46125 - DNA, 2975 bp, Cannabis sativa
agagagagagagagagaggaacattcagaattcttttcaccttcatttttatcacatttttgggtaaccttgcattttccgaccactaacttagttgatgagttctcaccgtaaacacaagccagactggatctaatgactcctggaggaagtcattggcagttagcttgtcaacttctgtttttaccgcatcggctctgacaggaccaaaggtcttcttttcttacttattggagttgcatcctcgtggatattcaaggcatggaaaatggtgtttcgatcaattccagtcatgtcagaatgactccaggccagtacatcttgattttccttaaccgtgttaattacatcttcttttatggtcggggaaaggtgatttcccaccctcatggttttggtggggtcttctttgtagatgctcacttcctcaacctcctctattggttctaaattttgctcgagttcaactcttggatctaactcatcttcatattcctctagtaccacctccgtgtccattgggtcctctaacacaagtgcttcgggtgcttcttccctaaccatatacacggttctggttgatacattgtaactttttcttacgctctgctagttccccttaatggtaccaatgcacccattattacatgggaacttcatacacaggtgtcggatggaggtcacgacactaaagtccactagaattggccagcccaatatggtgttataagttgtggggcagtcaactaccacgaaggttgagtgtttgaatgcactagccttgttgtctcccttgagggtgatctgcagttggatttttcccatgggaattaaggagaaaccattaaagccttgtaactagacaaggcatggagttaaatcagtttcagtgagtcaaatcgcttggaatgtgaacttgaaaaaaatgttgacagaacttccgttatcaactaggatcttggaaactctcttgttggcaatctgtgcattgattactgaaggatcattatggggaagcgtacgtttttagcatcttcttttgtgaaggttattgggagattcatcctccttggacgttgcgcaggagattgtaccagggcacacacttccccttcttccacttccttttggtatctcttttgtgtgttacaggtacttccaacaagatggtgtccacccgatattgttgcaacatgtccgtccacaggtggcgaagctattttgggaggatatggggttcctggtcttggagcccaccagtcggagctggtagaaaaagaagtgcaggtaaagacgttctaggagcttgagggtgcacaaccccctgtgcgggatttacagcaccctgctatccgggaagcatcatgtgtccatgaactaccccctgtccgcgataaatgatcagaatacagaccccatttccccaagtgcccggctcggacccatctcaatcttgtctttcaagtactcacactcatttgcagtgtggctcttttccccgtgatatttgcattgattgctttgatcccgcttgttcctcctgccgtttgacatgcacgggggcttcccgtgatggacgatggtgtatgtcactttataaatgttctctcgagtgtctatcaaacttgtatattcagtgtactttgggtcgtaatctttccttaccttcttcactgaatctttttgattgtggctctttcctcctctctttctctacgaatgccccaaactagggtttgggacctcagatttagaatgttcgggaaccacactgcacctagtatgtgtcgtcccgtacctagagaaatgagtttgcgtagggacgagactagacacagtaggtccgtaaacagttggagaaaactgaggtccgagaagggaaaaagatggagcacgagtttgagagataaaactcagagcggctgttgtaggtgtgggtggcagagggactctgaatgcttggatgtaggcatcctcaaggttaattatgccacgtgctttggacataaactctcctagtgtttcagctctttttctttgcatctctccccacaacaaggaacctgcaaccaatcatgattggagagccatttgctttagatcattgccgacccaacctctaggtcatcctttgaataaaagctttcaaactctcattgggtttctctttagcgttggtcaaggacccaacctccaagtctttttcgtgggcggcgatgaattgcttgtagaagataggctgtaaatccttccaattgtcaattaatctcggggccaattgcttccatcagtgttctgcaaacttggttaaagttagggataaacataaaaacttagcattgtcactaactcgagcgacttgcatcatcttgttgtatttagctaagtgcgtttgcggattagttcttccttcatacaacttgatatgtggcatcttgaagttttcaggaagaggggtctccgcgatccttttgacacagggttctgggtccacatctttaaaatccgatgatgctggactttactttcttaccacgcagatgatttcttaggtcacccccacgtggcctcactttctcgctcttgtacctctcgtattttgcatctaactgccgtcgcagatctgtcgtggactaactatccctataatgactaacagcagtccttccgtcctgattgacgaaatcgctagggggatctactcgtctcttaggcctgggacctccgtccctactcctttcggtgtagccctatttcgagggtcaaaagggcgtctaggaccgaaggcaccggtggccttctgcgtcctcgagggttgtccaatttgtggtacatctttctgatgaggtttcggaacgattttttgcgaggtttacctactttgcttttacccttctgcgtacgaggattttgggttcctgtgttagtttgcgtctgggctcgcccttctgccacctcttctacagacagttccc

SEQ ID NO: 46126 - DNA, 1847 bp, Cannabis sativa
gaatacacaacttaagactcaatattcgtcaaagttgttgcacttgaaactttacttcactgatgtccaaccttttacaatgacattatcttgcaagtacccttgggtacggttgcccagtgttttgtttatggcatggaatctgcaaggaactctacctttccttggagatttagcccagtacgtggttcgtataggaactctttctggctcttctctagatgtacaattcttgcaagaccttcgccttatgcagttgaattaattttttattcatattcagccttgaggctttcatgttctttcttttggcctataagcattgtatttttgaacactactactgtttagccttaaagccttttactatggacttataaaaaatataaggtcattcaaatagcctatattacaaaaaaaaatataaggggtttcagagtacacgcgatagaaaagcccaatagagtagaaacgcaattcagaatagattagatcacagaacttacaagaacaacaaaagaaagataagtcaaattatgtctggaagaagaagaaacatgcatggctaagtaccttcgagatcatgaagatcttcggtaagaagaactttacgaaatccaagctcgaattatcaaaaatcatttcctcaagtggaacaactgacatcaattacttggtcattcacattagaaatattggaaagaggagcctcaatagtagaagagggaacctaattattagaacgttttccacctttcaaaacacaagagataagacatatcatttagttcttcttctatcatgataagagcagccgatgatgtaaattttctggcccagggatctcctcatttcatcaaaattcttaaatggtcagaggcatagttgagctgaatgtagtgtttcccaaggaagacaaataattatcaatatcatagttcccatatcgaatatccaaggactcttagaacttgcggaacatggcgatacattcctctgtaggtgcctcataagatgtaattgtgtgcatatgtgttgcagcaaaaacctcaactacacgagcaataatcttctggatcttcacccattcttcaagtttcagtcgagtgcattcaaaatcaaactcatctaatgtctagtattcaaaaagaagaaaattgagtgcaaagcaacaagagggaaaagatcagaagaacttatgaaaagagaatacctccttcttcaagtgtgaaattttttcttcccactctagcttctctagaagggactggctatgagtgaaattgttcggttatggtaagtttttacaaatttatagccgactagttagttacgatttttattttacaaaaaccataactgattatttagaaattataaccgtataaaactaaccgtacggtttttgcaatttttagtggttttttggtttggcaatttcggacagtttttgttggttttgggcagtttatggcagtttttagcagttttggtagtttttgtttaaccatttttttattttgaaaactgaaactgaccgccatatcaaaaaaattataaccaaaactgactgccaaattcggtgatgacgtggaaccaaaaattcggttatggtctggttatagtttgatggttcagattttttagtttttattaagacccctagtactggaaaactaagagctgctcaacgaacaatttcttgtgagtttcaccaagaagatttttcttgtgatattagcagtttgatcattagagagttctattaaaataattttacttctcatttctcttttattaaagaattatcgaactcttttattgtttgatcactcttttgaagcttg

SEQ ID NO: 46127 - DNA, 1924 bp, Cannabis sativa
ctcctccaagtgtatacaagtgttttaagtcttaaggtgtttcgtggttgccatcgctgtcttctactacttcgcaccaggcttggccctgggataggcgggctaagcctgtgctcagggcccaccaatcccaggggcccaaaaaaaattatttaccttttaaaattatactatttttttttactgattttgaaaaatactatattttttttctaaataaaggcccaaaataatttttttttctatggcccactaaaagccagggccggccctgcttcgcacgccatggtctggcttgaaaaaccaaccaatcttctttaatttctcatgttaccattcttttttggaaaaaaattgtaggaacaatgaataaatcatataactatttgaactttctaacatgaaacatgacctttaaacaataatcatcaactatttaaggtggcatttggttagagataataatatagaatggaatggaaaggaattaactttcattctattttttgtttgtttgattgcatattaaagtattgtattatagtattaaaatgtcatgtcatttcattctaatagaataatttttttccactattttggtggaataacttccattttaaaatagaagaaaacaattttgatgtataatgagaaaaaatttaataattttttatgcattttaaattttattccattctatttctatttctattcctcgatatcaaacgccgcaatgtatttgaaattctaatgtattattagtagattaactaaatgatctaagtttctattatcaaaagaattatatcatttccttttgtattgatcaataccttgcatgacaagcaagaatccatagtgttataacatctcaatttctccaagctagccaagcaccttgcgaagttcttcgattaacactgaacgcctggttggatccacctacattttggttacaaacaattttatgatatgagttcatattcagagaagaacaagaaaattgttacttgattcttaccttgcttagaagggtggcaagaccttgaggtagaacttcaagatctgaagtcgaattgccaatgttcgataattggagaactatcttctgtactcgcagttcgtttactttagcctcgtaattctttggatcatctttccatttaaagaacgcttcatcgtctgtccaagcattttgctcgattcttgagatgtctgagtctaaaaaccaagtgatgatcaagtccctcgcagatttgtatggcagctggtgccccgcggcctctattatggtcttgatcagcgaatcctctgcaattcttcgacgcagtctcttgtaaaagaaagaccgagattgtttccattcgagaatttctttaacaacaccttttgcagccattctcaacgatgtgtcatgcaattctgcaaatttagtagctatttgagtgtataaaggcgaaagctgcttttcccgggctcttatctgttgttgcaaggattcaaccagcccctgcgtgccactactttcggcttcctcaagtttttcctttagatggattagttgttgatcaagccttcccatacactcaagaagttcctttgttctaaatttgatctcaatcgttccttctggctcgagtacattacccttagctgtttcatcagcatacatttcaatatggtctgagttaatttgactatccacaaccacccatgccccgccacgaagctcacccatcattgggatgtacacaaaaacaggctgcttgtatgttctgaggttttctacaattgttgaaccagcttgaagaatcccttcaaaaaggtccctctgtccacccgaaaaacctctccaattagccagaatgaagagcgggagctcttctcggttgaaatctagcaatgcttgtgctgtcttagttgc

SEQ ID NO: 46128 - DNA, 1226 bp, Cannabis sativa
attgattcgattataatatggaaaaatatcatgtatatcatcaaacattttattcaaccaaccaaacaagtactctacttggatttatgcttatgattaataaagttccatatggcttttgaatattttatttcgaaaaaagttgtcttttgatccctgtgatctatcactttctgggaataaaacaccacacaagctaagccatatccattgaattaattatgttcaatttttctttttcttttcatttaaatacagataagaattatcacatatgcatttgggtgattgatcatgttttgatttatcacatcaaaacttttcgcatgttaattgcttgtaagataaaaatttgtgtttttacttgtcttttttttttttactattgattcgatcccaccaaaaaaaaagtttttatatcataattttaactttatgttctgattttatctacttgctatatacatatgatttaattttaaatgtcattgctttatacacgaacgaatgttaaacattagagaatcttgttttttgtttgcataaatgccaaacgacatctcgtttagttgatatcacaaaacgacacgtcgttttattgggaggattcaagattcatcttcatggattgcacggaccgtgtcctcttgaacgacacaattttattttctctaagaaaacgacatggcacaagtcgacgtagtgttgcttagaaacgacatactaaatgaaacgtcgattgtcgtttatcacaaattcaaacttcatttatttcctaaaacaaaataagaaatacattatggaataaactacatgtcgtttataaagatcaatttaaagcaagatagcttttttttaacttttggatattagcagcaaaataattttaacagcacttaactatggtgccgtttgataatatttttattttctaattttttaatcagaaaatgaaagtaaaaattttatttttgaaaaacaaaaatgcgttctgtaaccgcttttgttttttaattttaaaaacagaaaacaaaagtgtgttctgtaaaatttattatttttatttttttactttatttacgtcgggtctaagttcgggatcggattctggttcaaatcagaggtcgggttcagcgacagggccgtgggggagatttgggttcggatctgatcgaagtccaagatattgattaaaaaaaaacactgtttaaaaaatattgaaagtg

SEQ ID NO: 46129 - DNA, 815 bp, Cannabis sativa
tggaatcaaactgaaatttgcttctgctctttcttttactcccttcttccactctttaccatatacaatattcacatgaaaataaaatgatgaatatttacagcatatacagtcacatttttttctttcttctcttttggtacaatagtaaacagtcactttaaactactagatttttccctagagttgaagaagctaatcatatgattataaatatcttcctttgcatgcacgctgataatgaagtctatatgaccataattctcaagataaagcaactctggagtagactgcaattccttgagcgtgtgcttcacatcggtcaaatctgctaaggcatcatctcctccgtaggccatccataacggcaatgactcgggtatattcccaagattgaatacagggggtttcaattgaccatattgcatcaggttttttactactccatagtcatacttggagaaagtaccctttcgaatcactaccaagccaaatgaaataaaataagattaaaataatagtaacagagtcagacaaacatgggaaggaaaaattcaatattacttatgagtgctatgccactgaaactctcaactgcctatgaataaaatcataaagagctaagagctatattacgtactttggaagagatggcgtatgttctttgctgatgatggatgtggttcatactcaagatagaaatccacacgcgagttgttaaagcagcaattcttgcctgtaatgtttttgccaaaataacgttatgacataaaatagtgtatgcaaatgaaaaatgaaaaacattattgaagacc

SEQ ID NO: 46130 - DNA, 979 bp, Cannabis sativa
tatttcttccatgcaggtagtgccatgtgttgaataggggaggtgacagctgcgtatgtcgcttgtataccttgtacttatagttggtatgaaatagagtacttaaagagtaaccccgtgagaccctcaagtagccagattggctatatggggtcatgtcaagatggcagaaagggttaccctgcctcatgcgatgttagctctgggagtgaccatgaggatgagagtctcatatttgagtttagtcgtgaggaagttgtaccaattaagaggaagagacacgagccttgtgttgccctgtctaattgtcctctaggtcgctatgatagagatggtaatccattgaataggctcggtgagccttcgacacttggcctagatatgtctcggatcaatcccctgagcttgagcttctcgatgcgggttcacaaggtgataggtggatttcccctatttatctctctcaaagggcagttttgagggaatgtaggctaatgggttagtgggtagtatccattgtaagatacctcttctgaaccaactagcgcatcgatttgctctcaaattgatggtgtggtcagagtaccacattagcaaggactcatattatttcttcatctctacttttgtgatgtttccgcttatttcaggatgtgtccaacacaaatcccccccagaaggtatcaagtacctttcggtgatgtttgtcttatataaggagctaggtttgcctctgcccactccttatgagattggatacttcttcaacttggagtcaattttgcagcaacgtcagtcctgatacttctatttcagctaagttggccaccagtggctaaatgattccaacagctcatctatgcctaaagtgacgagtatgcttataagtacttcaatgcttgggatgttgaagaggtccaccattggtgctttcaaagagtacaatttttcaagtgttccatccccacattaaaaataa

SEQ ID NO: 46131 - DNA, 2870 bp, Cannabis sativa
aacaaaacacagggtccaattggtaacttttgcaaaacagagggtccaaaatagtatttaccctaaaattaataatattcaattttccatggatagtgtcttatccaaactctctatctctaggcttgacatcaatcatattaattctcttcaatcctctcttgatgcaatcttgcttaaagaggaagttttctggaagcaaagatctaggggttaattggctcaaggccggggataaagacactaagtactttcataataaggcctccactaggaaaagaaacaaagtcatcaatagtgtcactctcgatgataattctattgttaacaatctcactgatatcactaataactttgtctagttttattctactctttttacctttaatagtactgatcttgagtccattaacacggttcttaggggtatctctaaacgcatcgatagcaaccaattcagcttccttgccagtcctttcactttctctgaaggtaagagtgttcttcttcagctgtctagtgataaggcccctgggcctgatggcattaaccccctcttctaccaaaaaaattggtccgttgctggtactgatctttgccatgccgttcttaatgttttgaatcatgattccaatcttgctcccatcaacaagaccttcgttgtccttattcccaagaaaactcacacttgtcaagtttgtgatttcaaacctatcagtttatgctcgaccatctataaagttgctgctaaatctcttgctaatagattgaaggttgttctcactgatctcatttcccacaatcaaggggcttttcttagcaatcattatattcatgataacatcattattgctaacaaaattattattgctatcaccgccaggaaaaaaggtaaagtgggttgggctgctctgaagttggagatagaaaaagctttcggatatggtggagtgaattttattcatcgaattctctctctcatcttggcctacctgccaattttgtttccctcatttctaactgtatcttaactatttctttcaaactctacattaacaatagcctctcttctcccattattccttctaggggaattaggcaaggtgatcatcactctccctatctgttcatccttgttgctgaagggttgtccggtctcattacttccaaagctcatgccaacctttttaaaggaatctccatttgtcgtgctcctcctcctatttctcatcttttatttgttgatgatagtatgcttttcacccatgtcaataaccaaaattgtggaactattcaagacattcttagtatctataataaggccaccagtcaatttgtcaacctcaccaaatcctctgtccttttctcgcccaacactacacctcaagataaaaattcttttctcaattctcttcatatggaggataaaccttttgttgacaaatatttgggtgttcctcaatgtttctctcgatctaaaaaatcttctttctattacatcctccaaaaatcttacagtaagctttcggtctggaatcaaaggcttttctctaaagtttgaaaagaaactctgctcaaggtagttatccaagtcattccttcatatgccgtgtcttgttatagaattcctatctctacttgtaaacatttggggaagatgatggcaaattacgggtggagatctttgggtcaaaatcagcacaaaattcattggaaaaaatggtattctctttgtaaatccaagttttatgggggactaggatttcgggatattgttcaccataaccaggccatgttagctaaacaagcttggcatatctttacgaatcctgactctcttgttgcttcccttttaaaagctttttaaaaaataatgattttcttcatgctaaaatcggtcattttccttcattttcttagcgtagtctcctttggggaagagatctctttcttaaaggtttagtttagaaggttagggatggcaaatctattcatatcactagcccaaattggattccaggatcaaattctctttatttcaagaacaacctcactcctccggatatttcagtttcttgttttattagtgaggatggcctttgggatctaaataaactcaccacttattttgacagtagtgatcttgttaagtcaatcctcagtatccctatacattccaattctaaggattgtcttatttgggggcatgatccttcgggttctctcattgtcaactctggttaccaccttgccaacactactcactccagccttagctcgtctaatgcagagacgtttaagaagtggtggaaatcgatttggtccttaaatatttctcccaaaattaaacatttcatttggaaagcttttcaccatcttctcccctctaagcttaacctcttcactaggaagattctccaggacccccactgccttttttgtttcagccatgttgattccaattcccactccctcttagagtgttctaaagctggtaaatattggaggcacactactttgcaccctctattctactaataaatattgtgatattaaattttttttcttacgtggttatgaaacttttaaaaaagaacacttgacaacattatttggtattttatgggctatttggattcatcgaaataaatctctttttcaaaatgggaagtctggctataaggagatagagccctgttactgtttcttacttccaagaatataaggaagctcaacctaagatcctgcaccaacctcataacaacctcaaagttcagattgcaagcaagtcgattaaagaaggccttccccacatccagatctttacaagttaagtgtggatgctgcagtaagaagtgagaataatcttc

SEQ ID NO: 46132 - DNA, 901 bp, Cannabis sativa
aaattataaggattttaacatttcttgcttttagctagactgtatttgtacttacatgtcatgtttttcaagtttgtcgtgtcaatttgtaacattgtgttgtatcatgtacaagttcatattttttttcatgcttggtcgtgtagtgtcaataattgtagtctgtatttacactaaacttgtttggtatgtcgcattaattcgtattgtattgtattatattatataataagttaaattttaatatatactaaatattatatatttaataaaaaatccaatatataacttcatcataataagaaaggcgtgcgtgttctctcaagctttcttccatggcgaagaagcgtcgagtgatccgaaagccagcaaatcgtgctacgagcgtggaaccaggggcaaagagtgatgaggattttcgatctgagattgaatgtgttttatctgagatagagcaggtgccagaggagaacgaggaaggaaaacctgctggtttggagacagaagaggatgtcgtcgaaggtgatacagagattcgtgaagaacaatccttggcagaaatggtggaaaatgatcatcaatctcactctcagagtcaatggcgagcatttaccactgtgaaacctttggatctggatgttaggttgaaatatgaggagccggtggttaaggatggggtcaagattgctcggattgatgttgaagaggtgaaattccaggcggctaattggagctcagctgttatttgtatggttttgggggcaaaccctccatttgcagtgtttgaagggttcatccgaaggatgtggggaaatttgggaatagctcagatagtgcgtatgaatggaggatttaccatagtcaaattcaatgatgatgcaacaagggatcatgtgctgga

SEQ ID NO: 46133 - DNA, 1309 bp, Cannabis sativa
aagtttagaggatcaatttccacaattaggtattttttccgtaaaaaaaatcagagggtataaatgtatgaaaccgaaaatattagatatttttactacaaatacccttaaaatttatataaaagaaaaatataactctaaattgaacacgtacaatagaaaattcttgattaacttttcttaatatgcaggaacgccatggaagcattattggacaatagctggtacgtacaattaacagaaaccattttttttagaaaagactatatgtacatactataacattattataaaataaattatatgtttatcatctctataattttcttaattttcgtaggcattacatacaattctaaattttcatttatgctatattattaggggtgtcgttaacagcaattattggagtaatcgcaattctaatagtatttttttacaaaagaaaatcagtgtcgagaaaactaataagtaagaaaaaacgcaagagggatcagtttcatgtggaggattttataaagaataattatgcatcgtcatttaccctaaagcggtatacttatgcaaatgtgaagagaatgaccaattcatttgtagaaaaaattggtgaaggaggttttagtattgtctacaaaggacacttatccaatggcacaattgtggcaataaaagtactaaaggaggccaaaagtaatggacaagatttcattaatgaagttgcaagtattggagcaattatgcacaaaaatgtagttagtctattggggttttgttatgaagggaatagaagggctttgatctatgagtacatgcctaaaggatcattggataagtttatttttaatcacaaaaataataccaataccaataatagtcgcctagaatggaaaacactttatgagatagcaattggaattgctagaggactaaaatacttgcatcaagattgtagcgcaacgattttacattttgacataaaacctcataacattcttttggattttgatttttgtcctaaaatttctgacttcggccttgccaagttgtggcaaagggatgggagtagtgtatcactgttgaagggtagaggcacaattggatatacagcaccggagatgcatgatcgaaatttcggtgaagtatcttacaaatctgatgtttatagttatggaatgatggttttggaaatggtgggcggaagaaaaaatatcgacactagtgtttctcgaacaagtgcaatatattatccacattgggcacataagcatattaatgatgatgatgatggtgagctcttgaaaaatatttg

SEQ ID NO: 46134 - DNA, 1150 bp, Cannabis sativa
gaattactttctgcttctgcaaacacttacagttttatattttcttatatataactgacattttgcaaaaacacggtttttcactactgttttcgaagtattaatggtagcttgacaaatttagaatgcaagaaatgatatgctttggaagcatagaacaacttcaacagcaaatgtgattctcaaagcaagatcgaaccttaatcaatggtgttgtgccaacaaaatcgtatggatcctcttcttgctcaaaatgttcaaggattggagatagagcattggatgaaacctttggctaacatgattaaggtaaatgttgacggggctatatttgaagcagctggttgttttggctttgggtttatggtaagagattctgctggacaaattgttgaagttgtctccaagtgtcgtcctggccatgtttcatcaaaaatttttgaagcaagtgggattaaagaggccctaagttgtattaagagaaaaggatgggaggttgttacgctcgaaacggactgcctagtggcagttcaagcagttaaaagcaatattctaatgccttctgcattcgggttgctggtgtggaagtgcagaaatctcctacttgagttgactaatgtcaattttaattttgtcaaatgttctgctaacaaggtagcacattttctccagtgtagtgcttgttatctgttagattgtgttttttattttaacgaccccccgtcagagttgttagacgttgtattggctgaatcttcattttaataaaatgccatattttcattaaaaaaaactatatatatataagtaacacttttcaaatgtattattcattgatgatttctaaacacatttaactataaatattaattttaaaaatataaaatcattagattttaatccagtgacaaataataaaagaaaaaatttaatttttatatttatagctacttaatcaaaaaaaaatatttattttcatactatattaaaaataatttatatacaaaatacttaagtaaaactcaactttttttcatatttttttttttgccatttttttttcattcgttgaaacaacattagctcatataatgtaaaaatattttttttttaatttaatagaaaaattaagcataaaatctcaaatttt

SEQ ID NO: 46135 - DNA, 764 bp, Cannabis sativa
tacagagatatgttgctattaatggcatttaacaactgtgtctccttacattttaatcagtacagtagaagatattattaataatgtcattttatgatgtatacatataatattagagcacatttatgtaatttatggttgatagaaagaaataaaatacttaattttattttatcatggtcgataacacgtatttagcaaaagtatgagttacaacatgttaaggatattggttagtttacagttagttaatcctgttaactaaccaaggtattagttgagtgtgtttgtagagtctgttagagggttgttatgtcattttgtactctgtttttcaataatacacttttcatctctaaaagatattaaatcctcacacaacattaataggtgtagagcaatataaaactaagagcattaaaattattataattacgaactatgtcttgtaaaacaagagccaaagacaaatccagagaacacttgattaatcttcaaaacaattttcagacacataattttatcaaagccaaggaaggaggacatttctgatagccattgcttcagccactatttgtgaattatacacaaattaaatatttatgtatatttttctttttagtaatacgattattatcaatatatattaataatttatactaaatgttgttcagaaaagattattataaattaaagttaatctaattcatatttttgtttatataactatttttttttttgttatctctataatctataactat

SEQ ID NO: 46136 - DNA, 2438 bp, Cannabis sativa
  modified_base (34)..(45): a, c, t, g, unknown or other
ttatttacattattttagagattcatatttaggnnnnnnnnnnnnatacatggtagtaaatctagatcgtggtaaaacatattccaacagaacccaactggcgacaaaattgcatttggcagtattagaaactgcatttttatgccatccttgaatgtgttccttaaaaagttcctttattcgaaccacaataatactcaacgatttagatttctgaccatgagttactttattttgttccccccatatcatccaagatgaaaatagaaaaaaattcaaaatcatgttgtgacagcatatctgatgctttcagaatcacttgttggaaggaaatattaaaagaagttgccttttaaaaactcaaagtccagtgattttcagacttttcagactccttcacaccagaatactgcatgactatttgagtcttcaatatgcccacataaagggcaatatgggtctgaagtcacaagtctcttatacaaacctacgtaagtaggtaatgcttcatgaaatcccctccatgcataatgtaaaatctttgattgtaaatgtagtttctagaatttcttccaccaatccataagggttgtacctaatgatgacggaatatccgttgtgagagatgtagctaaatgatatcgacttttaactgaataatcaccatcggtagtgtaatgccataaccaactatctgccttagcaaatttacttattggaatagaccaaatacattcttaatctgccacattgaaataagattgcaccataggcgaactccaaccttctctattatctagaataaaatctttaacaagcatagttgaagttaagttagtaaccgttgttggtagaaacgaatagggcctaggcagccatggatctttaaaagctagtgttatacccgaaatttgactaaacacattagcggaagacacgtgtcaagctggaaagaataaagaactcaaacacgtaatcataattacacttgaaatggaataactcgttaaaagcataattaagagagtatgtttacaactcagttgactgaacagtcttatgcaagataaaaatgtacaaactgttgccttatgccttgatgagaaaccatgtaacttcaggtgtacaagacgaggcactaacctcgttacgtggaggagatataatgacaatggagatacttagcgtataacgcatgatatacaaattaagtataacagatgggtgaaccaaagcgagagatagcgaggcatccacctcgccataggagggcatgcacgcgaaaatgatcatctcgtcaccagaaactgcagctgtcagaattaaagtaaaagcattaccaaccttggaaagacaggtgacgagctccagctcgccatcaagattaactcgactctatttccagcgagacattccaatacgataaagcttaccatatatctttaatacacattcattttgaccaagtaaaagtgggatattcatagcactgtgaaatttaaataaaaaccgcatttattagcatcatatgtaattagatcccatgattttaggggataatcattgtacagatgacagtcagctttgtaaattaactgcctactacgtgattataaatagtggcaagtaagatcaaaagggggacaaaaaaatcatacaaaagaggccttgaaaaattatcagaaatctaataaaattgactcgtggactatgcagaatattaactacaaaaccacgtaaaaaatcttgtgtgttcatactttttactttacagctttcattttttctgtgtgagattgtcactattaggcttaaatttggttaacgaaaatctgcattaacagtttggtgctttcatttagagccttcgtgaaaaaagctcagaaaaaaagcctcctaacataaaagtaatggatgacaacaaagaagataatcctcacgaaggaatcaatcatagtcctggaaaagagccactgagtcctcaaggatctattgattcatcacttgaggaggctgctagctccgggaaaacccagtattggggtctcaggctcgaaggacctaggataaacaacaaccaatgtaatgccctaaataaaaaggcacgctacccaaaaatgattatgaaaccctaatcccctataacgggattactaatcaaaatagcgtagaatttaaacttttatattaaacagagtgaaaataagacttgtaatacatttaaacttttaaacagttgggatcccaaaaatatttaccaacttaattacaagtcttttctttctagtcgacctaaacggcaaaatagaatttcaaaagttcaacactggtagacccttaacccgctttgtctgaaatggctcgaacatgtggattcttcgcctagctcttgtaactcatggctgatcagctaatgccttaccctttcctgcacagta

SEQ ID NO: 46137 - DNA, 1186 bp, Cannabis sativa
  modified_base (1145)..(1147): a, c, t, g, unknown or other
ttcaaataacatagaaaaaaattaacataaaatttagtacacgtgcattgcacgtagctttttgctagtacaaatatatgtatataaatttaaatttctcgtactatatactatatgattataaaaatatttttaagtatggaaataaataaaaagtatattaaaacatcttttccaaatatttgagaatattgaaaaatttcacaaagtagatgctttcatgtgaaaattgggattttaatataaccaaatgttgtccatcattacttttcttgttttgtttcacagccacgtgcataaatatctttcaactaattaataaatgtagttttgaccaaatatcatattttcgttttccattcaaattaaatcattctctgactatttgtctcctttacgtgatttttcaactacttaatggcaaataatagtcgtttggctcttttcgccgccgagttgcacttgagataattaatatacttacttcgtatgtattattttttttagctgaagttaggtaaaaatagtgaaggagagttcattataactaaataataaaaaaattaacttaatttgtctactaaatggtcccccattattatcttttatatatataataattgcttatccacatgtaagaataaggggccacaaaatagatcaaggatagatttttatatatataatcgggtagttcaaaataggtatctaaggatccaaaaaaaaaaaaaaaaaatgggtatctaagtttatttgtctagaaagagtactatatactttgtaggtataactactgtaggtgaaatatatgtaatgaattccatctcgtttagtatggaagtgagattaggtgatgatcattcaatctaatctataatattttgtttatagtgtttttgatttgtactgagtgcagggccgaccagagggtgagggcagccggggccgaggtcccataattttgaaggctccgaaaaaattaaaattaatatatatacatataaaaatatataatacataaatatttaactcaataaattaaatgaaaaacatgcagcacagttgaggttcaaagttcgattcttaccttaatcacctttaatacttttttacttagcatttcaaaaataaataaataacaatannntaacttaaatatttgtattacactatataaaaaatatat

SEQ ID NO: 46138 - DNA, 7406 bp, Cannabis sativa
tgtctccttcatagcaaataatgaagtatgagcaaccaaggcaagattggcaactttgggtttccatgtcttatatgaaactttttgaaaagcacgaggaacttactaaaagttgattaattatttatgatgttgatcagatatgttctgagtttatagcgcctaggtccggtatgaccttttttgttgcaaaagtgacaaataggaacaaagtgttctggtttttcggtaatatgctcccttttcaaggtatttctttttttgctatcttctcgtattcaactaagttactattagattcaccttccttattcactgcagcagacacaaacttcacctttccatctgaagaagataaattagttccatcaatcaacaagtcctgaccttgtttgtagagcatcttatacccaatggaagtctaatcaccataaggcttttgattctgaagggttgattcaaagtagctatccctagaggtatgaaggacaaagactgcatggctctcacaagttcgacagtcaacttgtatatttcactatctttagaacatagctttattatcattcgcttcagtttctcctcaagctcaatcttactgtcgtcaagagccttgttcagatcttgcagttctttaactctcttggccatgtagctccactgagcgaacatctcttcacaagctttattttttctacaataattgaatctgaatcaaaaaaagactcatcaccattagatcccttggacatagtttctttagctataaatgttatgaataacttatcttctttagactcatcattcacttcatcttcttcactatcactccaagttgcagcaaaagccttcttcttcttcaaggtgtttgcacattcgacctgtatgtggccataaccttcacattctcagcatttgatagctggtctgcctttcatctcattttgttggggatgattgtttgcattagagaagtttttgctggaagagctttcctttctttcaggaatgtttttcttgaaattctttttgagaaatcgagcataatttttagccaagagagcaaaattagcatttaaaaaatagtcagataagtctgactctttctgaatttcttccttgtgaataaaagctactcctatctcagttttgtccttttcaaaatttttaatcttcttacccttgtcccatctctgtaaggttaactcataatttcgcagggaaccaattaattcatctaagtcaagagcctcaacatctcgactttcctcaattgaagtcactttagacatgaatcttttaggtaagactccaataacttttttgatcaattttttattggaataggcatttccaagggtataagattcattagaaatatcaaagtttagcatgaaactcagaagctgattcattttcatccataggcacattttcaaaggacttggctaaccctcttaacctagcctttttaattgcctcagttccttcattctttatcttcaacttctcccgagcatccttagcaatctcacaattacaaattactttcaactgatttgtggagacaacattaaagagagcgtgaaaagctttagaattaaaatttgcttgtttcatctcatcagttgaccattcactggattttttcttcttttccccctcatcatcaacaatagtaggtggagaccaaccttcggcaacaaccatccatactcgttcatctacatctttcaagaaggctctcagcttggtcttccaatagggataattagatccttctagcattggtggatgagaagtagatcctctttctttaaacatctccatttcctgtcaacctacataaatccaagccaataactatggtgcactccgagatgaatctcgaagaggattagatttccagaattaacagatcaagaaagaagaaaagaacttacaccagaacctatttaaataacaagacaaacctaaccagaattacttagctacaagatcacaatttcttcacatgtaaaggatggctctaatactaaatgaaagttcaaaatataccaaaagctactaaatcacgattaggttttctatcacaagtataaaaacaaaaaatcaattggacatcgtaattacaagcatcccttgcattggaaactcattccaaccgggtagtgcttgggtctccaagaaccgggtaagataaccttcactaagaaattattcaaacatacattctctagttttaatatacaactcaaacaatgtaaactttaatgatttcatacaaagttaccaaaatacttgaatacactcaagaacaaagatctaaatctacttatagctgagaagacaacatcccctttcttctagcaagctaaactctcttcaacagatcagtctgaacttccatcaaacatcacagattaatactccttctttaaccttgaagatccaataatttacaacctgcaaaaaccacaaaatgtacaaaatttgccctagtagagcaagaatctaagaatgattctaacaaatatgaggagttagttagaaaaagctaccactactttttatactaagaatactggataactgactaaaccaacaaccaacaacagctccgccacgctggcaagaaacataacaataaataaaacaaactaaaaactaacgtagcaaaactaaagtgagagcagattaaacagatgcaactaacacagttatagatggacaactaataaagacagatcatatgcaacaagaaagccaacagataaactaacaacaagcataatttgccagagaaaacatgatacttagaaaaatgatgtgaaaaagataaataaaacattacatatttagatgatgtggagatgttctaaggtattaaggttgctcaaactaaaaaatgtctatagtgttctccatttttcaccttcaatgtctatttgctttatgtcgggacaacctagcttatgtggacaatttggctagtgtagctagatctaatgcctcttgtttgactgatcaaaggagagggattgtttcatgtggatcccatttctattcttatataatgagcttttgttccagcaaaaaaaaaaaacaatatcagttttttttttttttttctcaacctttgcttttcaattgacaattcacaatcattggataccaaaaatgaattctatactaagatccaatgacctacaatgtgttaaggtatgtaatccttcacaagcaacttgagggattatatataaatgttcggatgacaatatgaatggataaagaatgtctattattttacaatgtgtgaactgcaaagatacaccatatacatttactattcagaccaaaaccactctttctggacaaacaaagcaaaccaatggccagaacaaaacctcaagataggctcaaacccaatgcacatgatagctgttaaaggtggaatctcttcctacacatttaaggagagaatacaaattccaaaactgccacacttccaataagaccattgcgaaagctaagccttttatacttggtcgagatttgaattcatttttcaatgagccgaaggtcaaaagatgttctatgtagtcagaattatttgatgtctggaactaggaagggggcccatatttgatacttccaatggtggttgttggtgctctcgagtattttcttgatggcgttcttgctgttgcaggatttctctgaattcttgtggttgatggtgttgatactgctcttgctgctgccactgctggtgaagatgtgttgttgttgttgctgtaatgcaatttcaatttgttggcgggtggattgcatctgcctgctagttctccatctaaggtactcaactagcaaagtatttgtgctgattgcaatcccaaagccagtgaatgaggaaagaagaactgaaaggattgggtttacattaagctgcaagttgaaaaataacgtcataagatatccatccctctccccagagaagttatattacattacctgcatgaatgcatggtgtggaaataaaaaaaaaattataaaaaaaaaacagaatagtaaacactactctgcttacaatggtataaaatatgtgggcaaacaagatgacgatggcaaactggaaagaagcataagcccatatgtaactcctgctcactgacaccattacaagtaaagatcttgagtaacaaaatataggaaataatgcccgctgagggagcggtgaaacccaagattctataaattatagtatcgtcaagttaataagtttttattggttaattctcaggttagacggggatcctagtttaaaaaaaaaacaaagaaaaagtttttatcagttagacaagcaatataaaaacatgtcactagaagagaaagaaggcactagaactcacccatagtggaagcaatcattgaagaaaggaggcccaaaacacaagagaatggtaaagaaattgccagtgcccgaggacccaaatcagatacctgttcaaaagaaattgagaatagcaatggttaagaaattaacacattatatgtcaacaagtgcatacataagcagcacctgggtgggacccaattccctccatggttttgaatgtagtggaaggagagggtaaagtcaactgtgtgttccaattgaagatattgggtcacttatgatttactttctaatagagataacagaagaccaaattccattttcttcagccctacatccccaatacatgtaaatatacaaatgaccactattcatggtgtagtcctacgaatgaaaaaatcttgggaaatttaccaagaactcaactaaacatacattatcatgggaaaatctaatatgaagtttgctagatacatgacattatatattccagcaaggcagcaactaatgctgccacctacacgtgtcctcataaaataacaagatcgaagttgaaaacaaggaaagatatgttaccagaagttgctccaaaaagcagaaataggcaagcatgctaaccatgacaagaactggaatatcctgccagatcctgttaaccataaaccaaacataattctaaatgaaaataaacaaatctttggtcaacatatcaggcaatggacactgtacatgcacttttttccacagtaaaatgtaagaagatgtggttcttatagctatgaagcaaaaaaaaaaaaaacagacagggcttacttggaattataaaaatacaaagatgcgttcatgccacagccctaacgttatatatttattttatttttcttttgtactcttttctttttaacttctacagaaccacaaccaactcatacctaactaaactttttgcaaattgcactttctatggtagatctggcaaaagatgatggtattctcattgtactgtggctaatcttcctatgccatgtcctaatgcaaaattaaaaaattttaagtctaaagattaaaatttacaacaatagaataattgacttgcctataacggatagattccctatgctgaggtgctggaggcggccgtctaagaatttgaggagggttctgtatttttagcaatgtcacaggcagatttttaacatctcgcttgcagacatcacaggtcttgttgcctttaatgctaaaccatttcactgcacactcttggtgtgcaagtgccaactctcctttgcagctgcactccatttttagtgtatcaccaccttccccaagctcgacaaaacaaatcctacaaacagcttcttcctcaggaatatcttcaccagcatcttcactagctgaaattagcaagtagtggacgcaaattatgctcatagtcagaaaagtaaatcactaactagtaattatcgtattttctacttattagcaaccacaaaactgtgcataaaatatgttgtgaattaaaatcattctgaaagagttgtcaggtgattccattatctcgtgctaatctcttttaagaacagctggttgatcagtaacagaaaggggaaattgttatggagttcggctttcatggtggccattttggggtgaaataaaccaaagatttttactgagaaatgacaacttcagttgaaatctgtgaaattatttaattttgggcagctatttgattgagaagtgttgaggagttaaagaactttgcttttctgattttctaaggatttcaaaattgctactttctggccttgtaagtttaattttcattagtataggaattgtttttttacaagattttagtaattcatattaataatataataccttcctatattggaaaataacacacacacaatcacacaccaagaaacacactccattcagacaaagaaagtgaactaaccagcttctgtcactggggcatcatttcgggatgctccatcaacagttgcaggacgcggagtagctgatattacacgaaatacaccaccagaatctattcgccttaaacttctagtcttaacatttactggcactgataatgagcgggtgatatgatgattgacttcaatagtctgcaatagtttgaccatgaaaccatgaagagaacaaagcaatacaagcaatcatgttcattattagaatttctaaaacacacccttctcattaacatactggactagtgcatttgtaatttgaaatggtgatggaaacagtagaaagaggtcacgtacagaaaactcagaacgattctccagatgtccatcctgtacatgctctaggcctgaatttgccattggtgtaactggtaaagaacttgttactttacttgatgaagagaaaaaaaccttattaagagaaaacgaccttgaagtagtaggcctttcacaagaaccatctgatggaagcatctccggtataataagaacagtcctctcaacatcctgaggtaaatttttcactttcagacttctttgaggaaacaggccttttatggatgacttgaccttagctgaatttggtctggggggaagtccagctctagtagaagcaggactagatacagaagaattgtcatttctcataaaatcagagagagaattctctagagaccttgcaggaatttgcaaggaggataggttaggacgtcttgattgctgaaccaaggaagtctcttcacttttatcttcttgattacatgtctacaaaaccaacgtaacatttcatcaatacacaattcaataataagattcgaaaattgtctaagttccattgttatactaatgacatgggtggaaatgaaaatggcaaaatgctctccaaatctatatattataaataaacacttggcaaataccagctggaacagtctatacttatcacacagaattgaccaaaaattaattcctcttgacttgctacaatttccataattaaaataaagaaa

SEQ ID NO: 46139 - DNA, 2599 bp, Cannabis sativa
taaatggagtgccaaggccaactctacatatgcacataggagttctataatcaagttataagttataatatatccatccaacttctttaagtatatgcaaagattttagagagccgatatggaatatttttttgaggagaaattcgagtgcctaagtgaaccaaatggctcaggtatgggagccacaaaaagacaaagtaaatttcgagccctcaagatggtacaggtagctcagacatgtagccacctagactcaaagaatttgagccctagagaattgatgcagtgctcggatatgggagaactgatcaatacaatttcaagccctaaaagagcttagagggcttggatttcgggtaaaatgtcaaattagagtcctacaatgaggagatagggctccaacttagagaaagaattccatgcacactagagccctagagtgatgtgcaaggtctgggtataagatgagtaaatcaagagatcactcttctcaacaacacttctaaagatgaataattctacatatgcataaaagaggataattgaactatctcctttattttaggggtatttaaattggactttagatctttattttaatttatgaatattatattaaaattttaactgatatcaaagcaaatagatatataaatttaagtgttttaatatttgtaaatatcttccaaatttaaaggaagattttggagatattgtacctatacatagctaactcatttatttgtaaagggagaactccagaaactttgtgaacccttgcgaacttaaaaactcgattgagaagaaaactcttggacaatataattctagagaactatattgtcgagtatagagatcaatataagtactaagtagttatagtcaaaaagtggttaaccacaataaattcagtagctagtaatcatttttttttcattattgttcatatacaatttacttgaaatcaattattcatgtgtttgatcgctttattacgatcttcttatatccattgaccaataatcgcatcatcaaaacaaattaaaaatatatattcttttccttttgtatttttttcctcccctccggttgaattctctcgccttctttctacctctgcacctttggttcttggcacgctaacgctgcgtccagtctctaaaattctaaaaacctataggcttggacaacctcacactcaacttcctcgcctccaaactcctaagtaactattgactcaaaaaatggttaacgaaagtgtcatttgataagcaacagtcgtacatagagaacgaaaaattaaacggttaacacaacaattttatattatgtcacccctgttcgttggtaatggggttatatttacctaaaattttattgatttgatcaacacttagagcactcattctaagtgttgatagcaaaaatacatacttttttagagctctatagttatacaaagattacaaaatgtaaaaaatgaacgaagtgatcccttttttagaagaaggaggttgaatatttatatttaaaataataataaaatattcaaataaagagaatattctaagaatattctcttcaagttaatctggatcattgaatgatggcacaccatccaaatattgattgtagatctttaaggcttgatctagtacattaatattgtttcttgatgaatagttagaatttacccatctcaacttgaatgatgtctgttgatcttcgagattgaacgaggtccgttattaatcgaattctgtggctctgatacctaaattcgtatttccctcatgactcgattttttatgagaaggagtctgaattaatatttctttccttgcgaaacatcaattcgaaagagctttccaatacgcttaaaagtgcatcaattcaagttgtattgagtgagatacgcccaaaacactatgtaatgtgcaattgtctcctagaccaacgatcaagtgagcagttttgtttcacttggtcgcaaaacacatatgattccaaaacatatcttgaattagaattggattttactgtcgccttactcttgtgtgtgagaaaaaagatgtgcaacccctgttgtgcactaggtagggtgtacagtggtcaatttggtcaggttatggcatatttttaccagctctttataaatatcaggttataaatatttaattgtaactcacccaattgaaaaaataatttcttttaattcaccgaatgattttgttagtttggttgagttaacctatccaaatcgatcttcacttttttctacaattattattgtttgtttttagtattcaaataattttttttcaaaagtatattatttatatttcaagcttaaaaatattatagtctaaattaattttaataactttaacataagataagtattaattgaataaatactaaactatacaacaaatattcagacaaaaatagataaaaaaagtaataatatggtgtaaattttaaattttaattttaatatccgattacaataaaaattattaactgtaaagtctaaattttaagttaaacactataaagtttaaaatttaaagataaaataatataactagtaaaattt

SEQ ID NO: 46140 - DNA, 809 bp, Cannabis sativa
aaaaataaaaagaaactaagtagaagtcttaaaaattaaatatttcatgtcaagtttaataaatagatatcttaaattttaattttaatggaaaaatttactttaattgtgatgtcaaatccaaatggtaagaaatagtttgattaaaacgtccttattgtcactttatataattattttctagtgggtaacacacgtattcacatacataattattgttgtaaatatataaatttagacatgatataattttatgacatgaatatataaatagaaataaattactcaaaagtacgataggttaaaaatattataatttgataataataataaatatttatatatcaattataattatattaaaataataaaaaactcaaatataacataaagtattataattttataattaaaattattaaaaaatataaaactaaaattatatattaatttattttaaaaactatgagttaataatgcgagtatttattgatatgcgattgtatgtaattattattaaaaaattataaaaattacttataatttaagttagttgattaattgtaaaagaggtaaaagagaaaaagtggagcacgattggagcctttatatgacaacaactaacacatatttttgtaagctttataaaatatagatttacaacacatattcacaacttagtacataactatgagatttgaagaacttgatttagtatattaaaaccttataagcattaatcaatctttattgttgttagaggatctcaactaactcacaatgtgtgggaggttttttttttttttttt

SEQ ID NO: 46141 - DNA, 2586 bp, Cannabis sativa
agcccgtttactaccgcgaccgcagtgtaactaattgggcgacatcacttgacactcacatgtcactgccgctcgtgcctaaacaagcatcatcgacaaaaagaaaccaccactacaaaattgacttttagtcacactctatagtgacccgcacaaaaggtgcacgtcactaaatattatatctcaaagaattttcagtgacccgcattataggactttaaaattttaatattgctaactcacaatgcgtgtcattaaaactattctgaaattttaaattactttttttttattgaaaaaaattaattaactatagcgtctcccaatacgcgtgtgagaagactttctcactcacacagtcacacatagagcgacactgaaacacttaaaaaaaagcgtgtaacattaattggagtaaaagaaagaccttctggctaagagaaggcaagtactgctaagccacatatgtgttttctttctcttataacctaattaattaataaataaaatattaaaaatactaaaatacatcctaaatttgactctaaaaaaatgcataaaaataaacctaataaattccctcaaagttaaactttattcttcctcgagtaaagaccaagttaaactaacgcaaaaaacatcaaacagacaaaaagtaagccactatttttttttttttgatgaatcagaaaaattgcattgctcaaaatctattttgtacaatcaaatagcacccaaaaagggcctaaaaacaacaaacactgctatacagatataaatctcttcttttcctttttagaatctatacaatttgtacaaacactaagctctactaccaattacaatctttgaaaccagttcgtatcttcagtagatacctttttcggccatattgcattaactctttgtagtacagccactattgttatctatactacattgtctttccatgaaatcttaattgtgtttttagattttcagctcacctgcctcaaagtacaaacttaaagttcaattataaaaataactaatatgactcacaattgaccacaataatttaaactctatcatatatgctcaactcataccaaacaattccacaaccaaattttccatatgcttgcatcacttaaccttctccacctatatcaataacaaatgctgtgaaatcaacaatattttaaaaggttataacgttaagcttaggtaagggtcgataaaaaaaatcatttaggcttaactatactataaacttttacatttcaaggtcctcactttttattccatgaaattatctcaattcccacttaatgcaatacacaaaaaagatttatattgttgcaatcaacacttctatttatttactattcacttttctttagttatttatttatttatttttttttttttgtataaaggagaaattgaaattacagaaaatgattgtaactaattaaaacacacacacactctccctctaacactttttaatcttttaactcttcaagacacaatatttaattataatttccctccaaacttatgtgaaactcatggtatagttaagataaaagaaaaaaataaatgagtaaatttttagcttaaagagataaaaatgtgtattagaaaaaaataggttaagactcaaaagagtttaactatggataatcacaaaataagttagtttaaaagccacaaatattacaaagaaattgcctaaatcatctttcaaagcataagtcattaaagattttgtctcaaatgtcaaataatgcaagttatatcaaattcaaactatcataccacaaatcctagttaagtatatatatattaaaatctaaaatattacatttgtaaggccaattaaaaatttcatgcggaacttttaaattaaacgctaacacaattatctaagcatacggttattgataatttttttttagaggaaaagcaataaaatatagacaaaaattggcttacaaataaacacaaacacaaagaacaaaaataaatataactaactaaaaattaaaagtttgtaagttcccctccccaaattaaatatgcacattgttcacaatgtgaaactataagaacaaaggaagagaacttatctgagatacacaccacatcagtatggtggaggtggcggcggccatccttacaaagttgcggcctttatggcaagttttcccttttacttgattttccactttaaaactttgaaagtgcccattattaacccttgagcatgaaattaagagctaaaaatttcatctttaacccattttaagaaataagaaatcaatctaagctaaaaataattttctttcttcattatatttttctcattttttttatcaaaaaggcttgcagaacaataaaattacccaaattgaaggtctccaaatatttctcctacaaaaacaaaatcaaacaaaaataaaataataaaaatactaaaacacaccatcaaattatttataaaaaatgcataaaaataaacctaataaaaactagagaccaaacccaagatcgaaccaaagagtctatacttggagaatcagaacccccgaacagagccac

SEQ ID NO: 46142 - DNA, 1405 bp, Cannabis sativa
atttcttatgttcatgactaattggaacatatgttgttttgtacttgtagctattccttatgaaaagaggaggagaagggatatatgtggggccattaggtagacattcttgccatttaatcaactattttgaggtatgactaattagattcttggttttatttcaacactgaattttcagagtttgagtttgagttgagcctttttaatcatgctattatggatgcaaatttggtcgtatcaagcaggctattgaaggtgtgagtaaaataaaaaatggttacaatccaggaacttggatgttggaggtttcgagctcagcacaagaaatagctttgggtgttgatttcgccaacatttacaagaattcagagctatgcaagtgagtagagtacactacacctacctataatttccttccttcctacattaatacattatttataaagttataaatatatggtggcatattggcattgcactctgtttctcaggagaaacaaagaattgattaaagaattgagcagtccagctcctggttctaaggatctttatttcccaactcaattctctcgatctttgaacactcaatgcattgcttgcttatggaaacaacgacagtcatactggagaaacccgctttacaccgctgttagattcatgtttaccactttcatagccttgatctttggtacagtgttttgggacttgggatctaaaaggtaataataatagtaatatcatgttgcagcaaagtaacagatgagagtacatattaaaatgtgaatgtgataaaaattacatttgcaggtcaaatatacaagatcttagcaatgcattgggatccatgtactgtgctgttttgtttatcggtatacaaaatgcatcatccgtacaaccagtagttagcgtagaaagaagtgtgttttacagagaaaaagccgcaggaatgtactctgcttttccttattcattcggacaggtacattaaatattattctgaatttctcatacaaaaataattaaaaaacaccaccaattttaatgattgcattttcatttgcagatggtggttgagattccatacattttgtgtcaaagtgtagtttactgtctaattgtgtatgcaatgattggttttgaatggactgctataaagttcttctggttcttgttcttctcattcttttcaatgctttacttcactttctacggcatgatggctgtgggaatcactccaaataatcacattgcttccattatttcctctgccttttactcagtatggaaccttttctcaggattcattatccctcggacagtaagtaatgttacttaattaattatatatttaaactagtattaattgattaattgattgattgattaagatttaatttaacag

SEQ ID NO: 46143 - DNA, 1351 bp, Cannabis sativa
aaatttaaagctacaaagaaagagataaattttaagtaaaagatataaatatatcctttccctcctccattaagctaaacttcaaaatttttatagacattagaataggattttgaatttaaaagataaaatcaattcctgatattactaagattaaggaaaaattagaaattcaaaagccaaagataaatgaaaagcaaaagatcaaaaatattttatcttcttctttctctctctaatttttgaatggcatcatcaactaggattaggattcaaatctaattaatcctaatgccatgacacatgaagaaatttcaaattttcaaagaaaaagataagttaaaaaaaatatttttttcctctgtttcattgataattgatttttaaaaattcccaaggactaagtaaggaaatcaaaagttctaatttgattggaaattcttgaagaacagaaacaattgcctaagactgtcaaaattgatatccatccagtagttttaaatgaaacggacacgattcacatcatctagtcaactccacacaagtgtaagaaaacgttcctggaaacttttcttggtgacatgtacatcaatgttcaacatgtgataagatggaagactttaaagagttaattagacctgagtcatagaagtcgacttgggaggggaccctagccctacgccaaggttgacttcgggagctctgggatggaagttcaaacttcaataaattaaatccaactcctatctttcaatatcatgtaccatgaaaacatggagctatcaaatctaagtcctgaaaaagctaaaattacgcgaacctgcacctcaaaagctaacctggacacctagggtttcactcgacgcccaggttgacattcctaactgggatttcagtttcctgggtcgtcttagggaaaaagggtcaaaattttcattagaatatcaactagacatactgcgaacatatttgaggcatcaaaattagattctgagcaagttcattattgagcacctgggcacccaccgcccaagttaacaatttgtcaatctaaggcctttcaagtattagattgatggtccaacttttgcaccatcttcatcttcaccagaaacggggaaataggtacttttgaggaagaaacatcacttcctgggcgccaaaagcaaggcccaacgcctaggtagacattttgtactagtggtgaaaaccggtcggttatggtcggtttttataattgataaccgatcggtctcttacggtttttattttacgaaaatcgtaaccgaccatttagaaattataatcgtatgaaacctaccatagtgtttttggcagtttttagtggttt

SEQ ID NO: 46144 - DNA, 1374 bp, Cannabis sativa
tgagcttttaacttatgatgaggagattcaatctaactaaatttttgtagtttggtttcttccctatttcgatatgaaagagtagaagcaggggagggaattttgagagagagagagctgcaaaatgatactagaaaatcatagcatgcctttgattttatttcaatatttatagacttacttctccatacaattatgttacaagcgaatgaaaacaaacattaagaaacaagattacaactaaacctaactactaactaactaattagtttgttagttatcatctccctcaaacgaaaagagagtagataccactttgagtttggcctttaagtagtaaaatttgtcttaggcaaggacttggttaacacatttgcaactcgatcaacataagggatatatcgaactggatgttcatgattgaggattatctttaacaaagtgataatcgatctctatgtgcttgcagcgagcatgaaaaataagattgacagccacgacttctatacctttattgccaacccaaataacaagaatatcaactaaggtagcaagaagctcaataaactaagactaaagtcacttaatttcagcaacagtattaactaaggccctgaatttaaactcaattaatgatttagcaactacttattgcttctttgcagatcaagaaatcaaatttggccctaagaaacacttcataacctcttgtggatagtgatggcaattcatgtttgcggatcgtgtttgtgtcgagtcgagacccatgtattacaagtatatgcttgatctgaacatgacccttttgtaagagctaatggtaggacttgaacaaactttaacaccttcaaaatgaaccttgactaataaaactgtgatgtattttctttgaggtaaggacaaaagaaactatcattttaagtttaaaaaaaaactatcatttcaattgagtgggagtgttaatcataaatatcaacatatatagtttctgaatcaaacttgaattaggccatgcaattaagatgctctctacatagactagtaggatgactagattaatactttaaccatacgcagacaatgtggcatccaccttagaattgttgtaaatccctaggtaagtaatgtagttttgagcttctcattcggtcatgaggtgcatgttttaagccatagatggctttgtgaaattgacatacataagtagcatgatttggttcttcaaaaccatgcgattgtgtcatgtaagcaccaaatgcatcatccaattgtttcacttcccacttagatgagacaaccaaggtaagcaccgacctaccataggactgaaagtgtcctcatagtccatttctagatgttgaagataccctttag

SEQ ID NO: 46145 - DNA, 2426 bp, Cannabis sativa
atattttaatttaaaaatatttgtggtattaacttttatggacacctaaatatataatattttagtataaattaaagtttaacatagtgttatataaaaatatgatatacagccctaaaagactccaacgagactccatttcccaccttatatttgccgtgtcactatagtgtacggtttatatgatgtgtcactgtagcaacgaattctctctttatatatatttatattatttatgtatataattaatattttattaatgaaattaagaatttaatttaagaaaattctacaatctatttttttagtgtattgatgtacctttatctatttcggtattcgagagatttttttagtttaattttttttatggttatgtagattgtaattatttaagacattctgtaaaattttgaaaaattcaaaaaaatttaccacgccaccagaaacaaggttcaaactatctattgcatgcgtgattcttttatttagaggggtgcattatagaagcatttttgatctattgtgtgtaatttaaatgtaaatatcataaattactattattttcaactataatttaagtaaaaaattattatacttttgtcacaataaaaaatattacaaatttaaacacattaaatttaatgtaaatttttcgtcatgaatataatgttttttttctagtaatataatatttatgttattgcaatatgacattttaatttatcgagtttcattgattttacagtattattatctttaaaataattaaaaaaattatttaaattattatttagatataacaattgtggtaattttagttaattaatgtaatattaattttttattttattaaaaaattaatatagtaatacggaatatttttttagtataattttttgtgttgtggttgaagtaaaaataattttcgatactaaatttggtgataatgtgacaccaaatttaatatactccttaaagatgctcttacacataaaaagacattcaaggaatacaaaagaaaaataaagaaaataagacaactgagagaacatgtacaccaatatggtgtatgaatttatttgcatattcgtatatactgataaataagaatattgataacatcacttttatatttaataaattcatatatacactcctctaaactaataaaatatgaaaattatgataaattcatttttgttttgttcgattgataaaaattgctctttttggagggtaaatgtgatatagttacaaaatatatattttgatgatcatgcttttcacagtttcagaagaggattattgggctttatcccatgtgttatccacgattctaactacaataacatccgaccataatgaatttctcttgaaagagttcaataaggatgaggttttttatgctttaaaaactatggaaatcagtgataaaagtccaggcattgatgaaatatccgcaatgttttatcaacataattggcacatatcgttggtaatttggtcaccaaagttgtcttaaatgtgttgaataatggtgccacaccaacaacttttaacaagaccttgatcactttaatacctaagataaaaaaaccaatgactatgaaagattttaggtcaataagtttgtgcaatgtgatctataaattgatttctaagatgttggctcttcgtctcaaagatgtcctttctcatgtcatttctgaaactcagagtgcttttctcccaaacaagcaaatcacagataatgttcttgttgcttttgagcttattcacagtttgaaacatcgaaagcatggatctaaaggatatgcagcccttaaacttgatatgagtaaggcctatttgatcgtgttgagtggtcctatttggcggtagtaatgggcaaaacggttttcaatatctgttggatctctctcattatgacttgcttaaacccaaatactttctcattccttatcaatggtgttgtcacatgttcagtccttcctcaacgcggtctccgtcagggagacccactctcaccatacttgttcttgatatgttctcaaggtctatcccgtcttctgcaatatgatgagtctataggtcatcttaagggactggctatttctcgaagagctgcaaccatttcgcaccttctttttgttgatgacagtcttcttttttgtcaagcaaatgatagatcttgtggtgctatcaagcatgctctggatatttattatcgtgcgtcaggtcagctccttaatgagtacaaatcaggcatttccttctctcctaatacatctgaaaaccctaagcattcttttactcaaatcttgggaatgcctatgagtgagtgtcatgaaaaatacttaagccttcctccatattcaaagcaaaataaaaaccagttttttcctgaaatcaaggatcgtatt

SEQ ID NO: 46146 - DNA, 1021 bp, Cannabis sativa
tttgagacaagcatgaaagtaagaagtattaacatcccccttccttagccaagtgactttacttctctatttgagaaagctaaaataacacttctcacaatcatgaaatatggcagcaacattagttttggattgttggtagtgtaggtcattaggatgagcttgagcaagatgtcgagcttctacataccttgactgagcttcatggtaaagtttgccaatatcccccaccttgtcatgattaaatttctttaataggtgcttaagtctcattaacttcagataaacacccctcaaacctttagcaaacataggtctattcgagctttagatgacaacttccttaaaatcatggtgatcgacctagaaattgtagtacctgaaaggtttaaagcctatctcacaagtagcagcagcagtgatgatataagagcaatgatccaaaattaattcccagttaaataaggctgaagtgtttgggaaaagatcactccaatcctcattcacaaaaacatgatctattttcgaataaatccgctttgaatcctcttgcttgttagtccaagtgtacaccgagccttctctctttaaaacatcaacatgagcttgagcaaaccaattattaggatcaacaagttcagtttgggttataggatttcctccaattctatccccaaaattaaagacagagttgaaatcccctaaaagaacccaaggcttgacagggtgtttcaagatagataggttagagcataaagttttcctttcttcaatggtattaaaacaatacacgaaagtaacacagaaagcatgttggagacctgccattttaacaaagcagtgcaccaactgaggtgtttcagcaataacaataaccttcacatactgtcttctccacagaatcaaaatcctgccttcaatagtgggacttgaaaaatattcccaattcaaaaatttattatccatcatatttcgcaccttttcacccctaagcttagtctcaacaagagcaacaattcct

SEQ ID NO: 46147 - DNA, 870 bp, Cannabis sativa
aagagttttaccccaattggacaaattaacactacaaagtttgactttttcagataaactaagagtgccattggtgatccagcagtcacgaactatttctgcacacataggctcacgggaccatacattctcaaaacgaaattgataaacagggccacgggaacaagcaggagttggatccaaaaaaataggagagtgatctgaagaggtgattgcaagattagagagaattacctcagggaagagatcgagccaactctgagaaaccaaggatctgtccaaccgaatttcgactaaatttccagcttgtcttcctctttcccatgtatactgatagccgtggagctccaagtcatgaagatggcagtcatggaggacatcttggaatccttgaatgagagaagaaggatatggccggcctcctcttttatcggcattgctggaaatattgtttaagtcgccaattacacaccaaggcagatgggattcagagtagagggtgcgaaggagagtccatgtgcgacttcgaaagctacggttaggctcaccgtagaaaccagtgagacgccaaggagagaggttaggtaagtgaatttcaaggcttatgtgattttgggtataatttagaagttgggcttcatcagcaattttccaaaaaatagcaagcccacccgatctacctatagcatccacagaatagcaggcttcaaagcccaatttatttttcactctattcacaacagttttgtcacataaagtttcacaaaggaacacaaacttgggtttcttttgagtacaaatgtcctctaggaattgttgggcccgtgggttcccaagcccacggcaattccaactaatggtactcataat

SEQ ID NO: 46148 - DNA, 873 bp, Cannabis sativa
gtacactcattttcgtgtctttgggtgtgaatgtttttcatttcttcatccatacacaatgttcataaacttgaatttcgttctcaatcttgtatttttcttggctacattagtcatcacaaagggtatcttttccttcatattgctttgggacgattgtatgtcactcctcatgcccaagatatctctttccaccgtactcctcttctctctccaccctcttctctttgcctccttatgtcctcactactcctcctctagtacccctttctcctacctctaatcccactgtctcaaaccaaaatcgggcatgttcaaaccaaaattattttatagtgttctcacctctgtcccagttgaaactttttattttacagaagctaacaaattacaagtttggaatgatgctatgcaacatgaaatttttacccttccttctcaaagcacttggaagcttgtacctccaccaaaagatgctataattgtgggattcaagtgagtgtatcgcattatattaaacaccgatggccaagggcttccatcaaacctatggtctcaattttcatgagatgtttagcccggtaattaagccaactaccattcaccttattcttagcattggcatttcttagtagtgggcgatcaagtaatttgatatctaaaatatctttctccatagggatttccatgaaattctatatatgagtcaactttaagggtttattgatttcgctaatcccacacatgtttgtcatttactaaagtccatatacagggccgtcttaaggtattgagaggcctagggcgaaatttaaaatgaggcctttctttcataaaaaatttaaataaatattatttaaattttaacacaat

SEQ ID NO: 46149 - DNA, 1854 bp, Cannabis sativa
gttattggagttgcatactccaagtaactagatttgaaagacaatcgaaaattgtctaagaaccttgcagaatgactaaatgtgagaggcatatcagataaaaaaacaactccaaaagtgaaaagggaagaggaaaatcaagatctaagtcaaggggtagaaaagcttgttggacctgtaattaagaaggacacttcagaagagattgtccttagaggaaaaataatagacataattcaaatgctaattctagtcctaactcagcaaatatttctgattattttgataatgttaatattttaaatgttagtaatgattatgcattcacactaacagtttttatggatgaaaattttctttttttcatattttttttacattttagtccatttcataacatatttttttacatttacatttgaattttgtaaatatttttatgtttatgctctcttttttatattttccttgtacattatgttttttttacattaatgaattttcattatatcttaatttttatatttacactctaatttttttgccccactgaacaaaatttttgagtccactactaagaataagaataaaaaatagcataaaattaataaaatttaaaagacacaataaattgataattttttttttttttctatattgcatggaataattattccactaatatagtgagaaaatcattctataattagaataatattctaatactataaaatataattactaaataaaagaatgaaatatatatatatatatgtttttttccattttattctatttcattatctctatatatattatgtatgtaaatagtgagatatattctgtaataattaaggagtttaatttcataattttcaattattgaaacaatgctatttttgggaaattttattcatactctaactagccttattttctctaataaaaagtacaaacattgacagaatctaatactagtatccaaagtagccagagtcagaaaaaaataatgaaattaaataataaacaattataatggcaaaaggggtacataaatatatttacagaagtaaccatatacatttatatatgattatttaatacattgttaataattaatagacaaagtaaatggaaataaatgtttatcatgtaatattataaatggtgtagtttaggttaggtataaaaacaaaacatatgaaaagacaatgaatttaattaattattggcaatttggcaatacctagcctaaaacttccatctctaatatataataaaatatagttattaatattatttcaaattatagaatttattttaagtatttaattaggatatatagttcttaaatttataattacaggaaattatcttttttttctaaccagtcctggtcgctgaccttctttggatatatgtgcagcttggttagagttgtattttgctattgcaatacaattttgatattacgattaatcttgttattgtgatatagttttgtgtgttttaatcttatatgtatgacatgattttattttgttgttggttcttctttattcttcgatgtgactcgccatcaaatcggtattagtggttggaaacaacaagttctctatgactcaatgagttgttaataggcagttatgtaccttgcacaatagttgtgtgctcaaactacaagattgaatgaacttgctgcaacagaggttctactgttgtgtcttttaagcggtaaatgtcactacaaaaagaaactacctttagtgataattttttagtcataacataaatttttttgtgcttaaatgtgacatttagttacaacaaaaatttatttgtgactaaaacata

SEQ ID NO: 46150 - DNA, 1229 bp, Cannabis sativa
gaagaagaagaggaatgtagtgagttttgtgggcttgtcattgatgaaacagagttatggattacaaaatccatagaaagtttcgatctttttgagttttgggtttgggtttttggatcttaaaagaacaaactttcatgcaaacttcatatatatatatatatataagagagaaaagttcctatcttttttttgggtattgggtttggattgttcttagatcttataagaacaatctttcaatgtatatatatatataaatatatgtgtgatatgggtttggatttttggatcttaaaagaacaaactttcatgcaaacttggttatgtatatatgtatatgtgtgtgtatatatatgagaggaaagtttggatttttagtgggaatttggggaaaggcagatgggaaaaagagatgtgaagtgagattagaaaagggttgttgtgttgagtaaggaagaagaagaagaagaagaagaagaagtgagaaaaaaccaggtgtggaggattaaataggggttggggggggacatgatatgactaaatataatattgaaaaatatatttaataattaaaaagactttttttgttattattattattattattaattttatatgagtgtaagtctgaacaaggcagagtacgtagttggtgatttgcattaggagttaggactactcttgttttctttttatctttctacacacgataaattattttgttcatatttaataattaatttaatattacaccacctaagatgattgttttcataccctatctatccagaaaagatttttaatttagttatttttcatggttagatgttgtaattatttaaaattattagtaaatttttaaattttttttgattaattttaaaagtttaaatattttattaaatgagtgactatttagagtgtattataaatttttctattattacttattagtgttgcctaatatatatattttatttaatgagcatgatatggcataatttctcatataatttatctaaaaatattgtaattaagcatcttataagagtgctcgacaccatattgatatatttttttcatattatttttgcgatcgaggttgttatggcttctcttgtaagagcatctccaaggagctcatcaaatttggtgtcacactatcaccaaatttgatgttaaaaactatcttcactccaaccacaacaccaaaaattacactaaaa

SEQ ID NO: 46151 - DNA, 655 bp, Cannabis sativa
cttttattgtggtggatactatttagaaggttaaaaatgataaaatatacaataattgtgttcatagtattgtccatcatattagctaaattgccttttgttttgcagtatattcttctctcttctatcacaacctatgagatgacttccttttttctttgattgactagattaaaatcaattgtgatgtcgcagtcgagttgaagtctagaaatcattgtgttgaaattctttgttttttgaacactgctttgatgtttcaacactcttttgttctttttgaatcgaattgtagttatgtaaatgcgggtacagggattattaggatattgtctcttgtttcaaatattcgtaattattttagtcagtttttagttgtaattttgttaaaatagttagaaatataatagtatggctcataatataattaatattactacatgggtacttaatttaaacattattgtttgaccagtttggtttttctaatgaatcactttattctcaaaaaaagaataattgtagatatgtgcttaggaaacttgtctagtacaatatctaaaaagagatgtattagtgtatttttttttttaaattcatgtcaaagcacttagggggcgtttggtatgaggtgtttaaaataatctgattatag

SEQ ID NO: 46152 - DNA, 1575 bp, Cannabis sativa
agcaaggggaacatcactctcatcataaaaatattttaaattctataaaactgtatttttgtaatttttttattatttttgtgtatttatgaaataatcctcccaaaaaaaaatgaaaagccgaattttttattttatttttcaatgaatatttagataaatgaactagataaacttaactctttgatattattttccaatcataaaataagtccatcacaagtcgtcatttgattttgttttccctctttcaataacatatgtagaaaaggatagtccatagctcattggagatagatgataatatctaaatcccaattaattaataatgaaaatttctcaagatcaatcaaaatcaaaacaagcaacttgaacaatattgatgaatgttagtgtcaactttttattaaaaatttttagtcaatttttgtatatgaaaatacacaatggaatattttttttttgaaatattttttacggcagtgttatagttatagttatagttaagccgaaaataggtttgaaaatttttgaacacccatggtagattggaatatcaaaaatttattttcgatactaatattcaaaaaatttacagaaatgatattgtaactataataaatactgctataaaaatattgatttcgagcgtaattgtaatagaaaacactcatcctataccaaaattataataaacccactaaacatatataacataattatgcatactaggacctaaataataccctagttgtgagttgtcttaaaaaacaatgcacacattggaaaaaaaaagtgttataataaaatttaaaatgacctaacatatccgaaaataaataaataaaattctaattcattaaccaaaatctattgttaattgggtgatgagaaaatattttatatctaatatttctagagagaatttgtacacgaagcaccaaactatgaatagtatttgattttctttgaccatctggatgcatgaagacattgaagagaaattctagattttcttccaaaataataggcatgcatttaatttttgtttaggtgtctatgataatattatgacttttagaaatacttttgagatatttggggacacaaaattaaaagatgagtttggtaaatagtggaatttaagaagcttcatattgtagtttcaatccataaaaaaaataaaaataaaaataaaaataaaaaaaaaaagcttcatattctatcttttgaataatatactaggcaacaccattgcgcatccttatttacaacaataatttatttttaatatatcaattataagttatttaagaattaaattcacgtgtttataataatttaataaaaatagaatttattatttcagtaaatttattaacataaaaaatgataataaaaattataatttcaatatattaaaaggaaaatactattttaaactatcaatccttcacattgttaaaagataattcaaattttatattttttaaaatggtataaaacaatggaaaattctacaatgcacccccttaaaatagatatattgacgcacccctatctattttagcatcc

SEQ ID NO: 46153 - DNA, 1689 bp, Cannabis sativa
tagggttgggtctggggtttaagtttgggacgaatccaagtttcaggtctacggtcggggctgggtacaggttcaggtccgggacgagtctgaggtaggggtcagggtacgggtgcgtgtttgggttcaggtccaagtctgtggtctagggtgtaagatgggcatgggtctgagtttgagtctgggttcgaggtgggcttgggttcgagtttgagttcagggatggtacaagtccgggttcagtcccaatccatttttgagtccggggtcggggtcgagatctaagtccgggtccgattcatggtggggtcttgttaatatcggggtctcaaagtattgaagtatttttcaaaaagtaaaataaatttaaaataaaaattgtttttgaaaacattagccaaatgtgacttgtgttttgaaaacttcaaaaactgtttttgttctcattttttaaaacactttttcgaaaataaaaaacagaaaacaatatcaaacaaacttgtagcttctccaaaataacttttgaaaaattatttttaaaattgaaataatttacctacttcctaatatattcacaaaagttattttttgttttttcatccaaacactttcatgagaagaatctctataaatgaaaaataattttttttaatatattatataaacactaaaaataaatcaaaactcttatttaattcattcaacttttaactataaattaaagtaaaaactttagttaaacaaaaatctatttctttgtgaactaataacttcatttcaacaatgttttaccatgaagtaggtatggaaagtgagaagagtagcatcgccttcttcacaacttatagaccaccggtaccgttggacatatactcacaatatatattgaacgaaaatcctcatgaggttcacatgactgatggtgtgtcctataactacaatggccgacctattccatctaatgctcttcagacaattcataaacgcatttctggagatagcgacgacgatgttgatatctcctcgggcttggtttacgtatctgaaagaaaaggcaacctcgaaacattatacattgctctccactataataatagtgattatcctgaagttgaaaccattgattttgctcatgaatttgggacctttgatggtattcgaatggaggatagtggttgtattgctggtgattatcttgtttatgtcactactaaggataatcctcacaaacatcgtttcccatggacatcagtttacaaaacaaatcttaagacttcagaaactcaacgactcactccacaggtacgattaataatatatattgagaatgtgaaagtgtaattgagaaattaagatatataaaatgaattgtatgataaaatgtatagatttcatctcaaaattagttacctatgagagtaagctatgtatatcttataaatataatattatgttctcacacattatttatgaatgtaatatttttttaaataatatatatatagacatgattttgtcctgttattgtactttcacggaattattccgtgatgtacggcagccgttagatgagagaattatttgatatgagggctggggttgatctaggagtaattagggttaaaaaatggtaacgtatcctgagacacatctaatataccctgaagaaccatctaatgtactacgaaa

SEQ ID NO: 46154 - DNA, 1649 bp, Cannabis sativa
aacaattaaaacaacaatagaacaactaaaaattaattgtgaaaatttaatacagtacacagtataaaacttacacaatattttttttaaaaaaaaatactgaaaaaaatcgccccacaataaaaaaaaattaaaaatttcagtatgtagtgtaaaaacctcatttatatttggtattgataaacctcaaccatataagcaagacctggtttaggctatggcggtcttaagcctgcgcctaggcccatttagccgaggagttaagaaaaattcctctttaaaaatacacataataattctttactgattttgatattctttttcttaaataaggactcaaattttttttttaagctccattaaagttgatataagctgacccatcgtgtcctcgtgttataacttcatgaattggtacgtaaccttataattaaaatcccttcataattaacaatcaactatttatcaattaataataaatgaatctttctactacgtattacaataacaattaataacaatataattacaaccgaccttttgtgaataaataaattcatgacgaattaattaatacagggtatatatatctacacctagctactactttcacatttttcttcctaaaaatttacaaaaacctaagaaaaaaatagtcctacataataaatgtacaactatttacgtaaaagcatgcatgcatgcagatcgtacgtaatcacatatataatacatatatgtatttatatattagtggtggttggcagcagagaaattattatgagtgttggggatagtcgggttagggctcggcggccggttcttcgattcacgtaaagccctgcctgctgcggctgccggtattatataattattctgtttggtagctgagaaaaccaccaagaaaattaatagcaccaaagcaataaccttatgattgatactattactactagtcatgttgtagcaaccttttatatatatactattctctctgtaatcgactatatataaatgtatgaaaaatggaataaaatcgatcaattaaggataataaaaataataaacgtgtatataatatttcatatatattatatatatatagtcatatatataggccaggctagctagagatgagatgatgatgagatgaaattgaacgtaaatttaattaattaattaatttgtaggagtgatgaagaagaatctattaagaaaaagtgggactgtaaattgtagcatcacttcatggaatttaatattaagacctttttgtacgaaatttcttaataagtgttgaagttttcttgtaattaagtcaaagcgtgtatatataaattatatgtattttatatgtttaattatttagttatgagttactttttggtgctattataattatgtcaaccccccaaattctttgtcaactactttcagatcatacaggcccatgagcccatcccaagtcaatcaaaggccttgggccaaatagtgtaataattagccttttttcaggaaaaattacataaattgttatttttagaaaaaaaattaggcttttatgttcagtctttttttttttttttgggggattttaagatattctataaaaacacaaaaaaaattatataaaaattacagaaaaataa

SEQ ID NO: 46155 - DNA, 2667 bp, Cannabis sativa
ttgtgattaaagaattggaacaacttacagaaatacgaaggtcagacttgagatcaagcttggcacctcttaatttggagctctctctacccttaatctccatatttccttcccagctcttcctcagagccttggcccccatttcaaatccctgaacccaatttctaattggatttcctgtggcggccttccttgcagcgggactcgccgaccgaaccacgctccctttctccaccaccttcgctgtgaccttaacttttgtctggtgttgcttgatcccactagcaaatttctcgaaagaagtcggcagcgaataaacactagtcggtgaagacggaatcggccgcgaattcaatgacttcatcctccctaatggctcctttacatccacattgatcgacagcttcgactgctgctggctcggctttgaccgaccgagcgatgaagccgttttcttctccgactgttcctccttcccgccaccattcgatctcagtttcgaatccgatttagctctctctgtcgttttcaaacccgaagttgaagacgaattgttacctccgttgagaaatccaagcgtgtgagtcgccacaatgtcttccggggttcccacgcaggggtggcgacccggaacgggcctaacgccgtggagaatcggaaccggggaagccgattcgagccgttcaacatggataaactgacccaattggattttatcactgagaatgagatcttcatgttcgtcggggagagaaacgtaagtggcgtgagaagagtcggagaccttgaggtaaaaaccttggttcgcgaagagctcgcctccggctagagccgggacgatgctaacgacttgtaaaagagaagacctgtgctcaccggcgactttgacgtcagtgttcatatgctgaagaagcttgagaaggacccccgggacgagattcgccatttttgaagagcttcaataggcatcagtcaacttctaccgaagaatacaaacaaaacccagatgggaaaacctctcaaagaatcacgagaatcttgaaaaaagagcagctaaaagttatgaacgagagggctttattttcacttctttctctcttcttatttcagtgaaaaaacagtgatggacttgaaaaccagaagaaatttcttaccagaaaaggattgaatagtacgaaacaaaagataaaggtcatgcatttgttttgtacaaagaatcagatttggaggtgagcttgtttttggtaaataatggatattattttttttttccacgatttttgtctgcaaagaaagaaaaataaaagattttgaggccaacccggttgagatttaatcccaaaaaatacaaaatgttgacaactcaaggaggaaggttgttcgatgaatattcattatagtatattaatggcggagtagtacagcttcgaaaaagaaagaagataacagttacaaagaaaaactcaactcagtgactcaccgacctatcactgaaaacaaatacaggaaacttaagaaagttagaagctttgtcaaattaagtaaatattaattttttataaataataaaatagtgacaacactaagaaataagaaccatttctttgaaaaaaataaataaaataaacccaaaatgggagtatcatacaattacaatatttgggaacttggttggatggtattaattcggttttatactcttatggcaagacgcaagaagaatacaacaatgaattttgggttaaggataataccaaaaaaacaaaacaggaaaatgggggaaaacaaaaaaacaaaaagacaactttttcaagggtgtgtacaagtgattagtaaggaaaatgagtttagactcttctttttcctgcactgaaattagggggaaaatgtaaatgataatggtaaaggaaatggtaatggtgctgaaaacttccagccaaaacaaaatgtaggaagaaagaaagaaaaggtagagagaaaggaataattgattgattggcaaagccaaacagcttattttattattaaaatttaaagagctgtcagtgtctgattcccaaacacacatttacacatgcgcttcctctataaaatcacacatatttttatgtttttcatttaggataaaaaaaaaaaagctgacccactttgtgggtctttctctatcacactcagaaggtacagaaaataaaatgtaaactaaataaatgataataagggcaactccaaatccaatggtaatttggggttgaaattaaaaaaaaaaaaaatgaaaaattctctcagaaactggataggaatattggaagagagaaaataattttatttttcttaaaaaaaaaaagaaattgaagggaactggttgcatgtgcagggtaatggggggtgttagaaaccaggtaatggcgtgtcggctacctgaaaaggcgtcacatccaaaatattaacaactgaagttttcactatatctattatataaatattttttcttttttaatattttatttataagcctcgttaaactaaattacatttaataatgttgcaaacacacaacaccaacccaaagataataaataaataaataataataaaaactcaaaaatagacaattcaacaaataagaaaaataatcaaaattgaaaataattgatcaaagaaaaaaaa

SEQ ID NO: 46156 - DNA, 928 bp, Cannabis sativa
ttgagtggatcagcaccaccctcaagcattggcagagtctgcttcttgaactgctaatacactagctccagacaattcccaacttcctattgcacaaccagaggtgccagaggattaggattggggattggagcaggctgagctcgctgttccctcagttcttggatttgatcaccttgttgtcgaatggtctcctgcatcgcggcatataattcttcccagtttggtggtggtggacgattctcgccctcacaaccaaccccgagcccagtaagcttgcggttacccctaccagataacctaatcagatactaggtaacaccccaagccaaaatagaactcgaagaaaacttgggaattccccctgcagggcaaccggtcgaccgtttctggtgcacaagaacaaactggtcaactagttctggcacaccagaaaaccttgggttttcatccccaaattcgaaccaaatattttccaaacccgtccaacatctccagaacagtataatattacaaatacaacttatcccaaacatcaattaatcaaaattcatcaaattcacaacttcataaggctagaatcaaaacttgattctaaaatcaaaattgttaactccaaacccaatcaaccacacaacacaccaactaggatctaaacaaccctaaattaaacttaaaaacaaactcaaaacctaatctactccaaacagccctgaaattttaaaccctaaccccaaaattagcttcaaaacttgaaaattcttattcacatggacttaccttaatgcttccagataaaacatgaatggaaaaaaatctgctagaaaccacagagaattgatgaagaattcctggtttttgttagctcctaggttgctcgacaaggacaggagtaaaacatccctttttttattatatttcttaattt

SEQ ID NO: 46157 - DNA, 829 bp, Cannabis sativa
ttttttttttttttgtataatttcgacaaaaaggtttccgcccacgaaattagttttttttgtattatgaaattgatggccgcagcgtaagcgtaggtaggctattgttgttgttgatagttgattcatactagcgttatataagcataattagtggtttcaactttggttatttattttttatttactgactggcaaaataaatgtgcaacgcaacaactaagtagatttttttttatgcaaagtaaagtaagtaatttgtaactatgaaacgttcataattagtaatttgtaactatgaaatgataagggaagaaataaataggtggccacaacaagtttgtcttagtgaaacgttaaaatggttgtcctaatcaatggagacgaggtatatacaaaagtcaaagcacaaatccaaagaattgcttcgctcgttttacttcgccaaagtggaaagagtcaatttgtaattagatggatggttggctctttaagttccgtgttttatatctatctatagtgatagttgcctatttgcttctagtggattcaccttgttttcgttatgaaatattatttatactatttatacatgtctaaattactaaattaattattattatcattaaggtacttttctttatcacattaatttagtttccattcctttagtcatatttttatataaataggaattcattctattaaaataaataactgaatattctcattaattagttttttttttcctctcttcatcttctttttcttttcttcttatatattttatattattactttatagcacgttattagcacgagtctctac

SEQ ID NO: 46158 - DNA, 1154 bp, Cannabis sativa
tatcagcgactagtgaatgaaatgtttgaaaaacaaataggcaggaacatggaggtctacgtcgatgatatgttagtgaattcgataaaaaagtggagatcacataaaagacctcgtggagtgctttggaatactgaaagagtacaatatgaaacttaacccaaagaaatgttccttcagggtttcctcaagaaaattcttgggattcatagtcaacgcgaggggcattgaggcaaatctagaaaaaattaaggctttgatagaaattccatcacgaacaaagttgaaggaagttcatgccataacaagaaaaatggcagctcttaatagattcatctcgaaatcaactgataagtgcctaccattctccaatgtactgcagggcaacaaaaagttcgaattgacagacgaatgcatttatcaacaccaccagttttggctaaaccaataactaggtagactttactcttttacttggctatctcggagaacgcatttagtgcggcattggtgcgagaagaggaaaagcaccaacaacccgtttactatgttagtaaaaatttgttgggggcagagtcgagatatccccctcttgaaaaacttgtcctatgtctaattcatgcatcttgaaaattaagaccttacttccatgcacatccaagaaaggtgctaaccgaccagcccatgagacaaggtttgtcaaaaccagatgcatctggaagattgataaaatggtctattgaactgggacagttcaacataacttatcacccaaggacattcattaggggccaagctttggcaaatttcctaacagaagggataactccagatgaaaatccttttagacagtaagaagcagacacttggaagttgtacgtggatggagcatctaatgaagatggctcgggagcaggggtgatactcatttcaccaaaaaactttaagtttcactacgccataagattccagtttgacacttccaacaacgaggcagagtatgaagccttgatagctggtttgagaataactaaattgttaaaagtcaataatcttatgtgttatagtgactcccagttaattgtgaatcaggttctaggcgaatatcaggcaaagggtttaaaaatggaaaaatacttagagaaggtttggaa

SEQ ID NO: 46159 - DNA, 1297 bp, Cannabis sativa
agttgcacaaagggctgtcgacattgacaggaacatgatgtttttggaacagaaaacaggttggaagcacacccgaagcagctctccataagaaattactgatcttaggagggatttttaatgaccaaagggacttccaaaaagcagtattgtcatctctacaccaagcaccctgagattcctgcaaaaatttataggcacttttaaccgagtactgcccacaagtctcaagtttccaactccaaccatcattaacagctgaatcactaagctgaatggaaaaaaataaggtcctgatcacgggaaacaaacagatctctcacaacatcctcatcacaagcacgagtttcgacttgaagaaggtagttgatcgatttgttaacaagagcaggatgccttgtaacgacatagctgttagtaatatgtggaagccaaggatcctcaagaatcgagacattttctccattagcaattgttctttgagcacaggcacgtattagatctttaacttcaagaatacttcgacatatgaaactaggattgtctctcaattcagttgagaacagattaccatgtgcataatattttttcttataaagcttactaaccaaagaactatcattgaccaacaatcgccaatattgcttccccggaagagccaaattaaagtctctcaaacttcggaaactcaatccccctgcatgtttatggcgacacaaacgatcccaactcacccaatttataccttcgccactgctcgaattcgaatgccaccaaaacttagccataagccgttctaactccttacaagtgtccaatggcaagagaaaaacattcatagcgtaattcagcaaggcttgagcaacagattttagcaatacctcatttcccgcacgagataagatacgcccttcctaaccttgaattctcttccgaaccttatttttttacactttaaatagttgtttttgtatttttacgaaaattcacataacaatcatatagcaattaatagaacaactcagatcgcatctaaaatccacatagcaacccaaaccgtaaatttaaaaaaaaaaataatatatgtgataatttctctaaataattaagtaggattatctaagtttttctatattaatttttttttttttaaaaaaaaaaaaaagaaagttagtaattacatatataatacactgacccctaattcctaactctgaaaagaatttttttaaaaaaaaaaaaaatactaataactgccaaataaaaattagatgaataaggagaagtattataaata

SEQ ID NO: 46160 - DNA, 1436 bp, Cannabis sativa
atgttaattgatcgcaatacctgcaatcaaattatttaatttaatttattttttggttgtaattaaaattaaaaaaatgacacattttgctgtcttataataaaacataaaaaattattaattggcaggaattggtagctgtctataaaagccaaggtagctctttatactttatagtaaagtctatattctcaattaaacttatatataaaaaagagagagaattaataaagaaaaattgtgtgatcagattatattatgggtaatgaagaagaaggtattgatgattatacagaagatggtagtgttgatcttaaaggaaacccagttcgtagatccaaaagaggtggatggagagcttgtgcctttgttgttggtaataattaattaaccaactaatataactatatagtctatatatatatatatttggtttgatattctctaattatatgtatatattttgttgtttggaagtatatgaggtgtttgaaagaatggcatattatgggatacagtcaaatttgataatatatttgagtaagaagttgcatcaaggcacagtcacagcttcaaacaatgttacgaattgggtgggaactgttactttgactccagttttgggtgcttacattgctgatgctcacctcggtcgatattggacttttattattgcatctatcatctatcttggggtatgtcaacatttaattaaaacagtatgtttgtagttaactcataagtaattggattggattaagaaaatttgttcactaattttttttattattactattgacagggaatgtttatgttgactctatcagtttcaattccaatgctaaaacctccaacttgcctagactctaacccaaacaactgcaagaagccctctaccttacaagtagcagtgttttttggtgcactctacactctagccctcggaactgggggcactaaaccgaacatttcgacgattggtgctgaccaattcgacgattttgaaccgaaggagaagaagcaaaagatttccttcttcaattggtggatgtttagtatcttctttggtatattttttgctaacacagttcttgtttggttacaagataatattggttggacacttggatatgctctcccaactcttgggcttgctatttctattggcatatttttggctggtacaccattctatagacataaaatgccaacaggaagcccttttgtagaaatggcccaagttatttttgtggccatgaggaataggaaggcacctcttcctcatgatcctaatgacctttatgagcttgattctcaagtgtatgagaagaagggagtttatagaatttatcccacacccaccttaaggttagaatcaccttattacttattttcttggatatatatagcaactagtattactcctatccatgttt

SEQ ID NO: 46161 - DNA, 2416 bp, Cannabis sativa
cccctcaagttacactggggcattgaagtgttaacttgtccctaaaatatacaaactgagccacaagaaggggctttgtaagaacgtctgctagttgataggcagtgtcaatatatcgaacatcaagtttgtttttaaggaccttgtcacgaacagagtggagatctatctctatatgctttgtgcgggcatggtagatagggttcgaggcaagggacccagctccaagattgtcgcaccaaagaataggacattgaggaagagagatagacagctcagagaggagggattgaatccaagtaagttcaaacatggccagagcaagggctctgtattcagatttggtgctagaccgggctactacactttgctttttggaacaccaactgatcaaattttggcctaagaacacacaatagccagatgtagatttgcgatcatcataggagcctgcccaatctgcatcagtataaccttgaagatccaaaagagtggttggagaaaaatacaacccgagatgtgtggtgcctgctaaatatctcagcacacgcttgcaagctccccaatgatcagtggtgggagcttttaagaactggctgagcttgttgacggcgaatgagatatcaggctgtgtcatggttaaatactgtaacgctccgatgacacttcggtattgcttaggatcttcaagaagtttaccagaattgagtgaaagctttgaagtggcacacatcggtgtagattgaggtttggcttcaagcatgtttgttctgttgagtaaatctgttgtgtatttgtgttgagtaaggtaatatgtactgccttgtctgaaagcttcaaacccaaggaagtagtggacagaaccgagtttcttgagatcaaactggttgtgtaactgaagaatgaggtgctgaacttgttgttggtctgcaccaattatcagaatgtcatcgacgtatatgagaatgagcagaagttgaccacagttgtttctgtaaaataagctggtgtcggccttcgagttttggaaaccaagttacaaaaggtatgtcttgagttgatcaaaccaggcccgaagggcctgtttcaagccatatatggccttgtttaatttgcaaacatggtctagtttttcagcgtcaatgaacccttgaggctgcgccatgtaaacatcttcagtgagatcaccattcaagaaggcgttgttgatgttgacttgttgaatgtcccaattattctgagctgcaagagtaaagacaactcgaatggtacatggtttaaccacggggctgtatgtctcgaagaaatctacacctggagtttgctgaaaaacctcgagcaactaatctggcttttagtttattgaccgagccatctgcatttaatttcactctaaataaccatttgttagaaacaataaccatgtcaggagtgggtggaactaagacccaagtatttttccttttttaaagcagagaatttgttgttcattgccttattccactttggattagccaaagcctatttgaccgaggtaggttctttttcagtttgcacatctgccaagtaaatcttgggtttaaaaattcccattttggaccgagtgaccatggggtgatgattatgtggtggtaattgtaatgtgtcatgagaattagcactttgggattttgtatgggactggttattatcattagataagggctgagatggagcagggaatgagtatccagaatgtttttcaggggtagatatgctatggttgttgtgggaaagggtgttgaattgggaatttgatgagggataagtgtcaggtaggggattgggacgagtatgatgtatgggaacttgataatcattaggggagatagtgggagcagtattattttgttgttgagaagcagtagtaaatagagttgtatatggaaattcttcttcattaaatttaacactcctagccacatatattctcccactaggatgaagacatctataccctttttgagacatattataccctatgaataggcattttgatgacctaaatgacactttgtgggattgatagggtcttagtaaaggaaaacaagcacagccaaatttttttaaaagattataatctggtttttgttgaaaaagtttttcaaaaggagataggtagttgttgacagtagtgggaagccgatttatgaggtatgatgctgaaacaaatgcttcccaccaaaaggtgagtggcatattggcttgagcaagaagggttaatcccacatctactacatgcctatgttttcgctcaacccaaccttgttgttggtgggtgtgaggacaagagttcctaatcataaaaccagcagtaagcagatgacttttaagaggggaaaattctttaccaagatcactttgaatgcttttgatt

SEQ ID NO: 46162 - DNA, 3848 bp, Cannabis sativa
ccccccccaagattttcctataatcaaagttaatgttgatggtgcactttttgctagcgagaagagttttggtattagtgtggttgctcggtcatctctggtataattattcaggccaaggattttaggaaggttgttgcatttcagccccatgaggttgaagctattggaataaaagagcctctgagttagataaaaaataatggatggacgagcgtggttgttgagtcagattgtctaagagttattttgaatttataaaagaataaagttatggcttctccttatggccatattattttaaattgtaaggctttgttggtcgaagttagtaatgtttcttttaattttgttaaacggtctgctaataaggttgcgcatgcattggcgcgatcttctcttgtggagtctgatcgtatctttagtagtgtttctttacttactgtaattgcttctttgattttggaagacttgaattaatgaagttttcattattatttttttttaaaaaaaaaaacattatcattattcaacaaagctcaccaaacccatttgacaaggatgaccttatttattacctcagcagttgggaatccatgtcctctttatcataattttctaatacataaacaacatcatacacatcctaacctcatttattcaatctttcttttgccaatttctgatctactttgtaagtttgagagcatccttaaatatatgttcacaaaattaattaattgtacaatgtacaacaaattacaatgaactcaaaaacttgtattttcacagaataataactgatacaaagcttgtagttgcatagtatcacacattaaaaaatagataataacaacaatcctaaagaggccaaggctgaaccaaacacaatattccaaagttgctacataattgtttgcacgcgaagcgtgtgtcgtcctcctgcatttacggaatatgactaggatgatgaagcaacattgactgtaatgtcggtttctcggcgaaggctgttgtctctactgtaaggagctttggcaccctggaaagtagaagaaaattacattggatgacaatttttcgataatattacaataccaagtaaataaagagatgcaaaggaaagaagagacttacttggaaaattgtcccaaattttttcagtgcttgggcccgaagcttcagaacctccttaggtacggtagggtctcgaatgacctgaaagagaatcagttgacaaattatttctcgaaatctacaaaccgagtttgtcatttagaattcttaacttgctttagttaatcctctatgcactacttctgaacatcttttgattttcaattttcgacaacccaaaagaaagaagttttgcagaaagaagttttgcaactcaccgcattgcagacacgcgacaaagttgactcgatatcaacaacattaatttgccatagggaattaagcatgacatcctttttttcttccattactttcattaggttctcctctttgttgtctccttggtttatcttcttcatgtcttcctgaatttgaattaaagacacagcacctgcaaattcgagaaccaccacggggaactgagctaagtatctaaagtttgatgggaaccaataaatcacaaatagaaagaatgtcattataaatagtgtacctgaagctgccattacttgagactttatctggtgtcctttatctcgcacccattccgccagaaagggaaccttcatgaaccgtttatcttttccgagttcttttgcagctttccttgtgtaaatatagccaattgtatgcagcattgcctcaccaaaagctaatgaaaatgtcaattatgggctgatgaaccatatattaagcatataaatctagttgtcagcattgaaaagaacttcattactcgaaaagacaatagaaagtatattcaaaattagcttcacaagttaaaccaaatcgtttcagctcatatactagtactacatgatcacaacactaagcaatatacaagccaaaaactcggttacaaatgcatgcaaatgtaatttcctaggcaagaagaaatcgactagaggtaaatgataagataccaaccaatctagataaaaataacactccaacaacttcttctggattgaaaattagaggcctccctcttccatagtcggattgactctactcatgtgtctcctaaactaatagcaaagagatttacccttttcactttacacaaaataatcacatattctctaagtaaggcctcctgattagtgtatatacttcgcattcccgccccaaacatacaagacttttaaactattcaatttacccttgttacgactcaacagcaaattagaaactacaattaggacggctaagcataaacaataaaatgaatcttttaaataagttttctattaagtctcgagtattgggtcagcttaatttggtggccgaacatagaaaaaaatttaaagacagtaacaaatctataaaatagactgttaactattaacacacagaaacacccttagtatgatctctaatccttattcgtccttctaacataacctaagggcaattgtggttcaataaccaaaaattctacagaacaaatgatctgaagagcaaaaagcgaaaaagaaaaaaagatggggaaaatccatatggtttccttctcatcaagtcctggtgacattaccatacattggggagttatttctttattgctaccttatcaatatttattctcccatattttgcaaaagctaccaagaaagatttacttcagatagatttcaaaagataacaatcacaagacataaaatttatttaaaaaatttacgaggaaagaaaagttttaccagctgttgagagacgtcgtgcttctgaagttgcccattccacgaactcgtcagtacgcttatcaacaaatggttgaaggtgattttttaaagctgttacaagcttttcttctctctccttctgaaatgcctgcaaaacgatgagaatgcaattttagtagttatgattatagataaaccagcataatgtacacattacacatgaaatagcatactttcaatttctcctgaattttatgctgtcgaacttcaggatcttgagattcttcttcagcttcaatagatgccaaagacgccaaagcaagttgaccaacatagtcttcaaataattcacttccaaaaagcattccgaacaccgctgaagggtccaacatggattcactggcaattgaaaaagaaaactcttaaataagtgtgtaagatgcacaatcaggagttgtgctcgtgtacttagtagctaagtggttaattatgaggtagttggttttgctcagctggcattaactgtatatcgggtgttaattgcaagatcagcccaactctaaataaagcagatttaattcaattgactctttcaatttcctcaagaagaaccataccacaacaacttagcaaaagatgaagattataaattgcggtttatagaaaagcttacatttttaaggaaataattgataacctacgtttctaatgaagaaacaaagtaatgataaatctgtcagtggactgactacctagagttggtaacaaaatcaaaatgagcattaacaataaatagcacaattctttaatgacccctaaagcatatccacatatgcttataaagcatcttgatatctatttcttggaaaatcattttatatagcaataagtcaacttggataaagcaaactattaaagttgtgagatacaacaaaagagataagtgaaagttcattttcgaaaaacacattacaaccccattattttttcaaa

SEQ ID NO: 46163 - DNA, 4090 bp, Cannabis sativa
tgattgcgtatacttgcgtagtgattataaattatagcaacaaagagcaagtatgagcttgacagaaacaagatttgtgacaggggcaaatgtttcattgtagccaataccttcttcttgattgtaccccttggcaaccagccttgctttaaatctttcaatggagccatcaatattgtacttgattttgtaaacccacttataccctatggcatgttgaccagcaggtaaagtaactacaattcaggtgccattagtttctagagcttcaattccagtgtccattgcagcatcccaaacaggtatgcctcgagcttggtgaaaaaattctggctcaaaatggctgaaaatagctagcacagttgctcgaaactttagtgatagcctgttgtagtcaataattgcataaagagggtgagtagtagatgcaatatgtacctgagattgcacactgttagtggataaaaagcagtgataatcttgaagatatgatggttttttggtatgtctagtcggtcgagtactggtaacatttgcatgtacattaatgatatcaagtgcaggaatgtgtagttgaatttcatgttgagtactgggatggtttatggatgactgatgttcaggttgagaataaggtgagtctgcaacattctgttgggaagcatcagcaggaaaaaaaggtaaaaaaaaaaatcaagtgaaacagaaccctttaacacaaaaggaaaaatttgctcataaaaaataacatccctagaacaaaaatatcctatttgtattaagatgaagaagtttataggctttcatcccattaggataacccatgaaaatgcagggagtggctatgggggaaaattttgttcttgtagcctctaaggtagaggcatatgtaagacagccaaaaggccttaaatgttcatatttagggactttggatttgagtatctcaaaggatgatttgtgtttaaggttaggggtaggggttctgtttatgagatatgttgcagtacttatgcaatcttcccaatatggcaatggaatataagactggaagagcaaagctctagcaacattttaacaaatgttgatgcttcctttccataacagagttatgttgtggcctttgcacacaggaatgatagtggataatgcctaaagaaaagaataatgtaggaaattgaggttgtttagtattatcagctctaattcttttaatttgtgcattgtattgggtttggacaagttgcagaaaggctggaatggttgtttgtgcatcaaatttatttttaatgagatgaatccaagtgtatctaaagcaatcatcaacaatggtaatgaaatacttaaaatcttcaacagtttgagtatggtaaggtctccaaatatcaacatgaagtaaatcaaaacaatatttgaaaatattatgattgctaacaaaaaggcaactttctttgtttggaaaaatgacatatcgagcagtgaaaatcaaaacaatcagaatactaaaattgcaaagctttattcaattaatggttctttaccatggccaaatctataatgccataaagtttcattactaatttttgaatcatccaagtaggaatttgttccggtttcttttctttttggttagtattacagcattgatttctgcattgtattacaacttactaataattatcttgtaaaatgctccggaaatttcaactacttttacacaagcatatatataatattagcattaacttcatcatttcaaatatttataaagttgtgctatgttatgttcagtaagaatgattggagatgagaacgaatgagaagagactaaaattgtatcttgcttagttagcatgagggagagaagtggaacaaaaaaatgcattttaaatttaattgtagagtcgtgtctttccaatgcaagaattgaaattgttaacattgactcctcttatttctctcattctccactcacaaacacgagattttagtttaaatataaatcaatacaacatattgctcttctgccattcatagcttaattaaagctatattggttccatccaagatattgccaagaaactttaaaagaaactttcatgtaaattttcattgattgtctacattttcttggataaatgatactcagaataactgtcttcaactatatctgtactccatttcagaatctggaccacccaaaactttgcgataatgtcagaagaaaagaaaaacaattgccctttattattaaccatgttatgtgccatcagaagaactactgcagcacaattttagcttagcttagccgcaaaagtaatgcatccatctcataaactacaaagctctacataatagaaagaaaaggatgaaattccatggaaactagaacagacatcaccatctaataacatcttacagttacaatggtaaaacatgtgccaactatgatggagcaccgaggtaggaagcgagacgcaatatgtcgctgaagactccaccagctgtaacttgagcccctgcaccgggtccacggacgatgagaggctgatccttgtaccttgtcgttgtgaaagcaattatgttatccgatccagacaactgggcaaatgggtgatctttcttgtatcttcgcaattttacttcccccttctgattaaccacatccactactcccacgtatctcagtacctacacattcattcatatatcgcaaatttgaatggtgaaaaaataattatgaaaacgaaaaaaacatcaatctaattaattaatatttctgattggtttcaaagagcagttgtgttttattatatggtaaaaaatcaaagactcacatctccttcatcctctgctacttgtcttttattagccaagtcgtaatcaaattctggcaatttttccatgaattcctcagatgacgcacaagcctgcaatgaattatcagaaagtttcatgttgcacttgcatgtataaacttggtatttaagtcaatgctggaattaacaacaaaaattagttcttacatttaagggttctggcacgaggctttccactgggatatcagagagttccaacttcagaccagattctctagccagaattatcacctgccatacagattcattttaggagcaagaacttaccacaaaacaaatgacaaacaacaaaaacatgagcagtttgcatacaattttcaagtggaggttgtaacagatataacaaagacatagctatgtgcatttgatgccacatttctatttttttttttttctttctttccatttttcggccctagcagttcaaccggccagtggccccaaagtttttgagtttgaaccccggaacaaatgcctaccagcacttcccaacactccttaccactaattatacaattaatctcccaattaaaatttaaaggtaattagtaattactactaattatactcctaaaatcatcccgtgataaattaatactagaggattgattaatttttttaatatcatctccaatttcataacaaaatcacatgataaaaattatccaaccttactctccacaagtggcatcttagagtgtactaatcacaagttgaccatctgttgatcttaggattcatcaaaatatttccatagattgaaatatacttctagttctacaacaaataatttcatggaaactttacactttgtttggaaagatggatcgaaaaaggatagattgtatataaggtgcggaaaagtgaaatgaacggatggatttgatgtatacttaagagttgtttggtatagtaggagagaaagaaagaactatttttttaattgtttttctaagaaaaataatatttaaaaatgaattaacaatttcatgtcatcaatccactccacccatatgtagagggattgtttttggtggacctaaagaattggcaatccatagccatttccttcctttgtctctcttcctttctaccaaacaaataaaactaaaaacaaattattccattccacacacccctaacctaatccatccctcctttaatccaccctaccaaacaaaaggttgatcatcagtacctttctgcaaaca

SEQ ID NO: 46164 - DNA, 1540 bp, Cannabis sativa
atgatagacatggcttaacatacccgagtaaggacctggtttaatttatgataagttagtgagtgtatagaaaataaggatgacaattcacaataagtcattgttagcattttttctgggcatacattagttaatgtttagtcgaggagcccagtttgattaacattcggctcggcaaggagcctaatttcaaaaaagaatatagtagtattatgtgtggcatgcatttcttcctgttaatcttttactctctgtgttttacttgattaagtgctactttttctccggtttatatgttgacaaaataaggtaaatgcaggtacaacttaaaccattaatggatcaacttgcaagagtaaaagacttggctgttcctgagtttggaactcttctagcctgggaattaagagcaagtgctgctgcacgtgcagcaaatggtgacgccaatggtaatgatccttccaaatcatcccagaatggttatgggggaccaccaatgcccttttttggagaaaccaaggtaaatctttcttccatttttttgtgtctttccctttctctctgttttttgagtgtgttttgtaggaagtggaagtaagaaaaatggttgattagtagatggattttgagggtaggattgttgtttggtatgaaaatttgagggaagagatgagatgagtagatgaaatttaattccttattttgagcaaatttttagtttagatattgaaaagaatttagctgactaatgctcacttgaagtctactttgaattgcatctacatacttaaccttcaactctgtatcataaaaataaatacaagagtatggaatgataattttactgttaaaactttcctctttcctcttctccctcataaacatgggaggggattttcactaccattcaagggatgtgattcctctcataccacacataacatgagaatagagtgtgctctttttccattcccaattttactctattcctccctcctatcaaaaatagcatggagtcaaataatacaagtcttagattgacctgctcccaattttatagataacttttttttctggattttttttttaaattggattatttgtaatgatgatacttggcaacactgctggttttcagctttccagtcatctgggatttaataaaatagtttccaacttgatgcttttataagtttttgtgttatttgaacgcctggaacgcatcagtaacgagattggaaaatctgtttgtttattggatttctttcattaatgagttctgctttatcattatacttatgataagatgttttgcaatattaggcatttgttttccgtgaagttggcttgtatgtaatttacatgtggggtttggcaggtggaagttgcgttttctggaactgagggccaggaagataaaaaatctgaagttgatcatacaagtctaaggggcaaccatgaatgtgcttccatcaaccgtatatatgggttttatgacgagtgcaaaataataggattatacaaaataataataataaaa

SEQ ID NO: 46165 - DNA, 2686 bp, Cannabis sativa
ctaaatctttttcctacatgccaaaacagagtgagtatatcggtatactttttttggagtgtaccgtagaagcttcctatagtattactggaaaaatctacagtacatcataagaatattttggcatgtcttatccgtttcgacattcagtagaatattttagtttattttttcttttcataattgtgtacagtgcgacaattaatgacaaaaatcaaattgagaaatgaataatttgataaatcgaaagctgaccatatttataatattcactcttatcacatattaatttgtgatcaaatacacgtagcaaaataatgtaaaatcaattgaaataattttgtacaaatatataaatattctaatatattatactgaagcaaatatcgtcataaaaaaataagtaaagatatctaaaatgtatttcaaaaaaattaaactaaaatctcatcatttctatttatttattaattcagaacaaatattcttttgtgaaaaaaaaaaattaagaataaagagtttccgaatgtaatttatcaaaaactccataaatatatattaattttttttatgttataaattgaatgaaatcccatttttgaaaataaaaattaagattaaattacaataaaaagaaaaaaaactgggacacatataggtcccacaatttagtatacttttttttttttcagtacacgttttttaaagggcattttacaattttatatacattatttatttatttatttatttttgaagaatgtatattaactacaaaagaattacatcaagttaggaaaatccgccattaaatcggcagacgcataaaagggatattctcccaaccacaagttattacaatttgtaagcaaagcctctttggctaacaagtgagcagccttattgttcttccttactatatgcttgaccgccttacacattgaaaattctggggactctcttatgtcgtcgagcagagcgctccaatcagttttggcatgagaatctccgttcagatagatggctgcctgaagacagtcggtttgtaagatgaacgggtagggcttcactttatttgccagctgaatgcccaaccgaatagccaatacttccgccaactcaaccgagtaacaccctctttgctgtttaatttcaacagctaccaccgccccttcgtggttcctgatcactgctcccagccctattttccattctttacagagaacacttgcatctgtattgatgcacaacgtcccggggtgaggaggatcccaccccccagcaggtgttgtcatcggcttcaatggctgagtcgaattggagtggttgtgcatcatgacatccatctctaattgagcccacctgcaccataaattgttaggaagagaatgaagtttgagtctttttttgttcctcctattccaaatgagccaagagagaagaatgaacatcaaaaaatctgctttagttgtttgttgtttaatagccatgagcatgtgttttgtttctcctttccatctgttaattgtcttccataacaaaaaatgttgccaaatttcctttattgctggacagaaccaaatcccatgttctatggtttcttcctcatttccacagccacaacaccaaggatctatcttcataccccggttcctaagcaccatgtttaccggaatccaaccattatagagacgccaagcaaaatttcgaaccttaggagggacttccaacttccaaatttcagtccaccatttctttgtatgctcctccgatgaaggccctgcatttaactcgttggtggtggccactttatagccactactcaccgtatacataccattcggtgtgtagtcccaaactaaatcatcaatagcattattataacaaggagccatacctagcacaattggaacatcatccgggtgaaaagtttgagttatcatgtcttgattccactctcctttttcatcctttaagtgatccatagttgtcccattgttaacttttgtaggggtgcgaagagtgaaggtggatgggcggggcagccatttgtcttcgttgatgcgcacttctctacccaattggaccctccatctaactcccctttcaactattttccttccccataaaatgcttctccacatgaatgagcaaaatcctccaagtttagcttccatgaaagtagagttggtgaaatagcaagccttaagaacccgagccagcaacgaactaggattattgatgatcttccacccttgcttagctaataaagattgattgaacttctctaggtctttgaaccccattccacatttatcctttggcttgcaaagcttttcccatcttccccaatgaattttgttttttgactccgaagatccccaccaaaatctagccatcattgcatggatgtccttgatgagttcctttggaaggcggaagcaactcatgacataagttggaattgcttgaattactgctttgagaagaacttcccttcccgcttgggaaaataagctacctttccaaccttggagtttatcccggatcttggaccgaatggactcaaacacttcttttttccttcttcctacagttgctggaaagccgaggtatttggtgtggcattccaccaatttaacccctagggcagccgcgagcatagttccatcggtttgattgatct

SEQ ID NO: 46166 - DNA, 6890 bp, Cannabis sativa
ctgaagaaatgtctgcccttatcatcacacaaagtgtcttgaaagcctacgaatttgcagttgtggaaagctgccttgtctcctgatatcctcattgccactgcttgttctccattcagtttcccctttggcaatggagactttggcaatggagacgaattctacatatatatatatatatatatatataccaatccatttcataattaataatcagtttaatgttatgttaatgtatagtaattataacaatatgaaagttccaaataataaattactcttatagttttattagaacgactttagtgtgtcatgtcatttatatataagaaactgctaactaattataaataaataattatacataccacgaattgaatattagccgcaacaaagtaatcagactcaaccgcgacggtagcgctattccacgtcccaaacttttctgcggtaccatcaaatgtgattacgggcacattatcgtcatctccatataatgtcacgaaaggcttcgtcctatcaatcattatatgctcgcgataaaccccgccactaatccacactaccaccctcccagtatttcccgacggaatactattaacggcgtcagtaatcgtgttgaaatcccctttcccgtcttgacttaccttgacaaccctaacggcgtgttctgccgccgttagtgccttgtcaagagtgagtttattattaattgtctcactgagaatggtcttgtctttctcgtaggctctcatgttgtgatcaatccaatcgtctagcttcgattgctctgagggaatagagctttgtttggcagaggttgtaattacctctaaagccaaaattattccagccaaaaatagtaacattattactttgatcaaagccataataattttctttattatggttttgatcaatatgtttaagctttaattactataagggctttttgctaggatacgatggtgatgaaagaaatgagcctacaattattatttttatagtgtatctctcatgaagttatgttgttatgtcgaaaaagacatttatatccaactctctaaagaaattaatttaagaagcttgtgtcgtgtgtcataagggtaaatgtgggaattaaaatatgtgtgttaggagttaatttataggcatatatagtttgtatgttggtggtgtttaaccagattttgttattagggttttggttgtaattaaatgcttaattaagcttcactaataactataagtacagcctttgtttagtgtatactacagtcacacacgaatacctaactcataatgcattgcatgcatgtccattttacatacatataatatttatatatatatatatatatatttgtattttcagctagccttttatctataaattaaaacaaaattctgtttatttgctcatattttttctttccaatagtagatttatcttcttttttcttagggcgtttggttggaggtaatgaaatggaatggaatagaaaggaaacaattttcattctattctttttttttatttggttgcattttaaagtattggaatgacattccaatagaatgctctttccaccattttggtggaatgactgttccattttaaaaatgaaggaaagatcattccaatattattctcattctcattattctcattctcatttcttctcatttctattcttaatttctattcttatattttcattcctcccaaccaaacgttacctttttagtctgtgcacgttggtttttaccataatataagatcattaattaactacatatctactataattattatttgtaacttcttaaggtctctcaaagtttccaattattaggtttctaatctatatatttagataaatgctaggggcaccttaaggtaactaagatcatctctaattaaagatgtaaaaattattatatttggcacaaaaaaaagattttgtgatatatttgtatcaatttttaacattgtacttcaatacaacttaatataaatttaatatatatttattaaaagtattaaaatataggaaaaattgttacataagactctaaaaaattcattttgatactaataaattttcaatcttaaaacactatggtaataatctctaaggccgcgtattttgtaatagtctgtcgataccctatttaacagatctattaaatgcagataataagtcgatattctatcttataaatatggttaatttatgtactaatattctttaatttattttttaaattattgattaattagcgtgattttaatttgttaggctattttaaagactaatcatgtatttgaactcatttggaagaattttaacacattttggtagaaaatagtgaaagctagcgagctcggttttacaatgcagaaattaattgtaaatttcaatgaccttgaaagtagaactagacttggagctaaacttgaaagttttagctctcattcttagctttttgaaacatcttgaatcatttaatttcgagttgtattgaagaagttatggccaaaagattaatttaaacactcgatagaaatttttcgatagcaagttgtcgccactgcatgccttagcgtggtcgcggcaagagcgcgaattctactaaatttcaattttttatctttttttaaatgggatattttaaggagttatatataggacttttagggtttgaatttttccacctttgaactacgaatttgagagaaactcaaagagagagagaaagaagaagatgaagattgcggtacaattgttctacatcattgttctttttttccctaaactcatacttcttattatgatttttattataatgtctagttcagagtagtttctttttaattaagggtgatttcaaaactcaagacatgaatttttaatttctatgatgaatgttaatttctactttctattatatcgaattgcttatattcttctatgttgaatgtcatgattattattttaatcttgtttatatgatcatcactaaattaggttttactttaatctattaattgtcatcttaagattacatgcttcgttaatttattgcctaaattaatctatatccattgaacttaaaattttattttagttaaataaattgcatgtttcgtggatttattgtctaggtaaaagagttaattattgagcatttcatcttgattacatgcaattgaaaaattaggataattgactctctcggcgttatctgcacgattaatagtttgattaaaaatttgaaataacattcattgttaagaattaaggaagattgttgagagtggagattaaccttatttcttgaatatcctagtatctcattctattttttatttatgttatttaatcttcataattaaaaccccttttttaactcttattactaatttttaaataataaattgataatagtcctcatgagattgacctgtatttaccgttatactgaagtaattggtaatacggaaataaaaactagtaaatttactgtggtaaataacacacattagcagacaagaatgctacatgttgaaggtttattggtccaaataataattttaagtaaaaattaatttaaaattatttaagtaataaaatttatttaaaataaataaataaaaactttaataaatatttttcttctcttttctgtttttatttattctctccatgttcacgactctcttattgttcttcttcgtgggaaaagcccatccattgccatggaaaccccattaataaagaggcccaagaacaagcttacaacccatctcgatctgctcaattggccaccttttttttcaagctctctgttaatcatcttctttccttctctgccttccaccagtatcaatccaaaatctaaaattggaggttggctcatcgatctttgaaaatcccaaaatcagagccattacggggtgaggctttgacatcgagccattattagacctctctctacaaacacatgattttctcaaaatgttttcaattctaggcacaacaagaaggatggggtgtgaaagggaagcatgtagacgacagggcattgaataagtaggggacgactgtgtgatcttgaggtagtctagcctcgaattgatctgagagaggaagagctcgaagggaggtgatgatggcaacactgggttgaagggaaagggagaacttgaggacagtgacttgggatttagggtgatgcgatggtgtgttggctattgagattggggtataatgcgctacatcagtatgttggataccttaaggtgcctaataacaatgtttatatatttagcatcttaaggtgtccaacatcatatatcgacgtgacacgttataattagttaataactttttatattatttattaaatcaaaatgtgtatgacctgatactaaaatataccaataataacaatattgtatcactttttgtgatgcatgcttgacaacttcaaatgctcttaggattttaaaattttatatatattgttataggatgaatttttcacctaaaagagtgaatacagtctcatattttcatatctctaaattcctattttctagaaaagataagaaattagtttatcacattgtaaagatttgctattgttaagaattgaagctttaagaaaatacttttaataactaacaaagatcaataaccaacatgcatctaactaattaaaagtcaaaggaaaatgatacaattttcttgctctgctactcggctgagctgctctctagcttctattggtgccatggcaatgagactgagaatgacaaagaaaattaactcaaattaagtatgcaaagaagaaaataaagccttcatctttagaaaaacctaaataaactaaatttatggttgaaatccttgcggaaaaggcaattgatttctctactctagaaaatgatgtcgatggaattgatcgggtaaaagggaaattgatggaagaagagctcaaactttgcatgagttgcaaacacaagttgtggttagaataccagtccaattgacgattatggaaccttttgatcaataaatcttgtctctagaagaatcgttaaagtagctagaacacaactaaaaaataacttcatgtaaaacttaattatcacaatatttcaaagtgtgtaaaaaaaactaatgtgttttatgttgtgttttagttgtttttaagtggtgtggtatagttcctccacatgaaaaaaatctctaaaagaagtctcgtagaaagttagatgtcattcggaaaagagttctagaagtctagcttgtccactacaaaagttgttcgtcttcatggaaagtttgatgtcatccgaaagtgcgtttctggaagtctttcttgtccagtcggaaggagtctctagggaaaactagtcttcttcctgaaagggatagtttcggatgtctagttattccctcctggaagggagttccagatagtcatctctagttgttgctattcctatttggaaagccccttcaacgtacacttcaatttttattccaggaagcgtatgtctcatcaagaagcactctaactttagctgacatggagatattattacgaggagtttgttaagttcgttaaatcataagtaacttaacaaattagctatgcaaccaccgagtttgggatccataacccaaaactataaacatcaccaacacttatcatttttaaaataatgttttagagaggcgattttgaagagagagattgagagacaaagaaagagaaagagagagaggtatagagaaaaaagagaggttgggtttaggatttgtatgaagaatcttttgtagatgaagaagattcttaagtaagagtgcgagagataaacattttgagagaatccaacatagaatcgatctcgaccgtattgtaccctattcttgctcaatcaataaagaagatttcagtagtgttttagaactggaatagagctatagatcacatcgatctatagacttggaccaatatatattggtgttgattctattattttagtgtgttaatcgctttttggtttggatcactttgttcatccctattttatctccgattattgctttgtgaattgttaatcttgttattactaattatttattgattaagtttaagttgatttgattctgcacattggttgtaattttgccacaagtggttttcagaatatttttttgttgtacaattattttttagttattttctaatttaggttcatttgttttgatgtatatttttagtttattcctaacatttttttgttgtatttgtgttgctttttgtagatgtagatacatatatttaattttttttcgacacaatttttttttaaaatacaatgataagttttgttatttgtttttttaattgacaaaatgtgcactagtagatattgaaatattaaaattatatttttatcttgttaatatttgttattttaattatatattactcattacatcatatatctcattttgaaattatatgattttattatttttattattaatgtgactatttatttagtttctaaaaataaattattattttaactgtcactaactcaaaaaaaaaaaaaaaagagaatattgttacgaacaaaaatttcataaaaaaataacgtagtatatatattatatagtacaaaaagataaattaagttgtcgcaattatgttaaaaaaaatcttcgtaatacaaaaacatgatgaggaaatagatagtattttgcatattaacaacaaagggtgactattcaatggttacatttttattataaccatatggttacatttttctttaacctgtaatagcaggttactaataggtagac

SEQ ID NO: 46167 - DNA, 1778 bp, Cannabis sativa
ttaattagtggtgaaaaatgtgtccaaattaaattatataatatatattataaatatatatattgacgtatacgtgctttttaaatagctatagtaataatcataataactatattaaacacgtgattattatattgataattaattactattcacacacgaattatatatatatatataatcatctcctccacgcaaagatatattaatcctaattatttataatttatatttgaatcatctcctccacaagttttttttcacatgtctatatatatataatatacactaattataaaatttaagaatatttgcggtaaaattctatataatctttgtatttttatactcttcaatttaattttttgaccgtaaaatttctcaaattctaataattttgttacaaatttgaaatacaattcaatttatagggatatttgtagtaaaagaaaagtagaagaaaaaaaaagatagaaatatcaatatttttgtatcttataattctttttgatgaattattttataattatctttatttttaaattatttttagaaatttaaaataatatttaaataattataattatgtagactagtgaaatatatatagataatttatgttagtggttcgagtatgtactatttttagtccacgaatcaatattatttagttaaaaaaaatttcaagtacataaatatttgtaactctattttttccttaacttgtaagaaatgagaccctaactctttgcatttacatgaataagttttcttatatttataagcatagggtttttgtatataaatgttgctcatatgatggggtaaatacaaataatatattgactttagatccatctagtgaagctcggcttatgaggtgatcttctgtcgacgtggatgccacatcatgttgcattgatagttgttaaaacgcgtcttatcttcaaagacacataaatacttaattgacaattattctatttccttagtcgcaatgcctaattctcgaacataatctttaaaaataaaatcttgatgttgtgggatttaataattaatggacgagataataagcttgatatctaaaggctcattaattacctttccagaagcactacttaatgctatctgaaaacttgctttgatggacttttatctcgcctaaacaaggtgttttttaagcatgtggatgtcttgacctcgataataaattcagtccatgatcttaattggccttatatttgagtttgcattagctgatcttaaaattacacctttttttttcggaaacacaaataacagtttgaataattactattataatatttataccaaattttattttagatgatgatgcaaggaaaataacataataatataatatcctaaaataagataacatatatttccttttttttttcctccttaagtttatgacagattcaattatacaataattaataaaagtaaaattacattaattaatacaattaacattgcaaataaatatatataaaaattcaattaagaataatacacacccaacttttctataatttggtgatcaatacctactccataggaccttctctagctaaagaaatttcatagaatcaatagacaataatggtctttcaacactaatcaatcataattattaaaaaaaaattacaataaaaatactcaaaattataaatttattacatttaagtacttaatttttttttttttttactacaacaaattactcaatgtttaataagctcggatacata

SEQ ID NO: 46168 - DNA, 3412 bp, Cannabis sativa
  modified_base (754)..(759): a, c, t, g, unknown or other
ctctgtctcatattcaaatccttctgagtaatgtaatacttgaggctcttttggtctgtgtaaatattgcatttttcaccatgcaggtggtgtcaccatatttttagagcaaaatatacagcagcaagctctaaataatgcattagataatgctatttgtattccttcagttgaggggaggcataagctataaccctgtaacaccttaactaatttaggcatgttagcataatttttaacatattgtgcagctcgtttctaatcaacgaggttatcaaaaattgtgattaattaaaactttgcttatttaattaaaatcataaagttacatacatataaaattccaagatcccgtttacgaaaagatgcacaaaagtttaactatacttgcacaaaagtctgtcacctagtgactacatggcaaaagctcagatgtcccaaagatcgtacgctccaggcctaaccgcctcgacatgtacaatctccatctgctcgctctcatagctgctcagccttagccttgcccttacctacacatggaaataacaactgtgagcatactcagtaagaaaagcataacataaaacataatgatatcgcgggttataatgaggcgcccatacgcccaaccataaccctatccccgtgtcccacacggtgctgagtctagaacgttcatacgacaataccatcgaccatgatgtcagcctatactcaatatgctagtcatactcttgccatattgatgtgacannnnnnatcagtatttcagcgaacatacatttatcagtaattagtacaactctatgtatactattatccctatcaatatattctaacagacataaacaacatgtatgctaaatatgtaattacatatgcataacattacactagtcttaccttgttttcaaattcaggtgtgctagccaaccttagtggaataacttctcggtgaaatacaggcccctaaattacatcgatcataacatggttaagtgacacgctaaatcacaactagggacttaggttttaaaccataaacctacctactataagttaacatggcaataccctaaactaacaggagttggaattggccttttcgtgatcgctatcgatacaatgagtaaaataaataaatgccttcaatttataagtcaaaaactcaaaaccaagctttagagagaagatgatacttacgtataaggcaaaatgttgttgtcttgatgggggaagaccagttgtccagaagaattcatccttgaattcaattttattaggaaacctcacaatgatcctgtgatcgttcgtgtgggtaccgaggtagtaaaaacctcttgatcattgcttccttataggggcggcttttacagagtaaaaacacagaacttcgaggggagtgggacactcccatccaataatctagtataagacctttaaatagaataggattctataagaacttagaattaactaaaaaggggtaattccgaggtaattacagaattccttatagtcctctcttagcgagagtattgctccagctctgatgtgctcgaggctccaagcacctattccagaaaagctactagtactagcaccaccgcactcttctcagactactctttctggtgcaaaatagctaaactcccctggaacgatggacctaatgcaacatcctttatcgtatttgatgtcacaagcttttaatatatcactaagaaagggagctacgtatttgactttggattcaattagttctacctcgaaggtaactgttgaatcttgagggttctttgatttttgagcttgagttgacatgatttcaaaatctaagtcaccggtgaaaaagcaatagtgactccaggtaaaaataaaggtctcggtagaggagtataagattatgtttggggttcaagccaagcttcttcttatcttgattggtttttattagatgatcccaaagtttggcatcgtttatcttaagtatggactcaggaacgtaggttttggattcaaatggaaggtctaaatttttaggagatacagtttcaaggaattctggggttgtaatttcaaaattaaattgggtcatacatacagactagtgtaatcccaatttctggaaaaaagaaattcaacttaacctagaaatctaagaacctaataacctagatattttacttaaccataaatttatccaaacatacaggacaaaaattacataaaagagaaataaccaaacaaagtagatacagaagacaataaatctcaaaaatcaaactgcaaatatcgaaaaggtatacaggagaaggaggtgaaccactcactattttaatgaagatttctagacaaagaggaagttcgtgattgagattatgatgagcaaatcaatgtgttttgagaatctctgagatcgaaggtgcaatcagatgaaatgcgcaggaagtaagacaaagacaatgagggcatgcaaatacagaggagcaatgcaatcgaaaaaactttttgtagaaaaatttgaacgtttgaaaagccaaaatagcgaagtgagccctcacttctaccttttattcctaatcattgatgaccatttgatctaaagaaattagatctaacggatgggaatactacaattggaaaagacgggacatttaatgctaatgatgtgcctcgaagttctgaactgccaaaacccaaagcatgcatttttcaaaattgagttaagacaaaaatacccttgtaatcatttaaaaagttcttttaattaaaaagtactttttaaggggcaattattgtacccaaaattcagttacacttcagaagtttacatatgtccaatatattgaatatgaatcaattctaaatgatataatgatatcattaaatgcatattgaataatttgttattatttaaaggataaatagataatattcaaaactcgttggcgttatagtcaaaaacgagacaagaatagtaactattgatctgaaattaacgagatatatacatgcctcagaatatacaaacaagaaggggatattcatccactcgaggagaatgaatgtatcaacataaactccctcgcattacaaatagcgagaagatcacctcgcattacaaaagccacaaagaggacgtagagagatcgaaaccttcccaacacttagtgttttttcttatcaagatggacaaggaagataactcaaattagagaagatgtaaccttccacgtcggtaataaccatctaaaggataaaactaaagaacagttgggtagttatttagtattaactcacgtgtgatttaaatgaaacgtggggatggttcacgtctcatttgcatttatatataaatctatcccaaaaagaataacatccaacttatactcctataaataggggtaga

SEQ ID NO: 46169 - DNA, 1547 bp, Cannabis sativa
tctaaaatttcaaaattaaccataaggctcattgttcctggtattatgctgggaaaattgggcaaagagttggcgagccagccattgatgagcctcatatggatttgggagaagatttcgaattggcaaaacacagaaaggttatctgccaagttggccaaactgaataaccacgtgttgtttgtggtaatgcatttgcacaaaagagatgcaaaattttttgtatggagggatgactaggagtacatccaccaatctcatcaggcagagctagaccgcagtaataaaggagctagtgacataataaggcgattcaatgaaagaactaccaggagaggtcaagatttaatcagagatcctctctgagagagactagttgatacattgggtcgggtttacaaacaaacagtccaactaggtttcgccggaactaggatggaccttcccctaccgaaaggtggacaagtgctaccacacagatctagtagcgggactagccaaactctagcaacctttggccaactagccccttagtggtgcacctctggctggcaaacagagtgagcttactcttcgaagcattcgagagtgagtcattccaacccctatctttaaccaactaggtttgggataggtggaaacacctaagacggcatcaacttgagaagtgagaacaataacttaaggcagttagatccaccaaaatctagtaattggtgtgatctaccccctataaacacacatactacatcagctaattaggggagaacgggtggctagacattgcccagcatagagttggatggccatgaacagctacccagggtagggttggctagccatggccaattgctttgcctagggttggtcgatcagagccagatggtaggcctggcgctggtcggccttgaacataaactttcccagggtatggctgaccaagtcttatccaatctaggttgcagcccaatcaagcaaggccaatcaactaggctcttacatcagatccttctgtgcaagcacaattggatcaaataagggacatgataaagggctttgcttgccccaaactattagaccttgagctagataggtcaaggggatctccattatctgcatacaacaatgccctgcccttgcctaagttcaagatgctagtatggaaaatgtataccaaatgagaagatcctttggcacacattaagtaattcgagatgcaaaattatcttaagaaagttactggtgatgtgcggcgtaagatcttcttggaaactttgtcgaaaacagcttagcaatgatacttcaagctagctataggaagatttaactctcagaatgaattttctcgagaatttctcactcaattctcatcctcatgactgatagcatcgtagctggaagaccttatcaaggtcaaataatgacaaggcgaacctttgaaggattatatccaaaggtttattattgaggccaccaatttcaaaggaataacataagaagtctattatatgaccatactgggggcatactttcgttgagtgactttt

SEQ ID NO: 46170 - DNA, 1587 bp, Cannabis sativa
aattcttcttgatatggcccgattgcccgcactaaaacacaaccttgactttgatctacattcaccacgatgtttcctttggcagctggggcaggttgataactcagtgtaaggcttcttgcctccattattgtttgttgcaagtttccatttcttatcccgggtcgttactatggttgcttccatgtaatcttggtcacctctactattcttctttgcctcctaaagagcaactccctctttccttgtcattttccagcagctcagcctccagagcttgttccagtatgtcagcataaaccacatttcttcctggcacaatcttcacatctcttctgattggcagagaggatagcgtcgctgtagtatttcttgttgaacactaaaaaaatctacccagatcatactctgtttattcactgtattttttctggttgaacactgataaaatttgagggaggttcttacccattggaggcagagaaatggttaaggaatgtacaatccatattggaatatatggacctgaacgacagagaatgtgtatcatgtgctgcaagtctactgaagaaagtgtaacctgacggtcacagaatatgctacgcaatagaccgcttggcaaagttagcgatagaggttatactggcggaagcattaagggtaaattagtttctgaatgctacaatcagagtgaagattgtgccagcaagaaatgtgtttatgctgacatactagaatgaggtttggaggctgagcgactagaaaatgacacaaggaaagagggtgctgctcggtgtgaggcaaagaagaataagtgaagcggccaggataacatgagggcaaccatagtaatgattgggataagaaatggaaaccggcgagtggtgacaaacaatgatggaggaaagaagtcttacactgaagttgcgacctgccccacctgccaaaggaaacattgcagtgaatgtagatcaaagtcaggggtgtgtttccagtgcaggtaatcaggtcacatcaagaagaattgccccaaactagcataagcaagaaaagatgagcgacttactaattgctcaagaattcatcaggtttccttttaaattgcttaatgacattagccagtttgcttggtgaatggaatatgactttgggtggatgctccctctactgctttttcaatttacttttctgcttggtctaaattttttcatagattctatttcagagatcaatatgggaatcattgttcatagttttaactactatttggttttgcagtggggaagaagaaacggcaaatttgcttcttggaaaatttaaatggggtcatgctttcctgtccctcaaccggtatgttctggttcatttatttgtaccatttcattttctgtcttaagtttcagtgatattttattgaaatctaaatacatgttaaatattgaaatatctatgctgaaaaataggggatataatatgtacaccgtgagtgcaaagcataaggccaataacttatggacattcaaaatttcgtgttcgtatacttcattgttcagcttatgatcaattactattttcaatgtaaccgta

SEQ ID NO: 46171 - DNA, 2087 bp, Cannabis sativa
cagatttaacttttattagaaaaaggaaaaattatccatttaccttaacctttactaatactgttgttgggtttaatccacttgcacttgctaattaattgacctgcaattaatccagccgtgagaaactgagaattaaagcataaaagggtcatcagctacatttattaacaccttctaaataaatatatggcccatagattaagcaataaaagaaaacatgaagatacttctactactaggagaagagtccatctgacaatacatgttgaaaagccaagctggaaaactaagtcgatacaaagtaagaccaaaagacaaatctagtttcatacaccctttgacgaaaattttcatctgcaatggtgacaatagagccatccaataattgattcatttaacatattgatggactctcttcataagctactattggttcctactcattaaaacataggctaatactaatcacaaccaaaaccagtacaccaacactagtagtctattattaccaagtaagaaaatgcatgtgccaagagagaaatcagtttaacttgcccacctctttcatatgcaaaattattttgttcctacgacttcgtatattgtcctaaatttcttgtaatttcatattggcaaagtcttccactatctcaggcccctggatgatgcagaacctgtatttggattgggaagcacgtcatttgaagacatttattcaatacaatgaaaaattcaccaacaaaagaaacccaagtcgccaaattgcaaatggaaaaagaaacaatcatatgtatatacatatatataagtacccagtagcgtttttattaataggcttgaatttgattgagggagcaaaagaagatgagtcggggtcagacgaagctaagattcgcccccaagcaaaaaataaccaattcaaccgaacttgtcgattacagtctttgcaagcgaaagtagttcgacaaatctgaacaagttccatacattgagcacctctactaattgattcaaatcaacacgagcaaatctctctttctcacaatattgggaacaatagctaactaaaagagaaaaaaaatgaagaccaacactacattcaatcccatcatgtacatccaaaatatgctgaaagcttgcctctaatagcaaaattagagattaaaagaactcgccaaatttgaggagttcgggaagaggcgtccttgtcctcgtcatcgttgtcctcatcgaacgtagttgtaaccgatcgaagagtgctgggtttgaaggttttagtcgtgggtttgagaattaagggtttagacaaaattttggggaaaatgaagggtcgtgggttaagggttgctgagtattattaagtgggaattatttagttacacttttgtcttccatatatttatctaataaccaaaaacaaagttctccacgtggagacctttgttttcggttattagataaatacagaagacaaaggtcttcacaaaatccgacccaaaggcattaaaaaaaattaaacacttttaatttcgattattaataaaaataaaaaatataaccaaaattttatgaactactactttaaaagtgatgatacaagtattaaaatagttttatctttagattcttaatttattaaagaaaaaaatcgaaaataaaagatatatttgtagtagtgaggatgtcctctccttcaacaggaggaggttgcaacccttgattgtttgggttattgggaagattaggctggttaagtccattgccctgtctcttcacatactgcttgaagtggcctcgtgcgatgagactttctatctcatctttcagctgacggaacttgtctgttgtgtgcccaatgtctttatggtacttacaatacctgttcggatcccttttatgcctcgtgtgcctcaagggctcaagtttaccaaaagcaacgttgtgctcctgcgcgaggtaaatattttcccgagtttcattgagctcggtataaatggtataaactgacatgtacttatcgtgtttcttttgtttctttttgtgcttggatgaccccttaaaatcgtctttcctttttgagcctg

SEQ ID NO: 46172 - DNA, 2353 bp, Cannabis sativa
gctggtgtaaatcagtacaaggtagagccacaccatggttagtttcaacttgctggcagttggaccgggtagaatgcagtcctgtagagtgaacagatgtactatgttgctggtgcaaatgctggtgtgtagattctgcatgctgagtgccagtttggtgtgcaactggctgctgcaattttttgcagagagaacttttggcacttctgtacttgtcaatgtagttcaaagtaaaggatgcaattgtaatgggatctctatgttttccaccgtgaaggactttgttcctatcattccaaatgccccacatgacacaaatgagtgtttcaacatccactttttccatagttgatgccaaatgtataatgtagtctccattaaacattccttgagcatggttataatcaattaggaatttagtatgtttccaaacagccctggcaaatttacaggagaacaaggcatgcccaactgattcccatgcgtgtttacaccttgaacataaagctgaatcaatcactttacgtttgcataaacccgtggcaactggtagagcattctggaccactttccaagcaaatattttcacctttgggggaatttgaagtgcccaaaaatatttccaccatgtcttgtagtcatccgaggatgattcttggtccttctccgagatggagcttgcaaggtgaaagccagacttaacactgtagataccatttgtgttatgatgccagattagcctatcacttgattgataaaagctcaaagggatagtaagaatccgttctatatcgatttgagcaaaatcctcatgtaaacgaggcatattccattccatagtatccaagatgtaagatgacacaggcgtagtaggttccccagagtagtagattgggtgaaattcatcatgccctgggatccaaggatcaattccgcagcgcacttgtagaccattaccaatcttgtaacgaagacccttgagaagtagctcacggccccagtgaattccttgccacgttaaagatggagaatgacccttgtgtgcttccaaaaaagagttcctgggaaagtatctgtgcttcaagagtcgagctaaaagtgagtttggattttcgaataatctccaagcttgtttggctagcatagcttgattaaaatcaacgaaagatcggaaacccattcctccttcaaacttagatttacagagtaacttccaccttttccaatgtatcttagacccatctttgttagaaccccaccagaaatttgccatcatagattcaatttgattgcaaaaccccaatggcaagcgaaagcagctcattgcatatgtaggaattgattgcaccacagctttcaacagtacctctttccctccaatagagaaaagtttgtcattccaagcatgtaggagtttccagattttttccttgacattactaaataactccttcttattatgacttgaatatgcaggaagacctagataagtctcatggcaatcacatatcggcattcccaaagtgtggctgaaaaaattctttgcatcagttgaagtgttgggagagaaagacatgattgacttgttggtgttaaggaattgtcctgaagcttgatggtagacctctaatatctttttgattgctaaagcggaactatgattcgcatggcagaataaaagactatcatcagcgaataacaagtgagatactgacggagcgtgtcttgtaagttttaatcccaacaaattcccctcttgttcttcatggtgaagcaaccttgagagcccttccgaacaaattaaaaaaaggtaaggtgataatggatctccttgccgcagacctctagtcggccaaacattgccaacaatttctccattcaactggaatgagaagctattggatgataaacatcgcataatgagagagatccattggtgtgcaaaacccattttctccatgaccgcagacagataatcccattcaactctatcaaaagctttgctcatatcaagcttgagggccgaaaaacctttgttaccttgagtcttatgtttgagatggtggaccaattcaaaagcaaccaaaacattgtcggtgatcagacggtttgggaggaaagcactctgattttcggatatcaccaaaggcaaaacatctttgaatcgaagcactaagactttagagatcaacttgtaaatcacattacaaagactaataggtcgataatcccccatgaccttcggttttttaacttttgggattagtgttatgatagatttatttaatctactcatatcatggccttcattcaacacaccaagtacgacagcagtaacatcagagcctacaag

SEQ ID NO: 46173 - DNA, 2097 bp, Cannabis sativa
ttgacaactcatttgaaacaaaatattgtaatgaaatttagaaccgttaacaaaacaaaagaatttattgctatagattgttttaatctgtttttttaactgtccaaattgcaaatctaaacttactctatatataatagtaagtataattatgaatagaagatttaataaaaaaaaaaaacagtcatgtatcatattaccaaaaaaaaattgttatcctaacaacaacaacaacaaaactttgggagaaaaaaagtgtagtagataacggaccttgtagagggagataacccttttgaagcaaaagtggaaaagcaggaaaaataccaaaagatgtggcactcgtggttcttataacaagcctcggcagcttaaggctgtcggccacagcttgagtgaagtggaacatggcatctgcgatcaagcaagaaacgggctcattatccaaagcattggaaatcaacctaaccaaacactccttaaagggctcaacacaattgatgttgagatgggtaataagggaaatagcatctttggttgtggcctcggcctctgataagctatgggggatagagtggaaggtgaagtgaggatgattagaagggttgggagagttgaagttgatgtggatgagagtgatggaaaatcctttggagtacaaaatagtggccagctcaagcatggggtttatatgaccttgtaatggtagagggaagagtaccaatctcagcctttttattttctgttgttgttccattatttctgagattgtagttttctccttttcttaccaagcttgatagctgagatgaaaaaagaaaaacaaatagatgaaattgatcttataacaacaaccgatgtcggcaataaattttagaggacaatgatgacaattgaagaattaatggttgttattaatttcattgttgaattcagagtgggatgggaccatctgatatggtccccatcacttgtcatgatagagtctaccagataaagatttcaaatttcagtgttatattatgattcatgaagtccctcacaatggtttgagatgttagatccctcaaatgggacaaaagaaaatttgagatctttgtgccataaattcatgacctcctgcaacaagtttcttggatagtataaaattttatgaaggagaaataatttttaaattgacttttttattctattttaattacaataacggcttctccaatgagactgtaaaatctcaaatatagtgaaatttttacataatattactctaaccaaatactaaagattattacgcaggtgggacaatgtagaccattgcatctcttttttcttttactttttaataatttaataaggactttgtaccataaaacaaataattaaataatttatttataatccaaacttatattatattaataaaataatataataataaataatatattttttagtgtaatttttaatgttgtggttggagtagtgtaaaaaaaattagtattaaaatagtaaacttttggtgttgatttaacactaaatataacttttacgattggagttgccctaaatttgattttttgttttgtaaggaagagatgtgtagtgatattgaaagagaatgttttttttatttcttttctctttagttaaaataaaaagtaaatggtcatttagcaagaagtgtattcccataatgagattatattattggcaataacagtaattcttgcaaattatttcaattcaaaatttgctttgtgatatatttactatgaaaaatgacaatgcacaaaaataaaatacaaaatttaacatgggctatttatgaaaatatgggtaaaagaagataagttttgatatatatgacatagaaatttaactacactaaatatagtattttaaaaaaaaaataaaaaatatgagaaaatatcattttatataaagagaaatgccataaaaaaactttgaaattgtgttttttttttcttttttaaaaaatgaaacactgaaaaaaataaaaaaaaaaataatctcaactgtaaatattattttttttatagaaatcaaagctatttttctaaaaaaaaaaaaaaaaga

SEQ ID NO: 46174 - DNA, 915 bp, Cannabis sativa
  modified_base (58)..(63): a, c, t, g, unknown or other
tgaaccatgcaacataaaatgttatttttgatctttgttaataagtaaatctgattannnnnnaatgagttttatttagggcacagaacccaacaactaagtctttaaagcaataatattatgaaaaagaataataactaaatgatatgtatgagtaaataagaacacgaggaatttgatagaggttcaaccccatagttatgataatattctactccgctttttactgtattactttcatgagtatcaagatcacaaagagttagttaggtgagtttcttaacaacctttatgaaataattacaagtattttgacaccataagtgccctctaaaaaataggaactcaaatccttaaataattgaatggttccactatttatagggcagatacaataaatattgttacttaaaataataagaaatatataagaaattaaatactaaatccctagaatcactcggccttacaaaatcgatccgataaatatagggatttataaatgaggagattttaagaaaaatatcttaaagaatctaaattcaccacatctgtaacaccttactagtttagacgtgttatcgtgattttatactaactgtgcagttcattgccaatcaccaagtttattaaaaatcatgagtaattaaaatttttacttaaacacttataaatatcaaaataaataacgtatatatatatataatcgggatcccgtgtacaaaatatttacaactgatttaaggacttgatacaaaagttgtcgcctatcgactatacaaaatatcaccagctgtctcaaagattgtatgcttcaggcctaactgccctaacatgtacaatcttcatctactcgctctcacggctgttcaactttagcatttcccttacctacacatgcaaacaatatttgtg

SEQ ID NO: 46175 - DNA, 1039 bp, Cannabis sativa
atgatattaattaatgtcgtttaattaattggttattagtgtaatattacgattttatatgcaacatatatgcaaatgtttatttaatttgatatattattccatgaattatatagtcttaattatgcttgaaacatttatatataggaaataataaaatgggtgattgcaaatacatcaattcttacacaattgttcttgttggatcatcatctttatcattaacttattataattgacaaacaaaaaaaataaaagatattaattattattattacctcaagtaatatttatttttttgaatattattttattttatttttttgaaaaaaaaagagtaaacttaattaaagtatgtaattttataaaatcgctcttaatatttgtttaaatttcttttctacattattttgtgttaattcaataattattttaattttaagatatgttcagattaagacaaacagttgtttcagtataagctattcgaagcaaccaaataatgaagtccactttcggccttttaatcaaagactgtcaaattttgttataatctactctcctaaatgttaatttatatttttcattagacgatcagaaaaatcgagtagcacattatgttgctagacattctcggtattaatctggtcttatcatttctggtaaactcttacatcttttgtattgaaaatgctaatttattctatcatgaagttaatatttcatcttaaaataaatcaatatttattttaattttataatatatatttcatataaaaattattaaaatatgtgcttttattataagtttttagggtataaataaaaaatttcaaagaaaaaaattattattcaatttaactgtttcaaaaatttatattatatataattttaaaatgtatgtatgcactgaccatatcttaatagtataaatattttaatatgtatatataattttatgagtataaatattatatattttaaggtatgcctatataaataaattcttggtttaggtttatgagaaatttatggtgac

SEQ ID NO: 46176 - DNA, 3229 bp, Cannabis sativa
gggtattattaatcagtattggtccaatctctatcccacggctagcattgttcatctttccttttatggttcggatcatcgcgctattaaactgatataccactttcatatcataactcacaagaatagccgtcgttttttctttgaaaaccactggcttttggaacctgattttttcaagctcataaatgaaagttggacctctaaccaatcttctaatacctctgccactactcttcattcctttttttgtaagcaaaataactatatcaactccatgaaaacctggtccaaaaccaaacaaagtatcaagttccaaataaataatattcaatccgctatcgatagtgtagtttccaagccctctatttccaggtgtgactccggtcatatccactctcttcaatcctctcttgatgccattttgtttaaagaggaagttttctggaagcaaaaatctagggttaactggctcaaaacgtgtgatagaacactgagtacttccataataaagcctccacgaggaaacaaaataatatcattcatagtctcactcttgatgataattccattgtccataacctcactgacattaccaacaactttgtccagttttattccactctctttacctctaatggcaccaatgttgatttcatcaacatggtcctcaggggcatttcaaaacatatcaaccgcgaccaattcagtttccttgacagccctttcacctttttggaagtcaagagtgctctttttcaattatctagtgatatggttcctagacccgatggcattaatcccctcttttaccaaaaaaattggtccacggttggtactgacctttgccacgctgttcttgatgttttgaaccacgacgttgatttgacttcgatcaacaaaacttttgttgtacttattctaaagaaaactcaagcttctaaagctcgagattttagacctattagtctttgctcgaccatttataaagttgttgttaaatccctaactaacagactgaaggttgttctcactgatctcatttcccacaatcaaggggcctttcttagcaatcaatttattcatgataacattatcattgccaatgagatcattaatgccatcaccactagaaagaaaggtaaagtgggctggtctgctttgaaactggatatggagaaagcttttgataaggtggaatggaactatatccaccaaattctctctcactttggctttcctgctaaaattgtctctctcattattaaccgtgtttcaactgtttctttcaaactttgtattaacaatagtctctcttctctcattattccttccaggggaataaggcaaggtgaccccctctctccctacttgttcctccttgttggtgaagggctgtctggtctcattacttccacaactcatgccaacctcttcaagggtatatccatttgtcgtgctgcccctcctatttctcatcttttatttgcaaacaatagtctgctcttcacccatgtcaataaccaacatagtcgaaccatacaggacattcttactgtctataataaggccacatgttagtctgtcaaccttgccaaatcttccgtcctcttctcccttaacaccacccttgttgacaaaacctcattccttcattctcttcaaatggaggataaaccctttattgacaaatatttggttgtcccccaatgtttttctcgttctaaatttttttcctttcattacatccaccaaaaaaccctgcaataaactcttggtctggaaccaaaagcttttctctaaagccggtaaagaaaccttactcaaggctattatccaagccattccttcatatgccatgtcttgctataaaatccctatctcaacttgtagacggctggggaaattgatggctgacttttggtggggttctttgggtcaaaatcaacacaaaatacactggaaaaaatggtcttccctttgtaagtctaaattttatgggggtcttggttttcgagatattattcttcataactaagctatgttagctaaacaagctcggcgtatttttacaaattcggactcccttgttgcttccctcctcaaaaccaaatatttcaaaaataacaacttccttaaagccaaaactggtcatcttccttccttttcttggcgaagtctcctttggggaagagattttctccttaaaggtttaatttggaagattgggaatgtcaaatctattcacatcactagtcctaataggattctaggaagtaactctattttcttgaagagtaatctcacccctcctaatgtttcagtttcctattttattactgaggagggtttttgggatgttcagaaaattactacctattttgacaatgactttgttaagcttatccttagtgttcctattaacaccagctctaaggactgcctcatttaggggcatgatccttcaggttctgtcactgtcagctctgcctaccaccttgctgacacaacccactcaagccccagttattcaaatgttgacatttttaagaagtggtggaaatcgggttggtccttaaatatccctccaaaaattaagcatttcatttggaaagcttttcaccactttcttccctccaagcttaacctcttttccaggaaaattctctaggatccccactgtcctttctacttcagccgtgttgactcaaactcacattccctcttagagtgttccagagctagtaagtattggaagcacacttctttctcctccttttactttactaataaacattgtgacattaaagaatttcttttgcgtgggtatgaaacttttaacaaggataacttgactactttatttggtatttatgggctatttggaatcatcgaaacaagtctctttttcaaaatgagaacgctaactacaaggagatagagcatgtcactatttctttcttgcaggattataaggaagctcaagcaaaattccttccccaaccccacaacaatttccaagggcactcggatagcagtttgatcgatggaagttttctcccatagcctggtttttacaaactgagtgtggatgctgctgtaagaagtcaggataccattcatggttatggggctgttgttaaagatgcggatgacagggttattgctggttttcattcctcatctatctctgatctgcttcctgtttttgctgaagccgtggcacttc

SEQ ID NO: 46177 - DNA, 2349 bp, Cannabis sativa
taaggctagcttaatggtgagggatggatgggaaaaaaggagaggtcataggttcgaacccaagacctttaagctattaagctattaattgattgtaatacaattacgctacactgaaaaaaataatatattaatatgtgtacattatatctatctggacaatattctatgtacatatgaataatcaacgtggcagttaattgccaaaatagatggaaatagctaaatgataataaaatacgagttttgggagttttgccatcaaaatgtaggttttaagggttaattactagcaaaatgaaagtattgggggttatgcatattattttgttaaattttttatgattggtatatatgttttgttgtgtatagtatatcatttatttaagatgatgtttagtttctattttattatatataatgattatatataattttttttcatattgtatacatattttaatagcaatatatataattttgttagcatgatatatattttttgtgtaataatattataggtttagtattgttatgatttctttgtggtatataattttattattacagtatactaattttcggtaatacaatatattaaatactgatatatatatatatatatttataatctaatatatttattcatttttgttacaatatatcaatatacaatactaaaaaatttatataacttaatttaattattatataattttttaaaaaaaatttatacaaagtaaatgtatttttataatttttattaactaattcattatatttagctattttattaatttttttttaaaaaaatatttactaacttagtttttaaatttaaagtaattttacattttagttatctattatttttaatgaaaaaatatttttataaataaaaaaaaattaaagcgtaaaaataaaaaaaattctaaagtattttttgtatttttttatctattatataaatttttagaaattaaaagtgtatcacttgagcaactattttttttttagacccattaaatatgttcaattcaatattggtccataagtttaatttattaattattatagaaaatagtgaactcggcaaagtaatgataaataaatattttaatggaaaacagaaattattattgtcgaaaaaaaacagaatctcctatcaaaccccataaaataaataaataaataaataggtagaagtgttgctgtgtaagcaaagataaataaataaaaaaaattacaaaatgaaaccgagtaaaggaaagaaagcgatagaggaaacctgaaatggttaatacagttgccagttggcagttggataccgtacagaaaaacgatgagaatatgatgaaaaacccatccaacggttcaaaatcactttagttttactccattcttaagaaaaaataaaatataaacgtgtagaatctttaacgggctttcttcggaatattccttttatcaaattccactctggtttttaatttattgatttattattattttaaaaaattataccaaacaaacaaactcttctttctttttcttctatattaacccctcaacacctcaaaaaaccacaactcaaacaacctaaaaataaaaaaaaaaaaaaactcctatttcaaatgtgtgaagcacctaaaaacgcataccaactgttggaagaaattggccgcggacgcttcggcaccatcgtccgagccttcagcccagtcttggaagacttcgtcgcctgtaagataatcgacaaaagggttcttaccgatgacactgacagagcttgtctcgaaaaggagccaaagatcatgacccttttggcttctcatcccaacattctccaaatctttgatgtctttgaaaacgaagattttctcactgtcgttttagagctatgtgaatccgctactctctacgaccgcatcgtcggccggactctttccgaatctgaatccgcttctttaatcaaacagcttctcgaagctttggctcattgtcaccgcctcggcgttgttcacagagaccttaagccggagaacgttctgttcgactcaagagggaacctcaagctcgctgatttcggctctgctgagtggcttaacgaggatggcttggtcgaaggggtggtgggtacgccgtattatgtggcgccggaggttcttttgggcagagagtacaacgagaaagccgatgtgtggagtgccggcgttattttgtacataatgttggctgggattccgccgttttacggcgagtccgccaccgatattttccagtctgttttgaggggaaacttgaggtttccgacgaggattttccggtcggtttctccatcggctaagg

SEQ ID NO: 46178 - DNA, 4319 bp, Cannabis sativa
acttcttctacacatttatgcacctaaaccagtccttgcgttattactctcttcctttaaagctaaagagatttcaggcaacttggcctccaaacttcagagagggatgttcagggacccaggaagagaaacaatcttgaaatggtgttctggacgaacatcaaccaatacatatgcttcacctttaactattttctcctttaatttcgtggtgcttattctagaatcttcctcaagtaggtttaatttcataggtgacatattagagtatcagtaattattacttgttagtagacaaagaaaaaatgtcaatagttgttagcaaaatatcccgttaaaagaggagcacatgttagtaaatgtgtactagaaacagcggagtttgagtgaacttttcataatcaaattccttaaatttttggtgagtgaatgataaaattttaacaacaaacttcacatggcaaagaccttcccctgatggtgacctacattgcaaattacacttcataagtacaaataacacaaaagagagagccccaacttcccctttagtctaatattctctcgatattttatttaccaccaattgggagtcactatgtacctcgatgtgctgagctccaacttttttagctagccgtaatcctgccagcatggcttcatgctgagctcctttgtaagaagcaggaaacttaaagcagagagaactttgtagttgatggccttgcaaggagattaatatgacccccgctccgactccctttttgctagaggccccgtcacatatataccttcttaggtaggtagcttcgggactgatttgtttgggatatcacctaactcggagcattctaccacaaagttggctagggcttgtcctttaattgatagttgtagttgatattggatatcaaattggctaagttccattgcccattttaacaatctaccagaagcttccagattctaaagcatttggtaaagagggtgatttgtcagtacttttatgacgtgagcttgaaagtaaggcctaaccctttgtgaggtgaccagtaatcaaaaggttagtttttcaatcaacgaatatctagattctgcacccaataatcttttgctaacatagtgcactaatagttggacctttccttattctcgcactagggtggcacttatagcatgtttagacattgccaagtacagatacaaatcttccccttccaccagttttgacaaaataaaggccttagttaaatgctcctttactttctgaaaggcctcctcacattctttggtccatccaaatttcttgtttcctcgtaacacgttgaacaatagaatgcacttgtctatcgatttcaagatgaactagttaaaggtagcgatccttccagtaacactctacacctccttatgctttcgaggggaaggcatgtcgatgaaagcctaggttttctttgggtttgctttgatcccttaagaactaacaatgaagcctaaaaacttcccagaagagtcaccaaatgtacatttcgtgggaaacttcatacacaaatgacatattaaagttaccactcagaaatttgccaaggctaggcaccttagtattgtgtggtacaatgtgggacaatccactaccataaatgtacaatacctatgggtaccatcattgttttctcctctaagagtgactggtaactagatcctccctattggtgttagggaatccccattaaaaccatgcagttggactagacaaggtgacaagtctgtatcaatgagtttgatcgctaaaaaggcgtgtttagacaggatgtttacggagttcacgttatccactagaacttttggcaccttgtttcttgctatccaaatttcaatgaccaaggggcaatgatgaggaaaatttacatgttgggcatctgcctctgcaaaagtgattggcaggttcattgtccgagagcgctgagcgggcattcgtgccaacacacacattcttctttctctacctagttctcttaggtgcctcctctaaaaattcttgcaacttctcgcaaggcacgacccacccgagattattgctacatgcccgtcaactagtggtggtgctagccttcggggatatgtaggtcttggagccatcaaagccactgcattcaaagttggtggagctcacagtgttagaggatatgtttcgggaatttgagggttactccatgtggaggatttttagtaccctgctatctggaaataatcacttgtctgtgaatgtccccctctccgggatatatgatggtccagacccattgctctaaatgtcctactcttatcaacgttttaattttatccttcatgagttacaatcgttcatcttatgtcccacgtctctgtggtattcataacgcttatttgcttctctttgaaatttcccccttgaggcattctaggggtcttcctataatgaaccatgttacatgtttccttgtatacattttcacgagtgtctacaagactggagtatttggtgtactttagattgtactcttttttagatttcttcaaggcttctcctcgtcccaaacgtcttccccctcttttgctctaggaattactcacttcctgctctagtaaccccatttgcaattgtccatgtgccacactacatctggtttgcaccgttctgtaccaagagaaatgggtttgcataggtgcgggaacaactacagaaggtctacaaatcatgggagtgtatagtgttccaaaacaacggtagatgaagtcaagactagaacagaggttactggggttggtgcaatagggaccccaaaggcttgctggtaagcatcctctaagctaatgaagccttgagccttggccaagaatttggagagggattcatcccttttcctttgcatttctccccataatagggacctagtttgcaagtccagactataaggctgcaagcttcgtatcattggttactttagttttggcggctatcattcactcggtaaaactttttaggatttctcctgcttgtttcttgatagtggtcgtagaacccatttccaaatcatattcccaagcaaccacaaattgaaactgaaacatagattgtaagtccttttaggagcagactgattcaggagttagcctttttcactaatcttctacaaacttggtgagggtcaacaagaagcacaaacatttggtatcattgctaacccttgccaattgcatcatcttattatacatagctaaatgggttttgggatttgagcggtgtcgtacaactcgatttgaagcattttaaagttctccaagagaggagcctttgtgatccccttgatacaaggcttcgggtcctcatcttctaaatcagtgagagtcccactctactttcagaccaattttgttaaagcggctatcagttcttctaatcattttgcgtcgctgtcgaggaggctattcccataggccttgtcgtcaagtggtttctgagatcatcatcatgtgacctcacatttttgctcttagctttttcgtattttacatctaaaaactttatgaggtccatagtggaccaactatcgtcatagtaatgctactccgtcccctcatcctgggttaccaaatcattagggtagtccttccttccctcaggttctggcactttcttaccaatcctcttcagtgttatgggacctttctgggctgaaggatgcacaagccctaaggcgttggtcatcttctgcacctgggaggctctattatcctaattcatgttcttccaaggtggtttagaggcacaaggattttttggttcacccactttggccttccccttgtcatgtacaggagtagaggttctaacaccagtgggcttctccttggtatttcttcttacacattctactaaaagatcgtcatcagagtctccttcatatagatctctgaacttactttggaggaaacccaatattttttctatcttttagaaaatctctcctgaagagccagatttttctgagtttcaaacaactccttgaaaacctttgtcacctcgaaatcgtgttcataacagtggccatctttgtaaaacccatctcttgcgcaaccctcgtcatctactccttccacttcatgatctttagtatctttgccactgccaacataatcatgctggttggttaggccccccaccttgaacgtttatgtcagaagtatccccgcctctcgcctcgcttggtcgttctgctccagtgagagggggtttactttctacataaccatctcgacgccaccctgtgaagttcttt

SEQ ID NO: 46179 - DNA, 4073 bp, Cannabis sativa
gcataaaacccaacaaaaattcccaacaagaccaagcaaatgtgcattgaacaagcacatggaactcagtttcagcaaacacattgcagaatggacaagtggcttcagttaatacctttttaatgcagagatttgtctttgtggagaggcacttagaggccgcacgccaaatgagatccttagacttaggaggcaccttctcagcccacattttcttccaaaactcccctgttgccgttggtgttggcccaagcttctaatcttggattaacttgtaggaacttctaacagaataaaagccatccttctcatttagccaataccaggtgtcttcataagtagtatggctaattgggatgccaagaattacagttgcatcagtaggagaaaacaagtctctaaccacatcaacatcccaatttaaggaaccaacttggaagaggctactcacattgaagttctcgagtccaggagtaactgggactggtgtaggccggtttacaataggaagccaagggtcttcagtgattctcacagtcgtacccgaaccaatacatttccgcaagcccattttgacaacatcttaggccgcatatatactgctccaaataaaacttggattaaatcctaattcagcagtaagataggttccttgtgggtaataccttgctttaaaaattttactagcaagagtatcatggttaacgagaagcctccaaccttgcttaccaatcatagcaagattaaagtctcttaagtttctgaagcccattccaccttcacacttatgctttgtcatccgatcccaactcatccatataataccactcccttcaccattagaagatgagattttccaccagaaattagccatcaagcgttcaatttccttacacgttcctaccggtaataggaagacgttcatatcatacgatggaagcgatttcacaacagtcttaagcagtacttccttcccagcccgagaaagttactttccctcccaagagtttattctctttattattctctcctttaggaagcctaacaccgcctttttattgcgaccaacaatgctatacaatcccaaatacataccatcagccccagcctcattaatgttcatgaaatcacatattcgggtcctggtaatcccgcgggtgttcgaactgaagaagacggatgacttctggatattgactctttggcccgacgcaccttcaaaactctgaagcaagagcattaactgagcagcttcatcttcggtagcttggcaaaacacataactgtcatccgcgaatagtagatgggaaacaattggcgcatttcgagccactttacaaccaatgattcgtctactaatctcgaattgacgaattagagaggataggccttccgcacatactataaagaggtagggagataaaagacatccttttcgtatccctcttgaaggagttattggacccactttttgaccgctattaagaacatgatagcgaaccgaattaacacaactcatagttaaagttgtccatcgttcactgaattccatcacacgaagaacagttcctaagaatccccattccactcggtcgtaagccttgctcatgtcgagctttattgccatgtaccccttacgccccgtagtttttcgcttttggtagtgcatcacttcaaaagccaccataacattatcagatattaaacaacctgacacaaacgcactttgtgtttcagagatggcctcattaagaacacccttcattctattggctaggactttcgaagcaattttgtataagacattacacaaggaaatcgacctcaagtcacttatttgggaaggattcttctttttcgaaattaaaacaatatgagtgtcattgatggaattcggaaacttgccagattcaaagaaatcttgaacaaaacgaattacatcacttcccataatatcccagtgtttttgatagaacgccagattcatgccatcgggtctcggagatttgtctggatgcatttgaaaaagggctctcctaacttcatcttccacaatagggagcagcaggctttcattttgctcatcagtttctgtgggccgaatcccattcaaagtcgcacctaactcaataccagaagagtggaaaaggtcttggaaataccccttgataacatcttgcaaacccgactcccaagtcacccacctgcctccttgatcttgtaattgagatattctattattcctcttacgagaactagcaaccgagtgaaagtatttgctatttttatctcccgaattcaaccaaaattgcttcgaacgttgtttccaaaaagtttcacgctgagttaagacttcataaagcttagtcttaccttcctcatgttgctgaatagacacggggtctcttccccacttcgagtttccaatttgcgctttgcatttagctattcgtttcttgaaactaccagtaatgtctttaccccattttcctaacacttcctcgcaatgccgaatcttctcctgaattgtacaattgcccgatcctacccaacaactttccaccaacaccttgcacatcggttcccggagccaagcgttcttgaaacgaaaagaagaaaaggttgtaagagagacggtaccttgaaaaaccagcagcaatgggcaatggttagatgttgaaacttcgaggttgaaaagagaagcttgggaaaataaattcagccatccattgttcaccaaggctttgtcaagcctttcctctatccaattatcactatccctccctttctcccaagtgaaagggtaaccttggagaggcatatcgatcagctcacactcactaagcacctctcaaaacccatcaatcaaccaatcaggatacttacggcccccctcttttctgagtgatcccccaaattgttcatatctcctataaggcaccacgacaaagcattagtgtttttaagagatcgaaacatatcccatgtttgagtacgaatctctctcttaggctccccataaacccctgtaagccgccaaataggatacccgtgaagatgaataagagcatcaatattgtgaaacgagaacccctgtatttcgacttctttttcaaatttccagagtaaagctagacccccactatgtccacgtgagtcaaccacaaagcaaccttcaaaacccaattgggtcttaagtctttccataccatccttattacacatagtctcacaaagaaataaaaaattgggcttcttatgggacacaaggtccactaagaattgtttggcccgtaggttcccaagcccacgacaattccaactcaaaagactcattgctttgggcgggtctggaaactagaacccgccaaaggcccattttttgagagcccagtgttgtcaatctcaattacttccattatgtcatcaagagttctcccctgtaggcccataccttccacaaaagtattacctggccttttcctctttgagtcgactatagtagttatatcagaatcaaagaaatttctattattactgacattcagagctgcatcttccccatttatcccaatatcccatcactagaatttcggctatcaattattccatgaaaatggatattgttagtaccatgattctggccaatctgtcccacaatctcctccataactatcgggtttagattgctccccagagaaacactgctggcatgagatggttgtcttccttcctctcgcaccaccgcacccgaatggagccattgcgccccaaatgatgactgtcttctttgattagaagctcttaattctaacccatacggtttatcatgaagatgcagaggtttttcaaagagtctcggacaaaatctttctgcatggccaataattccgcaaataaagcagaatgttgggagcttttcatacttaaagtttacccagtaccaggaagattgatcagtgcttattttccttatgcatttgattggtttcctcacatcaatccagactcggacgcgaagatactcccttcaaacccccacaaagttatttgggtccgattccaagaactgc

SEQ ID NO: 46180 - DNA, 1456 bp, Cannabis sativa
gatgttctcaccctagcaccaatcagggcctcactatttataagaaattaggagccttgctcacgcaattgttccatcaagtccaaacccgagtttagaagactctgtttagagtcatctagagaaagatcaatcggagatctctcatcagcactagtagtgttagatatctccataccagtgtcttgagcaggaagagcagcttcagtagttctaccgctcttcctcaccttcttctttgaagtagttgaggcagcaagaatgccttgaaccacttcctttactggaggatcagtttccttcaacaccagaatctttctcttcaagttcaaacaagatgccatagtagccaagaagctcattttgtttgcaaagaataaagactagaggttagtacaacaaaagagaaacaagacaacaagttaacaacatagcatggagcattagccacctattgatcccatccttctctggagcagtcctagcgaaagtaacttctctgtcatcctggtttaaaaacacaaatattctccctaaatattttgtgtcatttcgaatagaagtcacttcttctatcataattcgagatagaataatagtagcacaatgagcatcttcatcactttccttgagtggcacggtccaagatttatcaaggaaactagtatcagcatacactctcttacatgacatgatcaatccaacctttcaaagattttgagtactaaagagggttcaaccatctctctcccatgcatcaatttcaagcaatatggcatcagctctcctcttcatgtcaattaaaggagcatgtcttttaaaagggttggcttttcggaaggtaatgtgtctcgatggaagaataggagtatagaagtactcttggtagtaaaggccagagttactcttggttatgtattctatgtatgggccaaattgatggaagtggtaggagccttgacctttgctagttggacttcttttcaagtcacaaagaaaatttatctcatgaggagttggaataggctagttcctaagatggtaaaatatgaagaaggtggcaagaatcttatagccataagggtttatctggtaaggccagacaccaaataagtcagctatggatatgaaccgtagatgcaagggtaagtacgtaagtacttgtattcatgtggattctcaaccaggcactgcaacaagtattttgagaaccctttggagcaccatgtctgggcttttaaacaacagtttcaggaagatagtaatcatcctaaattgtttgagcttgaagctcagtacgagtgctagacacaagagtcctaagcttaaagcctctatctatcagatcatcactctcaatggaagtttgagaagcttagttgccatcacttttccaccacgggtcttgtctaagttcttagacttaggcaccgtcatcttagctctaatgaaaaaa

SEQ ID NO: 46181 - DNA, 4569 bp, Cannabis sativa
  modified_base (2043)..(2045): a, c, t, g, unknown or other
  modified_base (4234)..(4236): a, c, t, g, unknown or other
taaatatatttttttaagaatatgaattagaagaaaaaaattaaaaaaattagtacaattaaagatataaaataaaaattattgaaatagagtgtctttagaaattttccgagtgtaaacaaaatttttctttttttaatttaggctaattagtatttttgctccttgaattaaagtatttttccgagtgtctttagtatttttctttttttttttttttaatagggagtttgatttaatacatatcaaaattcgatgggtattatttggtagatatcaaagtctaggaatcataatttaatatatggataatcacaaaatgagtaaaattaaataaaactggataaagtcctaattatcctttaatttatttaaaaatttaaagttctttttaataaaaggggaccaccaaaaaaaggaccattaaaaatttgggatgaaaattgttttttccgtcacttttatttaaaataattaaataaagtatatcctaataacatataattaaattaaaggatagtggcaaagataaaatatattagttagttttaacgttttttttaaaaggaaatgaaataaaatatattatttagctggaaaatatatatttttattaaatggaaaaaattatttatttaagtatgataatcttaggtgagaaaaaaataataaaataatattgttgccgccgcactcaatgtagaaaagtaattaacatatattatttacaaaatactattaaaaaattcactattctaaaatgattaatataaatatattttttaaaaaaaaattataacacgtttataaattacatttctccatataatcaacgacaaaaaatccttaaaaaaaagagtaaatattttttggtaaataaaaaaataattattttaataatgactatttacaaattacaatgtttaagcaaaagaaaacacctttaaaaaatattgttttaagaagttataataaataaataagtaaacaaataatatgtaattactctaaaaaaaagttcataaatatgtaaacatgataatgactagttggtaggttaatgatgaaccccacttaatcaataactttactaataatgataaaaatagaaaaaatccaaaaataatagtctatatactatatggtgctcttctccttttttcttttttcttttttctttttcctaataaattttattaacttttttcaacatgttttcactaaattaggcattttaattattagttgttatggcatgtttactaaagggaatgggaattaattgtataggattaattcttatttatttatttactaaattttagaatgggagaaactagtggagcccacacaaattaaaaaaataaaataaagagaaagcttctcctccattttcataagaaatccctttctctttctttaacttacttgatattaattatatttttattaataaaaaagacaaatatgtccttcaaaatatataaataaaaaataattacatgttttaacaatgacaatttagtcaaattaagtcattttaatacttttcctgattatgtaaacaaaataaaatgattttgatttctttttcgatcagtttagtaaacaacaaaataaaacattgtttccgattattttatattttaacccgatttatttattccattgattattctgattccaattacattttatagtaaacgtgtcattaatgtgttcaacctttaggaatggagaaaaaaattaatactattttgaattttgtgttttgtaaaagttattgattggactttctgttttgttaaatgataaaacagatcctatattttttaaaatggtacacattgagtcctgaactgattttttgttaaaataaaactttataataacctaatctagaagtgtaatgataaaattggttacattttttacatctattcgtgttaaaaattgtcttcaagttagttatattaaaaaaattgtcgaaaaattgagcttagggttttattattaccattttagaaaatataagatctattnnntcatttaacaaaataaaaagtctaatcagtaacttctgtaaaacacaaattttagtatagtatttaccctttaaaatttaacttttattagaaaagtttattaattcaaaattaattaataacaagtaggaaaatattttttaaattagctaaaatgtttcatattagtcaaatataacaatagtggcatttataagaatggccatgtgctttcaactacaaaacatcactattagcccataatactattgccatgtaacattttagaagtgactagtaattttttataattattaaattaaaatatataaagttgcttattaaattaaactaataagagtgtatgttgatatcaaataggagtgatctacaaagtcaattaacttatatatggggtagtcatgaagaactttcttagaaaacaaaacaaaaataactacttaagccaattaacttaaaatttacgcaaaactattctcaagttcttaaccctaatttggatcacaattttcttccaaataatctctcatatataaataaataaatggataaacaatcatatatattatattatattatattaattgtggatacaatgtgaacaactcgaaacaatataactcataataactattactttagtatctatcactacattaactatgatgtggaagttgagaacgagttcatgatggcaacagtggttgtaagagatcatttgggtgttactcgttgggctgaaagtagtgttataaatacagaccgaactttttgatatgacacgaaattaatacgagtttagaagtatgactagacacgaaaaaatataaacttgaacatgacacgacacgatgctacaaattggaagtgactcttcaattgtgatcaatgttgatatgtctatatgcgagaatgataattttgtttgtgggtgtaagactttatctaaaagtttgaatgattgtcagtttgataagattagtaaacgatttaattttgttgtccataatgtttgttagataggctttaactaatgagtttactagttatatagagttagcctctcctataatggcggagctctttaatttgagaactatgtaatatgtatcatattatatagtgtttcttttaaaatatttatatatatatcatatagaatgtttgaaaattcaggagaataaaataaaaactgaatatgcacacaacgaagaacaaaataaaagaaaaattgcattaattaattattactttttgtaattccttcacaagaatatgaatgtttattagatcacatttgatatttttaaatttatttaaatctgatttaattatatattaaatgttatattttaggtaatttgcggtaaaaattcttaaaatgttcactttattacaaattagtcttcaagcgcgagaaatagccagcaataatccttaaggtcacactctttgtaagtccgttggtcttaaatttaactacaccgttaacttattcaaaagtgtcacgtgttgaagaagccttattagtccaaataaaaattttaattaaaaataatttaaattttaaaaaataaaaataaaaaatacattttaaaatcataaaaaaattagtattattatatcttttttccccttcttctctaacctccagcaacacccgatcccaactcttcatctctctttttttcaaattcaatcctcctatggctatggagattggaagaaaagtgtagaaagaaattaaatctctaagcccataatctttttcttgggcctgagaagttcttccgttgtcgaagaaacatcactgtgaaaaatggaggccactacgaacctcctcgtctttctctggagtcaaggccactatggccttcgtcggactttgaaccctaagccctgcagttctcgaagctcccttcgtcgttcaccacaaagtaaagaaaaaatcaattaaacccacatttattttttcaccacaaaccagatctgtaaaaaaataaaaatgaaaataaaaaagagtgagaaaagggagatggagctgagaaagagagagacaaagacaaagacaaacaaggacgacttactgtgactttttttcttgtcgaagatgaggccagtagtggagacgcagttgtaaaggtgggaaagagaaagggaatcggtgacgtcgagatgaagaggagacnnnctcgccgtcgacaagatctgaacagatctaccgcttctctctctgtgtgatgtttggcccttgtgtgtagctatccccgttgtcgaaacgtcaccctccatggctttaccctgggcattttcgaagttcggtgagccaacctccagtgtggagttcaaatcagtggtggtggaaggcaagaaagaaagaagatatgaaatagagcttacaaaaaaaaaattgttggttgaacaaatttgggtctgtgcgtgctcaaggatgatgaagaagatgagtcaaagagaaaataaatgaaaaagaaaaaagacttaacaaaaaaaaaaagaaaaagaa

SEQ ID NO: 46182 - DNA, 2770 bp, Cannabis sativa
  modified_base (1042)..(1042): a, c, t, g, unknown or other
cttttattgcatgtgtaactgttttttcatatacgaataacatgcaactttttatttacttattttaaagacgattatactttttgagagataaaaatgacacttattattactttcatcattttcatgtatcctattagtgtaattggctaatgatatatgcttctccccaagatagtttagacatatagtttgacttagcttctataaactattttttagcttttagaattagaaaagtccttctaagagtgcttggataaaaaatatatttatttttttaaattaaaagtttttttgggaagaaactattgtaacttcttctataaagatttttgagaaactattttttgagaaactatttttaaaattaaaataatttacataatttttaatttactcacaaagatcttttttttttaatgatatcaaactaatttgaaaactacttttcattaaaaaaaatctttatataatagttatcaaaacaataaaaataagtcaaaacttaaacttatcttatacaattttattactttgattaaaatattttttttatgttactcaactagtctccttcggtttgatctcttacttatatgaacacattattttcgagtatcattcatgcacttgagagtataacatttaaaatgtccctattttcgagttcaactatatttatatcaaaagcacaaataaaaacacatttattttttttctcatgaaaaagatagtttggtggtaatacaatgtaaataagttatctaggaccagggccaccatatgtcataacatgtccaaagtcacgatgaaatccccaatcttttactaaataaaagtcaatatcaattgaagaaatttttgtgtttttagcatcttcttgtatgtgcccctcgtttatagttgtcaattccctacaatatgcatcataacgagtatcttgttttagaagtaaaccagaccccattggaggaccaatttgaccaagaggactgtaagtttctcctccccagtcaatatatgtagccaagtcttttantccaccactaaatatgcttgatggccaatatccaatttgatcatgatcttttgtaagttgaagccaccaatttccagtaacttgatcctattatatcatatcaaattaacaagtacaatattaatacaacccacaattttaaatatataacacaattttgttcatttaaagcaaaaatattcaacaaaaacttggtagggaaaaaagattaaaatttaaataaaatatttaattttatttacccgataaatatagattccaatttcccatgtaggaaaagtaccagggtgagtttctcttagaatcctgtcgatcataggttgagggtcaaccaaaacaaatcctggacacactgtattgaaacatgataattcaccagcctacaaaaatattgatacatgagttacacataactacacaacgaatatgaagaaatcttaaataataacataaaattatgataacctgaaaatatatgaagatccgagttttattgtctccatatacacttggatttacctaagaaatgatagtataacaaaataacaagtgaacaaaatattctaaaaaattataatttatctaaaaatatttagtttaattgtttttaacaacaaagaatatagtagaaagattattcaagagaaataaaacttactccccagccagcttgaatgatatcaagtccattttgtaattttattcgaccgaaagtgtattgtgagtcagtgacattatatagtgtgtaaaaacttgcaattgtgccacctccattgtatttcttggttgaatcagatgtgtaaacaagtgcatgctatgatattcaaattcaaattgtaattatatttcaataatggaatacgatatttactttatcaaaacaaaatgaaaatgtaaaatatgcttacatgagaagtaggaggagaattaattcttgaggtataagactttgtaaatagtttggctctgataagatcttctttagtagttcttcttatgggaacaaacccagttgggcatttttcaccctttaacccactatttatcgatacttgtctcacattctttggaggcttatcttccctaaccatcggggccatatgagaagaaggtttcatctacacaataaatatttatactccatatagatataagtgtattatattacatattggctattgttttggaaaaataaaaaaaaactaatgagctattagagaaataattattcaggaagaacgtacttgaaaatcatatttgcgattcttcaataaaggatgatcaaatgctggttgctcgtaaaaatcaatacaatcataaatatctccatagtatgtctgtgcatgacataaataagttagataaatgattagatgaaaataaattaataataataaaagaaaaatattacttttatagtcttgattgatgacttattcaatcgttcaagttgatcttctatttccagaagttcatctcttgataattctattagttgttcttcagattcgcaataacataaaagtgtagacaacataattgcaaccataaaaaatcccctcatacccatattgaaagattttatctgcaataaaaatatacattcacattagccaaagaaacaaagtaaatctaccaacagaaaaaaaaaaaaaatcttatatgaattatatcaacaataactattctaatcttctctcacaatgaaaaactaaaatcacataccag

SEQ ID NO: 46183 - DNA, 1234 bp, Cannabis sativa
acctattgttttagagtattattaatggatattagtggtgtctaacactttttataagtagcgttgattagttatcgatattctctaaaagttattttttaaagttatataagactaatacttaattatacaaatagtattatgacaccaaaaaaaaattttaaccaaaccaacaataatactttttaacaattctctttattttactactggaattcctagataacatattttcggccagcctagctaagccgcccctgcctcctaattaaatataaataatttcaccaaagttttgaatgttaataataaaaatttagggaaaaattatatcgttatattattttatataataaaatatagttagagacaatagtatttttgtcaagtagtaacatacaataggagtttatattttaatacaatcataaaaacgagttgtaaattcttaagtaatgatatcataaacttgttttacttttctctccacatttttactttttaaattagtaaaaagtgttactaatattatatttgaatgtgttacaatttgataggataataaggtccttatttttatatccttgactatattattatatataatacccttaggaatactcattaaaaatttagtttcatatatacatagaatgagttaatattataattagttttttttttttttaatattattacataaacaatcaataacattatttttttttataaaaatgatttaatttaagtactatttataaaaaaatttaaattcaagagaaaaattagagtttctcattctcaaatttatagctattgaaggttgcaattttcttcggctaggcctgctggccttccctaggctcaggtgctgtttggtcgagattgtgttttgctattgtcatttgatttttactactacaattagtcttatctatgtgacatggttttgaatgttttagtaatgtctgtgcatgtgacatggttttgagtgttttaatcttgtctatgtgacatgatttttttttcgttattagttcttctttgttcttttatgacttgccattacatcgtggttagtggttgagaataacaaattttttgtgactgaatgagttgttattagtgcaattacgtacattaaccaatagttaagtgcacaagctacgaggttgaacttactacaacaatttctactgttgtgtattataagtggtggatgaaacatgatata

SEQ ID NO: 46184 - DNA, 806 bp, Cannabis sativa
catcattagggaacaaatcacatgttttaattagtactttttaattaagtaaccgaaaagtgccctataattatatatatttttttccaaaaagaccagaaataaaaagttctctctttagttcatgtacatgcatgtggttaattttcctataataagattaatattaacaatgattagaagttaattattaaaataatataaaaaaaatcaaaacatcaaaacatattaatggaacaataatgacaataaataatccttaatactatatcataataaaatatttttgagtaaatataatctttatatatatacatgtattacaatttgaaataaataaaattgttaattttacacaaataaatttataaattatattttattaaaatataattattcttatataaaagtatactttcttaataaaaaaaatataaaataatatataactagctatttaccatttaaatgttatttttataatgacctatattaaaatttttctttttttttttttataataaattagaaattattcttaaataatcacatctaagactatctaagagcttatgataaaaaaatccaaaaattacttaccaagttaaatgaacctgcagctatatacatgtaatttgtaaataaataataataattatttctactaataattgaaaatctatacggccagttaatattcccatggagtatgctacaatttatatataaacatatattgctgtgtacttttaattgttgaaagaaagagcacaaaaaattatagagattatatatgtttagtaaac

SEQ ID NO: 46185 - DNA, 3502 bp, Cannabis sativa
tgttgaatatgcttgccacttgttcgataaaaagcctctatgttgcaatgtggccatttggaatgcattgattactggatgttccagtaacgggtatggtgaaattgctgtgctttactttagtaaaatgcacaagagttctattaggcatgataattactctcttgcaagtgttttgagtgtgtgttgtatagagactttggattttgggagacaggttcatttgttagtgattaaaactgggtttctaggaagaacttctgttgttaatgctctacttacaatgtatttcaactgtggaattgttttagatgcatacaaggtatttggagaggctgatgatgatgatgcatataaggtatgtgatagtattacttttaatgtgatgatagatggtttagcaagggtgggaagggatgatgatgctttggtaatgtttgaagagatgcgttctgtttgtttaaggccatctgagctgacttttgtgagtgtttttaggtcgtgtaaagttgctagaattgctcaccaactacatgctgacgctattaaattaggatttgaagctcatcccgctgtgagcaatgctgcaattaacatgtattcctgttgtggggatttaaatgcagctcacatggtttttcaaagattagcaaacaaagacattgtctcatggaatagtatgatctctagtttttttcaagggaatgatgggaaattgggtatcttggcctatttggaaatgcagagggcaggaataaaaccagatgaatttacttttggaagtttgttagcaaaatcagagtttgttgatattgtggaaatggtacaagcccttatatgcaaaaatgggcttatagctaaatctcaagtttcaaatgccctagtttcagcatattgcagacataggaaggtgaatcttgcatatcgaatattccaagatactgagtgcaaaaatttggtgtcgtggaatacgatgatttctgggttcttaataaacggatttcccgtggatgggttagaacaattttctaggttgttgatgacaaacatcttgccaaatgtatattccttgaccattattctaagtagttgtgcagccatttcagccttaagtcaaggtaaacaagttcatggctacatcatcacctctgggttttgtccgggaacttgtcttggtaatgcacttattacaatgtatgcaaaatgtggagttttggattggtcactgagagtttttgatacaatgattgaaagagatgctatctcatataatgctctgatatcagcatatgcacaacatggacaaggagaggaggcagtacgttgcttcgaggtaatgcaaggcttgtctaggatgttcaaaccggatcaagccaccttcacggctgttctttctgcttgcagtcatgctggtttagttgatgatggtataaaaatattcaactccatggtgaatgattatggtcttttagctggagtagatcatttttcttgcattgttgatcttctaggtcgtggtggctatcttgacgaagctgaaattattaccaatagtaagcatcttaaggcacattccaacatatggtgggcattgctcagtgcttgtgcagctcacagtaatataaaattaggaagaatagttgctgggattcttcttgaaactgaaaaagataatccttcagtttacgtgttgttagcaaatatttatgcagctgcagatcagtggcaagaagcagcaaacactagggaaatgattagaagaacaaagatgacaaagcaacccggctgtagttgaactaacttcttttgtgcaaatatcctttttttagggtgattttgtgtaaatatctaaaggtgaacatataagcgacatggatatccacaaagtgattcataatagaacttaattttgaaagagaagttatgagggaaccatcattcactctttcttcttggaaaatgttgcatgtgtgaggaagaaaaacttgtggaaaaccaagccatcaacgcaaaagataattaaaaatcagacaattcccaatttctcaataaatcaggaaagggaatacaaaatgcagcaaagttattgaacttcttgacgcaattcaactaaagagccaaaagaagttttaaaccttttcccaggtttttttttgttgttgttgttgtttagtaccactgtagcacatgaccagaaaagagggcagaaaaagaaccatgagaagcaatgtagtagtcttcttataacagttaaaacataagtcagaaaaaataacttaattctcaaccaaatgcactctaactcagttccttggggaaaatcctgtcatttctcaccagccaaatgaccctcagcatagtaaaaacatcatagttccaaaacttccttttcttatcaaatccattgcgaaactcttggaccatcaaatcataacaaatcttttggggagcagcactaatagtcagaagttgcagccaaaagaatttgaatcctcacattgtatttcaattgtggaattgttttagatgtatacaagatatttggaggggctgatgatgatacgtataaagtatgtgatgatagatggtttagcaagtgtgggaaggggtgatgatgctttggtaatgtttgaagagatgcgttcggtttgttttaaggccatctgagctgatttttgtgactatttttgttcattaaatatatttttttcgacaatattttttcatttattatttggattttgagataactccagaaatgaaatgaagaataatactcaagaaaataaaaaaattggaactctggtaacaatgtcttgcactcttgcttctacgggatttaacaacttaagggtgacactgaataaatatactctcttctatggaaagatttgagaattgattcatggcttcctagtttcaataattacttaaaaattgtctgaaacttgtatgtgtataaacacatgaataaatgaaaaacaagtgaaaattgtctaatgaaatgtgcattcacttgcttatattgcatttttagtaactaccatatttcagaacttgagtgagcataagataaaagtgtgtaaattgctttgtcctccaaacctttattggctaattgctaataaatgtatatccagtaattagcattataaaaataacttaaagtatttattaagaactacatatattaattttatccaattgttaataagctctaaaaagtatataaatgccaaaaacaaaacaacaaaataatcaaacaatattaataagttgagaatatctatcttcctcactgacccaagacccatctccaacctcaaactctgaagacaacccattatagaagtagaggaaaaggttgaagaagaaccaaaactgaatctttactctagccatggaagctcttggtccagaagaagaagcatggttattagtagtactaggaggggtctcagtcaaaatgcatgagatcacacaattaaaaaatggttgtttg

SEQ ID NO: 46186 - DNA, 2754 bp, Cannabis sativa
ggtgtccactaaattggtatactaagtatattggtaagtgtaacctttctttgcctcttgttctctatccgcatacttttttttgaagatctcttactccgagagatctgagcaacatcttgtacttatcgcgggaggtatggattgagagggatattagaaacctactccgggagccatgttaccccctagtgctccaaaacttgactaagctggggtaagagcaaggttgtgggtgtatgctggtgttgcaaagaatcgcacactaggcgttctacttgtccacgatgcaactggaagggtaattctaagaaactacgctctgggagcataccctggaccaccagtggggtaatatcctccgaaagcagttatctgtgcttcctctaaattgatatatttttaggccctcttctggaagtcctgaaggctagcggctccttcctgttagatctcattccaaaaaggggttgtcgttcaaattctagcttgtattaatgctgattgctatccgccatccatctttttagtcttgtaagcctcttccttaaatctttttatcattttttttgagtttcaactggtagttgcttgatgttggtcaaagtgttgactttaaggtttatctttctggctaccacaaactgccttctaaagctaacttgtaacttgttccaatagtccatggatctaagttctaaccttctaagccactccttagtggaccctcttaatgtcagcgggaaacataaatacttcacgtcattactgactgtcatcacgcaattaaacctggataagtggtcactagggtttgagtctcctgcatacagtgtcatttcaagcatttttaaattctttgggagcttagctttaaggatgtttctagtacagggtttgcgttcctcaaaatcacactccaaagctctcccctttgtctctaggagactttggctatatctttccggaggatggcaagttcagctgaaatcccctcgtttagggcactttctgagactggtattacttgtttctcccactccaagcgatttctaaaatcagtgtctttggcattgagtttctatctcaaatcaagagtagggtctttgtggattttctccgttctctcccccagctcttggtgcacggatacgcttttccagtcttcctgatcctgagggccaacatttctgtttggaaacctacccctctatggaccttttccttaagggagattagagaaaactttccatggatcttgagccttctttttctttttagaaatggccattgggttcgtctaagggtatccgatagggcttggctcttgatttttgtgcctcgaattatctgccagctgagattcctttcttgttttgtcttgcccaataggtcctgcacttggatgcacatggatgcctttagtacgatcattatttcttgcatcctcatgttctgctcctttttctctaccaacttggcttcatggtcaaggactttctaccttaacaacataagttcggtgtaactaccatcatcatatgcttcatactcttgatttttgtcatattctagatcattggtttcatcttgttattctacttctatgtctacttgcaaagccacttcctcttcgtctggccccctagggccttgaggtggacgtggttggcgtgcatggtttctagtttccaccatcgtactgagaatttacttttgatattcttctattcttcttacgtaaagccttctgcagttctcaatgaaagtaccaaaatattgaccgatattttgggcaactaattaatgagagctatttaaatgattagaagagatttaatacgagttttggttggggcattaatgagtcttactccatgagtcactgctatttaatataatagtttttctcacagacgatgttttacaccattttttccgaccccttcttcagaatatagttaggtatttacaacttcataaagatggaaaaaaggttactattgtcgcaagtgttgaagaattgcttgcacaagttcctaggttcaaataatagagtatgtatgcctgtatggtaggttgcataagttttagctaggtgttgggtaagattatcccttaaccttccttaattcatgtgatagttcattatgaaaccgtcataaggctcatagattagagtgtaatcaccaaataatgggtttaatgcctctgacatgtcttttcagatccattcacagacgcttcccccatgccgcatttaatgcacctatacaagtcacatccgggacctaatgatcggccctagaggctttgcctagctctcggagatgaataaaataccttgacattaggatgtggttgaagctctcggagggaccttctgaacatgactactaaatctagataaaatctcttagggagtttatcataaatatttattgacctttaaacccactttccacctatcttatttctagactgccacgtatattggaaaaaagaggggcaacactagtgaaaaggggtatcccctagtcggtcaatttctaggtcggtgagttttgggctgatcaggctttgtaaaaggctcttaagcttatctattcgagcttgcatcactaaataaacttgacgtgcctgtggactgacttgtgtcacctgtggacaccctagaacatactaggcacattgttattacattcatcggctgagcattaggagggatgaattgtctatcctgtccctttctac

SEQ ID NO: 46187 - DNA, 2249 bp, Cannabis sativa
tctgtcaaagaaccaagccagcaaaagttgttcaagctaaaacaccatccaaacacaagtcggcctcgctcgaaaaaccagccgagcaaggtcgtatttcctaccacggtaggtcgagacactgctttcattcttcctctatcaaaaacccagcaactgtcggttgttccctccaatttctggtgactgaaccagtgagtaaatgcccaaatattcgttggccatcccttgtcaacaatccagtagaagcataatcccttgcacctagatgagagcataaaatagccagtcccacaatggtgagttgagtcgttcatgggaagctttgattcatgcttttgtttggtgtattcacgccctctatcaaaaatccacacaaaaaatttgagtattttcgtcttccatatccaatcgctcagaccaaattgtccccatgaacaagaaatgcttgattttcctttgtcaaaagtaaagccttctcgagttctcttctgtctaaatcgaataaggatactatgacgagattggaatagctgcggtagcaattttatcgctacttttaaaacagaagcccaggaaaaagtttgaaaaacattcatccgccatgaatgaagggaggaagaaggtatatcattgtaaatgaagaaacatagttgtggggaagagatcacgtgggattgctcattcattagcacctgttttcttttgtaatgtccaggccaaaataaaacatctaaatgggctttactagggtcccattggatcagcccatgagtcgtcaagtatttcttgtttgagtgggcccacactaaaaagaaattaaatggaatgggctcgaatcttacctgatattgatattggtaagattttaatgctccaagaattaattgatccattattttattagtattgttgtgggcttgatctgaatagtaattctaagaattgggcctgccttcatagggttggaagatcatgtttgtcaatcgtatacttttggttcgtcttctccacttcgccatctgcgattgctcaaccccaggggcgctatgtttggtaatcggccggctcaactcttcattgatcaacaccggcaatgtcctcggtaccagtggcgacgtcttctcttctcccgtcaacacccacgccggcaaaagatcgttctccgacgacactttcttgtcaaacgactccaacaacggacgaacacaaggagtccatgaaaagatctctccctgttgcttctccgacgtcgcttccaacctctcgttgacactcgcggaagccggttgcattaaatataattcaccatcaccttcgaacctttcgaatctgcagttgattccaacgtgagtcctttgatgcgactccgagtttcccaattatggtggaattggcggaggttcatttccgttgcaatgcttctccatctctgttgtccttttctttccaatctgtagttccattgtcgtgtcgctgcaagtctttgtctggacatgaagagtttgcaatccattacacacagtttctaatgaagaaaccaagtcaccagcagtgagaacttcagcattgatcaagccatctttctcgtaagtacttatatatagttgtggatttatttgctctattggagagccacaaatctgcaatttaggggctcgattgtgcgattgagaaataagacaatcattgatgaattttctttcctccatctcatctctaacgagtttgcaagtatgatattgggtctgcaattcttcttcaacaatgagcgcctgggctaaaacatgagcgagtgtcttaggcctttgctctcgcaccttaatcgccatctccattggaagattcccaaagaaaatatctcgtagaaaagtttctggaatgtttggtagcatcgtcgcaaccacctcaaattgagtctagaaatctctcaccaaattttcatattgtagccccatcaacctcttgtacggatcatcttcggtctgactacagcaattgaacatcgcgattcgaaactccaaccacttcttgaatgggtcttgcgtctccaccgcttgaaaccatcaccaagcaactcctctaagacaggccttagcaacagagaccttcatgctttcacgaattcgatgttgtcgaaaatactcttcagtgtcggtgacccacgcgtatggatcatcgccgtaaaaaatgagcttcgagttttccatggtcgccagatcgatttgctctgataccatttgatagga

SEQ ID NO: 46188 - DNA, 2426 bp, Cannabis sativa
tgttcattgttcatggtcattgggatgtttgattagcaatttttttttatatattacatagtgaaaaatattaaaatagttaccggtgtctattactctcttcctatgtgttatattgatattaatgcaattaagtatcgaatttcatatacgttaaaaaaaataatatcaaatcttatataagttaaagaatattattaactaatcataagatatcacctctagatagtgctagacaccactcatatccaataacaatgcacataaagctcgatatttaatttgactaataacaatataacacgtaacaaaattttaaataccattaatatcttttagcatttctctaaattaatttatactattactagacccaatattaaaatatagtaatgcttaacagttaactctattacattttttattataaaatatcgctagccttttacactaagaaatgaatagatagaaccgattcaattaacataattactgaaattaattgaatgagataagataacaaaatttaacatctaatatataattatatcgaatctgaataaatcaaaaaatattgaaagtggtccaataaacacctctactaaataccttaagatgtcacttaacatttctcattataaaatggtcaaaaatatatttatccacaaaaattgtaaaccattattattattattattattacactatttttactcttgtatatataccaaccactttttcttcattctttcttatttatacaaatcaaaaaaaacacaaagaacaaaaattcatattaacaatctcaaatcttaaccttcccaaaacaaaaatggctctttcctccaaacccaacaagatcttctcttcttcatcttcatcatcaccatctttgttcttctctcaatcttcaaattcatcatcaaaatccaaatccaaatccctctctttcctccacacctcatcaaaatcaaaaccacaactaaaaacaacccaattcacaaatacaaaaatcaatagcatactcaaaacgacaacacccacaaccaaaacgacaccccaaaaaaaatacccagaagaaatttcatcaccaaaacccaccattttagtctccgaaaaactcggagaagcaggtctccgagttcttcgcgatttcggccacgtggaatgcttgtacgatctttcaccggacgatctctgctcgaagatctcagactgtgatgcgttgatcgttagaagcggtactaaggtgagtcgtagggtttttgaggcctctaatgggcgattgaaggtggtgggtagagccggtgtgggaattgataatgtagatctgagcgccgccactgagtttgggtgtttggttgttaatgctccgacggcgaataccgtcgccgccgctgaacatgggattgctttgcttgccgccatggctaggaatgttgctcaggctgatgcttccattaaagctggtaataattattaattaattaattaattaattactgaaaagataataataataaatattattaattaggatttatgattatgttttaaaaattcattattaggctgtgttttttaagataaaaactttaatggaataataataataatttttaagtgaaattattttatatactatttttttaatttttttttaaaaaattaattattatgctgtgtttttgatgataaaaactttaatggaataataataataataattaaactttaagtcttttgttactttttcattttttttttaatttttaggtcggttgttatataaattttaatcacgatttaggctgttttgtaagttggtggtaataattaattaattaattaattgctaaaacataataataattattattaattaagattcatgattatgtttttaaaagtttaattaggttgtgtttttttttgttaaaaataaaaaagtaacaagactataatttcattttgttttcatttataataataatattaattaattaattactaaaataatcatgataattattatcattatcattaattaagatttatgattatatttaaaaaaaagagaattattttatatactatttttatattaaagtaataataataataattcaattgttaattaagatttaaaataattgaatgattattatttaatatatatttatgaaaatcaatatataaaattaatttttgtaaaaataaaatttgatttattttttataaaaattatttattttaatatttttgttacaaaatacatgtgaaatttactattttaaactaaatatccaaataattaatagtgtaaatcacatgatttaaaaatagttaattatttactcaaaaaaaaagttaattattagttattgtgtttttcaacatgttgaggtgagattaataaggaataa

SEQ ID NO: 46189 - DNA, 844 bp, Cannabis sativa
gttcttggtacgggcctagccagctttatctctgagccaaacctgcctttaacccaaagttgtaaccatcaactcccatgtgatcctttgttaaatatattgcaaaaattaattgtttaaaagttgacaagtagtgtccatcaccactttcagaacattatattgttattgatacaatttaatattaaattcaacacatttaaatttaataagttacaggaaaaattgctaattactagtaaggcgccacatcatggtaatattggacacttatatgacttttggttggagataataaattgaaatggaatggaaaggaaatgaaacaatttttattgagatattttttctatcattttgttagaatttctattctattttgaaatagaaagaaatatcatttcaatgtaggatgagaaaaaatttaataattttgttatgcgatttaaatttaattccattttattcatattatttcatttctatttcttttattcaatccttttaactgccaccttaaggcatctccaatgtaatactaaaaaaataatgtattgctacacatttaagagtatctccaatggagagctataaatgtagtgtattgatatttttaagaatattttgttaaaagttaactccaataacgatgtaaaatggataccaaatttggttcaaactaaaaattgtgccaaatttagaacaaaagaaaatatatgtgataaatactacattttttattacttatttgccactcattaatactattcattaataaaaaaaagttttcttatttgtaagtgatgtgatcaatgcatgatcaaacacctcgcaaataacacaa

SEQ ID NO: 46190 - DNA, 2429 bp, Cannabis sativa
gagtctgttccacaatatcccaccagatctgggtatgctcttggaacataaatgcagcataattaacccatttagttcatgttactcccgtattttccaaaatacgggtaacaatgctaatccattgttatgccttgttgatgtcggtacctcccaagaacgtcagaggttgtagcttaacaaagcgctcaaagattgagtcccgatgtggtagtaggttacccaccagtactagaacaggagttggtggtaacacttgctcagttggagttgcctggatcggttgcctaaactgatgcaactcatcttcctaatagagtataatggtttgcattttgagaaacatctgttgccagtcagcaagtggattagcattgctaactcccgcattatctcctgaattttgtggaggcacaaaaggtgtcagtaaattagtttggttattaccgggctcgccctgtggtttggttgattgatcaagatccattttctctcaaatagccctaaaatcaacaactttgtcgagtcaggcaccaaatccatacttacacacttattgtcttaaccctcactcatacatactacttttttttttcaaataaacatttattcacataattactaatcatgattttcttataacattatatcttctaaatgctcatatgctgcctataatagtaaacataatcacaaaagcagttaagcatttagtctcaatacttactgcaccacgagtcgagcttgtctttggcgatgattgtacatgttcagctagactacaggaagtttaaaaactttagcgctctgataccaaattgtaacgccctaacataaggaacaccacatattgcgactgaacataaactaatcttgctaatttgggatatactagatctaagagcgaaaattaaactttaaaatatagaataaaataataacgtgtaatgataaaactttatgataaatccaaaaagagtacattatatttcaagatctcatataacattttcaaaatattacaagtcattagtacacaccgacctaagtagcaaaagtggagctttacaatgattctcctgttagacataaccctcgtggtctagcttgacctgaacatatacaatgcacttcaaaagccctcgatctcatggctgctcaactatcgacttaccatttcctgaacaatagagcactcgtgagccaagacccaagaagatagtataaacaataatatgaataataattgcaatctcacttaagtgttgatgccagtgcatctattatctatttgacatagacctacgtactactctcaaacatgtatttataataaggccttatgatgatttatctcaattttaaatactaaatctaacctaattatgctttaactgcacaattctttatattaacataagtaatacattattgcattcacattcacatacattctagagtaatagccctagattacataattgctaaatttagggtaataaccttaatctcgatttcctgcataatatataaaaaataacatacatgagcgccattgtgctaactcactgtcttacctggtaatccaagtatgtcgtgattccaaatccccaggtgttaagtaagcgtcggtaatcctagtcacacattcttgggattttacaaatagggttaatcccaaattcattttcatatacgtaatatgaactccagttatagactaacacatagagctcaaaatgagatttctaatgatataaaaaatgtccaaaacagagttcagagtcaaaagttatggcaaaaacaagaaaatgaaaaattgagaaaaacagggccctcgtcgcggtagctccaacctgctggagctcgctgcggcgagcctttttgtggtcgcggcgacggtccctgaacccacacaaaatccaactttttcatgctttcgaatccaaccaaaaatcttaccaaaattcatcaaattattatgcataaactaaatttagctcatcacctatccaatttaacattggtaagaaattgagctcaacaagtagctcaaaaaaacaaatccacaaacacaacttagtatacaacaggaaatcaacatggcacaaaaactatcaagtcttgaaacccataaattcaagacacaaacccaaaaattcaagatgatttctctagaaattcaatatcaaaatccaatccaaagacttccaaacaacatggatgattctagcataaacactatagcacaaccatacaaaaattaccacaattcactagaacgatcaatgctttagattccaggagaacaacgagggatggatagatttatggctaagtaagatccatgcttgccataagttgatcctatggtgaatggcttctaatttcctgcctacttgtgaaaaaagctttttccttcaccaaaa

SEQ ID NO: 46191 - DNA, 3346 bp, Cannabis sativa
tttaacatcttgaaagcacctgttattaaatgggcattcaaacaataagtgcttaattgtttctaaatcagtgccacataaaagacaagttccatcttgacaaatctggaattttagcagacaacttctggtttgaagctgattttacacagccagccacaaaataatcttgtgttttggtatattatacatattccaaacttctctatgctatataactttaccttggtcatcacaaaagagtttatacacttggtggatactatattacttaccacaagaggctgcaaatgagggattcttctatgtgtttctttaagcttcacaacctgtctccaggtacaactgttatctatggttgattgatagtcccaccaatttgagtgtttttaagtatacgacatgcactcatttcacccacaaattatcttgttttgtagctatagcccaaacatatctccccagagctgcttcattccataacattgtattcctcaagccaagacctctctctattttttgtttgcaaagacggtccctagataaccagggctattagcttcaaccgagcctttccataaaaaggacctacatatggtatttatctttttcataacagctttaggaagaattataatttacgcccaataggaatgtattgctatgagcactgagttaatcagtgtaattcggccagcaaaggaaaggttccgagaccctaaatatgaattttatgaaccatcttctctactatggattcacattctaagaccgacaattttcttgtacaaattgaaattctcaggtatttggaaagaagatcacttctagcaaaacccgaagcttccagaactctttgcacttcttcctctttcataccacaacattacaaggttgatttcaattcacttagaaataatccggatgacataaaaaatagcttgagaccttgtaaaagatagtaaataaatttaaaattaccatgacaaaatgataaaacatcatctggaaagtaaagatgattaagttccatatctgagcacctatcatggtatttaaaatctatttttctttccacttttgctaaaatttgggagaaatattccatgcacagaacaaatataaaaggggacactggatctctttacctgagccccctcttagcttcaaaaaaaacatgcattgctctattataaaacaagctaaatttaagggttcgaatgcataccatcaatagttaatgaattttggcggaaaattcgtagcagccagcattttctcaataaagtaccactgtaaagtgtcataagcatttcttagatccagtttaatcatacaattcgaccttgtgcttttctttccataatattttaccaaatcttaacaaaccattatgttgtaagctatgtatttatgaagccactttagttctaagcaactaattctggtagcactattctcattctcataaaaagcatctccgatgccactttataaatgacattacaacaagcaattattatgtagtcactaacactttcacggcacttcactttagggataagtgtaaaggatgtagaattcaactttttcaacaacctgtctgtatgtaaaaaggagagtacttcactggtcacatcttcctcaaaaagatctcaattatccttaaaaaagataactactaaagccatctagcccaagaactttacatccgggaatgctgagtaaggcctctttaacatctactgtagtaaaaattcttctctaaataaccttgcttttcctttgttagtcacagaccttgttgcatcagctttataatcactggcttcatgttagacattctcatccccagtagattagtgtagtactttaaaaaagctttactaacctagtttggatcatctactgcaataaattttttcaaaaagtgttattacaaattttcacaaacaaattttaaatttttcttttaattatattttaataattttgatctattttactttcttaaccaaaaactaataattatagacaaagtatgcttttttcaacaaaatgcagaaaatcttgcttctcaatagcttctttattatatatttttttaaatacttcactaaaattttactttttttttattttacttcacaaatttatattgtaccatacattagatttttttataattttctctaaaccatttaaataatatatttataatacacacaaataataaaatattatatattacataatatttatttatttttacactaattagaattaaataaaatacattattaaaataataaaaaaaattattgataagcactaaaactaagataactttaagctacatttagctaagcactattcataaggtaaattttttagctattttagctcatctattagatctgcttttaacctttttttttaaatttttagagcactcacatcaacttttttactctatcatttaaaatataccattaaaactttacttttttattttatctcaaatttttccattacatcatacaataacttttttatttttcttctctatttcaaaattaatacgtttgacacgattaaatacatattaataaacaaagtataaatattaatgaaactataatagcttatacatgataaaatgaaaaaattaaaccgatttgacataaaattaggcaaaatattaatgaaactataatagcttatacatgataaaatgaaaaaattaaaccgatttgattagtttttatgtatgtgggtaaaataggtattaaataaaaaaaacattgtgttgtctaacattaacataacctaaatatgacatgtttgtatgtcacgagtgtagctatttataaccatgtcatgtttatatttacattatatgacacattattaattatgttgtgttcgtgtttaatataattatatgttgtcaaaattcaattaatctaaaatacaatataaaattcacgaattgaagccctattagcaccattaacactacattctatctccgtagaattatccattcttcattaacgttattaggtttttttattcatttcaagtttccaacttccctattctctctcctattcctctcttcctctcattctctatattctctctcacaaaagaccacccaaactcatcatagcacaccactcagtgttatattatttatcaataatataatatataagtcatacatcgatcggtttagtcggttgatactacatattttctaacccaacgtaaagatcagtttgtaaaattctacatgcaacctgcccaatttttttaaaaaaaaatcttaacccgaccaacg

SEQ ID NO: 46192 - DNA, 1723 bp, Cannabis sativa
  modified_base (1635)..(1640): a, c, t, g, unknown or other
tatgataatcgaatttgtttctgctcgagctgatcaatccttgtttataaggatagcagtttctcctaccacatatgtgcttgtttatgtggataatatttttattacaagtagttccaaggcggctgtttcaactctaatcacatatcttaatgcatagtttgcattaaaagaccttagccaaatacactatttccttggatttaaagctcaacaccttgatgatggcttacacttgtgtcaaaagaaatacataatggaccttcgatgccatgctaaaatagattttgcaaactctcttccaactcttatgactggtggagaaaatctagcagccttcaatagtgatcatgttgctgttccacatcaatattaaaacatagttggagcatttcaatatgctatcatcaccagactagagattgcttatgttgtcaataaggtgtctcaatgcatgcacaaaccacttgagtctcatctgaaagtggtcaaaaaaaaattaggtatcttaaaagaacttcagactatggattacactcaaaaccttgctctaaactagttttaataaggttttgtgatgctgattaggcctctgatcctgatgatcgcggatcttctttcggtttttgcatctatctaggctcaaacttggtatcttggagtttcaaaaagcaaaagaaaatatctcgatccaatacttaacttgagtattgaattcttgcaaatgccactgttaaacttgtctggcttcaatctttactgtttgaagttggtttatcaaagcttccaatccctactatctgttgtgataatcagtccactgtccttttgcatgtctacaaatacagtgttacactccaaaaaaagcacattaaactagatctttactttgtcaagaaaaagattttgaacggccaactctatgtaaaacacactccaactcaagacgaagttgcttgacatccttaccaaggctttatctacacctagatttgttttgttgagagacaaactgagtctggtatctttatcttagctcgtgggaatattagatacaattgttaggtagtcataattaattatttattttctgttatctaactcattaactaacctgttcaacttgtatttatagaacacttttgctcagattcatcaatcattgaaattcatttcaattactttttcttctcttcgttcttattcttaaaagtttatagttttgaataaattaaaaagttttaaatatgtacttgtaaattgaaatatcaaaaaatttattgtgcatatttatactattccaaaaaaaatttaaaaatttaaaaatttaatattataactataacaaatattcctataaaaaataagttaaaaaaaatatgtttcaatataagtttttggacacacaaattatgaaagatattgtaatgagtaaaaaaaattacttcatatactaatttttttaaaaaaaaataaatttacagtttaagtttttaaagtggttttccagaagtttctatataagttgttatacgattttttgttgcgatttaagttgcagcgctagttgcaataaaagtttctatatataatttcgtaaaaatataaaaaaaatatattttaaagtgtaaaaannnnnnaaaaattaaaaaaaaaaaacttttttttattggacaattagttaattttatcttcccagtctcattgacacatgggtttagtc

SEQ ID NO: 46193 - DNA, 2288 bp, Cannabis sativa
aataaaataaaaaattttaaattattaactttgctcgcacaatctggtcttgatctttcgtactggtggcttgcgtttcaaaaagcaattttctaattaatagacttccaataccaatcattgaagacatttcaccatatgaatgattgtttaagacacatgattatgcctttttgaagccctttaggtgttctcgtttcccacaccttaggccctacaatgctcataaactctaactcaaggcagagaagtacattttcgttgttactccctgccgcataaatgttacctttatgaaggtctcacatgcagaatatacatagctcgaaatgtctctttcaattaagatgattttcctgctcattcctctataaaagaatctcaggtacttttgtctgaaaatttatattttcctacaactagcttctctacttctccaatattaactaatgcacaatttcatgttgctcgcaatggtgaaatgccctctccatcacatggagtttttgttgccattgttgttatgtctgttgctattgcccctatgcctgttgtcactgcctctatgcttgctactactgttaaaatccactttaggatcccatgctactgttatctccctctcataatctcattgtaccaaataacattcacgcatcatctctgatctaaattgtattgcctcagccaccacaaatgcccttttccaacacttcctctcccacaccagttccttcccaaccatagttaatcaattcaaatcaaaatgacaatgcaactccttttactgtaaatactcatccaatgtaaactagatcaaaagtaagaattcaaaaacataaagcttacatagcttcccttcacctttcttcccaaatttattccttctgaaccatcaacacttaaacaagctttgcaaactgagttttatgctttactgaaaaataaaccataacctcacatgacaatagttagtaacaagtgggttcaccgagtgaaacttaatgcaaatggatcccttggaaagtttaattcacgacttgtagcaaaaggatatcttcaaactcctagaattgattaccaagagaccttcagacctgtggttaagccagctacagtaaggcttttgtgctctttagttgtttcatacaattggcaagtaatttagctagatgtttcaaataaatttttaaatggtaatctacaagaaacaatctacatgaagcaactttcgagttttgaagattcaacaaaactacaccatgtttgtcatcttcacaaggccatatatggcctgaaataggcaccccgagctaggaatgacaagttaaaatatactttgctgagtagggatttctctctttcaaggtctgatacatcattatttattcatggtaatggacaaaattttctagtgctcctcgtttttgttgatgatattctagttacgggccccaatcaagatcaaatctcaaaccttgtagctgatttgaacaacgaatttgaagtaaaagatcttggaccactacattatttttttggagtggagatagctcgaaataggcctggtatgtatatttctcaatctatatacataactgatctacttagttaagcttcgctttaaaggtgataaaccaagtccatctccaataagttcatctcacaagctcagcctcacacatggagaactattttctgatcccactttgtatagaagtactttaggagcgttgcaatacttgactcttactcgacctgatgtgacattcattgtcaataaattgagccagtttatccatgctcctaccaactctcattgggaagcttgcaaaaggctgtttggatatctcaataggacaattcatgagggacttcttattagaccaacattgagattatgtcttcaagcttattccaatacaaattaggccagcagtcctgatgatagacattttattggggttatgctatattttttggggataacttggtgtcttggtttactaaagagcaacatgctatagccaggtcaagtatcgaaagagaatttcgagccatatatagcaaatacaacagctgaaataaagtggctttcttctgtttttcatgagctgcaagttactccaaaagtagtaccaattatttaggtggataatcaaggcgagacttctcaagctgtaaatttaatgttttatgctcggtccaaacatatcaaaattaatatgtatttcatgtgtgatcaaattcttgcaagacaattggaggtttgatatgtttcctctgtg

SEQ ID NO: 46194 - DNA, 2701 bp, Cannabis sativa
tttgttgtctctttttttgctgcatattaagcaaaggaccagcaagaaaagccaatatgattttgatgagacctttttcaattagcccatttttcggtatgagattctttggccctgtatcttctgcaaatatgctccccaccttgacagaatcacttaaaatattcactcctagatactgatagatcatcatgagtacccctgaggaagatgaaaagttgccagtagggaaccaaacaaacaaaggaagtgaaacattctcaaaaatattcttcaaatgaagatcatctggtataaaaacactttccttgtccaccaagtgaatcttgtcatgcgaacatgttgctgcggtggcacaaagcttggtcaagtgttgcttgaaagcctctttggtttcttgcttccaatatttgagatgccttctcagaaaaagtggcattgtaccttagaaacatggtgatcactgcttgaagtccaatcattccataactggaaatagtcatccagtgaagggaattctctaactccaaaagctgacagaaatagaggtagcaattctgcatcataaaaatgagaaagggaatacaagtgtgagccaaatagatcgttgtcgtcatcaagtatacatagtttggactcaatccattttcccttgtcaccaacattggttggtatccagacaagtgatttgaactcatctggcttctctggcttccagttgaacagactaaggagtttatacagccttgttatcagagaagtgtttgtctgcgaatagagaagctgataaataagagagcaaacctccatagaatctgtttttacaccaatggcttttaactgctccttgtacactgatatgtctgactcgtaacacttcacatcaatacttggtaaatcagtctgattcaaaatactttcccaagttgaatcaaaaagaatacattctttaggaacaaggtaaccatttgttgtctttagaaacttgcttttagcaatgttctcaagaaaattgtcaggcaatgacttatcaagagacttggacatgacagatttgaggcactttaataatgccattgtaccagcagttgtgacaaattcagatgcaataggactcttcagaccttcaagaacaagtccagcaccaccctcaaagtcagtaatggcacccaacatatgcagttcatccttgtacttgtatatgaaaatgctatagaacccatcgtcgattagaggaagatcaacaaaaggcgagactgctccccagttcgtgctgaaaataattgattggttgggagccttgtaaccgtggcgtgtttttaaccatttctcagtaaacaaacacctcacttcagagcatcctgaaaacaaagtttgtctctcttctttaaaacactttaacattgatagcaccatatcaggtcccaattttgaggaacttgaaagaatcttaaacttagtagcaatcttcttagttatactagcagtatcaaccgccactccagctgtactcagttcactaagatattgggaaagctcgtcaccatagtagagttcatcaattgtaggaatgtgtaaagctctcaccaaagaaccccatactgaattaggataagcagtttctgaaggacttttgaacccagaattcgttttcaaccaagatttccctttaatcctctcaatcaagccagtggcagaagtgtcagataatttgatgcatttaagcataagcagaccacaatcaacagttacagaaggcaaatttggagggaaacttgccttttgcgcaatcaatcttaatgattcagcatgatcagtgataactccaagcatctttagttcagacaagaaagaacctaattggcacccataatatgcttcatcaacaagacgaagatcggtagtagtcaaacaggaaggtgtttctaccttatatggcaagagaataaccctttcgggggcattgtaacattgatgagtcttcaaccactttcccttcttcatgacttgcagccatccctggtcaatccttttcttcatcttcaagaaactaatgagtgtcaacaaagagaaggcctgctctttactgattccagtagaactaagagagacaaatcgatcagtgaccgatttttgcacatcatcagacccaaatcccacaccaagaaatctcagttcatcttgatacgtactaattttgtcaccatagaactcctcttctataattgatacatcattgagaacatgtttcaccaaatcaaacattgatttgcctgtttcatcaggaagaatggactgccttggagatttataacccgtgtatgtcttcacccattttccatcttgaatgcttgccttaaattttactggtatccataagcccctagctcgaagtaatctgatctagtcaagaagcataatcacttgctccattgaaagtggagaagaagctatttctaactccacattaggaggagttagctcaggtagattcatggctttggtatacaagcatataaagtctagaacaaccttttcaggtgtgaattctcccagaaatgaaccacttttagcatacacatcccctatatcaatgtattgttgattcagatatggattttttctaaataacttaaaccacttgctcccaaaagcaggaacaagggttgtatgtttcattatagcttccatacctagttat

SEQ ID NO: 46195 - DNA, 1324 bp, Cannabis sativa
acattgttttggctaatacggaaatgagactctcataatcaataattcaacagatttgttgaggtaaatgctgcaatacatttcatccaaattaaataagtttgtcaaattctcttgatgaaatttgtgttgtgttaattttcattgtagccaactcccatctagtctcttttgaatagcggtacctggtgcttcgtcatttctttgttatacccttgctaatttgttcgagttagtcttctagatttgtcagtcactgttacgagtcgcatttgaaaagtaattttaaaccagaaattaaataattaaagctaagaaaatacagcatatcaacactcagtgttcttaattttcttcttttttgaggcaaagttgcttggtccaatttctatggagattcttttggttctgcagaacataaaaataagtaaatataatgagcagaagagctctatatatcaacttaaactgcaatcgaaaatcaatactgaaagtataaaacaacacagtttatgaagcagcataccttgtcaaaagttcttccgactctttattatcatcgtcttcatcttcaactacatttcccgtagaaagttcttctaactccttacaattatcatcatcgtcgtcgtcaactgcatcagctggaaaaggaagttacaatcggaaggaaaatccattattaggataaaggacacaaactttatacttgataataatattgaaaccagtcttctcaaaagcccgacaacaaaatcgaaataaaaacacctccaaaatcatgcaaatcaaactcccgataatgcaagtttggttgggtcattctctattgaattctcctgaaatccttactggacaattggacatcagatgtatgcagtgaagaaaaactaaaacaaagaatggagtttggccccaaaaaccatgtgatttaaaggttctttatcttcaaataaaagatgcattcaagacatggagaaacaggaaaaacacaaggggttcaacgatatttgaaaatctcaactaaatggatttatatcatatcacacctagaatataacacagattttggaagttgatcaatattttcaagtagggaacaaaacaatgcatacaaatttttcaaaccctcaatcttaaatgaatgtgaatcttaccattctcatcaactacatcactttcatgctcagactctgaatctgaaccccacctgtctccgccatcatcaaagtcccaacgttctcccaaaggaggcatccaaaattcagcctcttctaaatcactttctacatcagaaggctctctaattgcagatataatctcc

SEQ ID NO: 46196 - DNA, 1696 bp, Cannabis sativa
tgcacgatttactacatgtcaaatttcaggtggaaaaattactaattttgatataagtttccaactatgcattactccaactttttcaataacataaaaattgtaaattttttctcatcacaaacaacctttaacaatttgctaaaatcattgtcctagcttttactccaaataataatagtaaaagaatatcatactaaggaatgttagctcttcagaattaagatgatagagtgccatagttgatttgattgtattgtgatcagatgggctttgtctttccatcttcagttgaatgagcatgcctgaaattgaaaataccataaatccctttttcttttgcaagatgttctatttcttcaattttttgcttcagaagttcaatttctctttctatattgtcatctctctgcttcatttcctggaacagtttgaaaagatcatgaagataactttaagtggagtacaccgctgattgtacggcatctaaccagaatcagggattgtattttgttttttttaatcttgtggtgacatcaatatcatctaaattacggctctttataatgaaaaatcagtttcaaacacctaaaccaaatgagtgtaacacacctgatccacactgtaattgtaaagttactgcagaaactaatgcattttgatgtcatttaggcaatagattcaactcagtttgtcaattaaatatgcagatcttattgaaaagagaaagctgcccctaattaaatcacccatactaaaagaacaatattcataaacataacaagagaagtttttccaattgaagaatatgatgcagcaatacaaatatcctaatccaatcatatattgaatgatggattggtagatagatctcccatctcttttataatgcttcattagattctaaaaacaagatggaacaaaaagaaattaggcatgaaagtttcgtcatttgttactcattatttgtaattgtaatacattttcataagttataaactagtcaaagatcatatgctactaagtacttattagtaacctacttggtggaaatgctaattacatacacttatactacgtaacataagaaacatgaaaaaggactcaatccagtttctagttttagaaacttccatgttccctaaaaaaggagttaatactccgaatcacaattgcaggacaaaaagaaaatagaaaagacaattttttctttgtcaggtaataatatcaataaatacctgtaattcttgtttgcgcaattcctcctttctagcttctgatcttgtgcttctctgcacctcaaaaataactgcagctccagcaacctgaagatagtagtaaaactaaaatgaagtaaagcaagattaattgaagaagggtgcagagaggtaacttccttgtgaaattctccatcttatattattaacacacgggccaacttggatattttccatattgatgaaccaatcaagcagtaaactctttacaaccaaagtgtacaggaagaagaagaacaagaaaaatatgtaatgcattcttcagaattcacaagtgcaatttgcagcttcataaatcagcaaacatcaagtatatttagttctactaaaggcaccctttcaatggcaattttgatttgtacttgtgaaaatgtacaaacaatgaattgaacttatgaaaattgaaaagattgcattaa

SEQ ID NO: 46197 - DNA, 1058 bp, Cannabis sativa
aatttgaataaaataatattttggaattcaccacaagacaagaatggaaaaagaaatgaagacaatttgcaggaaaggacctacagcctctgctatttttatgttacaacaaaacctagttagctaggtacatttcactttcatccattaaagaaaatcgtttgttttatcccttttctctcttacaaaattagcacgtgcatttattgatttagatagatttaatagctttcaacgattgatctatatgcacccacgtagccaatttatccatttatatatatcaacaataaaaattaaataaaaaaaatacttctttaataatgtgaggttctctgtcttaattatatagtctaccacacattaaaacaaagtaaattaatgattgtgattgaataatattattgtaaacatgtatcatgtatattaggaaaattattagacctaactggcttttcaaaagagaattgtattcactttattaattaagcagatcaagtaataatatcaccactctataataaataatatttgaaccatttaattgcatgtgagcaaagccttgccttttagggttattattcttaattatgtgtctctctattagttggtttttgaaaataaaatatcatatatgagataaacaaggagttactcatttcaaattgattttaagatgaaaatttatatatatatatatttattttttttttcaaattctaacatttaggctatgtttattaagaaagaaagaaaataaaagggataaagaggataattaatctctttcgtattatatggtatgtactagaagtaaaattagaaggataaaaaatcaaataaatattgaaattagtattttatcatttttaatataattatttatttttattttaaaatgtaaaaaaattattttatatagtttttttgtccttttttttttttcaattttcctattgatgggggattagaaattgtatatttgaagaggaagggtctcctttccatcaattttctcctttcttttctatcttttgccaaacaaagaaattaccaat

SEQ ID NO: 46198 - DNA, 1685 bp, Cannabis sativa
aacaaaactaaccaattctaattgtcacaacaacctaacaaagctattggttatcatcccccctcaaacaaaaagggtagaaaccactttgagtttgtctttaaggtagtgaaatcgatctttgggaagatacttggtgaagatgacagcaacttgatcaacggaaggaacatatctcacagcaagttcatgattcacgagttgatcatggacaacgtgctaatctatctcaatatgcctataccgagcatgaaaaataggttttgcagttagagcagctgcaccttcattgtccacctagattataggaatgtcagctacagacaaagtgttgatctatctcaatatgcttacaccgagcatgaaaaacatgatttgcagttagagcagctccaccttgattgtccacccagattacaggaatgtcagctaaaagagacttgcaattcagtgagcaaagacaacaaccatttaatctcagcagtagtgttagccaaggcacaaaattcagactaagtagaagatctagccaccacttgttgctttttggcagaccaagaaatgagttttggacctaaataaattgcataaccccttattgaccttcgatcatcaacgcatctagcccaatctgcatcaaaatatgcgtccatggacattcttagaacagatttcaacagaaggcctttcgagatggtacctttcaatctcaagagttttttccaggcttcacaatgaataaactgtgataacttgtcaataatgtgtgcaacatcaagtctggtcaaagttaggtactgcagggccccaagagtgcttctataaagagttttgtcttcagtaacgcacagtttgtgagaggtgctagtaggacttgagcaactctctgcaccttcgaagtgaactttaaccaacaaatcagttatatattttgtttgacagagatacatactggctgaatttctataaatttcaacaccaagaaagtaatgaactagacctaaatctttgagataaaaggcaatgttaagatcaagaacaagcttcgaaatcaaggtggtattaggacctgtaatgaggatatcatcaacatagaccaatagaatagctaaggtgatgggaaagggcttgtaaaaatatgtagcaataggaagagtattggagtttggagatacctaagaagtagatgatgattgtggtgcaagatagacatgttcattgaggactacatttcgagctatgaacattctaccatttttgtttccacagagatagcccatgtgctttggagagtagccaaggaaaatgtattcttcaaatcaaaactccagtttgtgatgatcatatggccaaaaagggggaaagcatgcacatccaaatgacttcaagatgctgtaataagaagattgctgaaacaagcattgaaaggcataccaccaataagtcaagtctaagccatattgtgccaataaaagtcaagccagtttttgtgatgtgttgatgcttccgttccacactaccattcttttcatgtgtgtgaggacaaggatgttgaaacataataccttgatctctcagaaacttagcaaagggcttatattcacctccaccatatgcttgaaaacctttgataggtagattaaactgtttctcaaacaggcttttaagctgaataaaggtttcaa

SEQ ID NO: 46199 - DNA, 1961 bp, Cannabis sativa
cctcatgggccagcgcccttgccaagatctctccctacacctactctgccataagaatcgccatcgctatcggtgtctcagtacttgggactgcttggtaaaaactctcaataaccctctcacattccaatcattttaatctcgttgttttgataaattgtgaaatgtcttcttagtttcatagggggatttacattaccggaagtagcttgatcggcgctgcaattaaagctcctcgaatcacgtctaagaacttgattaggtaatcgcgaaccttaattcgtacccttttttttttagatttagcagtttggatctcatagtgaagccgttctagattggggttttatggacatatatgtgtttgatgataatggatcatcgcttagttgttgtatgaacatgtattttaagtttaattttgtgatttgtgtgtgggattttgatgaaaattatcgttaatcatatcgtgggaagaaatagcgaaggaggtaataaagcatacagtaatggcatttgcgaaagcgacatttggttaaaaaacttgctcatgctctagcctttgtcgctctatcgaagcctctagtttctcaggtttttactctaacttttaaatatgattgtgcttggtttaacatgcatttagatgcttcaaggcataaataatgtaatttgtagttagtctaacatgcatttagatgcttcaaggcatttagacctctaacttatcactcattgtctttagctcttccatatgtatgaataaaccgattaattgctcattgaaaaagcttattgacgtaattcatcaatagtatatataaatgagtacccacacattataatatgtatatagatatgtttttagtattaactatatataaatgattagatatgtaaatatgcattttatataataaatagacttgctgaagtggtggatttatttccaagtttaaataattgaaccttgaaggtgatgaaattgaaatttgatatttcattttctccctataggtattgtagataatgataccatcattggattttttttttcttgcttaaatggaacaataagtggttcaagtcattgctttttatgttgtcttaattttcatgtattatagaatgttcatagttttttgatgcttgcaatagggaaattgtcctattcttggattctttgaactttgggacttcttgcccttgctaatttttctatattctatttttttgttaaactctgtgtattaaaaacagtcatcatatatgtttaggttgttattctattatccatgcttgatgagggatgtgatctctctctctcattctccctttcataaaattatataccctccttaagacatatttttttccattacttgtattacttacacattctttttaaattattcaaaattttaaatatgtgaaagtttctaataaaaacaaatatgggtctattgtatatgcagaattataaaccagggtacacagcaactccaaaaatttctcctctaattgaagcagcagtaaccattaggtacacaaatttccattattaaaaaatgtttggtcattttctttctgtactttatcaaacaaaatggtagctttaaatttaaacattaagctaaaagaagctgtttttttttcttcataattttgtttcgggcatgtttttctttttgagtttaaatattctttaactgtggtcactttattcaagcaaaagggtttctttaaaagctaaacataacattaggcttttttttggggggctggccaagaactccataattttaatgtaatgattaatattttttatcttttattttacagtttaagtcagacactccctatagtaacgaggaaatcaatgcagtatgggatgagtgggccgaatttctgaagcctttgattatagattaagtacaaggttactacttttattataatac

SEQ ID NO: 46200 - DNA, 1284 bp, Cannabis sativa
tatatatgatactaaaattaattaatatattgtcaaaaaagaaagaaaagttatttaaatttagtttactcatttaatttatgatttttatctgatttacttttatgtttctataatttatttttcaagcaaataataatatcaagatactctatctcgagtcagaatatgattcgatattataatttaattactattttttcagtattattaaaaatgtggattcttttcaaatcataaagaaaataaaaaatatttattatagttataagttttgtcttacggaaagctagatattaatccgaaaagatattacggaaaactcaatgaccttccagatatatagcttgtttagaaagttgtggctagtttggatggtccttccaaatagcttgtcatcaatacggaacttccaaatcccaaaacgcttatccgggatgcttgaactcgtccagattatcaaattcggatcgactcatccggattgtacgtacaaaaaatgtgttactgaagctaacatggaatgagttgctgaagtttacttagagactttaaatctacagaactagttttagcaataatgcaaattaaatctatatatatttatcacctttgtaatgtatagtgtgtatcttaacaacttgagaaaaattgtattgtgtaaggttagagagagagagtattaaacctttgagagaaagttcgtcttagaatctctatgaaagtttaaaaaatttctgtaaccttataaacaaatatcaataaagatatagctgttgttgttataacttagatataaaatattgcacatagttcaaatttgttaaatcctaatatcttcttctcattgatttattgtcttaatttctaatttttataattctttgatagtattattcttaatttggtattttttcattctatgtcattgattgattaaaaaaaagtttttaaaaaatacacgatcttagtttacacgtgtattatcaacttgtttcaggatttcaatttttatattttgtatgatttggtaaatagctgtcaattttagttattaaataattttaaaagaaaaattgttacatcatcaaaagttacttatcaaatatgctttttctgaaaggatatttatttatttatttttagggaaatacttataaaatatgcttggataagcattattcattaacaaaaataataataagtaatttctagatataattattattaatattataattttaagaatagattggtaactaatacagtggaaagttgaaacca

SEQ ID NO: 46201 - DNA, 915 bp, Cannabis sativa
gagaaagttctaactgaaattcccccctttggatactctcatcaaaccattattatttacacacctattatcaactacatattttttttttcataaaaagcctcttaatctattattagctcatcacgagtacttttggaatatgtttgattatatattctttaaagtgaaaaaaaaaatgcttttataaatattcttccttcgtgttctttttctataattaatatgcaatcaagttcatgaagcaccaactttattaaaacatataaccctgtaatagttttaccattgaagaattaattttcaaacatataaccctataataataagtgatattatatatattaacattgtaagatgagaaaatgaagtaatcagtccaagcagtaacggtaacgtacgatgccgggactaaaatatacacagggtcaaaaaaaaattataataatctatatatacaaaatatataattaatgtataaatttcttttaaaaatttagaagggccggccagtataaattattagatatatttatctttttgttttttctttcaaaaatgcgtgttacaaagctatagaaaaagaaaaagaaaaagttaggggccatgctagagctatatatgagaatgttaattttttatttttgtttgggggatcaacattattaatttaaaataatagtaattaaacacgcgctcattaaacaaaaatcatcataacatgcactcattaaaattggttattaaacaaatagagtagttcttatttatttattttggtgtatgtgatcagcaaattagaaaaaattgatgcttttgtcatcctctattccaactcatggatgagaggtttaatgtataaatttgggtacttaattgctttgctccaactatttttttattatttattattat

SEQ ID NO: 46202 - DNA, 3196 bp, Cannabis sativa
tttttttttttgggggggggggggaatgaatatatcaataaacaaactcaagcataaataattaaaaataataataattaatggcaagaagggttttaacgcagttttgaagttaattcttcatactccacgagtaccatcttattatgggattttataaatcgtacacaagaaaatgtttgaataattctctctttttctcaaattggccctcctttgtcccttaggttttgtccctatttataggatttttagagtgataggtattcctttgggatcttatccctgtaaccgttcatgaaatgtggacaatcttcacgtttcatatttacatcagatgagataataataaataactgctatagctactttttgtatttatttataaatagttatgttgactatggttctttatctcataatataaacaatccttctatgtagctttgtctaaaggtaactttttgcgcctaagtagacactgggtaatactttttgcgtccttctataaatgttaaaagaagcaaacacaagatactgagatgaattatgttggctgaatttccattagtctttcaagatactgataggtatgtggatcaaagagctgtaagctcttaaataattcatcatctaccctttccaacatactaaagttttgttgtgtattttgtgtatcctgagatgggccttttatgttgatttattcatcttgctggtcttacaagatggtagttattattcacgactcgtcattttctttaaaatagatgaatttgaatatctttacaaaatgtattgtctgaggcgagtttctcagacatattatactactttacagcacgagctggtttattttctagctttttgatacgtgtcataaccatatttagttcttgaaatatgggtataactattgtcccctaaaaagtgctttttaaaaaaaacttaaaaaggactttttaattaacaaagggtaatgattgcattttctttgtttaatagaaaatgcatgcttcatttttgcaatttagtactttaagaaaaatatcatttcaatatttattactctgactcttcttttctcaataattcccatttgttcgatcaattatcattacgatcgaatagtttccattgcttggatataaagtctaaatcttccccatattttgtccattaccgttttacagagctttagagaaattcaaattctagcttttattctctttaaaatttcatgccctctttatctctagcatatttctttacagttttcgctagtcttttccctgaatcacagaatcgttaaggaccaaactctcaacaaggatttttttgagaccttctttctctcaacaaacagcaagtgtatttttgccatttctcttttgactagtctcttcttattgttttctatatattttttcatcgcccattacttgtatgggactatctttatatggatttttagcgacttagggctagaaatttagggttacatgattcgcaggtcgtgagttttcatgttcaacatttctagaattttgggacatttttttcttgcaatcaaaacaattccccattgtgatcaagattatgcacacccagaccttgtagaatctaataattctcaattacaagccattgtttttaaaccccatacccatatatctcaatctatacttgagattgtttatcgagttctttggcagctgcatattttttagagcttaagaaagtgataacagaataaatagcaagacaacaaataagagattgttacgtggttcaggcgttaactatccttagtcaatgagtctattttattaggttcatcggccgataactattaacataagtagagatacaatggactaaaactcccatccaccgtgatcctcttgaagaagaggaagcttattaggaatattctggacttgataggagggttacaaaatttatttgcttaggatgatgaagaatgagtcttccatccagaaaaaggtcctactcccttgtgattttttgggggtatttataggccaacttttttgcatatgcaaccttggatggatcatttctagtgtgaaatctaattgttggatcgctaggtggcatatttcccatatggcatttaagggtgttagatagtacgagctgggcctccgacgcgtgtcaccttagggcgtctcctttttgaatttccctttatccctggctattggatcattttctcaggtacacaaggacatgcatgctctgtacgatagagtgttgtgggagataacctctgacatcgtaccgttaaaagcctggtcactaggtccatcatctaacatgtttaggtgaggcttccgctggctgaaggtgtagcccgctttggtgcgtcttagaatgccttaaaccttctaagaaaatccatactcttctcttgagcaaatagttttagctcctggaatggagggagactttgactcacgaatacccttcgtgtagctagcagtcaggggactcttcttcatagaggctcttcctgcgaagttggtgtcgttacgttcctggaacatcaattgaggaagtagggaagctaatgacatcttagccctccttggttaaacatccatgtgtcatcacgatgaaaatgggaataacatttacccccaagctttcaagatgtaacgaagtctaggagcttgcagcatcttctcttgggttgcttcgagcacgtgggatttatgatgagctctttattatactacatcatcagccgccaactgaagtgtcactatttagaaggcattatttcttctattttctcgtcagagttttaaatggtggattttgagtttcacgcgtatataaggtgtgtgttttgtgagatgcccaaaaatggcggtgattagatttgagaaaactttcaatttgctaaacacttttcacaatgtatgcaatgatggaagccaattgttggcaggcaatttaccttctcaacttcccacttatccaaccatctgatatctcttaggtgagcgagttgaactgttcgcttctcatggaaggtgcctcttcttggtacccaataaatacctttatcaaccatcctactattttcatttttctgtcctttataccagagttcaattaattctattccttcctctgcctttcaagatcgtcttcacacctccatccc

SEQ ID NO: 46203 - DNA, 1281 bp, Cannabis sativa
ttaattgaacttagttgggttgtacagtcaaaccatgaattaaactatagatttaattaattttcgaatacctccaaaagattaattaattttggatgctcttcttttcttttggttaattttatttccttatatagctaataatattatatataaagagaataatatatatatttgtagagaattagagggtttgattctattttgagttaggatatatatagcaccggttctaaaaagatatttctacctgatattcatacaacacccttgaattagtgtataccttcttatctatttaacttttagggaaaaatcaatgtttggttaattaacagaaaataagataaaggctattacaacactcaaagataagtaaatataaattcatcctaataagagccagcaaatagcaataggaccaataatctcacacatactaaagcacacatatgcccgaagtcagaattcgcgacagtcttaaaaataattttttgagagaccgtcgttaaaaaaattaagtaactgtttaaaaccgttaggaaaaattaatattctcaacgatttataacagtaattacaagaatagacgacggttttaattgaaatttttaaatttatatattgagcccttaaaaccgatggataagagtgcattaaaaaatcgtcacctacttctcgccacattttttacgtgcctacctacttttttacttcccacatgcccacctatttcttctcaatttcccacaccctaaacgaaaatcttaactctataaaaccctacgcctccgcaacatcgccctcctctctcgacgtcttcctccctctctcgatctccctttcttctccactctctcgtccatcaatctccacccacccttcctcccgtcggtatccctccgtcgcatacgtcggaccaccaccaccacccgtcggtgtccttctcatctccgtctcatactaaccaccacctcctgtccgtctccctctctcttcgagctcggtataaatatatttatttatttattatatatatttactttgttatcgtataaatttaatgtgttaaaagttagtttttattgtaatagaattaattcgttgttttattttaattcatataaatttaatgtgtttaatttgctgttttattttaatttaggtaaaattataaaattaatgcaggaaaaaataagggaaaatacaaatttttatgtcattaatggcagaaaaatttgtatatatattttttttacattccctgtaacaccctaacta

SEQ ID NO: 46204 - DNA, 2063 bp, Cannabis sativa
atacgcaatatactagtatatatatattaaaaattgaaaaacaagtgtatctatttaatatttccttccttaaagtgatatatatgatgataaggaagttgttatgttcatttcaaatcgtacgatattgaagttgataggtaataagaaaatttaatttactaatattgacttcaaaaactttttataactgttgactacaattgaataaaatacttgttaatgtatgtgtatagtatagttttgtttcacatttgtgcataataatatttggataaaataaaagtcgtgtatataagttggtcagaatattatattaaatatttttgcatgtatttcatacatatataaagtaatttaggaatttgcttgggtgtggtggttgaaaattgtctctatcaaaaataattgccgacgtatcgtctttattaagtactcttcatttaagtttccataattatcattgtaagtctcacattataatgtagaaattaaatattacacataaaatatgggctatttcgattttaagataaaaccatatagattttattatatacttataaattcatacttcttcaactatacaatcttaaattctaatatagtattagagtcaaattaggattttaaatggggttttaaatgtaataaatttcaaataattttacataattgattatatattagaaattaaaattagtgttgtttaatttctattttattttttctgttaattctattatgaagtcggttaaggataagctgacacaagttagttgttccaactaacttgatcacctcctcatcctatataaaccatcttagccattgtactcataattcaattcaattcagtgaaaatatattcaagcttttctctctctctcattttctctcatggtatcagaagacaattcccacatatccaccatggccagaccttcgactagatctcaatatgggattctcccatccaattctgatcaagttcagtcccaacctgatgccattcctgacatcgcctctgttccaaaccaacctctccttgctgcgactcctcgtcgatcttcaagacctcgatcgcaagctggaccagattcatcagctccttctccggctgatactcctcgtcccctccaagatcgtggatcgcttgaagacgcttcctgtcccttcttcctcagcttaggaggcctcgtgttggtttcctctattcttacagggacaaactatcaatcatggaaacgtggtatcaccatggccctcgctgccaagaacaaaacaactttcatagacggctctctttctcgtcctactgttggtaatctcctcagttcttggctccactgcaataacatggtaatgccttggcttgtaaactctgtttcccctgatattgcacaaagtattatgcactttgatatagttgttgaaatgtggcaagatcttgctgaaagattcaatgaggccaatggccctcgaatctttcaattgcaaacacagctcactcgtttgcaccaaggtgatcaatccgtcacctcatacttcaccaaactcaaatccctatgggatgaactaaaagagtttcaacctaatacaccatgtacttgtggttgactatcacaatcaaagtcaagctctccaattcttgactggtttgaatgaattttatgcatatgttcgtgctcaaatccttcttaatgagcctatcctaaacttgtctagagtcttctctatgattgttcgagaagagcgtcaaaggacccttgtcgactcagatattccatcccttgcttcctcagttcgcccttcttcatccaccaatcctccaagaaccaagaaaccaagaccatcatgctccaactgtggcaaaccaggttggttgacaagtgcttcttcattcatggctttcctcctagttatggagacaagaaaaaaaaaggcaaaggcaaaacctctactcatcaagctgttgcgaaaattattaattactacgcaagtgcacgcaatcaagtagtatactcacgcaagtgaggacgaaccacagggaattggattaa

SEQ ID NO: 46205 - DNA, 1904 bp, Cannabis sativa
cgatattgactattgacacattgacacataggaaggtactaggcaatactgcaatactggtgccctttagcatttctctattatatataagatacatgaactactcaatcatttccaatttaagatgaaactctatatactttatcttaccctacaatatttgttaaataattgcgtgaggcccgaaatcaaaatgtactataaaatatgtatggagacctaataaaataatttatttttgagttgatatcttaactccaaaaaaataataacatcccaaattaaattagatccaatatataaaacaggttaaacatgtcgtatatatagttttagttttgaacataattactaaataggtgattaatttgatcagtttagcatttactaccttctcacacgacacacaataatacgtgaacacgaattaccactttttgtatagcttcaatattctgttttggtataaacttgttgggggaataaatatgtgaaaaatatatacagcgcgcttcaattaattgttgccaatataatttttaatactttcgaacaaataaattcaaatgtaggtacaaagtagatttatgtacttttgactatacacttatttacaaattacaatacctgttactttttgtgatttagacattaataaagtctcagtctcttgtaggcatagtcgttcaatccatttttcatgaaattccttaattgatgggaatgcatgatatgatcaacatacaactactactgtttgtctattgagttgtatatggcacttgttcaaatacatctttaatatcaaatttcattttagaaatacttctcattcattatttaaatattgtatttagttggtaagaataaaaatataagaataaaaatttaaattagaatagaaataaaaataataaaaaaatttaaaatgcataaaaaaataaaaaataaaaattaatagagaattcagagtttgtttattaattaagaaactttaaaatgtctaattaataaataagttaaatgataattttatttgatagttgactataattattaaatagatagaattgacatttataaagttagaataaaaagatgaaatttgtgaaaagaaaaaaagataagtttcaataaaatggtaaaattgaaatccactacgcctactaaggttcgaccatgatgggtcaagtaaagctaatttttttttttttttaatttcattttattcaaaacctaaccctaaaagcacccctataaatagaataatataactcttattttcataaactaattttgactatttttgtcggacaaatagaaaataaagagagctctttctatcattcaaattcatcatcatcatcttcttcttctcaaaatttttgaaccctatagtaattgagtaattgcccgcacaattcaaggcaatactcaagatagtgtggaagattgtgtagatttttatcaaatgaaggagaatccaggttcagatcttgatcttactctgcaatagattggatcaagggttagagatttgaacggaaggattcatataattttgctgccattaatgtaatattttctacaactttttttgtatttatttcattattttagagaattcatatttaggatgttagattatagatttataatcaaatatacatgttagtaaatctagatcctaataaaataacttccaacaacatatggctcagagtgtctggtgacggaaacaacaacctcaactgtaggaagatttctaactgtaagagttgcccatccagtggacaacgtgtcaagcacaccatctcagacaatatgattccatgacttggggaggaacttcctccacctctagttcagttccaatgaaccgaccatagaactcaccgcttatt

SEQ ID NO: 46206 - DNA, 1773 bp, Cannabis sativa
agacaatctatatataattaaaagtatagacatttaattacattttttacatgttattaaataacatattataacattattttagtgttatatattataaatagttaacattaatttagtattatggttctttatgttacattcattaataacactttcaaaatgtaatcgtacaggttttaagtatacattaaaattaatttattatgttatatatgaagaaatattatgttttaatgttgttataatttcttaataataactattttttaatgttatgattctttatattatattcattttaataacatttttaaaatgtaattataatttttaattatattattattatgttatcattaagaaatattacattttgatgttattataattttttaacaataactatttattaatgttacaatttcttagtgataacactttgtcaatgttattttttgtattttattttaattaacatttctagaataaagttattaaattaaataatgcatattatttgtcacaaatgaaatctaaaatctaatgtaattacaatttgataaaatctaatataattcttatattaaaaaaatatctaatatatgtgcaaataaaattattccaaactaacataataaaaactccttaatcaaaaagaaaacataataaaaaaatgtctattaagtccttcctagcaaaagcaaacaccacagtaatcttcttgaagttagattgcaccattgttggagaattcccaccattcattatcttgacaatgcaaaatcctgtcaaaaccaaagacaaccctaaaatgataagtaatgttatattgtcattaaaaatagcagtttttgtattgaacccccactataagaaataagacttttgctagtgcatttttacacagtcaaaagttgggtatttcactgacaaaaggggtcgacaaatcgacgtcaatactagagcttttgccggcgtaaaatgaaagcgtcaacaaaaataactattatcggcgcattaagatgcaactaaaagtgcaatgacggtaaaagatccaaagccgaatgtaagcccaacttacagaaagataaggtcagaccacttgatcgattgacgaaatgatgtttggcctagatggtgaaagctccatcaagacatgcatttctaaatgctctcatggggtaatccgaatacaggcaattgaagagacttccaaaaatcatcttacgtggcgacctccagactcggggtcccaccatgtcagggatttgtcccctacgtcaaatctagggagcatgtaccaccaaaacaaagctcttttttttccaaagatatatgctctgacattctaagtacatcacctaattagcccaaaatcaatgtaattaaattgtaatttaccccattaatgggtcaagttgacaatgacacctatatacctaccaggttatttagaacatgatccctccatgtaaagggatcggttgagaaatcattttctgctactataagagctaataaataggattcttcagctagagcaaaaatacttgtataacgatactttaaaacatttttagctcaataatattgatttgttgactaagattcattagcgctccaaccacgcaaaagttctgatttcttcttctttaatttatttttttcttaaatttaactattttataattagtttctgaaaaattaggggtgtgtataaatcgattcaatccaatgagaactgaccgatccaattacaaccgaccacca

SEQ ID NO: 46207 - DNA, 1233 bp, Cannabis sativa
aagcaaaataaagaaatacatatcaaattaaaaggaaattacatattaaagaatagtacaaacggaagaagaagagggttgttgttgttgaggaggagagttagtgttgagattgattccaggccattgacggcagaggcagcgctggtgttgtgggattcggtcgtacagggatcgggcattgctcttcgtaacacattcttctttctttccttttcttttccttctgtttttttattttttatctgtagtttcatagatttatatagcgtgtgcatcagcctaaattcagcaaaattgtttaatggcaaactattttgactggtcaattaagtctgagactttatttacatattttattcctaatctaaaatgatgtacacaacacaagatattatatcaaactaatatgttagcatttgttttatacatgcacatatttgtactcattcttaattattatattatttctttcaaaaaaaaattattatattattaacaataatttttttctgtttcaataaaaaaataatctaattataataataataataataataataataatgcttaacaatatttttaattcagcagccaaaccttccttgtgaccagagccaacccgggtagcgagctaagcctacgcctcgagctcccaaacgtccaaactcaaaattgtaaaaaaaaaaaaattattagtagatagataaaatattacataataaaatattatagtaaatattatttggtataattgtaaaaaatattaatttaaactaagaggttaagggatcaattcataacctctacatttctatttttttaaaagttttaccattacactaaacactagacttaccattttgagaagtaaacccttatatccttctctctatcaaggtttttcctctctcttctctttctaagctagggtttcatctctttctcttttccttgttcggctagagacccagccgttggcctggctgtgcagttggtgttctctagccgagagggatggcggttctcttggtcatggttccttgcacgacgaacttggggaagccagcaacaatgatgcttttttggagtcgtcgtccaggggaggtcaaggtttttgggccctcgtggtctacagtgactgaggttcggaggtggcaccgatgggcctccgaaaatgtcagccattttttcttggccattttttgagcttttagccctatcctttccttt

SEQ ID NO: 46208 - DNA, 9569 bp, Cannabis sativa
gcctaagggctcctatcttttgtaattgaatttctcaatacatttaatatacaattcctactgtttggctactgtttaattatcaagtgactgatcaacactggtttttgagcaagatgattcatctatgccaagatttcttcctcccttatacaaacattttatacccataaggtttttggagttgtaatgcttgattgatttcaattgtccttggtggaataaactcatgggcttgtttggctctcaccaaattcgtagtcagcttgttaatctcactttcattttcatctaactgtttggtgatatttttaactatgccttctagactagattttttagactcaagttgttggtttgcatcaccgagtttaggactgagcatattggccgggtttgatttggacctggtctacctgctcggatttgacccgtccaacctggccgtgtgcccgttccttacgggcgggtgggctccaacccactcattttcatcggacaggttcgggttgattttgaacaaatgcttgggttcgggttggacccttactcgcccgccaacccgccactttttttttttttctttataactttcctaaaaacctaaaatagaacctaactttttatgtatctttttatgaatttgcatactacttgttgtaatccaagcttttatctatgcttgttattaaagaatattgtagagttacttaacttttaaaagttttggtgtaatatgagagaattataaaggttttttttttctgttctttttagtacaggttacaatttacaactttttttttttgttttaaaatataaaattaataggaaaaaaaagaagaaaaagagagttgacctgatcaacctgcctaacccgccaaccctaaacctgccaatttgcgacacgtgaatgagcgggttcgggttcatttttttcacccaaaacccgccattccgaaacacggtcaacccgcccaatgttcacccctggccctaattgagtcccttaaccttttttgccatgtacccctattgagcgaacattttcttcatagacattctgtctacgtacactatcagcatctgaattgacaaaatctctatcttcctctgagaaaatagactgatttctcttttccataaaggcaaccatttatttatatattttttttcatctaaaccctcacatgagctccggcctttttcttcctcactttcactccaagtcactgccaaagctttcttcttcttgagcgtatttgcacattccgcttgaatgtgtctaaaactatctcactcacgacactgtatgcccatatacttcttatctctatgctctggatttttgttattttcaccatagtttcttctaagttgattctttttcccaccaaaaagtttttcttgtaattctttttagaaaatcttgcataattctcggttaacagggcaagagtgtcatctgctaggcattcattagagcttttttttttttttttttttcttttttatgaacaaaagcaaggctattctctggtttttctttctcagattcttttggcgtcttccttttattccaccttgtaagagtcatttcatagttctataagctctcctccaagtcaagcccctcaacatctctcattcttctatggaagtgactttagacttgaactttcttagcaaaaccctcaactcttttcgaacaagtttggcattagagtaagtcttccccaatgcgtaagactcattcgaaatatcacacatcttagcgtgaaactttgccactgtttcatcttccatagatagattttcaaatgcctttgccaatgatcgcaacctggacttttcataggagcagttccttcttttttaattctcaacttttcccaagcgtctttggctactttacaattgtcaattacttcgagctaatttgtaaaaactgcgctgcacagcgcatgcatagcttttaaattgtaattagccttctccatctcttcagaagtccacatgctcaattgtttggatttggtcactccttccacaattgaaggacaacacaaaccatcttccacaatcatccaaactctctcgtcaactgctttgagaaatgctcgcatcctggtcttccaatagggataattttgcccctcgagcattggaggtttagaggtatatccacctaccctaaacatttccataatagacaaaaaaacacaatatatacttctagagatggatctcaaaaggggttagctcaacaaggatgttacaaaagggaaaaaaatatgtagaaaaatcaagaattgcagcaacaccgaatttcagtactacacagcttgcaagaaccaaatgtaaattcttacctatattacttctatttttcaattttcaaactcatgtaaatcaagattcaacataatcaaacatcacaccaagaaattacaaggctcactccaactggaaataaatttcagctagctactccttagaaccaggataataactccactaattaagaatgttacttacaagctctaatccatattgcaaaactgcaaattacattcctccactgaaaataaaagtaaaaattttaaattaccctaaaaccaaatcccttggttatgcacaagatccccttgtacgattgttgaaatcccttcagcaacttcacgatttgaactcctttcagatctggtcaaagcttcaacaagctctgcaactcagctccacctgctgaaatggtgaacctgcacaaagaacaaagaagaagaagaatggaacgagttttctctcactaacaaagtcaatgagaagggttagatctgatattcaagaatctgctatttatatgaaactaaacctgaactaactcaacccgtaatggacttcaaacaagattaaactaaatctaaataatgttcataatgctgatgtggacttaccaacttactgcactctacagatgaaataacgaacaacaaaggtgtaactgagacaaaatattcgtttagacaaaatatagatgaaacactacacacgctagatgcaactctggaacataattttgcacacacaaaaataatgactgttacctttagtattatattattgagtcatttttcttttgttcaaattaaaagttttccgatagagtattcattattcaatatgttactttctgcaggtcggtgatgttgtgcttgttgaggatgagacagtgattgaaaatgaatttaaaatggttggattggagacgttggtaggttatggttcatttaatcaggtgttcagtattggtgtttaagagttttcattttgttacatttaaacattcagctaggattaggatttttttattttttatgatttatgatgtgtggattacatgattcttgacaccttttctataaggttgtaggttccttctattgctgaaaacttcacatatgcatacaaattagtcttctgttttggatcagcatggttagtgttttttcttgtttcccccttaattaaagcttctctatctaactctctgtctccctcagaaaatatctcttcaatatggtaatgtgtcagaaacattatcttttcttcggtttaattctgttgttgagcaacatgctgtgtctttgacagatcaattactaatatgttagacgtaatacgagagagggtgatgttgattcatcaacagtggttgtttaaaaaggtctgggagacagatttagttgatgttttgagtggctgattagtataaataggaaagacaattagggaagcatacattttgtgtgttagggaggggactattgggattttggtagtgagttggggagagtgaccaggctcttgaatttgtaggggttctttgacaatttggatgtttctgtactagacattatttttaataaaacagtgaatgtttcctctgttcttttcctactgtactgttgtgtgtgtgtgttgccgtatctgtgttcagttctgttcttatttttcaatgtcttgaagaacttctgcatattgtggattttttcgatattgtttttttcatcaacgataagaatttcaagttatctattccctgttttgtgggattagcaatgagttactatgttgagttctgtataattcagttctgcctttacacttcgagggcttaagtttttatatttgctaggtagggtacaaagttgtaacaccaggtcggcggaatattggcaaggtgtgtcaccttttatttctggtgtcttcttaagtttatgtacctattcagttgactgacatttagttattactacaattacaggtgcgtggatatacttttaatattaattcaggggctattgaatcactagagcttgattcttacgggatctcaatcatcccctcaagtttggtatgtggattgaaaattataatcttataacagtgccaaaaatttgaaacttttactttttttttttgattggataatttgaatttatattttatctaattagacaaggtcttgttatagttatacttgtcttgcataaatactaaatgctctgacgtctactgtttgtctcacttatgtttaggttagtacatatgctttgcttgttgaggatgtgctggaagttctctctgatgctgttgtggtacatgaagctgccgcttcacgaatacatagattgaccaaggtaccttttcctgccttgattcagtttggacctgtctcttacttttaatttgatttttatgttactactcatctggaaaaatctccactcccagagtagttttccattcgtatgctttatttagtaagtgatggttacgaagcatttgagcacctgaagtgaagcacataacttgaatccttgcctgtttcttgttataagcatatactctataatactcagcacacaatacaagcgtggaggcatttagaagggtgtacatccagcataatagttttagggattttaacaaaactgtcattatccctttgttttgaaaaactgcaaaatacatctccatatttttagaagcagatacttctattgaaacataggttatttgtattgattttgcaaataaaacctttccacagtttgtcctaaattacacagtacacttttgagatgacggagccccctattcgcttcacatacaccaggagtagtaagaaagccaactaggcagtgagctgtgagggtagtgttggaactgcatgaggcttgtccaagttgtcagttgattgagtaatgggattatggagtgagtatttgttcttatttataattcaattaaagtgttttatggtagtttaataaaagatatatcaaaaagtttgactagaattaggtaaggcaaggttattctggttggttttgatagccacaggtcttctgtggaagtttcttataaacgtaaggttataattggtaattaactagaactcaaacgtatactattaaaaaaaaactcattataataaaactattttgaacttaggttgctttggttggaattaatgagatggaacggaatggaaaggaaaccatttttattcaatttttttatttagttgcaatttaaagtatcagagtgctgatagaactttcttcagatcaaaaaatgtttctatgtacaatcaacagacaaggaaatcaatctctaagaaattactttgttaatattcgtggccagagtacacctaactttcgagaggctgagagacccattcgagatctcccaagtgagtcaatgctcatctaaaatccatgctactcaaaatagattctcatccttatatttataggttttgattgaggataaaattacaacccaagccctcttattacgtcagccaataacacaaataaacaattaaagaataaaaatactaaaagacccttacaactcataacaggtccttttaacaatttaagcctatgctctatgcttatttcgaatctgatggtaagctgatttgagatccagtttaaaaaaaattcgagcgccatgaagctcatctataacaggtattagaaacttatatggtatagtcactctatttagagcactgtagttcacacaaaactgccacgagctatctttcttcctggcaagaagaacttggcttgaacaaaggctgttgttgggttgaattattcctaccgtaagcatgtcagacattaacttttccatctcatttttttgagattaggcatatcggtacggtgtgacgttgatcggggctgtatgacgatggcatgctcatgggagcgattcgggtgtaaactttaggtatttcaaatacatcaacaaaatcagcaagtatttgagtcaaatattctagtaaagtttggcccaaatcgttggtatcatggtaggtgaaattaaatttcaaaatgatgccttgttgctcagcttgaagagtctttgccattgttttgaaagataccaaagatcgatcaagtgagcggtctccctttaatagaaccctttgtttgccaatttgaaattccatggtttgcaacttccaatccacattagtcattccgagtgtatctaactatcgcagccctaagattatatcgacactacccaaagggaaaggcaagaaatcgtcccaaacatccacaccttggaagtgtaggttcagatttttgcaaattccttcacatttcatcgagtccctattccccaaagtaaccctataagtcttagtttttgaaatgggaatgttcaactttgatactagagccttggaaataaaattatgagtcactcttgaatccataaggattaccacttatttggtcccgaggtgtcccttgagtttcatggtggaatttgtagagagaccagctacggattcgaaagagacttgaactttttctgtacttcagtggaatccagccccgcagtctcttcttcttccttctcggagttttgcgttgactcatcgtcttcgatgtcttcagttatcataatcacttggagttctttcttcttgccacagtgtcctggagaccacttatcatcacagaggaaacacaattctttctgtcgttttaatggaatctcggcatcagtaagtttgcgaatctccattgtggaattggcaagggaagttcggcttgagggtcttgcaactcttgttgtagtgttagggctatttaggcaacttgaactggggtatcgctgccttgttaacctattcttatcttcaatatcttgcacaatttccatggcttcatccacgttcccgggtcgatagatttgcaattcctcttttagcgatggaagtagtccattcataaaagtgcttagatgtacaacttgttccacaacattaagtggtgccaataacttgataaaagtactctgaaactaagccttcttgtggaacagtcaagaactggtcatataatgtccttttgtgagaattgctgaaatgacggagtagtaatcgcttcatttcctcccacctatgaatcgtttgcttgttacttttatattggtaccaaagaagggcatcactcgaaaaagaaatgaatgccgcttctactttttcatcgtcgtcatacccatggcaagtgaagaatctttcagcttgtaggattcatccatctaggttctctccattaaaagtaggcattttaagttttatcaatcgattctcatgatgaaaccgagtatccaaggtcggccctaaaatttagtgggcccttatttagagtaaaatgtggtattttttaaaattaataaaaaaaaatgtgtaattttaaaaggaaaattttttttgggccttggattaggtgggccctaggcacaggtctaactcgcctatatccagggtcgggcttgcgagtatcgttccggtccttctccaaagaacccctaacaacaccttgttgcaaatggaattttgacgtcaaaggtgttcacatggtggtgcaaagtgattcatgatcgagtacctgtgtggagactctaatttattcgctgacccttctgtctcatctttttctttgctcccagcagctactagtttttcttctctggtgtcttgggcaattcttgatttctttaacttccaataaggctttgaaatgctgctgaatcctttcttgaaaggattcttggagttatttttgaatccgcagagccaaaccctgaagtgaatcattgagagaatccttgagttccgaaatctctgattttaaagcttcaggatcctcttcgaacaccattgtagcatcagatttttctgccggattcttaggtattgtggccgcagtcaccgcaccaaattgatggaactttcttcagatcagaaaatatttttatctacaatcaacagacaaggaaatcaacaacacctagctttcgagagactatcacacctagctttcgagaggctagtctctccaattcaaccattagagagggttgtctttcccaagtgagtgaatactcatcttaaatcccggctgtccaaaatagattctcatccttttatttataggctttgactgaagataaaattacaacccatgccctcttattacagcagtcactaacacaaataaatcattaaagaataaaaatattaaaagacccttacaactcaggtccttttaacaatttaagtctctaccctatgcttatttggtctcctggtatagactaaacatactggggtctatcaaatgccattctaatagaatagttttttatcattttggtagaatgacttttatttttatatagaaggaaatatcaatccaatataagatgagaaaaaatttaatattttttttattaagttttttgatactttttaaatttaatttcattctatttttatttctattctaattcctattcttgtatttttattccttccaaataaatatcaccttaaggttatatcttagtttttttacctgttttcggaaaatactatttaagatttttagagctttttgttaagctttattccacgtgtttaacaaagtgtgcttttttttctttgccgaatgtgtaacatagtgttgagatgttgtatgtataatttaaataaaaattaatttaaaatttaagaaattcattttcttatcaacaattaattagaaaatttataattatttattgacaaataataagaaaataaacttttaaattttaaaagccacaccaacattttgttagtgaatagaacttaacaaaactcttgtattttagcagtgagtagtttggaaaaaattttaacaaataaatttaagaagtatgatttaatagttgtaatagtatgaggggtaaaaaatcctaatatctttcaaaaaatcttgaataatttactatatcaaaaataaaatttaaaataattaattacaagcgaataaaagaaaataatatgtgggcaacttactgtttggatattatatactgtttgttttttccgtaaatgggcaagatgcatataatgtcatataacaataatatagttaaatatagttcgttcatttatattttcatgttaattattttaatgc

SEQ ID NO: 46209 - DNA, 977 bp, Cannabis sativa
taattattgttgttagttttaagtatttaaataaaattaaaagtatattatttaattttaagcttaaaattgtaatagtataaatattaatcttaacaattttaatagaagacaactattaattgaataaacattcaaatactaaacaaacattcaataaaaaatagaagaaaataaagtaatgatttggtgtaaattttaaatttcaactccaatatttaaatataataaaattattaactataaagtctaaatttctaattaaacaatataaaattcaaactataaataaaaataatttaactaataaacttaatttatgtaatattatacacattaatttaaaacaaatacataaattggtttgtttagattatttgggttaatcgggtttagaattatttttaatctaaccaatatattcattaggaggtttagattttcattgggttatttcaggttacattttttatcagtttatccagtttaatttgggtgatttatttaggttggatgatttgttaattttttttaaagacccctacttgcggttagcagatacacgctaccttacaacattttcatatcttactaataaattataataatttacatgtttcttttatttttttttttaaaaaatagataattacttacacttgtttttatatgaagatatataaatatactaagtgtggagaacgtgccacagtcacttaatttcgtcaaaacttatggattatactcatgtatcttactttcatcaattatgtttaaataaatattaaaaaagttatgtttaaacaaacacatagtgtagtatagattcatttattgaagttaatatcatcagtcatcataaatacaatctcatatgattttgttctattattatctacgaataagtaaagtttatataaaaaataaaataataattaacaaaaaattataaaaaataataaataacaacacaaaaa

SEQ ID NO: 46210 - DNA, 1223 bp, Cannabis sativa
gggcctgaaactcctcttttttcagtgttccgtggaattgggctttaggcttttcctgcgaagattagtggaagggaggcaaaaaggccttctttggagggctcgagctgttggtgagctatctcatatgttgtacacacaattaattcattcaaaaaaaagtattaattaacagtatgtctacatttatagctcatgatatgttaaatattactagttctgtttacaattattaaaccctacataatactaagaatacccataaaagtatacaaactttttttttgcaactgatggtgtttgaattaataaccatatttacaaagataaattcaatcaccactacacaaatatgagcgatgttctatatatcatcctttggttttgaaggtaaaatttctagttgctacttgctattgtaattatatatatgtatatatagagggtaatcaagtctatagaacatgttctgtgttccagtagactccttatatatttcagttgaggaaattttttagtctaatttttgtaatgatagtgtacgttatagttatttaagactattgtaaattttaagaaaatttcgataagtttattacgttgaaaataagatttacatattttgtttcacgcacaataattttttattacgtcgaaagtaagtaactgtttaaatacattattttttattaggcatggtaaaatgatccgaattttcagttcagatcagagtcccaatttgacggggcgatcccgatcaaaacaaacaaatctcaaatcgaatcaaaccaatccaatagaaatttattcggatcggatcagattcgacccacctcagttttttttttttttaataacgtccaacaacctaacattaattataaaaaaattgatttcatgtaattgacacactatattattatttattgatgatgaatttttaaaaacgctaaattttctaaaacaaaatctattaggaaaaattgcaaaaaaaaattatcacctcccccaacatcatctcttatattaaattgaataaagactatagtgaaaattttgattaaaaaaaatggatttaagatttggatcaggttggatccaacctgaattattcggatcgaaacagatttgacacggaaaagtaactcagcaggttgaatcagcagctaattcggatcagatcatagtcaaatcagatctcatgacttgatctatttacattc

SEQ ID NO: 46211 - DNA, 1564 bp, Cannabis sativa
aagccttatggtatttttgataagtgttgctcaagttttgctgtattttttatagtttaattatttagtgatagttcaaaccgcagaaaccacactgcactgccctattttttgcggtgcagttttttagtttcgcggtgcgagtgtagtttgggaaattgaaaaaactacatgtgcgggttggtttgaaaaaatagtcaaaaactgcaccacccgcaccgcaaacacccctattaagtaataaagataatcaaaaagctataaacgacacaagatttatagaagtttggccctaaaatcagtaatgacttagtctcttttttgttgtatttttctagagaataataagatcacatgaatctgatctagtgactttcttgctattttagaagattataaatattttgacaacataatagttctcttgagaatacagaagtcggtccatgaatagtgagtatgatcctttatttatagggaaaatgtgttaaaatatttacatttaattatagaataaataatttaatatttgattgattgaatctcacaaaaatcctctaaatcttaatgccatttgaatgtgtatctagcattttaaaaaaattatttctcttataaataataattatatgaataaatttacatgaaaaatagtctgttaaaaaaagggaatatccatgaattaattagagaaaaaaacaaaaaaaaaatatttgagtaatacttcgtagcattagtaatggaatcacctttctctacatagatagattgatgaatgctccatccattttatgtaacatgtattacactggtttaaaaatttaagcacacaagtgaattgtaactttcatatcattaccattacaatttacccaaatcaatcaccactatatttacaagtatgaagagcaaaaaaaaaaaatgttaatgatttgtgcagctgtatttagtttgatggatgcagtgattgaatggcagtccaggatccacaggttgcagtctctcccacctaaatttgagcactttatttatgactccgactcattatttaaatttaaatttaattttgtgcactgtgaacggctcactaacatatggaataggtgttttaaagcacgttacaatttaaaaatatttcttttaattaagacttaagagttttttgcggttaaattctcttaactatcactccacttgtacttaatcctctaaattcaaattttgacggtaaaacctttaaactactgaattgcttgcaaatttaaggtgtcattcattttttaccgttaattaccaatatagattattttatttttattttatatttttatttaattttaaaataaattttgaaaataatttttaaataacaatattaggtgtaccaatataaacatgttatgttattaaaaaaaaaatataaacgtgttatgtgtacaagagtgtacacataaacaactcatagtgacagtattaactgaatgacaccttaaatttgctactagtttagtagtttggaggattttgctgctaaaatttcagcttaaaaggctaaatgcaagtg

SEQ ID NO: 46212 - DNA, 1484 bp, Cannabis sativa
gttattcttatttataactggcccccatttttttataacaaattagaggttattcttaaatagagtattcttgaataggggttctactgtatatttttaagttgtatttgaatatatagtatgttggataataaataatgtgcaatatcttaatttttatataattaaaattaatatagatgttactgctacaatgggtttaaataggagtttcctgttcattaatgatggaactatatgaaaaatatggattgaaatttttagtgggtacgaaaatgggaaagtaatctccgccaatttcttaaattatgtgcattcctaccggtgacttgcattgaaaatcagatttaatagtatttctccaatacaaacgaatgcttgagagcaattagaacttatctttgagatgagtttgcgtctatgtcgctagatttgcaaatttatatttataatgttagttgggtaaataagaatttgactcttaatttatagaatcatttttactttttcaaaaaatctcaacattctctatgtgtatcatctaggtctttaactatttttttagcgtttaggtcctcaatctctccgccattaattagaatttagagccaaaatagtaccctaaagtgctaaaattcgagcacatccacttaaataaaaatattttggactttcacaatctacattttatcttagttttttgtggtttgaaattgttgttcttctttatgccaaaaggttcattgttgaccttatgtgctataaaataaaacaataataataaaaaagatgattaaaggtggtgtaatggcctgttgaagaaaaagagaaagaagaggaagtgaaaaatgtgtattttggtctcaattgctatcatttgcatatttcagaagttggtaaaaattaaggcaaatgatgagttaagatgacattgataaatgccacgatataatattacattgataaatatcttgggagacaatagacatgctttcaaaaaaaaaaaaaaatcttggaagacaaagtcaacttaactaaattacgtgccaccaagtaaccgtagcataaagattctataattctataattaaaaataaaaattttataatttagctaacactacaaaattacaaatatattcttttggcatcttattaaaaatgatttgattctcttacattccaactttttgaatatctgaatttgatttgatttacaattacaaggttgcatttagtgtcattatttttcattttatttatttattattaagagaaaagaggatcttctattaggaatagtatcaaccattgacgcctttcatcgacaaatgagtttttttttttcctgagcatgagctcttaaaaattaaaataatatagaacatactctcaaaaaaaacaaacaaacaaaaaaaatcagtcaactattatttggctaaggatgatgatctgacataatttgtataaaaatattttttgata

SEQ ID NO: 46213 - DNA, 1625 bp, Cannabis sativa
ctttttccagcaaaatttcatgtattactgtgaaaattatcatccatgaactatatgtaatgaaatcatactttaaaaaataaacatatgtcaataactccaatgattacatcatatcaacataacaataaacaattatagtgaataagctgttaataagggctactatggaggagtactgcttcatactctgacataatcacatttgcacattctttctcataagaaaactttaaaacaaaagtgaaaaatgaggcatagcaaccaaattcattttagtaaaggttcgtatattacaagttattagcagaggaaatatatggacttatttcttattcaaatacaagtcataataacgtaatgctagttataacttatgaaagaaagtccatttaatgagcttccaatgggtattggagtcccacttcttcattcaaactcttaatgtagtccttccttgctggatgttcttcttgtggcctattatatgcagtccaaacaggttccccaatgaacaatctcatcaactgtacattaaatttcacccagacaaaacaaaaattaagatcaattttattttatttttatttatttatttattttgtataaagtaataatggttaaataagtacttactttgatgaagttagaggtgtctaaggtgaacctgtggtaaatcccagctggtaagataataagatcaccagccttaatccagatcctaatccaacggtcctccttgtccctaacatcaaagtagccacttccttccaaacaataacggacttcttcatcaccatgtatgtgctctgtgtagaagttcttcagcttctcttcataattctccaacttttcaggccttatatcaatcaaatcctgtatcacaacaaattcaaaataagagaattcgtttgttccatattagaagtaaaacaaagaaacattcagtaaataatacaagttccttcctacaattaccatgtaattataacctctggtttctctaatatggcgtagttcttcatcattctcgtaatttttggggttcaggtgccagtacagtactcccaattctgcaaaatatttaccaattcatcacccaacttaagaatatgggatagaaagatagaaaatgagactgagagagacagagacctgccaatttgtccaatggaagaagctctttggggttgagacggtgaggaagccttggatgttcattgctgtcgtccatgaaccatgcctgcttcaaataacaaatttacataaatataataatacaatacaaatctactagctagggtgttgaatttatctaaactgcgtcatgtaaactcacctccatcgccattgccagtaactaagacacaacaaatctacgaagggaaaccagttttgcttgtatatgaagtttgttttgtgcagattatcactcatatagattgtcatttattcagatattttcaatgtttgagagattagtcccatgtctactttatcaccacctgtcactacatttttgtggcttttattttctgctgacttctattttttatggtcacttgccaatatgccattaaagatctctctagaaatttttggctttcctcaactctttcattttc

SEQ ID NO: 46214 - DNA, 2223 bp, Cannabis sativa
gatgaagtgagctaagctttttcctgattttccgctgggttcttgagccgaaaagagaagagagagaaataggttttgatttcattcttttccattctaaacttatttaataaacttaatgtattagctaaagtaatacttcagcttaggataatactaaagcattaaataaaacaaagaattaaacttaacaaaattaccattttaccctcaatacacacctaagccaaaacataacataggggtatttttgtcatttctaactattacacaaaaccgacaacttagaattttaaactagtccgatataattcccattctaatccataattcattatcatgacatatccaaccattccgccaaattcccacgatcgccgaacccgaagatattttatttcaaaaatggtatccacgatactcacatattctaataaaatctccgtaattaataaattacgctttatttattcatttactcaaattccactaattaactcataattagcttaagtaagattgtaatcttactctaatatccacagaattacatatttaataaaatatggccaaataaatatcaataaaatttcgggatattacaatactgaaacacagttctaccaaaaaaataataaataaatataacaaaaaaaaaaaaaaaacgaacaacaacaaatcaaagaaatagcccaagttgtataagtttattttttttattcttttgatggaaataaaaactgaaatgttcaagtatggaacataggtaggagattcaagtcttagaaaattaccataacagtggtggttgcatcgaaaagaacaatgagggatagcacggaaacttggtcgacgtatgttgccatggcttcaaacactagcaccccataaacatatggatgctgcaaaaaatttctggtgacatgatgagcaagattgtgattttgatattagaacttgaaagatgtgtggaaagtgcactagttaaataaaattttagctttattagcaaacttacttcataacatgagttccaagccttgaccaactctcatgtgagaatcgtaggaggaagcaaaaaagataacccaacaacagttgagtagaacaacatttccatctacaaatatataaataagtaaaaaattaaagaaacaataaaaagagaccaatcaatgagaagaatgacacagaatagagctaacctgggtggtatttggatagagtgcctgaaaccattatagcacccaagactcgaaaattgggagatgtctgagcatcagctaaggtgaaaagtatcaaaccaataactagtagtattgcatatacatattcacgaagagtgtatctccatctcagtcctggaatgaaggctcccatgatcatgagaggtaatacatgaattttcatagccaaaagaataagagaaaagtatcgatcgatgcaagatttggcaactataatgatatactagagttttaaattcaagattttatcaaaataaattgaattttctaataaagagaaagaagaaaagagggaaggacttgtttggatttttatttttaagattgggaactaaacatagactccatgtccatgttccttcaacctttttttcattttctcttgaaaaaatattgttttttccccttttaaaatggacagcagtggtgagacagtccaaacaagtaccactaatttttgcaatcacataaacctttatatctaatacataaatgttatactaaaaaattggccaattcagagagtcaatattaaaagaaagtttagcaggcaattaagcatttgaatacatatatatatatatatatacacacacgaatactttctcatttgactaagataatgaaataaaatggaagattatatatacatatatacgtgtagtgtgagtttatcagatttgacgaagaggataacaagacaaaattgaatacaactcttgcacataaaagaagaaataaaacatccttgaataaaattttatcaatgtttcaaaacatacccgatttaattttagatatttttcttccacttgaagttgcaagttgatcctctcgtctaggcaccacagtgaaacgactactacttgtacaagaaacgagccagtgcagtcaaatttgtggaccaaattgcagttttgaatacaacacaaacattcttactttctctttattttaacactttgtggcatttttt

SEQ ID NO: 46215 - DNA, 2165 bp, Cannabis sativa
gtctatttgataacagtttctcaatacttgttttattgtctctctagcaaattgaggatgttgtatctgagcaaagattaacggctccaccccaaacagctaatgacaataaaggagagattggatcgaaaagtaaatccaacaagattgcagagaaaagcgagtctcaaaaacttgatcgatcatctctatatagtcatctacaagggaatggctcatcaccctaccataataaacattccctatccacatttcatgaacaaaatgatcttctaaattcaccagggaaggcaaagaattccaagaatagtgcctttgatatccataaaagtgcgcggaccaattttcgaaagtcagcaaatgagaacaacatttgggaagttggctctgggagtccagtgattgagaagactctttacatagatgctgtacataaagtgaattatccaggctcaaagtcaagtcccttggatatgaaagacttgacggattgcagagggaatgacgttgaggtccctgaaaaaagtagtgacacagaagacaagctgtcactggattcatcacttaaggatatcagacactcaaatgttgcgaatcaaaaggagacggtaaggcctaaaagtttggactctgttgattcccatttcagatctgcttttgataaaaaaatcaacatgaaaaatagttccaatcaggctgatcttactcaggattctatttcgttatgctgctcaaaagtgaccgacttggagaattctaatttggaaagtccaaggtctgtgaagtcacgtaatcaagagaggcgtcttggccttgttaaggattctgtcatgtttacaagctcaaaagaagctagcaacaagattgattgtaaaatccaagaacattttggattaaattatgaaaagaacttttgtggccattttcagaatcctactacaatgacaatctcagaaaaggctcatggcaggaagtttaattcagaaagacaacggctgatgaaatcgggtactaaagaagatgcattagcccttgttcaaagttctacatcaaaagcaagcaaaaccgaagtaattgatttggatagtccaagacttgcgaatttaggtaatgatgggagttctaatggcaaatctttgccaatgtcacttgcattacccttgccaaaatcgccgtcagagtcttggctaaagcgtaccttgcctacaatttcctcaaagaattcatattcacagacttcacttgatgcccacatttgcaatagcagtccattgagatcatccctagacccaaagtgggagacaattgttaaaactactaacctacaacatgggcatctgagattttcccaggtaagtctattctataccagttgtctatcactgctttaatttactggtctacaaacccttagtactaacatgaatacctattttatcaggaaaatctccttcctatcccagaagcttgaaaatctggaatccttatctgcagtccgtataaaatataatcttggtaaaagcattcaaagcttaaactggttcaaagaagccaaattacatcttttgcttcgactttcataaacattaatacttcagcttgttatacagtaaatataatcattattattagctgtaaatctatgtattttcaagttgtgattatattgtaaatttcattaattttgtgaagtcaaagcttgccccaagtgcatttgcttttgtaataagaagaaataaatgatgccttttgtgttgctcatcatctgtcatcattctggttttacaatgatcccatgaaagttaggattgaggaagtttcgatttgatatgcttgactctaacctctcccaattccaacacagtacaatcatacccttctacaacctcttataaccttcaaatactttcccccaatttagtcaacccttttcaaaaaaataaaaacaaaaatatagtcaacatcctagattacacaattatcgctatcctaaaataaacatcagcacaagtcttcttacttacatatatttatatgagtaaagtgttgaagatacattcaagttatagttttcacacacaattaatttcaactatacaattaaaaatgatatgattcaattagaatttgtcaaaattatatttaattagaatgtgtctccaaca

SEQ ID NO: 46216 - DNA, 687 bp, Cannabis sativa
cttccattgttataaaatctctaacattttgtacgcataatcactgagttttatttaataaaaaacattgatttatatatatttttgttcaccatgattattgtacacatagtcactgtctaatctattattaacacatgcaacatgactgtcttattattatcatttcttttaatcataataataaatacaacattatattttatcaaacaattatcataagacaaatacagcaatggactattaaacaaagttgctaatgatctatttgtgtagccattaattatcaaatataattgaagagaaaaaatatataaaaaatattgtgagaggggcaaataaatacaaatgtactaaattattaaaaaaaaaaaagaacaatgagggggcaactctacgcaccacataggtccacccatgtgtagcttagtttaatggggaatttttctgttatatgattatgaattttacaattgtggtatgcttaaatatgggaatatacatttcccaaattttataacatttttctttttaaaaaaaatggattactacttattatcaaaaatgaaaatatatgaaagcgaagtcttatttccaccttaaaaatttataaaagtattctaattaataatttttatacaatatttattttatatatataaaaatggaattattacatagaaaata

SEQ ID NO: 46217 - DNA, 1394 bp, Cannabis sativa
ctaatgctcattataatcccttttcaactagagttgagacaaaatagtgcgtttggtagggaaatgtggacttttttttgtaaaaaaatgatttgaattagacttgatctttggtagtaaagattttggttgaggttagacaatgaatggttgaacaactgttatgtcccttattctaaaaagaaaaactcttctgtctgtccctaagtttaaaactatccatctataccaatgctaaaagtattgtcgtttcataggtaataatatactcctagtttcctacctagcttcataggtgagacttgagaggcttcgtttgttagtcattgtttccaattttggacataatatacatttgaaacaatcgcaacgttaaaaacgaaatataaccgttgccttacctgacataatgttgaacttcgttttccttgcgtccttctccagcccagtgggcccaatagcttctgaccaagcagccaagatgttaacaccaggcccaatcacatcaggcttcaagatctggggcgtcactagattgggccctctcgaactaaacgccgccacaacgggagacggtcgtacattcaacacggtcccaccaaagctcagcacagccgtcggattaggaactgatttcacgtactccctgatcaaatcaccgctcttccttcccaccgccacagccggtaacaagtggctatctgccaccaattcctcgccgctagcggctgtgttggccagtatcatcccgatcccaccggcatcgcggaccaccgcacctttctccacacgtgcatttactcctctgtcgcacaataccactttcccacgtaccaatgctggttcgagcgaaccgggcaggcacaagttgcctgaactgttggaccctttattgtacacgattgccaccggtttatttcccattccggacccactgtagagtgagacaccgccaaaccgtttcttgtttcccagcaaagcaaaagccgggaaatcacgatccagagttccagccccgacagtcatgatccacggcgccacattggccaatgaagccttactgggcccactattaccagccgagcatgagacgaaaatgcccttctccattgcggcgaacgctccgatagcgatagtgtcgcggtagtaaggggcggacccacctcccaaagacatagatagcacatcaaccccgtcggcaatggcccgatccatacccgcgagaatatccgacccgaaacaaccggagctccaacagactttgtaagctgctactctagcgtgtgttgccattccacgcgccgtcccgctggcgtatccgagtaagctagcattcactacgtgtgctccggcggcagtgctcgccgtatgggttccgtggccgtctctgtccc

SEQ ID NO: 46218 - DNA, 889 bp, Cannabis sativa
gcaaagcaaagcttcaagctttagagtcttgtagagcttagtccaatgcttccattatttaattctctctctctctctcatacattactcatattgatattctctttaattcttttttgaaaataaattattataaagcctttaatttttttttcaaataaataaaatacttttgagagatcatattaataataccaataaaaagagaatgaaggaactttttttttcatatttatcagtagtttatttttttttttcataagatattaatcacaaattaattaaggatttttttaaaattacattttgattaatttggcatcctttttgtttcaaaattggattttagttgtaattttatccatgatatattaatggaattttctgcatgaaaattttccttaattgtcattgattgttttttatgactttttgaccaggttagatgaactatcaaaactgcctttatttgaatctttaacttccaacaattctgcactgtgtcaatagcctactctatagataaatagttgactaagcaagtaactccctcactcggtttgacccttttaaattcaaattaatattattagttactctaactgtaaactactattttttcgatagaaaactgtaaactactaaggatattaaatataccccacgaaaattactttacttttttttttaaataattctcttatttgtttaatgagtcgttattagtattactctccctatgagacatgcataggtgttttggaagttcgagctatcatcacttaacccaagaaaacgacaacagtttttatgtcgtttctatcaaagatgatgctgtcttagtaattttttttttttgttttgagtgtaatataatagtatttttaca

SEQ ID NO: 46219 - DNA, 1256 bp, Cannabis sativa
tctttatcaaactgaagacgttcctcaaggtaatttcattgttttcattttctatacaattgaatatgcgtttcaagattgaatttttttatgtatttgtttggtttggggtggtagatatggtggataggagagttgaggtggtttctaggttaaaggctttggaggatgcggcggcgcctcttgttacatttttgcaaaatccagctgcggttcaggaattgagggctgacaaacagtataatcttcagatgcttaatgaacgttatcaggtgtgtttcttctttttctaattcaatcaaaattaggattagggttaatttttgtttggatttgtttactgtaatttttgtcatgaatttgatgctttgttttggaccttgtgatattacatagcaaaaatattgtgaaatttgccaaactaacaatttaaaatagtaaaatttacaaaataaactcactaaatttactcactctgatcgactaatcattgcacaatgtaaatttctggtcgtttatggttcgcacagtgtaattcatagaagttttcgcgaccatattaggttattttgctaataaaaaatttcatagtggttatttgtacaaaacatttggttggggaaaaatgaatgcgaaatatttaccatgaatttgatatgagactttttttaatttatatatttttttgtatgtattattgctttaaattatattacgctcaaagttttaatttatctgaaaatagaattcttaatttattgattcagtttaaacatatgaaaatgaaattttttgggtatcgttttctttgggtccaaacatgccttagaaatctatatatgtagtgtatgtctccatttttttttttcttcaagagggtatttttggttaattaagtgtttttttttttaaaaaaaaaaacataaacagattgggccagatcaaatagaggcattgtatcagtatgctaaatttcagttcgagtgcggtaactactctggcgctgctgattatctttaccagtacagagctctgtgcacaaacagtgaaaggaatttgagtgctttatggggaaagctagcagctgaaattttgatgcaaaactgggatattgctcttgaagagcttaatcggttgaaagagagcattgactcaaaggtcttcttcatctctatactcctaaattagttgcttagtagagttttgtagggggtacttttgttttgttgtttacatgtcttggttgtttttgttat

SEQ ID NO: 46220 - DNA, 1606 bp, Cannabis sativa
tggaggtggtgtaggaggtggtgcgggaggtggtcttggtgggggtggtggtggtggtgccggaggcggaggaggcggtggcgttggaggtggttctggacacggtggaggattcggagctggaggaggtgtaggcggtggtgctggaggtggtgttggtggaggtggaggctttggtggtggtggaggaggaggagttggtggtggttcaggtcatggaagtggttttggagctggaggaggtgtaggcggtggtgcaggaggtggtgttggtggtggaggcggaggaggtggcggtggaggcggaggaggtggtggtggagcgggaggtggttctggtcatggtggaggatttggagcgggtggtggcgtaggaggtggtgccggaggaggtattggaggaggtggtggtggtggtgctggcggtggtggaggtgttggagggggatcgggccatggtggtggttttggtgctggtggtggaagtgggggtggtcgtggaggaggaattgggattggtattgggattggaattggggttggagctggtagtggccaaggatctggctccggctccggtagcggtggaggtggtggacgttgaaacacttgtaatgtactactagtcttgttttctcaaagctaaacgagacattaattatgttagtgttggagtgagaaattgatacgccaaaaacaaaaatagctttaaatactttctaatggttgttgtagttttttatataatgttttttttgtgtaaggaatggttattgtattgttgagatacatcattgtaattcctaagatttatgttgcattatttacaaactagtaaatagtttgcccttgtttaatttttttttaaaataaattgtatcattaaataatataattttgtcaaaatttaattttattatttgtttatataaatttctttcaataatatataaagttattatacaaataggcaaaccccacttgtgattataaagttaattaaacagtctttctcaattttttttttgaaaatgaaagtcattttattaaacgaaaatctctgttactaaactaggcaacaacttaactggaatagtgttcaaattaaacagacgatcatagtgagatatagaggtcctcgtaaaggaatgaaccgctacatttgctgatcgttttacaaaatgaaaagaaacattacgcaaagaacttaacaaatttctacaatcactatgatcactaatataaagttaaacaatctttctcaattttttaaacatcacttctacttattatttttactaatgaaatgagacattctttcttgtgttatctctgtattcaaatatgatgttattacaaataataatttaaacaattattcaacaaaactaatcaaaaattaaccattacttaaaaaaaaaatcacaataagaaaaaaaaattataaatataaataaaaataacaaagtcatcaaattaaattattaactaaaaaattgatacaaaaaagaaaaaaaaaataccaaattagacaagaactaataaaaaatatataagtgaaaatttttaaaattagaaaagtgaaaatatttttcaaaaacatatt

SEQ ID NO: 46221 - DNA, 2250 bp, Cannabis sativa
tttgatttttaattctcaatttgcatattacacttctgtataaaaagaatcattgttattgtgctatataatctatgcgtagagaataaactaagagtatatttgattctaatctgtttcttaacttccaaggtatgcatatggctattctaaacctgataataacaagccaaaaaattatcataataaattgggtaattgtctagtgaattttttaaagcaccggtgatgccatgtgatgccatgttatactttgaagtacaatgactaggaactgcaaaacccttttctaatctacgttacccagtatgtcttttatgaacctgaaatacatattgattcaatatatatttgtccattgttctactttgttttttcaatttctggattgacagtgtcactgggctatggtattcttacagtatattgtattcacattaatgcatattgtttgccatgtggtgggtagtctagcatttgcattgaagtttcttttctggtgtagagaaaatattatgttttactcatctttgtttcggacttcatgccatgcaacactggtacaattgggagtagaaaataataaatttactgattcattgatttattattattttttgtcacattggattgtgagtttggtttacttgttgacaccaattcttatggacatttggcaactatcaaaattttttggacaaaacataagcctaagtagaccagttttttttagtgtggaatgtgttattagccaatatcactgtcacagagtgaggaagtggctgtttatatgttattgttttatttcgtttgattagttttaatttaggaatctaaacatgggtgctaacatccaagactatttagcatgaactttgattgagataatttattcactttcagattgctcataaagttggtgatccaaacatccctcgcccatggagtcgtcattcttcaaaaactgatgaaaaaacaactaaagatgggaataaagttgctgctataaaaaaatctatccttatgggatcagaacgagagaaaaataatctgaaagaggacagtaataatatgggcactcaggtccaagaatttctgcaagttatgcagccaagagttaaatcaaaattgtgggcaaatgacacattgataacttcaacaactaacaatgatcgtaaagttaaagagaaacaaactcatacaaataaggaaagcatagagaaatcggctacaatacataacgagtcggatgaagatgactacacagaatatacattatcaccagacaagcaagtttctaacaatttagaaagtcctgctcatgatgatgtcgtttcagatatggagtactttaagagcagagttaagaagaattggtcagagtcagaaagcagtgacagtgatgataatgaggatgataatggttcatcaaaagaaagccccatagagcagggtgttcaagaaaaagttccgaatgaaaaattaaattcacttgagacggaggtttctagaaaagaagatgaagaggaagcttatcatgaagattctgatggtgacatgcatgaacaagacataaagaagtaatcgagaccagtcgtcttttcatccgtaatctgccatatactgcaacgtacgtagtcattttttcccttttaaatagtgctctcattttttttaagaaaatatgcccggtttggtagatggcgtcttattattgtcttgtctaacatagaagtaggcgctcttaagtaataattttttcttatgagctattttttcaatacaatttccttaatcagtgaagaagagctggaggagctgtttagcaaattcggaactgtctcagaagtccatcttgttattgataaagataccaagcgtcccaaagggtttgcatttgttaattattcacatctggagtttgcaactaggtacctcttagtgatttaattttattttacttctgtttcctttttctgcaattttgtgattcattatgtttaaatgcatcaacttgaattgaacaccttcatcatgaaaaactcatcaaggctgtgaatctaggtttgatgttttgttattcaccaaattagatagaaacagttatttcttgttattaatctagtgacctatggtgatacacaaatacatactcttcttttctgtatttaatgatattttttttctttcatgtttaattttgggtaaagagcattagaggaactagacaattcaattttccaaggaagg

SEQ ID NO: 46222 - DNA, 3168 bp, Cannabis sativa
catatggtattggaggtaaacccaattgatctgtgtctacttgttttcttttatatgctttgaaatgtttacttggttgctaatttttaacatatatttctatggtttgctgatgcagcatagtgtctggctggatgatgcatttgacagagcaagacaattatatttgtcatattatcggtctattcccaaaagcttggagaggtcaactgcccacaaactcatgatagcaatgttggatggagatgaacgatttgttgagcctactccaaaatcattacaaaagttgaccttgcaatctgtaaaggatgcagtcatgaaccaatttttaggaaataacatggaggtgtgtgattcttactttgtattctttttatgaaattgtgtataaatataacatttctggttgattaattaatgaataattgttttctcaaggtaagtatagtcggtgacttttcagaggaggatttagaatcttgtattcttgattacctcggtacagttagagctactggaaatcccagaagtaaccatgatgagtatgctccggttgtttttcgtccttctccatctgatttgcagtctcagcaggtgggacgagaaactaataaactacttaagtttaaaagcctgctttccatttacatattattcatagttgtctatgtttatttcatcagatattcttgaaggacaccgatgagagagcatgtgcgtatattgcaggccctgcaccaaaccgctgggctagtttaacagttgatagtagcatttcagctggtgatggtgagttgttgcagcatcttatgtaaaactatcctttgggtgatgtacagatatttatgtggatagggtatatgcaggtgtgcaaccaaacactgaagaatcgcttactgaggctgagggttttgaaaaggatttgcgaagaaaacttcgtgggcatccacttttctttggtatcactatggggcttctggctgagattattaactcgaggtagtttttcctgcacatcaaacttaataagcacctgaaaaaggctcaacttcatgtatcaaatgcatgtatcagatacattttgccatttgtaactttgtaagctctataatattctttggtgattttgctcaggctgttcacagctgtacgtgattctctcggattgacatatgatgtagcatttgacttgaagttattcgataggctaaatcttggatggtatattatttccgtaacatctacgccaggaaaggtgaggactgaatttgctcttgtgtaatttgtattttgggcctctttgaaccacttcactcagtttgactgtaacatccttcaggttcacaaagctgttgatgcatgtaagaatgttctcagaggtttgcacagcaacaggattactcaaagggagttggacagagttagtttcttcatttttttccccttcctttttatatatcaatttttataaatggatagcacatgaactaaggttattttgatcattgttttgcaaactacaggcgaaaagaacccttcttatgaggcatgaggctgaaatcaagtcgaatgtgtattggcttggactcttagcacacctacaagcctcttccgttccagggaaggtacaatattatggaaactctctcaagatcaacctaactaacctcccttggaaataagtgttacgatagttatatgtgatgtcattgtgtgtatctgaattttggtgcaggacatatcgtgcatcaaagatctaacattgttatatgaagctgctgaaattgaagatgtatacctgtcatatgatcagctgaaagtagatgaggattctttgtattcatgcattgggatagccggggctcatgatgatgaagaggatcgttagataaaggctttccgggagttggtctagttggacatggtttatcaacaatgaaaaggcctactacttgagggtgctcctcccctttaagatgagagtttcattctccaagtaaagcgattgttaataattttcataattacattaaaatgatttgataacttcatgccgagaccgagaccagtggcattgatgtgctggtatttgtgctaattttgggagaccattttcaggtttaaaggactggtatggcttcaccttgtcttgctgggacaatccaaaatatggcattgccatgacaacccaaagctagcttctttgcaataacactgatgcagatttttttcatccccgcttctactaataaggtaagtaccttacttgacatgcatgcatgaatgggattattgtaatccagtacttgtaaatatatgcgcttaattgtgtttaaatcccacttatgtcaataagggtattttagttgttttggtctgctgaggatataatcatgataactgtgattttatttatatactaggactgttattgtgtagcattattgttggatacggtacaggtggatttcgtcaagcagtagcggtttcggctcaggcgaagttttggggtccattctggtataattgggattttatatgttcttgtatggtatttcccatttgggatggtcagtgttattgagtaaattatttatctatccttgaaattatatttagttaaataattctttaaggtcttttgaccagtaattttggtctactgcattaagtgctttatttatttcaagttagaaaaactgtattttatttatttcttttgaaaggactatcatccgtatcttacgaacagttacaaagtcctaatattaagagcagctacaaggtacttgctgcgagatgttgaatatttatcgaaataatatttcgaaaatgttgaaatctcacttcatcaagattgtgatccttatttagatgaagtcgcctcacaggttgagtcttgagtttttttcaacctgtcccacaatgcatttgttgcgagaatttagtatttatgtcacgtgatattcaattcgactttttcattaaatggtacaaaaatgaaaaaaatttcccctaagtcagtttttcatggtctacataaagctgacttattatatgttaccttcccattctttttagcacctttccaagcatttgttttataacatacgagttgggcatgttttgagtcatgtgtattacgagttgctcgtttgtgtttttcgt

SEQ ID NO: 46223 - DNA, 1072 bp, Cannabis sativa
ttttcttggttcaaagaaaccatgttaagatccattacaaagaaggctaaaatgcggggttcaaatgcctactataattcaccgaatgaattatcttggaaattgaagtgcttgcatcatttcctctataaaatctcaatcgattgtatcataagtctttttcagattcaatttcaacacacaattagctttcgaattttttctctcgtaatgtccagccatattctgacaaatcatgatgttgtatgcaatgaatcttctttgaacgatatatatataaatatatatatataagagaatcttggagctccattttccatcgtcgagcaatcgatatggtctggcccttctctacttttcaccgtcgagcactccaaagccccagcgagtcgagatctcagccacggttggaagactagggccatgactttaactttggcttcagatctcggtcttcaactttgaccacccacctgtacgtgagagagagaagaaaaaaaaaataagagataccaacttcgatttggtttatcgatgcacgagctttgggatcccatcctcgtcgaacgtcccgacgagaccccaaatttctacagcaatacatcaagcaaaaacaaaataacttgacaaagtatgcagccaaaaaaaatttataactaaccaacgtgaatagagataataattgaaaaatcgtccctatatgcatcattgccacatgtatataattttatttttacaccccatatattatgtataattttattagtctcaaatttgtgattatattatatactcacgaataataataagaagcaaaatatggcaaagtcatcaccaatgtccaaaaaaaaaataaaaatgagcaaagcttttgagaaaataaaaaatgtgagctagcaagctaattaaatctatatacatataaagtttacgtgaaagttgcccccatacctttgttgaatatttcttatttacaggaatagaattagatttgatttcctatttgtggatctgcatagtgctacagttgatatttttgtttttttaagggattataaaccttcatatatat

SEQ ID NO: 46224 - DNA, 1274 bp, Cannabis sativa
aatgtgagaaagaactaaacctgggatgtgggattgaagaaactgaaatttacctggtccgcaagttcaattacaaaaaaatctgctggaccacctactaagaaagcatttgggaacacaggaatttgcttcaagaagctttcgagcttgtcaactgcaggaattggaaacagcaaattacgagtgcatacaaaaatgttcagtaataaaatgtcaacatcacaagcctacctgagttataaaataatataaaccttgaaagtaaaagatagagatctcgctgtgcctgagaattaacaaaacaactctttaaattctacttaagaatgcttattattagacaggattccacatcatgatccctaatattaaaaataaggggaaataaaatctcaacaagtgtaaaagggaagatttatgcgtgacctgtacaggaatcttatttaaccgagctggctccaacaccacttcctcaagaagatactgaatccaaacagcataagaaagaaatcaagtcatgacatttttaatcaacaaatatttgcataggaaaaacactcacacgaaacaaagactgaaatcgtcttgaatttgtttggatgtcgatcctacaaattggcataaaaataagtaccattagggaagcatgcgaaaagaatcctctgttagagtgaggatgctttatatagagattacaaagaacacagcaagtcagatatccaaataaaatatacaccacacttctcatggagtgttgctaaaaccaacagtgacttttagccaaaggcaaaacaatgtcaaagcaatagcatgactatgattccactgctgaataaagagattgtaagtgaatattacactaccaggggatgacacatgtaaaaaaaaaaatgtattcatgtacgattaagaagtaatggaccaaaacaaacagtacatctaaaatttcttaaggtctattaacatagtattaaacaatacatactgtgaaatgtagtgccccagtatagtaacaatatttcatttgatccaagcatataaaaacaaatatttgcttaaaactaattagaaaaatttaagattgaattgcattctttctcaacagccaaagtaccaagtttaagagttaaatacagaattgactctaagacaataatcgttcaataataaagcgtatctttttaaaaccatttaatttataactagcttcacgcaggtttaatcagtgacttgaacacacttttatacaataatcttcttaccaaaatagattt

SEQ ID NO: 46225 - DNA, 1752 bp, Cannabis sativa
attaaaatatctatcaaagctatacaagttagaaccatatactcgaaagaattaattgacaatttcgtatcaatctggactttaatttattttttgcttttgttttcttagctggactaaaacaagggagtagactttatatggtaataaattaaagcaaattaatatatagatgactgttagaaaacaaaaaagatgaaataacagactttctttatagatatccaaaatttatgatatatagatatctagtatttatgacagtatctttaaaatagtcaaattagataagtattaaaagatgattcctgaacaaaaaaaaagtattactgcctttgttcgaaggagaaaaaaggattactgtcattaatatcacatccaaagtcacaattcaattttaatctatctattataaaacccccttaaatagtcgcagtctaccaacctaaactaaaccctcctatatccctttttatatgctaaaattgtaagaactaaaaatggccaattcctctgtttcctcttccttgctcctagctctccttgtatgcattgcaggttagtactaattcttattcaaacaactttgtttcttcttttggtgaatggcgatctttgtttaaataattttttctcatatttaactgaaaaaattatgtatgtaacttattcaaaaactcactaatcttgatcgattgattgattgttattgtgtgaagtgaaaagtagcttattacctattgtggaaggatgctacgtggcggtggtgggaggtggttgtcccaatgcggaagcatgccgaatgacttgtgctccttgctaccgtggaattggatatatcagcgccttctgtcgtgccgccggcggaggaatgccctacgaatcgtgcgtgtgcacgttttcacgaggcgcaccatgtccaccgcctggtccacctcgttgcccgggtggcggtgctgcctttattatgattaatgaaactcaccatgagtagcttatcacagctataagaaattaacatgtattagaataatattgaagcttatgtatacaaagttttaaattttactgattatatactttataagcttcaacccattttaatttcattttcaattcttatttaattttgttttttaccttatagatttgaataattaatatttttaccctttgaattttcaatactacctgatcttaccccttaaaatatacgtcttgttcaaaattatccctaaaatataacaattatataattatgtcccttttgtagctttcgttactttaaccgttaaaattagcatttatacccatgaactttgatcaatactaaattttatcttcttttataaaaaacaattaatttaaaaaattataattttctattaattctcaaaaattataatcatagacatgacacaagtacacatcttcctctaccgagaagaagaaccgcaaatggaagatatttttgaagaaaatgctatttagaaaatatgttgaagagatgtgatcaaattgaatgagaagtgtgagattacatagggaaggaaaatacactgcaacggtttagatcgtggtcaaataattttagcgggtaagattaaaccatgagatttaatgttagattcaaaagataaagatataatgtgataacacactgcaacggttgagatcgtggtcaaataatttcaacaaccaagattaaactatgagatttcttatcttctaattttggattcaaaagataag

SEQ ID NO: 46226 - DNA, 801 bp, Cannabis sativa
actaaccagacctcgatcaagacgaacctccacccatccttccgtcccccggcctctctcccaggtaaagggataatcaataagatctaaatcttgcaattcacaatcaaataaagcttgttgaaaaccaagaataagtctttcaggatagcgattacctcctctcttatcctcatgagagacaacattattaaggtctcccatcacacaccaaggcagaggagatcgttgtttcaattcgcgaagaagatcccaagtttcctgcctccgtcctctgtttggttgaccatacattcccgtgaacctccaaggcggcttcccctccacctttatctcagcatcaatgtatgaagaagaaaatcccagcaaagaaacctcctcatcatattgccaaaatagagcgagtcccccacttctcccattaacatcaacaaccaccgttccttcgaaaccaatagccacacgtgctctttccatctgatccctacggcaaagagtctcacaaaggaaaacataattgggcttcttttggacaactaaatccttaaggaattgtaaagcccatgggttcccaagcccatggtaattccatgacaaaatgctcataatgaatggtgggcctagaaaccagtacccacctgtaaaccattttttgaaccaataacactaccttgattcccttgttcagtcttctcttcattcggcccagcttgtaagcccatctccatacgcctccttttcccattagcaatcattaatatgtcctcattaatagggctattaacatcttgcacattttgc

SEQ ID NO: 46227 - DNA, 988 bp, Cannabis sativa
aacttgggattcatcactaatgagccatcgtccaccaacttcaaaaacttccttaccccataaaacagatctccaaatgaagacgttttcttggatgtgtcagcctttaaaagggtagaattaggataatagatagccttcagaactctaacaaccaaaatgtctagagcacaacacaatctcgtacagcttgcttagccaacataacctggttgaagatggctggataaattttgaaagtccataccgccatcaaacttgtaccaatacagtttttctgaggtaaactagtggagcttatttttactcatatttccaccccctaaaaatgtgcgcacaatctatgactccagaatcaaatatgcaagaaacctaaagagatacataaaataaataaggatagtttgaatgacttactgaataagaatttcccttccactagacaaaaaagaacgagccttccaatcatatagtttatttctaatctagtcaagaattaattgaaaaagtcctgtcttactttggcacgcataacaagaaagaccaagatatatatatttctcatgacaagaaatcacattcaccaccccgagatagagatagcagccagcttatctctattctcatcagtaactcaagaactaaaccaaatagttgatttatcattttacagaactaataaaactacattacattttacatgcacgtgtgtaacacgtgacaccaactagtataaagaaaaagtttcaaattgaagtgcaagtgacattttttttttatcaagaataaaaacatgcctttcactagtaccctttagcttttccactttttatattttcagactttatattgtcttctattcattattatcttaagggaaattcgcgacaaaatttttcaaaaaattcagtttgatacagataaatctccaacctcaaaaaatagtggtaatagtcctcaaagtcgtgctttttatttgtccgttagt

SEQ ID NO: 46228 - DNA, 2691 bp, Cannabis sativa
tgaggggtggtgttgaagaacctgagtaatactagaccctactactgtggattgcagtcacacttacaaagatcctatttcctctgcttttccaatattgttgggtgtatcacttctgttagaatcttattcttttctgtgtaaatacgtgtcaattgattattgattgtaaagggatatccattgtaccactcttgtctataaatgaaatattcctcactcaggaaaagctaaggagagtttttgcccaattcatttttctttgaaatctatctgcaactgcaaatatgtataaaaattacagctacaaaaaattgtataaaaaccctattgcaagagtatatggaataattccacataaatattttggttttattataagaatagtttgaataattattattattattattagcaaatagaaatcaaatcttagctactatcatttcacttgtcaaatatgatcaaataggttcaaattgaatcaatatacagagtatattgagaaaaataactcaatgcaacacttggcaactcttacaagtttaaaaacaaatctgaggataattctactcaacctagcaaacctgtcaagtcacaacaaaattaagctgagaagctctcttcttaacattatccttcctctatctaaatagtcttgatattatgagcaatctcagcacatgcagtaggtcctgttgtgtatgatgagaaaaaattccaactctttgacaatgttcacaacaaattttttgggaaacaaatggttggttttcatgaatcaaataatcccctttgcctttggtctcaagatcctctggaataacatcaacacaacagagtcatcatgtctgaacttggttgctcatctctttcaccctcatacaagagcaaagatgagttgagctgtggacgctttcaatttgtccaattgctgtttcatcgcgctgaagttacaggaggggcctaaagctgtgatttgagttaaagcaatgaaactaatggcaaatatacaagataaaaaaccatggttgaaaattgtaatgtatgtgataagattcaaaaggggttttctttgaaaaaggaatataaactgggaaaaagtaacagaaagcctatgaacaacaagacctctaaagactaaagagattcacattgtaaattaagtcttgaacattagataccatgagcaaagacaaattgaacaaggacttattattataacaaaatggacattttaacctcagccgaaagatggtgataagtttgataataatcacttatgaaatcagtacatttaacacttttgcatcataggttgtgtgtaatttaataaaaatagcaatccaaaattgaaagaagaaaaaaactgaaactttatgataataaaagttgaatttgcaacaaggatcagatggtgatgcatgtaaagaattcatcattcaaatacagaaaatgttgggtagttatcctcatatccaattgcaaaaacagaatactaaaaacttcaaaaagaaaataccaattttacaaaatgaaattgaatttggaattgcttgaagaaaagatcagatagtcgatcattgatacaccatgctacatcataaagatgtaagtaagactgaacatcaaagattatcttcatatcataacacaatttaaattcaattccagttaacaaaaacaaaatgttagtaagctcagatcagatatgaatgtcaatcaccacctagcaatcagaaaaattgcaagtaagactggggcgacaaaattacaatcatcacttcgttaaagcctcaaaaaattcaatcttcaatacatatatgatatatacataccttgacatagataaaccctcaaattaaaaatgatattttttcgaaagcaaaggtgccgccattgttgcttactatctataatacgaggaagcaaattataacagttagctaaaattaatcgaatcaatatagataaaccctaatagaaatgaaaacctagaagaaagcacaatgacattgaagtgaaattgggagaacactgtgagctagggttttagtcgccgcttaggttgagggtttgaggttgtaaaagctccaccttttataggctagcagaacaaaggaaaggaatacttattagggaaataagaaaattacattttaatttttaaaattctttttttaatacaatttggaattggaattctatatttttgcaaaaattattgcttgaattctttttttttttggttaaataataaaatagatgtcatatttttcaaatggcataaataagattctgaacttaatgttttggtatttttttttaatataatcagcttgaaaataattcttaacacgaaaagatgtcataaacgtaactagttttgtcataacgcatgtagatcgagttattattaagttccattttgatagaaaatcaatttagggtactagttagttttattttagaaaatataggatctaatttatcatttatcgaaacaaagagttcagtcagtaacttttgcaaaacacatggtccaaaatggtatgtacctatatcattttagactgtgtttttttaaaaattaccgattagactatctattttgttaaatgactatttgaactctgtatttttcaaaatggtacaaaatagaccattaacttacttttcgtcaaattaaaa

SEQ ID NO: 46229 - DNA, 2424 bp, Cannabis sativa
aatttttgttttaatttcctgtttgagtttctagggtagtttttatataaattgttatatagattttaattgcgatttaagttaatttgttatataaatttctattaaaaaaaattgttttaaagtgtaaaattaagaaaaagattctattattactattattattattagagcattgttattgggcacccgagcaccttttataggtgatgctctataattgattagcgatatttctttaaaattattttttttaagttatatgagatccgatacttaattacaacaatagtaatatgacactgaagaagatgataaacaccaattataccattaaagcaattttactactactactattaatattattatttttgttattgcttcaatgtcttagtctatacttagttatttgtatttatttatatatttatttagtttttagccaaaacgagataccaaaaagtcgatttttatgttgctaaaaatgaaagttagtaaattagtaccactcttcaaactattggtagtgttaactaagtcatacacaatgatgatatcactatacatatttttaattaatttattgatattttggattgcatcaagtgtctcatcatacattatttagtaatcttatcatgccaattcatatatgatttgtttcatgcttatattattgtatccattcatcattgtatgtttatttataatataaaatgctatttttaaattaaaacatgttaaattgcattaattttttttttgaaaaataattgatatatctataggcaaattggtaatgcaaatatctatacatagtacttgcaattatttaaaaatattttatcaaaactatatcaatttataatttttataaataaaaatattattatgttatattatttaagctgaaatcaatttagaaaaatacaataattttcatgttttttttagaaaaacccaaaattcaagcaaaaagcttaaagaaaaggtggaggtaatattaattatattcattcatctcattaaaaatgagatcatggattcaagaagagtaaccggaccatcaaaccttgttaataacttccgacaaatcatatttagttaaaaaagaaataacaacattagtagatctagaacagaaagaaagagtagcagaataaaatttagcaaaactatgtctaagatcttcaaagataaaactttattactattattattattattgttattattattatcttactgcatttttttatttaagtaattggagtataataatagttcacttaaaagaaaggtaccattgcattaactaattattaatcctaacttatacactttaaattcaattggaatggattaattgtgccatattgcaatgcttctgtggacttttttcccataacacaacaactgaacaaagttagattaaccctttaatctagtaactaaaattaagaatagttgatttaaatattgaaggagtaattgacaaaatttacattttgaaatataaagttattgaaaaattcttacaaaagaaccatatttcaacacttgtcaactaagtatcaaatgtagctgtatagagtacatggtacatcaggctttttaaagaaaatactttttgaaaaatgctaaaaataaataaacaatattaataacaataattataataattaactaaacacctcattatttattgcaatgcaattaaaaattacaacaatatggcctaataatttggtggggttaagagaaaagttattacattgttttgcttaatttactcaattaaaatgaaatttgttttaatttgacaaaaattactccattacttttgaagaacataatttctttttcaataaaaaagaaaaaagaaagttctatttatttacaccataaacatagaaagaaaacgatagcataaatgaagataaaaataataatgtattgtgggagtggtccctcccatatcaatataaataaaaaagagattgggtatcatttttttataatattattggagcgttttttatttgtggagttagagaaataatatttcatttttatttttggaaagtctagtacaccccgctacgagatgatttggtagattctttatttattttagtattcgtgaattttttttattttaatttgtttgtgatcatgtaaattgtagttatttataattatttgtaaatttttgaaattttttatattatggtgcagaaaataaatataaatattttagtatacatgtgattgtttttagatatatgtagaaaataatcccttgacttttttattcggtattgtagactatttaaaaaattttataaatctacatgtagtcctaagagtactattctctataactctttatttaaaatagattcttcaaaaaaaaaaaaa

SEQ ID NO: 46230 - DNA, 513 bp, Cannabis sativa
tggtaggatggaaggagaatagagagaactgatagtttttttgaagctcaccattcactttgagtgcatgcacaatcaattcatatgcggtcatattggctgagcgacgaacatgaattaaggaccctccagaaaaattagatagtaaactataaatatcatccaatactgatcctaaatcattacaaaaagaagattttctaaaaagagtagacaccattgctaaacaagagaggactgatagttatgaaaagatgaataatataaaggagtgagaaaaaaaatatagtaatccttcttaattgttcaatgaaaaagctcaatgatagaactaaaaaataatatagatcactatttatttttaaaattactaaagtattttcataatattttcagatagtaattttgtaattttgaacaaatcaaaatagagagtcagagtaccaattcttctattataatagaaggatttaaaattttcaactaaaattattggggagttatatttgcacc

SEQ ID NO: 46231 - DNA, 3032 bp, Cannabis sativa
cttattgaatttgactctgaattttgttttgtgaaggacaaagccacaaagaaggtgctgctcaaagggacgcttaaagatggtctctaccaactctctcccactttttccaagtctacttgtcaccaaaatcagtcaccatgttttcctagtactactgtgaaatctgttaatgttgttcagcatagttcagctttaaattccaagaatgatgtgtggcataggcgcctaggccacccatctcttagagttcttaagaaggtcttaaagtctagcaatgtaacttgttcttctgaattaaatacaagtttttgtgatgcctgtcaatatgggaaatcccatgctttaccattcaaaagttctaacagtagggctaccaaaatgctagacttagttcacaccgatatatggggtccatcacctatagcatcaaatacaaatttcaagttttatattcacttcattgatgactatagcaggttcacatggttataccctttaaaacacaaatctgatgctctacaagcctttgtccaatttaaaaactttgctgaaaaccaatttgaaaccaaaattaagtcaataaggagtgattatgggggagagtatcaagcctttgagagtttagttcaagaacatggaattcattttcaacactcttgtcctcacacctcagcccaaaacggtagagccgagagaaaacatcgccatatagtagaaatgggcttaaccttgcttgcccaagcaagtatgcccttgaagtattgggttgatgcctttcaaacatctgtctatctcataaatagactcccaacaccaatacttcatgacaagtctccttttgaagttgtgtacaaaaagaaaccaaactatgacatgctgaaaacatttggggcaacatgttttccatgtttaaggccataccaaacccacaagtttcaatttcactctcttaagtgtgtgaaccttgggtatagtgagtcttttaaaggttacaagtgtctaagttccacagggagagtgtacatatctagacatgttgtgttcaatgagcaagaatttccttttaaaattggcttccttaataattttgctcctgaacactctgttattataaaacattctgcctggtcacagctcccaaatatgcattcctttgcttataatatgcctcaagaaaggaccactcgaaggcaagatgtccctggagtagtacctaaccagtcggctttgtcatcaccaagcaatagtcaggtaagtcactcttctcaatctcattcgaacaatgatcatgaccattttgatatcatgtctgaaactaacacagcagataaacaacttgattctacacccgtggctgactcacctgctgcaaccgaaaccccagcagacagttcgaatgttcaactagcaccacaaccttcacatcccatgataactcgatccaagagtggaatcttcaagcccaaagtctacttcagtaagacaaaatggaatcctgaaaaggaggaaccgaggagtgtagctgaggcacttagtcaccctggttggaatggagctatgagcaatgaagttggtgctctcaaagcaaagaaaacatacactttggtaccttattctgatgcttacaatgtgattgggtgtaagtgggtttataaaattaaaagaaatgcagatggctctctccaaagactcaaagcgagattggttgcaaaaggatttcaccaaaggccgggactcgattatagtgagactttcagtcctgttgtcaaggcctccacaattcggattgttctcactattgctatctcaaacaattgggaaattcgtcaattggatattaataatgccttcttgaatggccatcttgaagaagacgtctatatgtatcaacccgaggggtttgaggacccttcgaaaccaaaccatgtgtgcaagttgcacaagtccctctatggtttgaaacaagctcctcgagcttggttcgacaagctgaaaaataccttactgaactggaacttcaagaactccagagctgacacttccctgttttactataaggatgaaaagctgattatttttgttctcatttatgttgatgatatagttgttacagggaatgttagctcaaaacttcaaagctttatccagcaactcaacaagcagtttgctctcaaggacttgggacaacttcactacttccttggtattgaggttgcacgggatgtcacagggttgtatctcacacaaaggaagtacattgaagaactcttggagaagaatgatatgaccaacctcaagccatgtcctacacctattgccactggaaaagccatgtctatcaatgatggagagaaacttggtaatcctactgtctaccgtagcttaattggagggttgcaatacttgtgtaataccagaccagatatttgcttcgccgtaaacaagctgagccagtatctcaaggcaccaacaacagttcattggggagcagcaaaaaggatcttgagatacctcaaagggacaatggatcatggtctccacatttgccatagtcacaagctaaacattgctggtttttcagatgccgattgggcatgttgcatagatgacagaaagtcggttggtggatattgtgtgtatcttggagacacactagtttcatggtcttctaagaagcaagcggttgtttcaagatcgagcacggagtccgaatatagagctctggctcttgtcactgctgagattacttggatcgaatccttattaaaagagttggggttcccactgcctggagtatctgttacctggtgcgacaatatgagtgcaagcgctcttgcttccaatccagtctaccacgcacggactaaacacattgaactcgatgttcactttgttcgagataaaattttgaagaaagaacttgaagtgagatacattccttcctcggatcaaattgcagactgtctaactaaagccttgcctcactccaggtttcatcagctcatttccaaactcggtgtgattgcttc

SEQ ID NO: 46232 - DNA, 987 bp, Cannabis sativa
tattttagtaaaagttaaaagaaactaattaagattttttataaatgtgattaattaaagaaaaataataagaaatagtttgtgtgtgaatagtaaaaaaaatataaaaaagaaaaaaaagaaatattataagtgtttgtgtttttattaaaaaaatattaaaataaaattttatgagagaatgaaagtattaaaaaaagatacaaaaatgtaatgtatattaattaaatatatataaagataaaaaaaatataaagagagagaattgaaaaaaaaaaatggaaaagagaaagaaaagaaaaaaatcaggttagtccagcccaacgctaacttatataagattaaaaaagaaggtcaaccaacctgaatgaaaaaaaaaaaaaagaagtcactaaaaaaactaaagagacataagaaagaaaaaaagtaattaaatttaataaactaaaattttgaaaaaaaaaaattgaattttgtgtaaatattcctaaatattcatataagttatttttcaattaaaaatttgcaaaaaccatatacatattttactgccattattagtactagtataaatatctatatgaatatatcagtattatatacctaccctctttaaaaaaaaatactatttatacttcattctattatttttctttttcttttttattttaaaccacgttattaacatctcactttatatacctgcaatgcaacgtacattataaacgatggaattactatatatattatatatggtagttcatctaaagtttgaatagggaacaaaacgtttatgaaattaactttaattattggagtgtaatatttgttagaggagtactgttaccatgaactcccggttacaatatttagtcaatctttatgtctgaaaatatatatgtcggaattttttttttttttaaattcttttcacgggagtatttgttatgcttacaacatcatctctgtaaatttttgaaatttttt

SEQ ID NO: 46233 - DNA, 730 bp, Cannabis sativa
  modified_base (661)..(701): a, c, t, g, unknown or other
tatatatatgtatattttagattatagaaagggttatttgagtttctaattttttatgcttaaagtgttgtgatacgtgaacaaaaaatgtaatccaatgtgtaatttgcatcattttttgatgtttcacgaagcttttgcgataattgtcaaaaaaggtaaagatttggtgtaatttgcgatatgttatgatgtttcacaatgattttgcgatatattactaaacatgtaaaacagttaatgttgtcaatagtttctgatgtttttgtgatgtcttacgattattttcgatataaacccgattattgtgttataaggcttttttatctattatttcgttaaaaatttgactttcttgttaatgacaggttcaactgtgtttgtacttgtgttgtatgatggagtctgggagtgtcagggtttcaattggattttcagaggtgcaactagtgtaactttaaaggttgagatggacacaaccttacaacaattgtgtgatattttatacgaagagttggaagtggcaccattagggtatgatttgaaattagaggtttgttacatgtacatgaaaggtcgtctgattccgcccgagtttttaaagaaagaccgtcaactaagagtgttcttagacatgagggctgttgggttttatgccctnnnnnnnnnnnnnnnnnnnnnnnnnnnnnnnnnnnnnnnnnatagattagaaataacatttaatgttgca

SEQ ID NO: 46234 - DNA, 2155 bp, Cannabis sativa
taaaaaattaaacatgtataatatataaaagatatgaaaaactttgtataatatataattttataaattattatactagtttatatttgtcgtacatttacacttattagattttaaaattttgaactactagttttctattacttattagagagtatcaagtatttcttcttgctatgttacctagattgaaagcctcttcttgttatttttactataaatgaaggtttgatatgagtgatgaaaacaaattatctcaagggagagcctatatatgtgtaggtagatacatatttgttattatttcaactgtatttaacaataataaaaaaaaaattattacttttttttttacgtaaggattatttttaaatcaattttgtttctttgtatatttaagtaaattacataattaattttaatttcattcaacattatttggttttattaaatatgtctcaaaagaataacatagttattgttagaaaaatgaacaaaatagagtttgattggagacccaaagacattttgcctccaacaagataactagaccatttaatttaagtaattatttttcttttctattaaattattattgttaaattaatgtttttgaaattaatgacaaaattattttcttaaaaaaattgatatactttgtatgaaaagctcataaaaaatatgaaaagctttgtataattagtgataagtgataataatttttctccaattaaaaggtacactataattgagtgctcaaattatgatgttgaaacaatgtttactattatatcttctaaggggtaaatgaaatagaatataagtgtttttaaagttaattgtaatgttgcaatttttttatcaatttttttttatcaaacgatttaggaattagatagctgatttttaagctcatttttctaattctagtcatggtcgtgtctttaatgagaaatgtatctcaattgaattataaattattattttaattgattctcatatataaaatttcatgatttgttaaaaaaaaaaatagtttaaaattattgttttgttagttacacacaaaactcttgttaccacatgaaaaaaaaaaaaaaggaaatgataacgtatagttttttttatcatttttttttctatgtttacgttaattattttactatttcatttatatatattttttttgattaattttaaatttaagtataaattttattttcatattttacaatttcttcataaatcactttcttcttacttttttttttgtttttttttttctgcaatgaattcttgttctgtccaccgcaggcccgaatttaggcataagcagactagacctgtgcctaggatccacctaacccaaggacccaaaaaaaattctttttaaaattatacaattttttattgattttgaaaaataccgtagttttgtttctaaataagggcccaaaaatattcttttgctatggcccacaagatttcttggccaaccctgggccagcgcttaaatctccctagcttgaagttgtatcctaaaatgaatatcattcttcttcttcctcccaaactcacagtcgctcaccactatgaaaaatgaggcttgatttcttcctaatcgaaacggaatttgctacacatatcacaatcctaaatcatgatcaaatcatatatcgcaatctcagctccttcttcttcctcttctgagttattctctcttctctgtgattgttcaagcgcacaacgtaagactttcataaaatgaaactgaagagacaacaaatatcacaatccaaattacaaccctaaatcaccatcaaaccatgtaataatctcaaccatactccagtcacaacctaaattacaagaccaacacatgaagtttccattgattttctaaacaaaactaaatagttgcaactgatattgcaacacaaatcgcaattgatattgcaaccctaaatcactattgaacatatcgcaatcgtagttataaagtcacaaattacaacattgaataaccattaaaccatatcgcaattttatatatgcccccttcgcaacctaaattgcaacctaaatcgttgttaggattttatgacctaaataaaactcattgtaatataatcttattgtaatgaccgctttagta

SEQ ID NO: 46235 - DNA, 2268 bp, Cannabis sativa
gtatatgtcaaagttcgggaggtaaaaattctaattagcctaaatatttccaattctaattcttcttcacccattaaattaaatatgcctgcatatattcttacatatgaatttaatgggtgagacaacagtataacattagtaaataagcaagcataatataaagctcatttttgtatgattatttagcgaacctgctatatttcacataattgcaaattggtgagccaaaaataacgcttatttttgcataaacaaaggccacagttatgcttatctaattgtaaatgggcgagcttgatatagcgcttatttttgcgttattatttaacgaacccactatgctatttctatttataaattggcgagcccttcatgtgctcattttatgcataattatttgacaagtccactgttatgcttatgtaatcccaaagagacaagttcaaacgctcatttttgtatatggcaagctcgcgatagtgctcaattattttttcccattagcacatcacatttatggccaatgcctcacttaggggccactctgcccaatcgggcaacacaaccctgaaaggtttgctggggtgacatctcaaatatataaaagaatcaaactctactgaaaaattttggtccgtgaattatttaccaaaggtagaagactttttgtctcactttaggggtcaatgtcccacttggtcaatacctcctcttatatatcaaatatataaaaataaagaggcacgggatattagaaagaacgagaatcaataaatcaatgattggacgctatatatgccagtagtccaacacttgtagattaccaggtgtactttttcttttattttaatcaagtccaacactttggtcaaataatcattttatatttgatacattattattcgttcacttctgagagaaatacaaatacatttaaatgcatgataaagctatatttttacacgtgctcattttatttacaaaatggagtgaaacatgatacttatttcttgcataattatttatgagcgtattgcaatacctatttttacattattgtaaatatttaattgaattaccataaaaaatattgaaattcccttcatatttattttttaaaaaaaattaaacaaatgaaactacaatgatcgtcggagttgtcactcatgccggaaaagtcaccagaggttgctgtcggtaccggaaaggtcgtcggagtagctaccagtgacagaaaagtcaccagagttgccaccgacgcaaaaaaaaatctttgaaaatagcattgtcgccgaaaaaatcgcaggaaaaatcaccaagaaacaagtttcttgatgaagaaaccgatttcttggtgattttttcggcagtaaatctggcgacttttccgacaccagcaactactctggcgacttttccggcaccgacagcaaactccaaaatagtcgtcagaattgtcattgttgctagtaaaatcaccggaaaaatcaccaagaaagcagtttcttcatcaagaaaccagtttcttcatcaaggaactagtttcgtcacacaacaataataaagattatgaaaataaaataaaaatgatatacaatgaaaataattgaaaccagtttcgtcaatcaaccaaatagagaaaaaaacacaaaaaaatactcataaatataaacaaacaacacacaatgcacgataataatctaaaacaaaatataagtgtgaaaatcaattttaaacctagaaacaaaataataaaaagaaacttaaaataaagaatatacaataacatcataaaatagagcaacctcattacaaaacccttaaaacctgtaaaactaatttcaaacttatgaaccctgtgaaaccagattcgacactaagaacaatcataacgaaatataaatcctaaacaataaagttaactgaaacaagtcatcggaattggcatagtcggcggagttgctgccagcactggaaaagttactagagttgctgccgacgttgaaaaagtcatcgaaattattgccggaaatatcacaaaaaaatcaccaagataatggtttcttcatcaagaaactagtgatttttccggtaatttttctggcgacaataccaattccgacgaatttcctgaagtttgctgtcggtaccaaaaaagtcaccgaagtagctaccggtgtcggaaaagttgtcagagttgctgccaatgctcgaaaagtcatcagagttggcatagtcgtatgaaaaattaccgaaaaaatcacc

SEQ ID NO: 46236 - DNA, 1125 bp, Cannabis sativa
taatataataacttttagagagtatcgctagccaatcgcaatgcgacatgtcaagaaggtgctaggtaccactggtgcctaataacaatgctcagtttataatgaactttgtcctcagttttttgttgaatgaaaacttaaatctttcctaaaaaaatagttataatttcttttttttttaatataataatgtattataagataaagttttaattaatttaaaataatttatgatttattaaaaaataaaaattcaacaatcctatggatataaaatagaagaaatatatgtgtaacaaaatatttaaatttaatattttctacggtcaattttctttttaatttctcaaaattgcatgatgtctttttctttttattttttagaaatgaataattcattgaaaataacttggaatactcgaccaccataaaatgatgagtatctagtaaaacaaaatcaaacttagtcaggagagtatgtttataattacagaatgtctattattaatataataaaaagaaaaagaaaaataaatacaatagaattgaaatccttgtataaatttggcgggtaatcaagattggtaactagtaaccaattaaactcagtactcaatcctatatataactgaaattaacagaacctaacttccactttcattgatttcttcaactgaaatctctctctctctctctctctttctctttctctctctaacaatgcagcaaaggtactcatcatcatcatcatcttcatctccatctccatcgccacagcaaataacaataaaactaacagagcatcaacaccatcaccacactaaaacctctccttttataagaagatcatcatcaatggcagatttcacttctactactcctacttctcttcccctgtacgaccctcgttctgttcttggaaagaaagatcatcatcatcatcacatgatcaaacgctcactcttttcagagaaatggattcacgccatccctgtcattatcttcatctcactcttcatcctcttctggttctgttatcctggtaataaatctctctatctttaattaattattcttcttcttctttcttttatatcattaattttgttttaattaattaattaa

SEQ ID NO: 46237 - DNA, 1787 bp, Cannabis sativa
ataatatttactattaatataatataataagataaatgacattataagtatttaaattttttagtttgtaaatgggatgtatacatgcaaaaatacatgtctctatgcgcataataattaggcctaatatgaaaacagtcaaatgcatactgtataaaagtgcaatggccaataaaaaccacacaaagctgcaaaaggaggaggaccagactccacaagttgaagaaaccctgctaaaaatgcataatacctcaaatcaaggtttctctttttctttttttggttctaaatatcaaaagaagccactgataatcagtaccacacaatatgaatatcaataagaataatacattttgtgtgcgtcacatttatttttgcacagatgagttcatgattggtgtcacatttttatggaagcaacagtaattcactagtattaaatttgtatgttaatgtgatattcgtatacaattggtggtggtgctatgcacactatgttattgtggtgtcccagaacaataacaatgatatgtcactactatctatggtagatcatacttaaaaatctccaaggcctctcaattttagtagtgatgttcatctagtcaacaacttcaaattaaggataacagtaatgagtaacaaattgcactagttactccagtgataagaagcactgtttcaggagtctacagatatctaaatttgaatatgtcccttgtaatagcagcaaaaatcttctcaaaatccacaagtcactattatacatacaattttctggtgcagattgtagccgtaaatcacccaaaaacttagaagaaaagaaaaataaaaagagggttgttgcataaaatcatgagaagcctaactctcaaagtcaaatgtaatcttctctttttcagataatattttgacccatccatcttcatgtgggaactgccgacactagttcaaaatttgtacaaagcaagcataacaacttcaaaactagtctttatttcattgtttacaattacatcttatctacctatctgtctgtacacatacatgcataactttcatttctcaaaattagaatgaactaaaaactgctccattatgggatcagcttttcttcactatataatactttatgccaaggtaagtaaaacaaaatcaaccagaagcaactcacaaagtcacagattaacaatcatacacaactaatgttactattcaaatgaaattgtggctaaactaagcatgaatatcgaatagctctacttattggcttcttcattaaaatgtattaagagtttttccatatttggtatgcctgttgtctaaattgtcatgaagcactcccaatagctctttcaaaataaagatacctcaaaattttaaggaacaatggagcaaatacacatttcaacatatgatgtaaatttcttctctatttgaaaacatctctattattttcaaatgcttctctacatgtactattcttttcaaaaattattttattcgtgctataaatttttttaaaaatatagtcttatcttgtcttttgacatggtatgtttgtattgagtttggttctatgttttaatccttgaacgttgtttactttgtttcttgtctggttagtatggcttctccaagcaataccaatactgagtttgctaatctgtcattggaggaggaagaagatattggattggtcattgaagataatggggatacggaagttgttgagtttgttttccattcaaaattatgtttggtagggcatttcattatcaatggag

SEQ ID NO: 46238 - DNA, 1424 bp, Cannabis sativa
tttgttttcgtaatgtttgaatgccaagatgtgaagaatccaaaatatttgcaggtgttcatgcatgtagtaatgttgtcatggttatgttattttatcatatgttttatcctttttttttttttggtatcaggacaaatacatgcaaaacagacttgtgaggctcgtatgcgtttttttgcagagccttatcagaaataatatcatcaatggtgagttttgttttggtattaatattactattgagagtgattggataggtaataattttgtttgtttatgatgtatggttgcagttaaggatctgttcatcgaagttcaagcattttgtatcgagttctcgaggattagagaagcagcagcattatttaggcttctcaagtcattggaatgaatgaacaaacaaattgaatgatttcatcatatgcttacttagcttctcatctaatttctcttatattacattttgtagataataataatgctttaattgaattgaattgagatgtcattttttcagtgaaagatattgaaagaatagctatttgtttttgtggtgttcatctcttactcaaggcaatagaggaacttgctttctttgggtgatttaacttataacagagaaacaaaaacttgaattggggatatcaatttgggaggaaagattaaaccaacattttgatgcaacaaaatcaaatcaaaaccaacaagcaataataactcaatggaggttgttctgaatgaacattcaaatctctcttactctctttctatttgagctagtgtttaaaaaataagatattagcaaatatatttttttatatattattattattagtaaggtacttcggcttgaaatggcctcaaaattattgagtcacttttgttagagcatctctctaagagtgtaatatttcaccaatttagtgtagatcttcaaatatacaccataaattttaatatgatgtgaatcgtattatttaatacgtaaaaaaataattataatatttacaaagggtctatgattggggatcccaactccaaactcggcctcggtctcgaactccatatcagactccaaacttggaccaagaccccaaatccagaccttgccctagcactggccccagccctagccctggacctaaatctaggcaccaaacctggcttcggccctgaaccctagatctagactgggacctcgaatctaaacttagaccctacacccggaccttaaacctagacgggattggagttggaatataattttacacaagttattaatacaaatcaatatcaaatatagtattgtattaaataatattaatacaacacaatagtatataacacaatgcaatacaataagacgtaccaaacgagttcttagagaacaaaactctacatgtctatacaaattctattta

SEQ ID NO: 46239 - DNA, 3175 bp, Cannabis sativa
agatttgttcggagtgatcttgcagacaatagaacagtcgtccgaaggggatttctgaagtttcaagtcgaaattgacacctcccttcaattagtatctggcttttttcttgatattaagagggggaggaaagaatggatccaattccgttattttaagttacctaaactctgctataattgtggctatcttggtcatgacaagaaatcttgttttagatcgacagcctttgcttttcctccatctggtgcggcggttccagcgtatgggccttggatgaaggctgaaatggcagtatatagttgtttcaataccaggaatcagctggaatatttcagagaaggggtaggccggaacccttcaccggcaaaagttcctccggtagatgcatcgagatccaaaagcagtggaaagagacctgtccaagataatcacagagagcagaacctgcaaagtccagcttgcagcaaacctgtgaggaaagctatcaggattaacaacaaagatccaggtgccatttttggtagaaatttgaaaattgttgagaagaatgtgtctagtccgctggataaaaaacttggggggttgaaccctttaccacgggaatcaaggaagtttgaaagaggaagattagccagatctgtttctcctagagcaatgcgtagacaccaacaaggtaataatagtacgatctcagaaattgatattattaataatttttcttctaggcctcctcccaatgaggctgataatgggattctcacaactatgatggccaacattgggcccacttatgaccaaatggtggaaaagccccacgttgaattatgtcaatctaggcaaccccataaacaccctgagcccactcactttccttggcccatctacgcagaggaaattgggctagctgaggagcttatggggcctgccccaattgataagtatgagcccactcctacccttttccatgatcccatagatgtgtctgagcttgtacatcattgtccacaacccagaaaacgaaaagccagcctaacattgataccttatgtgcaacatacagccgagaattctggggacttttccattgatgtccctgagctccctgccttttccccctcacccgagtcttcttttaaaatgggagcaggtgcctcgacttcatctttgaagaatgataaacgtagaaggaagggttcccgttctaagttatcagtctctaagcaggataagaattctgttctggtggtgagtgaagacaaagatgtccaaaaaaatctacttgactctctaaatttggttgaagttcaagtcaatagctgtcaaaattttcctatgggcgaggaggcggcccttatcaagccccctacagccccatgaagtgtctttcatggaattgtcggggccttgccagagacccgacatcccaagctcttgcggcttgggtgaagaagtacaaggtggactgtatctttttgatggaaactaaaactaatagaaataagatggaggctgtggctcgttatttgggtttttcgaaaattgcttgtgcagatgcctctggtttgtcaggaggttcttgtttaatgtggaattgtaacatggatttggtggttaattactttgttgatgggttctttgaggctacgatttgggattttcaatctcaacttcactggaaattgttcgcagtatatggtacgccttatgcaagtgtcaaggaggttttttggagatccttggaagaggaatgttctcaatgttccctgccatggattattcttggagatttgaattgtatttatagtcaagaagagaagtcagggggtcggttagtttcttatgctgatactcaatttttgaagaacttcatgcttaatactggctgtgttgatctccaatttatagggaataaattcacttggcaaaacaaacggtttaatggtggtcttatcagggaaaggcttgatcgagcagtgtgttctccagaatggcttttggattatgagtttgctggtattcgtaatatgccaatctctatttcagatcacgctcccattgttctcgatactcatttatttgctccgagaggttatataccttttcggttttttgaatcttggtcctgggagccttcatgtaaaaatgagatatctagagtatggaatttttctggtagcaatgctactgctgccttcattcataatatcaacaaagtcaagaatgctcttcaggtgtggaagaagaatggccatttggtcaaagagtgtgatattaacaagttggagaggagattggagtggactcaaaatcagccaattactgatgctttgaaaagagaagaagctagtattcattctcaaatcctggttgcttgggctaaacttgaaagtatgtggagacaacgatcaagagaaacttggctctccttgggggatagaaatacaaggtattttcatgctgcaactgttatcagaaaaaggcgaaatagtatttgggcaattaaagacaaagaagggagaatttggaaagagaagaggatcatagggggcatcattaataattatttccatgagctgtatacttcctctcagccgtgcattgaggaggaattatttattaatctgtttgccaataggattgatgataatgcaaatgacatcattgctagagtgcctacagatgtggaaattaaggaggtggttttctgccttcatcctctcaaggccccaggtccggatgggttttcgggttgtttcttccgcaaatactgggaagtggttggtccaaatttgtgtgctacagtcagagagtttttcttgtcgggagaaatggatcctaatcttaacaagacttttatttgccttattccgaaagtggattttcctctgggtgtagaccaatttcgtccaattagcctttgcaatttctcctacaaagtcatagccaagattctatctaataggctaagacctttcatgtgtgatctaatttctccccttcagtcagcgtttatcccagggcgttggatcgctgagtcttctattctcactcaggaaatcattcacaagattcgtcataagaaaggtaaaggggggcttatggccttaaagcttgatatgcacaaagcttacgacaaaatggaatggaaattcttagaaaaagttcttgtggc

SEQ ID NO: 46240 - DNA, 2334 bp, Cannabis sativa
gtgtggtggaggaggtggctcggcatggaggtgcgatggaggaggtggctcggcatggagagaggttaaaaaatatgggaggggtattttagggtttagggaaaagtatacccattttttcaatagctataactattagtttggaaaataaatttaggtataaaaaatacatagaaaatcaaatttcccatatatttttcgtattgtgtggtgttatgtctaaacccatatattttcgtatgtaatcatacttgtattaattttgtaccgtataaaaatccaaaccgtatttagggcactaaatgtgagtggtttggtacacatgtttgtcgactaaaatagggacgcggaaatagttgagcacacggaaaaaacacacattcacttcacctattctttcatatactattgactatttattagtagtaatgtaatattcattaatattattattattcattcattttaatatatagttttattttatattaattcacactttcctataacatatttatttatatatcacttttcaaattttcccatattggtgggcaggcagtgttggaccaccaccacaccaccactacattaagctatatatataaaaataaaaattatgcccactttttattatatatatatagtttcccaattgactatatatgtattgtatgtatgtagagtttttattttttggtttgtgttgtcctcttgagttttgagtttgacccttttgtatccacttctttatttttgcttttttgtctcttggtttaatcggtatgcctctccaaataaagtcatttatcaactatgcaaataccactcatcttgtatgtcataatagttaaacaaaatataaaatctttttttttttttgttatttaataaaataaaaaatctaatcaataatttttctaaaataatattaactcttattgtagagcactactataaggtggcaccctaggtccagagtcggccttgagcataggcaagctaggcctgtccctagggcccacctagctcaagggtcaaaaaaaaatttatccctttttaattttttttttttatcaattttgaaaaatatcatatttttttttttctaaatgagggtccaaaaatattctttttcctaaatttcagggccgaccgttcctaggtcctataattatttagcggtatccatgatcttcattaaaataaaataaattagatattaaattacactaataataatattacaattgttaagtacctatggtgccatttaatatttctcatctttttaaggagagaaatgtataaaaataccaataatattaagttgcataaaatttaatttaataactattataaatgagaaatgttaaaaggcaatggtgctcactcttcagagtgtaatatcgttattggtgtaattatttataataatttttataaagtatcattagtgaatcgcaaggcgtcacttctaagtggtgcctaatagcgatgctcttataaaatatcgctagtcattgataaggcgctatttcataatggtgttaaatactaccagtgccaaataagtaataataatgctcttttagaaagacattactcaattgtagaataattaacaaatttttataataattattatattaaaatatatgagatgtgatatttaattattttattgtgacgcttgttatttataagtatagacacagtttatggttgcgacagatagtggaacctcctcaaaagaaataaagcaagcaatattactagttgcaacacaagcaacgacactatgagcaatcttagttagagattagggatcaaattatgattaacctaataagtattttaacttaatatacaatgaagtattaataaatatcatagaaaattgttgaggttactcattcctaagtttctcataacaagtctctttgtatctaccaaactcatctttgcttattaatacatctttttcttgaaaaaaaaaagtgtgtgaaatgggattagccctgtcaattacacttttatcattattaataatttattattattgttgttgttattgtcaaaaaaaaaaaaaatctattttaaaataataataattatttaaatgtagcatttgaaagtgtttataatgagtagttttttaaaaattaatttggtatgaatgttcttttattttagataacatcaatgagtcaagaccaactaagttggctggttattgtcaaatttgctgtgctagagcttagaataaccaataaattaatttgtcaagttaatttatttatagctaattaagatttttgcctcttaaacttt

SEQ ID NO: 46241 - DNA, 1506 bp, Cannabis sativa
tgtaattaagtatcaagtcttatataacttaagaaaataatttttagagaatatcactaaccaatcgaaagtcgccacttacaaaaggtgttgggcaccacttgtatctaatagcaatgctctaattagaatgagcattgctatgagacacttatggtgtctattaatgaagtgtcgccctataaatggttagcgattttctataatatttattaaagtaaaataaatagacccgatattaagttgcaccaatagcgatagaggagtgccaattacaatcttttattacaacctcttagtcaacctctacgcccgaaattacatgtcgaaatattttttttttcaaattttcttatagcgatattcgttatatttacattatcattcttgtatattttggaatagtttacaataccgaaaatagagtttttgatatttcagtttaccacgcatattcaaaaaacttaaattgtattttcggtattgtaaactatttgaaaattttcaaaaatttacagaaatgacattgtaagcataacaaataatgtcatgaaaaaaaaattttaaaaaatattttaatatatattttcaagcataaaaattaattaaaaaattgtaataaaagattaagggaaacactactcttaaccataggtgtcctttttcaattaaattgtgaaggtcacgtgatgggcaggtggcgcatttaaaagaggatttgactgacaagtggcacagtatgagagagagagaataattaaagcagttcacaggtgccaacagttttagaacaatattccaatgacgtgttacattattattggttgaactaaatccaccttctagaaacttgtattcgtatccaacaaagaattaaccctactactactactactactctattactaggggtgcgcagtttagtctttaacacccccttggcgcacgaagagagtgcttggagataacgtgcgcagagtgcgatgggttatatgtgtagtcacatcaacgtcgcttttgtctaaccacaacagaaaaatgctctattattaattattattattattattattattattaaatattattgaattacgtgttatgacatgttcctatttctttggctttttctctaacattttttcttttctgttttttgtccgaatgccacgtgttaattacgtgtgtacatgccatgtattttagtgtaattaaatattgagtttttatattcaatttttgaaaaaaataaataaataaaatagctactcttgcacaaggtcttacatgccaagagtactttgaaaacactaagattcaccttgcgactttgaccaagactcataaatatcaaataaatcaagacatctttcttgagggtcccgtggcacttctagagagcttgaaaatatcaaccaaccatttggcatcgggactcacacacccaagtgtgcccaaacgagagttcatgggcacgcgcagcattttgaccttagaaacctcaat

SEQ ID NO: 46242 - DNA, 1567 bp, Cannabis sativa
ccgccatacgatatccactgcgaacggaatactctccatccttactataatgccatagtattttatcttcaatatcccattcagtagtagccattcccaaaattaattcagcatccgttggattgaagacagctctaataaactcctcatcccattccccattacctttcttcaaatcaatgacatataactcattcggtagaggcggtttatcatatatcttaaaagttacagggtgtggcagccaaggatcttcaatgactctaacagaattgccattaacaatcctccatcgataccctttttgaataaccttcttcccccaaaccaaacttcgccaaataaatggcgcatggttcccacttttttcctccaccaccccaccatttgggtaatagcttgctttcaacactcggctacataaagaattcggaaaccgtatgcaccgccaaacttgcttagctagaagagcttggttaaaaagtctcaaatcccgaaaacccaaaccaccttgctctttgtgcttgcataagacgtcccacttacaccaatgtatcttcgaatctttctccgaagatccccaccaaaatcttgccgccatgctataattttatttagttataatacatagaaatcctataatacataaaatcctataattttatttagttagttaatttattatgtcaaagggaaaatggaagaggtgggtttcctaatatgaagtttgaacatcaccgaactttgactttgaaactaacttatagtatgcaatgccgtatggtgcggatccaccaaattggacttcttttttaaacaacaataataataataatatatttggaagattagcaaaagaaaatagaagaaaagtatttgaaaactggaagtgttaggttcggtcaattgcttggggttcttagtcgttgaaaatacattggttgaagttgcagccaactctctaatcaccactactacatattaactctactatatatatactacccgtctttatcatgcaaatttacgtactttgacaattcttctttcttttttccaagtttaatccaatttgtccacttaattatttcttattaattattttagtctcgtatatatagagaaaaatgatagagcatattttgtagctatatatgacaagtaacaatatttaatatacgcatgtaaaaggttaattggcataatgaaatttaattataaggcagagagattagtcgtacgtaccattactactcctttgcctaaggccatatttaatgccacactaaaaattcatatattatataattttttaataaaatttttaaattaaattagggtgcatttgaaaagaaacaatgtaattgaatttgtgtgtaattaaaggtaattacacaatttggcatgtttgtctgaccatgtaattactgcgtaattggaagtaattgaggggttccaattacactctccaattctcatggccttccatgagaattcaatgtaattatactgtgtaattgctaaaaactttccatattaaatattagctactaaaaaatattatttt

SEQ ID NO: 46243 - DNA, 1016 bp, Cannabis sativa
gtgaagagaaatgagttgagcatgcggataatctggctgaagcttggccttagattagggtcctcaacccaacatgattgtacgatgaatgctagatcgggtgatatgtcttcaggaatactcggccgctcttgctgcattatcagaatgccaaaaaaggagataatgaagaatggtacataatgtttgtaacacatataagtaaagttttataactatagtcttacaaaagcccataagtaatggaatctcatcttcaacatcagtttgactagaatatatatattgtaatttgtatctctaactttcaaaagagggtctaaagtaaggaaagaaccccaaaatgtgggtactgaaattcagactttgtgggagcaaaccacgtctgaccatttgaggtaaccgttctaggtcgaatccgttagaatgaaacggatggttcaccaagaacgggagtcgaaccagaccataaggaattcaattatatacccttagagagttgacagaaaatgttattattgaacagcaaaagcataatcgatttcgaactaatgaaaacaaatatgttgatgaatacataatgaaaaggtaaacaaatgactttgtgcaccttaaaagcagcagcataggcagcctgcaaatttgacatgccttcaaatggcatacgattggttaataattcccaaaggacaattccaaagctgtacacatcaactttattattgtaatgcttcttctctccctgacgtaaagtcacagtgctatacagctgcaaaaggcacaaatcatatttagtgaacccagaaaaatgaaaatcagcagtaggatttgagtatacatgtatgtagacagtaacaatatttgattgtttattgctgaaattgtgagattatggcatatgacttgtgggtgaatgagttaaattccaatattgataccttgaactcaattctacatcccctcatataagcaataatattgaattgaaccccccaattgaaattcgaaattcgaaa

SEQ ID NO: 46244 - DNA, 1859 bp, Cannabis sativa
  modified_base (53)..(70): a, c, t, g, unknown or other
aaaaaactatttaaaaaaatattaaaagtgattttttttatttttaaaatttnnnnnnnnnnnnnnnnnnttgaaaagtgaaaacagttttataaacatgttattaaaaaatattcacttttacaattttaaaaacaaaaaactaattaaaaaagtattatcaaacgctactatattttatacatgcagacaaaatgatttttaatatctgcagaaatgtatgggttaaagagaataataaacaaccagtagattttacaactttaaataatgagaagagagtctttttcaaaaaaaaaatgaataaataaataataagaagagagaacttttgttacataaaaaaataatgagaaaaagaaaaagaaatgagaattaattattagatttcattctttctattgagataagatttttaaatatttactaaatagtagttgaggttcacaaatttctatttctctgttttcatcacccaaatagtaggtcttgatttgcggcaaattatttggagctcacacacacaaaattttgaatcaaaatttacaatcaatgacttgaaagaaagcattacaatagtgtattcaaatgatttccataaaatggctggaatgtttttttagccattaatttaaattgttatcactccttttagaatggttgggtgacttggtcgccatcaagaagaagcccgatgaaccactaaaagactatattcatcgctttatgcaggaggcaattaaagtaaaaaatctaagtgacgatggtaaatgggctgctatcatggggggtattctggtgggaagtcggctgtgaaaggatacaaggcgaaaactaacccatactatgagagatttccttaatagagctgatgagttcattaaattggaataagccaaacaaaatgctcaaggcttcaactacactaagaacaaaaagaacggaacaagctcgaatagtcagagctctcaagggggtaatggtaacaatggcaagaggggaataacagtaatggcggtaacaacaatgacaacaagctaccaaagaacacctccgaggcagccagacgagatccaaccccaaggtttactacctacaacattctcctagacacaagagaaaacatctacaatgcgactcactcggtggtgccatacggtaagccttatcccatgaggaaggatattagcaaacgagacatgagcaagttttgtcgattcgacaatgactacggtcatgacactaacgagtgtaacaatctgaaggagaaaatagagttcctcatcagacaaaacaacccccacttgaaaagatatgtatgtcgtgacaacgatcgacccccacgacaacaacaacaggcgaccggggaggaccaacaattgttacctccttccgttgctggtcgtttggatgttatatctaaaggacctcatcttgccgggaactccgagaaatgagccgggtgacgatgtgttggcagtccaggagcgagctcccaaacaacctcgatatgagcatgagtcaatcacattctctaaggatgacactaaacacgttcgatacccacacaacgaccttttggtggtagaagtacaaatcgccaatatgattgtagcaagaacaatgatcaataatgggtcgtctgccaatatcctcttcaagtcttcattggagagaatgggcttggaggccaaggatttggaaccctgtgaacatctcatctatggattcacaagaaatggtatggcaccggctgggctcattaagctaccattgatggtgggaacagtctccaagagtgtcactatcatggcattattcatggtattggatatagtatcaccctacaacgccttaat

SEQ ID NO: 46245 - DNA, 1103 bp, Cannabis sativa
tctaatgactgtaacacttgttgcaactcggtgatgtagtccactactccaccaataattgatgcttggtctccctaataaaagaaaatcacaaagaaaatgttaagtgttaagacatttctcatcaaaaaaaatatatattattggtaatgagtgaagtaactcactcgcttgacgtagaagcaaggcatgagagaacgcaaaacagacaaattctcattcatttgttttctgcggtttctctcaattgctatgtgagacatcttattcccttgtccttctgtggtttcctcctcagccgcagctgcagcggctgcggtcatggaaacttttgactttttgctgtttggcaaaaggtcaagttcggtttctgaagataatgagtcttgagaaactagggctctttttttggttgtagatgacttcgtttgattttgtttgctttggagctttgtacattcttccaatggaggaaaatcgggctctaagctgtcgaggatactaaaaagatcgtctccagaaggtaagttgttgatatgatcattggaaccgaagtattcattatcgtcgtcgaaaaagtaatcagatgtggcagacaaagtagcatctttcatagtattcatcatcattttggtaatttgttttgtttgtttggatagtgggaaagtgtggaagagagaaaaggacccaaaaagagaaaattaatgaaaaaacaatgaaagtgtcgagatcatcaagaaacaaaagaaaaatgaagaaccatgcatgcaactaaatattgagtgtgaaatagagagatgatgatcgatgaagacaagtaaggacagagtgaaagggactgaagcatctacattaaatatatatatatatatatttgttaatctttctcattctatttattaattaattaatttataaatttttatttgtttgaattgaagatttttttttataatataatatattttgggggtgtaaattataatgagcttttggacaatctaatttatagcgaaactggtaaatgcaactaccactagcagaccagcagggagactcacgcagcaaagtgttgagagttaataatctctctctctctctct

SEQ ID NO: 46246 - DNA, 1082 bp, Cannabis sativa
gattgagagttcgcaccagtgagcacagtggagacaagaactaatcctagatgatcaactgtgatgagacaaaatagactggaaacatcttcatgtgagagacgatcgtgagaagaagatcttctggtaggcatggcagactgtggtgcatcttcaattggagcatttgtaactgacatgatctagtgtatcgagattggtgtgagatctcattctcaaagtgtgttgtcttcttggagcaattgaagaatgaggaataggatcggaagtagcatctggttaatggaggtggattgtttattaatggaggaacactatcttgggaccttgtggatggtctcgccatggatgcagtgtgaagaattttgtttgataccatatgaggaaaactgagtgaaaaataagaagctaaaatgctttcttattattatgttcatattattcaattacaatgtacatagtacatttatatgtaggccaagacagggaactgagttagttgtatgattaattaactccagcagaatgtagtaactaacccgagtaacaaacttaactaatttaactgattctaatacaaacaattccaaaaaaatggttctaagaaactccaaaagaaaaaaaaaatctcccaccttaattgggaaataatctccaaacaaacctaactcagtagaagaaaaaaataaaaaaaaaaaccaataaatttgaaatcctttcttttgtgtgagttgaataatgactacacgggatgtttttattttaccttttgtcttgtgcgtaggttataaaataaataccaatatatatatattagtaatcctatatagaatgacatatcataagcaaataaaccaccgtggtccaccactacttaattcaagatcaaaggttataaaaatttccttacttgtgagagcaaaatggatgctctcacctaaggaacaccctaaatttatatgtatttgataaaaataatttataatatttttaaataatattttgattacttgtaaaaaaaattgtagtttataagaaattttaaaatgatttggtttgttaataataaaaataagaatata

SEQ ID NO: 46247 - DNA, 2010 bp, Cannabis sativa
tcgacttgggttttcatggtgtcaaatgtacatggcacaactctagaaaaggggcaattatcgcattcgcaagaggcttgatagggccatggttgacgtctcctggtgtatggcctttcccaacaccaaagtcacaaatttgttgattgtggcatcgaaccactctcctctattgctaaatatttggggtcatatggagaaacttttttatcctttcagattcttagaagcatgaactaccagcccatgctgtgaaaaggtggtgagaagatcttggagtaacatattttatggcagtagtgatgttattctatctaagaaattgggaaatacaaaaaagagcttaaaatttggaatttaaattcatttggtttttgtgaacataagttacggaaacaaaaggaggaattggtttctatctaggattcttccttttctcagtaggctctagaatgggaagcgagtgtgcagctcaaaatacttgatatagaagataaaattgagcgaatttggaaacaaaaatccagggaaaattggctgcattttggggatggtaacaccaaatttttccacgcttccacagtggttcgaagacgaaggaattttattggaagtattgaggacgaagatggttcgtgggtgcaccatcgtgatagtattggaaattttttcaggaaaaaatttagtgaagtcttcgaatctcaatgtccaatcatcagggatgattttgaagatatgttaacagaagggatcactgaggcagaaaatgaaatgatttgaaaaattcctagctataaagaaatttgagacgtatcgttgcgtttcatcctttgaaatcgccaggaccagatggtttttcggtattttttataggaagtattgggtgatcgttggaagccaagtttgcgaaatgatacaagattttttcgctctgaagaatcttagcagaaaaattaatcatccttttttgtgcttgatcccaaaaactacaaatgcttctacctttgatcaatttcgaccgataagtctatgcaacttctgttacaagattatctcaagaattctgacggatcgactcaaaggaattttgtatagattagtctctccatatcaatcgtcttttattccgggacgttggatcgcggaatgttcaatcttgacttaagaagttctacactttctcaaacacaagaaagggaaatatggagttattgcgattaaaatggatatgggtaaggcctacgatcgccttgaatggagctttttgttacgggttttgaaagctaatggattttagagagatgcctgcgtgctcattataagtataacatcagtttcatattctattttgcttaatggcgtgcctttggctcccttcaatcccaagcaaggtctaagacaaggcgatctcttatctccatatttattcatactctgcagtgaagtgttgtccaaacttattctttgggctgaatagaagggagatattgtgggtgtgcgggtctctcaaaatgcactacctatcacacatctgttctatgctgatgatgctgtgttcttttgcgaagcttcttatcgtaatgtcactagtctcatggagtgcttgagacaatatgagggttagtctggtgagaaagttaatatggtaaaaagtagagtggttttctcccccaatacgccatgcaaagaaaaggagactttaaaggtagttcttggtatgaacacgcttaattctaaagaaaaataccttggtaatccttttttcttctctactagaaaaagcgatgattttaacttcctgaaacaaagagctgtggcggattagggttgaggatgtattttgacatgaatatggctttacttcccaaactttactggatgttcattacgggggataacaaagtttggattcggattatgtcagccaaatagtgccatttcctggatgctaggtttgtccctgaaagggcaagggaaacccagtgttggcaaggcttgttgaatgtgcgc

SEQ ID NO: 46248 - DNA, 1811 bp, Cannabis sativa
atacttgagctagaacaaagttaggtacacaatgacaaaatcataggacacattttaataaagtgcagacatttttgatttaagaaacatttcaaaccaaagtaaggaacaccaacaactcttctaaagatcaagtaatatctttacagttaatcacagctgaaaaaggtatagaacatgtagaaatcaaaggaaaaaaaaaaaaaaaaaactttttttcccaaaaccaaaatgagagtaaacggttcacaacaataagaaaaataagaagacctcaaaaaagaaaaagggaatatcactgagaaagtcaacatcacataatttaagatgatccaaaaaagaaaaatcaattttgtggtaaacaattaatcataattctcttgatcattaagagagaaaaaatataccttctttcccctttctatgtatttaactgcaacaagctccttactcttcttatctctgaccagtctggccacaccaaaattcccagaaccaagttccttcaatggctcatacctctcttccattgcaaaattcaatttcaaaaatctaccaaaccaaaccaaaccagaccaaaaagaaccaaaaatcacagcagaaatgaaactttaagatacccaatcccaaatagaaaacgacaatatgacaaatcaatagtccaacaaaagcaaaaagcaaaaggcaaagcaaataaagaatgaataaaagaaaaagtgaatgacttttttctcttttcaaagaaaaacaaaatccaaatcaagaaaggtaaaaagcccaactaaaacccagagagaaaaaagacactttgtttcaaaaacataacacaaccatctgaatgactcgaaaatgaaacaaaaacttattatgtttccatattcaaacagatattctaacaaaagaaacccaaagtgataataaataaatcatcaattttcaattttttttgataaatagtacaaaatctatttggaagaatgagaattaaataaacgacacgtataagcatagaaagagtcgcttttaagtgtcgctcgttaaagtcagtgattctgacaggtgtcttgcgtatattgacacgcagtccgtaggtttaagttcatgtgggtcccacatcttacatggtgacgtcactttcaaatgtcttattttagataaaacgagataaattcattctgggccccacactacacccccttgtgggtcccatcacacttcggtgtacgtatggtttgagcatgagccaatcagaatttgacagctcggataactctctcacgcgcgctctgccgacatttcgtactgtgggtgctgagccgaaaggccccgttggtagtggaattgtactagtggctagctagctactttgatgggtcccttcttcgtaacggttggtggtgactttttaaatgactaatttgcccctggtttgttttaatgtgttcgttaccgttggatggattttttattatgaattaacggtcagatttggggagatgatgccatatttgatccaccggtgaggtcactgcaaatttaattgatttatttttgttaggtgatttatgacggtccagttgaacggctcggattagagatgcgtcccaatgtagtgtcaatgcagtttttatgttgactaaatgagtgatttttttagtttttttttttttttgagaaatgctaaaaagtgttgttggtgcttattaatttattaagtggcgtttggttagaggtaatgaaatggaatgaaatggaaaggaaacaattttcatttcattcctttgtttggttgcattttatggcacgtttac

SEQ ID NO: 46249 - DNA, 1866 bp, Cannabis sativa
tataacctgaaacatattttcggataactctctgaatattttatattataatcattagaataaaatgcaagaagaaaaaactgtcatcatgagtcctggtacaagattcatagtacacttaatataaatttttggcttgtgcgaaacacaatttctagcaccataacagtaactaattttgtatataggaaaaagataaaagggaccaccaagaaatttaaattggtgaggcacatatatagatctataaatatatattatatagaaagagaaaacaggggaacaaaaggtggtggtggtggtggtactagtgctgcccctcattatgcaaataactactataagaagcaaaataataataaataataataataaaaaaaaggttatccactgaaaacatttatggtgatgatgatgatatatatttgatctactatttaactccctatgaaaaaccaaaccagtagtagtgtgtactggtactacagtgaggactactgttcttagctttttgtgaggccactgatgttgcggttcttttctatgtataactaggctacaaaccaagctgataataatgtttgttttcttttgtgtttttatcccatcaacctcacaataaggaccagttgataaggcattaattatatagggtgttttttcttcaggtgctgcttcaacagtagtttcaaatttttaaagcttagtgtacagtactattacgtacccacgtctccacctttttgcgttcatagctaaacacaccagagtattatcaattatccttttgatgtttttttcttaatttgatcacatatatacatatatagatacatatgtatatttgtatttatatattatctatgttattgcatgcgagtgcgtgcatgtacaattcacacgtataaaatactctgctttactattataatatatatagtaatgttcaattgaatatatttcttatttatttcttttttttttaaaaaaaaaaggactataataatatatactatatatgtgtaaggtttaatgtatttgtttgttcattaataaataaataaataaatagcacaggtgtgctatatatagttgaattaaaagatgatatatattcatttgacataataattggggtttgacattatatcagtctttgggttgaattttagaaccattttgaattttaatagagttcatttactaacggcgacaatttttttcttctcttcgttagattcaaaaagccaatcaataataagctatgaataagtcaaacattaatatattataaatcaaaaagtttattgttcactgaaccttatatatgaacctgtaaattaatatcgactagttctgcatttttctaatccaactatgtcatattttatagttttaattagatactgtgcacaaaatttaaataaaaaattgtgagctgagcgtagtcttttattaggttagtgataccaattacttgatacttaacaataagataaaatattccattgaaaaagaaaaacaagataccatatacatatacataagaaaactactggcatacatatttttatgtaagttgatgagttaattaatgttgatatatataattaattcatctagaaatttcgagtctagaaaaaaaaaatactaaattgtccaatactaacaaaaaagaatgtgttccctatttgactttactatatccctagtatattagtggaaatccagtaccaattagtggaaagaaaaaagcataataataccacacacaggagttatactgctcgatctcacttttttaagatcataataacgtataaactaaatactgttactaattacgtatacttggcattgatttta

SEQ ID NO: 46250 - DNA, 2645 bp, Cannabis sativa
  modified_base (1152)..(1158): a, c, t, g, unknown or other
tcttggaaccgtatcagaatggaaccatgatcactatctgtataggtgcggatcggataggatcgcttgcctgcaagggatgtggctctgataccatgttgagaatcatggggttccatctcaaaactaattggcaatgtggagtagcccatatttttatatatggctcaattctctaccatttattctatgtgggataatgtccacaacactattgaattgagacattacagaagccaaagcatagagacgagaggggctcctctctggaaatagcatcaagccctccctatcaacactccggtgcaacccaatcataggtcgatgaagtcctaaccgagggaaaaaaatttataactgggagtactccctgcagtactccctattgggtttttgataatttattactttagatgaatattttctttaaccttgagatgcaaatcaaatttaatgttttgcttggttgtatttatgagtatttccaattttttttttaaatgtacttcaaatattgtcagagacatgtattctcattagtttaatgagcttgtttagtatataaagcgtggtcggcaaaataataataatcataatgttttagctttaagtttaaaataataattgaatggttagtagtagatcaataataagagtacatgttttagctcaaaacagaaaaagagcagtactagtacatgtcctgtttatgtggtggaatacaaaaactacataattattaaatgatgttttctctttataaattaataaaaccaaaatttaaattgtctatacatcacaaaatacaaatcattcaaaaggtcaatgctataaaataaaatacaatttgacctatggcacaaaagtaaacaaaaggtatgatatatatatagttagttagtgatacttactcaccactccgatatatatactttgcattagggtgtgcataaatcaatcaaatttaacgagaatcgaccgattcaattacaaccgactgcttagatatccaattgtgttcggatcagattggatgttatttttaaatatccaattggatcggatcggatggtggatggagtgtctaaaaatccaatacatccaacatccaatcgaactaattactatttttcatttagtttggatgagtannnnnnntttatattgttatacgtcaaatctatatatatatacatatgaaaattaacattaaagttttactctttttttattggatttgatggatccagtccgatccaatacatactggatctaaaatattggatagatccaatccgatccaaaaaatattaggtctaaaatattggataaacccaaattaaataaataaatataaatacatccaatggatagaaccgatccaatcaaacatccaatggatgttggatcgattggatgacgaaattaattggatcggatcggatggtaaaatgtaacatccaatatataattggatcgaatctggataaacctaaaaacattgaatgtgatcaatgaacaccactactttgcatatatagatttaattaagtgttgtttttggttaatcattccaactaattaagttgattctggatatgcgtcttcatatatatacaagtcatattaggatatataaatcattggattttccaatctaatatatacatattatatcattcaaaattaataataaaaaatatatataaacatatttatgaactagaagttaatacacaacaagaatattatctaggatggaattattgataaaaagatcgataagaaactaatgagaaaagattcgttgataattgatggatttataattgtaaactagtcaacttgttaataatcatttgtgaattgcatatagatacatgtaattcgttcatatatatacttaagatttgtatgaaaattaatataataatagataagtggaatgtattcaatgtaattggaactactaattaattgtcatatataattgttccctaataagtaggttagaaatgtgcacaatgtaaacatatggaataataatatctaatagttatttaattaattacttgtatttatgtaacattttgatattattagttcccttcacgacaaaaatgattccacacacaattcacatcaattcaatccatgagactaattaagggacattaaaaaaaatggaactattctttattcaactagtattatatttaacaattaaagctccatgagaaaaatatatgtttcaattaaagtgacaataccattccactaatgctccacattttgtcaataatattaataataataaggatctaattctacaatggataaaactatacattgtttctttcacccaaattaactaattatttttgatatattaagtataattttttttctcataaatttgattatggtttgcgttagtactcccacgttttccttaatgattaatgggttgatgcatgagttctttaaatcaaaaagagggttaaagcaaaaatgatttgatatcttttgtttttggtgttaaaaatgaaataactatcaaggatccttgcagttaatagtagctcagaattttaatttctaattttattgaaagtgtttgaagctgaaattaactcatttgcgtc

SEQ ID NO: 46251 - DNA, 1373 bp, Cannabis sativa
tatatttgagacatttacttttggtgactttttcagtgacttttttccagcgacggtgactttttcgacaatttttctggcgatggtgacttttccggcaccaacgacttttccagcgacaatgactttcccaacgacttttccggcgaaccttattattacaagtttaatcaaatttatttattgttttccccatattttaaactataactattttttaatcccatatttttttgcattatttatttataccataaaaatataaactctattacattttctcatatttatgaaaaaaaaaaccctaacgataatatctaactaaaactttaaatttgtaagaaaaaaagtaaatttaagggagttttgccacaaaaaaaaatgaagaagttaaatgtataaaattaaaacataattagctttcgccgcaaatttctcataaaaaattagttattgtgcaagatttcctctcatttattttactatttaaatattgatgtattttattttttgtaaattattaattttatcttttaaattttgacaacaatcaaattgtattttttttgtaaaacattcaacgtttttttttttctctcaaattatatgtatttctataattggtaaaaagtaaattgagatggaaaaataaattatgattaagaaaatttaatagaagaaaataaaatcataaaactaattaagaaatttaagaaattaatattcaattttgttggaacaagcttgaatttattttattttcacaaaatctaggtttgttaaagtaaacataatatttttttagtttaaattttcattttttttttgttggatttttaataatcttataaaatgcaagtttgtaaatatagataagtttatttttttttcttttttgacaaaatctttgtttgcttaaaatatttagttttataatatattttattattttttaagatatgtgtttgtcaataaaattaagcttggatatatttttcttaagaattatttagattttttattaagtaaacttaatatttttttaactccaattttttttttattatctaagaattttatcaggcatttaataattttctttattttttatgaattaataaaatattataattttaaaattaatttttcaatagaaaggagtaaattttgatgttagtcaaagttcaagcggtaaaaatattaattactaacgacaaaataaacagaatctaacagaagatgcatgattatataattgttatatttttgagaaatttttaataagctgtatattttaaaaggcataatttggtagtgtcaaaagtttaaagggaaaaaaaactattaagtatattaagtctcctgcttctttt

SEQ ID NO: 46252 - DNA, 1446 bp, Cannabis sativa
tagtctgaaaaatatctctttgtgcgtcgtatatgcaggctgaacaatgggttagcaaaatgactaaagctgtagatgatgaacaaaatgaagtagagggacgacatcccaggttagtataactacaatcgtagttatttaagtataggttagtataactacaatcgtagttatttaagtaaagggagtgctacttttaatgatcatatgtacttcaaaatctatgtaaaagcttatcatgtatttctgcaggcttggcttgggtgccaaattttcacgccaattcaatgttggaccattatctgatcccattgaacgaaaactctttgccaaattggatactcgatctaaacgtaccgaggagtctaacttagctactaaagatgaacttaatgatgactctgacgatagtgaagatacagaaagcagaagccaagtttttaacaagaaaagagcagcaactccaatgatgccatctgtacaaacaaagaaaaagaagaagtgactctcaacttcaaattttgtgcgcggtcttttgaaaaaatatgccaactttcttatatgtgtaatttagtggatctagtaaatgaggtgagttaaattccaatcaatgataatttatttatcattgttctctatgacaaaggaatgcttagtttcttattcttgatgtctaagtatgtaaggattttgaaaagtaactgaaggcaatgccatcattcttgactattgatgtaaaaattgagtgtgttgttgatggcagggactatgggaatagcaagtctttgcagagcattatgaaactgtaacaaatatcaaaatccctatatacaaatatgctgcaattatcattatcatcattatcataattattattcgtttttttggcttgatgaacttcacagaaaactacactttcaattattatatgaaaacaaacacaaacatatttgaaactacattcatttctttcttataagcttatatgtcaaaatttaaagaacaaatataattttttccaccacaattataaccacattcaaatcttgttctctaaacttttcctgctgataaaattttttctccaactaatctattatagagttttgtctctttatttacacgtgttttaaaaaactaattatgtagtattttttgagctgaggtagtagtcaatatgtaattatattgaatagaaaaagtatttattaagattttatttttaaaaatgatattttttaaatttaataaatattttttattttatttaattacacacgtgatactgagatgatattgttactaaattctaaaaatgctacacaagtagctttttagtcgcatatgacttaaggggcaaaattctataatgggaatagtttggaaggtattttcattaaggtatttggcatgtttgtctgacctgtaactgtgtaattggaagta

SEQ ID NO: 46253 - DNA, 1479 bp, Cannabis sativa
taattgcaatggatcaatcaggtatacatacctattattatatattattattgtgttctatattatatacaaattgatcttgggttaattattaatttttctaacaatcagagcaaaaacaaacaaaaaaaccttctaatgactatctaaccccaacaaaaaataaaccccattcagcttatcacaaattttaataggtaattaaaaaaataatgtatttggtatgattaaatatccataaaagaaattgtgaaatgttataataatttgtatttacagaagacactgcaaccgctaaagatacaccaaatttaatccaaatccttttgttcaaagaattggattggattcaagtctaatggatttcatgtcattaaatatgttaattgttggcaaataattatacaataaaaaataacttcaaaatatatatatatatatttgtatttttacgaaattctatatagaaatttttatagcaactaacgaagctacttaaatcacaactaaaatctacatattaatccacatagaaactaccggagcaacccaaagcgtaaatttttaaaaaaattaaaaatattatatggagtaatttcacaaaaatatactacctattataaatttaatagaaaatatgtaaataaatattaactactggaagacatacactacctaaaaatataacatatctcttgtataatattaataatcgattaatatgatgttatgttaaaatttagtataaaaaatcattaaaaaattggatcttatagtctaattagaggtaataacttagattttaaacacgtgtttttggaaaatgattgtaaatatttttggagaaatgtttggtaaacttcccaaattgattatttgtttcaccatccatgataattttttaatccaacaatatatgttttttcaagattgtacgaaatcatttttaagatcacttgtaattttttataaaatttctattagcttacaatccggcaaatatttgagttttatttttggaagtgtaatttttcatgataatgtttggatttttttttttccttttttttttttttggagttatcacctatacaactaaatatttaaattttatttttagaattgtaagttgtttaattttttttaaaaaaatttacaagtaattttatataactacaatacatgttattaatagaaaaataaattaaaaaattcctttaatcccaaaacaaataaagactataccaaaataatcatttagaaatgtactataagattacccaatattttttttaaaacacatgatataaacatatttcaaatataatctgattgtatttgatccaaatgtaaatattacagataaattaaattacatcggattcaatcagaatttttaacatttaactttaaatttgttatggtaaatactattttggaccctctgttttgcaaaagttaccaattggaccctgtgtt

SEQ ID NO: 46254 - DNA, 2537 bp, Cannabis sativa
atcgacatataaatatgcccttaaacagatgatcttgagttttggaagggattagggtagaaagaccttcagcaactcgaaagaacaggtaaggtgaaagagggtcgtctttcccgattcctcgagaaggaaagatatgagaggatagactattattaatgcaaagtttgggagaaacagtggaaatgcaactggagataagggaaatgaaattggcagggaaaccaaggtgagaaagaatgtgattaaataaacctcactcaactttattaaaagttttctccatgtcgagtttaagagctgcccagccaacttttccacttttcctataggtaatggcctcaataatctcattggcaataataatattatcaaaaatgattccattgctaagagaggctccttgattgtgagaaatgagatgagacgactaccttcaatttataagctatggacatagcaacaactttgtaaatggtaaaacaaagactggtgggcctaaaatcctgaaccctgatatcattgtttttctttgggataaggataacaaaagtctcatttatgggagcaaggttggccccattatttaagacatcaagaatagcatgacagagatctttacccataataggccaatttttctgataaaaaagagggttaatgccatcaggaccaggggccttatcccctgaaagctgaaaaagagcagtcttgacctcagagaaagtgaaagggttggccaaaaattgaactaataattatctatgcgcttagtaatacccctaagagccatgttgatagggcctaaatccgtgccattagaggtaaaaaaaattagagtagaactgaacaaaactattagtaacgtcagtacggatactgatagtagagttatcatcaagagtaagactcttaatgatattatttcttcttctagtagaggctttattatgaaaatattagtgttcttatcactagctttaagctagttaaccctagatctttgcctccaaaaaacttcctccttaagcaagggagcattaagagaggtttggtaattatcaacacttctaatgtcatgtcaagagatgaaggagtgagagtaaatcctatcaatggcagattgcatattattgattttatttttttaattcatttttatccttagaccaagacttcatagcctgaatacaattatcctgcttactaagaaaagaaacaagagtggggataacactgctactaaccctattagatgaccaacattctttaatgagatcaaaaaccacagttctattatctaataattttcaaagaaaaatattttattatttttattaatatgtggagtagaattgtaaaccaacttgagtgctttatgatcagagccatagaaaggaagatggaaattgttagcagtgggaaaaatatcgtgtcaggcctggttaataatgcctaaatccagatgttcaagaagactaccatgcttccaagtgaagtgattaccagtaaaatttagaggaaacatgttgtatttaaagataaaatgctaaaaaaatatggatagcgtgcgtagggacaaattattactgttgcgatcattatagcctaaataatcattaaaatatcctaaaataagccaagcagaaaaagaggcagcatcaaaaagacaatccaacaagatccaagagttagacttatcattattataaggagatccataaaaatatgaaagatgataataaacatgggagttaatagaaatagtacagtttatatgacataaagagtaagataaaatattaacattgacaacatcattccaaaagagtaataaaccacctcctaaaccatgtctagggacctcaaatacattatcaaaagacagtctagctttcaacagaatacttaaactagctgtcagcttagtctccatcacaaaaaaaaaattgaggttgatgttgcttgacccagaaggagagattttggaatgctcgggaactccctaatccatgagcattccaactgataatactcatttttctaggcaggttgctgagcaacacccgcctattcattagagtcggataaagatgggaccacaacaaaatcagagttggaagatcaagctcttttcagaatacttctaacagaagaacccacttgacaattttgtctagtaaaagatctctttgttcttgacttggtacctgaagccactttagcctatggaaggggtgaaacaaacgatggagtcttaggcaactcagggtacatagggcccctgcccttagaggtagcagtaacaacagtcgagaccaagatatgggtgggggcaatgagagaagtaagagggtttgtgacaacttggctcgagactacaggcaagatggtaatttgggtggtggtacttgaagagatagatatagggtggcaagctgtggggggtattaactaaagtcgtattggaaatactagggacaaggaattggtcaacaacatttcaaggccttagctggaagtgttagcaagtgatg

SEQ ID NO: 46255 - DNA, 1846 bp, Cannabis sativa
tggtaaaataaattctaacagaaagatttaaagtgaggcgaaggaccatgattagaagtgcccccaattttatcagaggttttgaggaagtcattaaagtctcccatcaatagccacggggtggtgccaacagtatcaccgatgcgttgcaccataaaaaccagtaaaagaaaaagaatgattattttaaatcttgatgtaacagtataaatgacttatattaaaagaaagcaaggttacatcaatatcattagtccaaagaaaaagtaagccaccactaaggttgactctagagacttcaagaccactagggaacttaagcttatccataaacctatttacaacaccaatgaggagtttagtctccataataaacaaaagtgttggtttatattgcttcaccaacaaggagagatttcaaaatgatcgagtgctccccagatctcgagcattccaactaacgaaccttatgggtctgggcgggtgcgctaggcgtcacccacctcaatagcgctagctttgtaaagagaatgagcaatgctgcgattgcgcttcaacatcttcctaaattcaacttcattaatgccggatggatgattggaagtaaacttcctatttgttcgagcttgaggaacactacgcgcaggctgtagagatgctcctactgtgaactgaagtggctgtgaaccagctaaatcactgagtgtggtggagaagacttgagaaatgggaacactatgccaatcgggaacagtaacagtaggaataggaggctcggtcgaaggtcaaagtttgatgagtggaaatgaaagcagagagtttctctgtagtggtgaccatgggaagtgaggcttgaatgggaatgacagcttcgttaacaggaggttgaccatgagcaagagccatggaatcgggccaagcatttgggggattggagagaggctgctgagcaggagcaagtgtagttggaggagcagtataagagggacccataggaaagagacccgcagtatgcgtggttgacccgggtattgaaccttataggcggacgtaggagcattgaaattttccaaggaattgaagagtgaattatcagctcaagctagaggcatattagacaaagggacatgataagcaatgtaagggtggtacagaagaggcatcacatttggctaaaaactcactgcaatggttcactatatgatgagacaactacaatggttcactatatgactgagacaactgcaatagtggcaaaaattaggtagattttcgaagcgaaactcaagccagacaggagatgtgagaccatggaattgaaagcgaaggccttttggaagtggttgagtacatcaatttcaattctgacccaaaggtagggaccccaagattccttcaaagaagtagtgtcaacttctatgaactgacccaaaatgacccaaagtttgtgggctagcgccttagaacggtgaagaaatggaatcccatagacttggatgcaaaagggggtagaggttaaaatgtcagcgagtgacaatagaacctgcttcgagaggggtcatgactataagtttgtagtcaaagtgccacggttggccaatcaagacacgcattcgatcaccaaagcaaccgaattaaacagtttaaaagtttggagtttttgccacaatgttaatggaaaaatgttcaagccacatttggcgaaggcgtcttttgaaagcatcaacattgaaatggcgagtagtgagatgtttgacagtaagaaaggcagaaggctcctcctgagattcctcagaggcttccttaggctgttcatataaggaatgatgtaacaccctaactagca

SEQ ID NO: 46256 - DNA, 1324 bp, Cannabis sativa
tttcattaataatactagttgatggtgtgacccttttacatagaaactgagaatcacttgcttatgtgaaactcaatatttgtttcaagtctttaggaattcagtgcagacatgcagatacttttaacaggaaaagggagaaactacgtcgttggcttacagatgtctcgtttcctgaaattgatgggctctgttcgaaggggtaaccctcacaatcattagtagttgcactttcagtttctttgaatctttagtgaataaaagtataaactttctcaggtgtgatattgttcctgtgctcctcaagcggctgaccccagagtgcaaagacattaatgtatcctcagattgttatttgaatggacaaaaatcattgtctctgtctgtgttgctaagcaaaattacttgctcttgcagatagtcaatgatcagaatttgggaagagaagagactgataccaaatctcagttagtgccatcctttgagtcagatatttactccaacagacttcaatggacacctaggcattgtccggaactcgaatatgatccataccttggtgatgatatacaaccaaatcctttgtggaacagatcaagagggagcattctattattggatgctccattacatcatgataacgatgtccatcattataactataaaccatggaactctggattaggagagttgccaattgatcgtgattcaaactttgtttttcctatcagaaaacaaatatctgttgaactcttagaaggattcgacaaattcaatcaaccaaatagaaatttggttggaaaccaatcaaatgtgcatgcattggattggcattatgacaaggagaaatttgaaagaaccttatcgactattagttccgatgtagagccaaatagtcatcactcaccattggtagcacagcttgatgatgatcatcgtcatcattattactataaaccatgggaagctggattacatgaaggagaattacatgttgatcatgattcaaattttgttcttcccgtcacaaagcacacatctgctgaaatcttagaagaattggatgaattctgtcaaccaagtagaaatttggttggatgccagtcaaatgtgcctgcattagattggaattatgacaaggagaattttgaaagagccttatctattttcagtccctctgatatcgatccaaatagtcatcgctcaccattggcagcatgggttgaagttgaagacgatgttcacattaataaaggacttgaatattcatcgccagtgtccccttcaagttactatcaaaaccatgatcttagagcagagattc

SEQ ID NO: 46257 - DNA, 1339 bp, Cannabis sativa
tacttacatgtcctaataggttgagcttgtgtttggggtggcgaaatcctctgtttttccttccactcactatctcaagaaccaacacgccgaaactaaagacatcagatttcaaagagaagatgccgtcgattgtgtactctggcgacatgtaaccactgtggaaaattaagttcaaagcatttgagaaaattggtaatagtaggtactctacaatatgagttgtttagagatacttactatgttccaactactcttttcgtatttgcttcagtttcatctccaccaaatcctcttgccatgccaaaatctgaaattttgggattcatttcatggtcgagtaagacattactcgctttgagatctctatgaacaattctcaatctagaatcttcatgaagataaagtaaaccccgagcaataccattgatgatgtggaaacgttttgcccaatctagaagtgtactttgtttttcatctaccaagatatttacacataacacaagtatgttagttggtctttagatgtccatgtaaatcagaaaagtaatattgaaagttgtatttttctttagaatgataaattgacataaacagttgtgtatgagcattaattataattaaaacaagtgtactaaccaaatatgaagcaattcaagcttttattgtgcatgtattcatatatcagcatcaaatcctcagcttcaatgcaacatcctaatagcctcacgaggttgcggtgttgaagtttggcaatgcagaaaacttcattcttcagctcatccaatccttgtcttgaactttttgagagtctcttcacagcaatttcttgcccatctttcaatgttccctaagtgtcattaccatcttatcaatcataaatatttttcttagtagaatggtatgtttgtacatatttacttttttgtttatctattatgtggagattaagaaggaaaaacttagtaataattgcttagtgtaataccttgtagactggtccgaaaccaccttgtccaagcttattgtcaatagaaaaatcgttagtagcttctgctattacatcaaaactaaaaaatggtagatctaactctccatctgggttttcatcaatgaagtcctgttctcggttatgcattgaaattgaagtgccttaaatacaaataatcaacaacgagataagaagctaataattttaatggactacacacatgactaagctacttatgtatggtgaactctgactaaatagggtgaaaaagaaggcaacgacaataataataataataaaaaaagcaatgtcaataaatgaacaatgcattttggtatcagtagtttt

SEQ ID NO: 46258 - DNA, 2572 bp, Cannabis sativa
aaggaagagaagatccaggttcaatttttggtaatactctatgacagaactaacaaggatcagagaactgaacggaaggagataatatattctgctgcaaccactgtaaagttttctaaattcttttatgtgtttatattattgttttatgttttctatattaggatgttagattaattataatctaatatacataagtagtaaattaatatcttggtaaaaaattttccaacaggttaaactttcccacttatgggtttttaacattgaggttccctttcgctaccatgttctgtagctgtaagagggtttcttatattttgtgtgtagcttcttcttgctctgacatctttctatgttgatctgtgactacttgccttactctcaccacctccgggtcttcctcgtagtctttatcagggtttttgtcgtagtcatctttttggtcctcatttcatccttcttagtcatcttcgtcaattggagtttcatcaatgtatttcttagtggtggccttttcgaagcagacgactacccacttttaacgtttcaccatcccttgcaatgtccatttgagtgtctactagagggggacagtttagattgtcatcagtaacatcttcatggtcttggcgagtatttggcttgatgaccgtattttgagtgacaacaatggagaatactttctttaactctcaatcaaagcaccaaaatatttattgatattttcaaaaactaaattaataatagattaagctaaggataaatttttaagaaatgaagaaaaaaataatttttatgtggttggggcgttagcgagccttaggacacaagtcaatattattgagctctttgactatggaatattttactcaagagtgttcttgccaaatttttatagagtttctagccaaaattcgtaaccctttgcatgaagggataaagccctatttataggatgaaaccgagttctcgagggaacccagacccgttagggttttgaacatgaagtaagcccactgatgggggtaaaatacattataatattaaatttgggtcgggtacatgaggcccaaattggagggatttcctttgttcgtacgggatcatacaacttgacggtgacaagtgtccatgcaccaccgattgtgtacaataaatgtgagattagtggacgttggacaaaatgtatgcttcttttggtgttgtgcgcctttcctaggtctaacacaaaagataaacccctaattttatgggatctggtgtcagaagggtgccacgtaggatcgcacttgacgcctcctcaactactcctatgggattacccctgaggatatctggcatcgtctcttcgagtcttcgcctctctggatgagagtcatccttccgagaccaagaaggtctagcttggtcgaggcagggtcacagttgaactcgaagctgtaatttgactcttcttatgggttgacccattgatctgtctgagcctgatgaatgggcccatgagtttattttgggcattaaaagtacacgtgtcacgcacccaaaaacgcgaataacaactaggttaaattattttgtcatgtttctaatataaatattaaagtttaaaatattcatctcaacctaatgaacccaacccaatccaacctatatttattttactaactaggttgggttgtacaataaaaaaaattgaatgttttatagcttctccaaactacaatcattgggttgaccccttaaaacacttgtaatccaaccagcccagctcatgtgcacccctagttacttccaattccaaacacaccattaatatatatttagggtgtgtttcgaaagacaaaagagaattaaaatttggtgtaattaaagataattacacaattttgtgtattagtttgaccacacaattacgttgtgacgacataatttgaggtaattgagatgtctcaattacactccctaattctcataccctcatgagaattacttataattacattgtgtaattactaaaaaaaatttattttaaatattaagtactaacacttattattattattctgtgtaattactattataatgtttgctttgatgtaatcaagattggaatggaatggagattacaattataatgtttgtttgatcctattaacttttgtaatccctttacattataatgagtattacactacttgtataaatattacataggcatgactcatgattacaattaccaatagaaaaattatatttacacccgataaaactataattatatcctattactaaatttacctcattttttaattaaaatattatttgttttataattacatcccactttgtgtactaaaatgatatcttttgaatacaccccaaaacttttaagttacgattgaaaaaagaaaaagagaaaactcagaagtcattaatggcttctacacattgattgtccaagtctaataaaataaataataattaaaaattaaagttattgatttgtgaaaacaattaaatggtttgttaagaaaaattacaaaatagtagcagttttagaattgttttg

SEQ ID NO: 46259 - DNA, 2298 bp, Cannabis sativa
aaaaaataaaatttttgaaaattaaatttagagtcttatttttaccattttaaaaaatatataatttattttattatttaataaaataaattgtttattaattaataacttttagaaaatataatgtctaaaataaaatttatgttttattttattttataagttttgggttggcggtggtctaccaatgcattgcatactaatgaaaggaggcacacaactttatgggagaaatggttgtcaatcatttaatgtatgaagcaaaagtatttaatgtactagctttacactctgagcacatggtccttctccttctcatcaataatgatgcaaagatttttcttttgtttataaaaattatatatatgtagaatagaaacattgcagttattagtgtccacacttaaaaagcaccttcccaccaaaccatgtccccggttggattgagacgcctcatcaattaactccactcttagttttaccaattatctcaaataaaagagcattactattaggtactagtggtgcctagcaccttctcgacatgttgcgttgcgattagctagcgatatttcttaaaaattattatattaaattatatgggacccgatagttaattggactaatagcgatattcacacataagagagtgctaagcaacactgatgccttttaacatttctccaaacaaaatatctatgtatggaaaaacttacatagtaatattttagggctatgtgtaaagctttgacaaattctaaataatttataattataaaaataaaattcaaatatttatttgtttcttttattaaaaaaagacagttatacaggtaataaatattttaataaaattttaaattatttactatatagtttcatatgtaacaaaatatttatttattttccacacttaattttttttaaaaaaattaattagtcttaaataattttaacttacttaacctcacttagcgggtagtaaaaactttctctatactaggggtgttcgcaatacggatagtgcagtttttgaccattttttcaaaccacccgtccgtacaacatggcggtttttctaatttctcaaaccgcaccagtaccgcgaaactaaaaaccacataaaccgcactgctaaaaatggtacggtgctgtttttgcggtttggactattaccaaataatttaactattacaaatacaacaaagcttgagcaatacttgtcaaaaataccataaggtttgaaaataaatatgaaaaaaaaaagtttcaataatataataattagtggactttgagttgaacattcacatattagatttaaacaaatataaaaattggtagttttataatgtgcattgcagtgcagtttgaatcgcatattaataatttaaaattactaaccgcatcgcaccgcgcggtttagaaaaaattcaaattacgaccgcacacaaagaatttcaaacgacattctttttacaatgtgagcggtatgataaacactcttactatatactatttgtatggggatatataaattgtataatatttttttttttgttttgtaatatagagatactaaaattctttgatgtatgttggggtttagggtggtggagcctcataattgtaaaatgaatgaagtagaaggttactcgttaatttatcaacttgacccgtcacattataattaattattatgattattttatttttaggtggatcttaactcttagaacctatcaaaagataaaaacttcacccaatgcgttaccaaatcaggaaaaacaaactaagaaatcaaagattcttttcttctattcctttgtgcctctcgagtgtaggaaaacaactatctcaaagtcccactcacctaaaaacaaaacataaaagactatgaagtatgaaatgaaatcaatatatgcgtgaaagcacgcgccaaccacgaccatacataatagtcatgatcaccattcatcgtgattaccattataattatgggaatggtgattatagggtaaaattaagtaccagtaatggtaatattttttagaggtgacaatttattattatttagtgatattttttaaaatttattttttaaaatttattattaagtcttatattgtcgaagctattggtatcaaggaagctctttcttagagtaaagtgaatggatggtcacagattgttgttgagtcgaattgtttaaaggtcgattagcaaaagttcaaacatatggcttctccttatggccatattctttatgattgtatgactttggttgttgattttgat

SEQ ID NO: 46260 - DNA, 1093 bp, Cannabis sativa
tttattattaattaatttatttactaatttctaatttaataaaataaaaaatattcattttcattttctctactcaattacacccctctgcttctctgactctctctgcttcacctcctttgttcgcttctcatcaaaccacacaaacaaacccatttccttctctctctcatacccaaaaccagtaccattaccataaaccatttttagctctaaaacatcatatgcacccaaactatatctaactagctttttacacttgctttgctctgctctcccacccccatgatgatgatgatggaaggaatcaaaggtgttaataatggcggaagagttgtgggtgttggtcatattgacgaagacatggctgacggtatgcagtgcactgaccatccttaccggaacaacccaggtgggatctgtgctttctgtcttcaagagaagttaggcaagctcgtctcatcttctttccctgtacccattcgggcttcaacctcttcttcttcttcaccttctttcagatctgatatcggagttatcggtccctcttcttcttccacctcctccacggctgccgcggtggctctctcgctctccctccgacccggaccttcgtcgttgaacaacaaaggtaacaatagtaataataatggaggcaatgagtgtcgttttgttcatcgtgagaaccaagtccaggagtactatagtaaccaccatagacggaccaggttgccttttctcttggccaagaagaagaagaagaaagtgaataacactgttgggacaactttaatggataataatcgctctgctactaatactactcccggagataatcatgtcgttttcaagcgaagcaaatccactactacaccacgcagaggccgccattgtagtaacagtaataagtttttggacgaccatgatttcattcataatagcccaagaaaacacagagggggtttttggtcttttctctacctctcttcttcttcttctgcccgtaaaatcgataacggtaacggcggtggctcaaagacggcgtcgttttcttccgtcacttcagctggtttggctggtaataataataata

SEQ ID NO: 46261 - DNA, 1411 bp, Cannabis sativa
atttagatgtccataaaagttaatgccatatatagttttacataaaaaatattgcataaaatacaattcaatataatactatacaatacagtgtaatacggcgtaccaaacgaaccctaaatgcgtagtattttctagtatgcctaatcaatacaactggtctactactataaatatcatgtaccttgtctacatctggtctttcttcacggtccacctgtttgcacttacataaattaaaattaagatacaatctttacagactctactattgaaaaagagattattagaaacatcaaagcatagagattataaaacccattactgactgaccttgatactaatgaaccaatcattgagcaatttagcaaccccctcatcctcaaaggactccacctccataacatgacaccttgtgaataaattttactccagtgagtagtgacacttgatttattcagttcattctccattttctaatggttaaatgaaggttttgtataatcaacttccacaacacttccgtataaaaactcaccaatggcaggtgctatatccaacttcaaatgtgtacacaacacagttgccgtagcagaaccaataagcaaaaaatcatcagaatagactaaacaaaacccaaaaacaaggaagtgttataaaagaattgtatttacttgacaagaaaatggggacgtccctctttcgagcttcggcaaaagcttcttcaccccacggataccaatcaacctaattgacaaaataaaaataaaaattaattatctgatgaataaccgcaaaaacttatttgtttcatttccaatttgtgggacatacgggattatgggcatgttgaagaagatagggactgtgttcttgggcaaggcgattagtatggtggtgagaagaactagaagaggagctatgttgggccatagctaagaccttgagagcgtaaatggatggaggagaagaggaggggaataatgaaagtgaagaggttgtttggcgaaagagaaaggagcggaaagtgggtaccgttctgagcatgggaaaggcaagggaagagaaggggtagatgcagtagtagtgtagtattgtagtagaagaagaagaagaagaagagaagggttatgagctatgagttttgtggatgaagaagaaaagcggcattggcatatgtgcgcgcgcgcgcgagagagggtgaatgaggtgatgaggaaatcttcagttcagcgccatgtggagtttgggtttttccgccacatggactccttcacatgattcatcttcgcattgcttttgttttttttgttttgtttgttgttttgtttttcttggttttttttttttgaaataaaatgggattttattaaggcaattatgtaaaacttcatggatgtgaaacttcaat

SEQ ID NO: 46262 - DNA, 1391 bp, Cannabis sativa
gtatatggggtaattcccttttttatttttacatttcaaaatatatatttttttttatttttacagaattctacatagataacctttattgcaactagcgcagcaacctaaatcgcaaccaaaaatcgtatagcaacccacataaaaaccactagaaaaatcactttagaaacccaaaccgtaaatttgaaaaacaaatagtatatagaataattctcccaaaatttattccacaaacatgtcacaagaacaaactaaaagcactaaaaaaagacctgaaaaacttttttatacaaggttatacccctttacaaagattcccctttacaaaggttatacccttttacaaataaaaatgttattttaattataaagaaaaataccccagaatgcttgtctctcagagtaggcaaaagagttatgcagatctgaaatacaggaatgtatagtttcaagcaagagatcatgtgttcctatgggtgtctctaatgaaagggatcaaacatttcgggaaaagaggcaaattatgccctagatatacatgaccttttgagattctcgagaatgttggacaagtggcatatcgtttagcttttcctccagctctttcagcagttcataatgtattccatgtttatatgctacggaaatacgtatcagaccttgctcatgtattaagttatgaacatcttgagctgcaaccagacttatcttatgaaaaacagccagtttagatcctaaaaagaaaggataaggtcctgcgaaacaagaccatagctttggtcaaagtactctggagaaacagcaaggaggaaaccacctgggagttagagtccgacatgagagctcaatatctagagttattcaggttagattttggggacaaaatccttttaagggggggataattgtaaggaccgcataactttaatttagaaattagcatataattagggtttaattatgaaacttagatattagttatgaattattagtctacgataatttatttgaattcagaatgtattttatatgtcatatatgaaatattatatttttacatgttttgtgcctcgcaacgttggaacttggtgttttattagaatcacattttagtatttttagtatagcggagcaatatagttagacattgggaatgttgggaatagtcaaaattctagaagtgaccaaaatatcccttggtgattaaatggctagttagttatgggaagggtgaaatggtcattttgcccaattaactttttgtcttttagtgagttttgaattgggttttattctgatttttttaagttgattatatttgataaaaccaaatttttatcccattttatgaaaaataagaaattaaccaaaaagaactctctctctct

SEQ ID NO: 46263 - DNA, 2381 bp, Cannabis sativa
  modified_base (131)..(133): a, c, t, g, unknown or other
  modified_base (276)..(295): a, c, t, g, unknown or other
taaactgtgccaatgccctggaaatgacataacacttatccaaggtgtaagtataccttatcgtcgattttcatgtcaatctaaatccactgaattgacaaatcatgggaattaaacttttaaacatatannnatgattatattccactgtgctaatgaaactataatcatgaacaaatatgtaaatatatgttctgaacttaatataatttatacataatcatgaaataaatcatgtgaaccatgtaacatagaataatttttgatcttttattnnnnnnnnnnnnnnnnnnnnttgaaatgagttttatttaggacagaaagctcaacagtttcaccacgtaactagattcccaccaacaaaggagcaataacctaatgtagatcttctatctaccatacttctagcccaatctaaatcaatataagcttcaatttctagatttcctcgtggtttgaacaagtgacctttttcaggcgttcccttaagatacattagaattttataaacaatatcgaaatgctttgaaccaggtgaatgcataaactgacttactatgcccacaaagaaagctatgtcttgtcgtgtatgggacaaataaattagtctcccaactaatctttgatacatcttccggtccttcatgttctttagatctagaggttcaagtttaacattaggttcactaggtgtttcagcaggtttgtagcccatcatacttgtctcacttagaagatccagtacatacttatgctggttaataaaaataccttctctggaccttgcaaactccattccaagaaagtatttcaaattacccaagtccttgctttcaaactcttcaccaagttttattttcaactttttgagtttactatatgttatacccgaaatttggctacactgcagaggatgacaagtgtcagttagtggaatatgaaccacctgatataattaaagctatatcatttaaaaaaaagaaaaataacttgttaaatatagaattaataaagtatattcataactcgctgactgtatagtcttaagcgagacaagaataaaaaattattaaaatctgtatcgacgagacacgagtctgcctcgaagtacatagatccaaagagaagattcgtttattttgaaggaatgagtgaagttacccaaagcaacttcagacaacatatagcgaggcgtccaccttgctattcataagaaatttgacaaggcgaattatttgttaaacacttagcgtatgttctgcattacaatagctaaggataacaacttggaaatatgcaagatatgactgtccagtctgcaaggccttatggtcaaagagcagttcttaagttttctcagtacactggtgctcatgccattgctggaaggtatatgattgtccgaatcggcattaaccatcgacgaattaagcgagatgccattatccaaatcagcattgaccatctttgaggataagaataataggcagttatgcagttatcaattattatccaaacatatgatttaaatgaaacgtgggaattaaccacctttcattaaatggttatatatcttgaatctaaatgtaaataactgccaacttatattcctataaataggggcagatcccacagaaaaagggacagagaatcctttgagagaaaaatagaaatattatcaattgtatattgtattaaatactctgaaaatatcttgaataagatagactcgtggactatgcagatttaactgcaaaaccacgtaaaatatctggtgttattattatactttatatacttaattgacttcttgttatttttgtgttaaaattattacgaaaaggcttattattggttaacaaaaatcagcgttaacactataatcatcttcaatcagcacaatatcatccacatatacaattagaatagccaccttaacttcttttgaatgtttatagaacattgtgtgatatgcttgactctgagtatacccataacactttaacaccttaccaaaacattcaaaccaggctctaggagattgcttgagtccatataaggactttcttagcttgcacacttttcctgctccatagtgatcttcgaatgaaggtggaagactcataaacacttcttcttctagatctccattaagaaatacattttttttacatctaattggtgtaagggccaattagagtttactactagagataataacacacgaatataattaattttagcaatagaagcaactttttcttgataactattccatgtgtttgagtaaatcccttagccacaagcctagctttgtatctttcaacacttccatcagctttgtattttattgtaaatacccacttacatcctacaatttt

SEQ ID NO: 46264 - DNA, 898 bp, Cannabis sativa
  modified_base (860)..(860): a, c, t, g, unknown or other
gataccatgttgagaatcatggggttccatctcaaaaccaattagcaatgagtggagtagcccatgtccacaatagtgcttatcgttaggttattaatggtttctctatgtgaatacttatttgaacatttagtatttattgataggttatcgacacatatctatgggttattgattgtttcaggtttttttcaatttttatgaattttttttaaatttggtatttatcgatagattattgatatgttatcgatgtattgtcgacaatttttggttcgcctaaattattttgtagattaagtatttattgatataatattgatacacttatttatggtttatcgacaatttctggtatgtcttacatttttttatcaattaatgactaattgtattattattgtttaatctaagttgattagttattttgattctcttaaataaaggctcatatgattttgttattcttttcagcataaaatgtcgacatatattgctagttatcatggtagagatggtggtggggatgacctattcgatcctactagtgtatctgcttcgtgcgagacttttggtgaattgagaaaaggtcacgagaggaatgttttggctaacttggaagatagaagaaaaaaatttgagacgccgttgccattatcatttgacaacatctccaattagggttggagagtaaagcctaccctctttcggtagggagagaagttacattgcatgttcttggacaattttctagttgggcaaatatctcggagtagtatgaatatttcattttaaccaaacttcgagtaaattttttgaaatttatatctaaattaataaataaaattatatatattaantatttattacaattttttttttttgtcaaattaggcag

SEQ ID NO: 46265 - DNA, 2045 bp, Cannabis sativa
gattagggtgacgtattaggaaaacaaatccaaggtcattaatgagggtaaacagaagccaaatcaaaagtcagggtaagtaatgaggcgagagtaggaacaaaagggaaaacatcaagagatagaggagatagagtaataaatgcaaatcagagaggaatcagaaagaaagaaaaataaagagagagaagctatgaggactcaaacctgagaaagaagaaactgagaatcaggcaaaacaaaccgatatcggtacataaccagagcaaagcctgtaggaagcttcaagaagaagagaaaataaaacttcttacggttttaacacttgaatcagataaaagttactttttttcctggtcgctcatgaaataaaaattagttcattgcaccctcgaaataattatacagccaaattcattccaaagaaccaaaagcaataagatacatttggccaaaatacaataacccaaaaatccaacagctatgaacattacacacatatatataaactatatatacatatttatataaactatatatatacacatatttctgtatcaaaatgcgaaccatatcaaaaactgaaaccagccattacatgttgtaatacgaatttctggatcagtcagtttcatggtcaggagttggggaataccatgcagggaacttgcctttgcttctcagcagtctagtaaaggatgagtcaggcattttcccactctcttcttcttcaagctccgcctgtgacttcggcattccatctggtataggaaaaggtctctcatcattttctgaaccaaatggctgactcaaacttgattccttcttccccttgtggatttctgcaataccatgtaagaatccaatcaaggatttcacccctcctgcttgaagaattagcctctccacgtctgctttcggtgtttctttctgaataaaatgaataatacaaaatactagtcagattcgaaagttggtttagagcaaagtccggaaaaataatatatatatatatatatatatatgaaataactattcgattaaacataatccaaaccccagtagttcattctacaagggcagagataagattttcaataccaaaataagtctgatcacaataccaaaacaaaaatacctttttgtttttcacatatatacttttgtaacatctaaaagaaaacattatagacaaaggagttcagttcacctctagatctttgagctcaaaatatgctctccagcaaccataagattcgtctccttcaagggtggaacaataatctaaccaaaatcaatcaacaaaattgaatgattacgaaatcgatatattaccacaaatcaaatttggaaaacgttaacctaaaattatagatgaaaaattccaaacttgtaaagaaattttacagacaaactatacctgcgagctcgttctcggacttttcgatcaaaggtgggtcctttaagatccgttcgaacttggtacggctaaagggctcgagctttggaatgtaagaatggtttctggaagaacaagttacagtcgaagcaaatttcgtggatgacgacggtcgtgttcgattaacatctttggcttcaagaaccaaagggggtgaacaagaacgaagtacggtcgacgactttatcatattttgtccaaacacaccttaattctccttttcttcttcttcgaattcttctgtaatttcaaaaggctaaaggtaatttacgatgactaatgatgatgagctctagagtaaaatggattaggatcagatattatcttttcgggcaaaattgattttcaaagatattttattatttttctttcaaaaaaagatattttattatttattctgtttcggtcgcaatgaaaatgacagagatgagttgtagccgtagattggttcacatatgcagaagtagacggtggatctgatccgacgtggtaccctttggggtagtggcaaattgcctagagtcgagtgtgggacccgactactgtaggaatgtgaaatcagtgggcgtattgggataagatcagg

SEQ ID NO: 46266 - DNA, 1574 bp, Cannabis sativa
cctttttagtcttgtttttttttttttttcttcttttgctatgtataattctccataatggagtcatattctagccttgtagtatttacatctgaggacttaaaattattcactaacagtttccacaagaataatctgattggagacactcagtttggtaagttatttagaggttgtataaagaatttaacaggtgttatatgcactcaagaaaatcgagatgtgactgtcaagatatgggatgaaaaatcaaattgcttgaacttggattctgatgatgagcatttgatgatcaaagtaagttgcccaataattgtacttgtatctgtttgtatatatatttatatacataaacttttttaatttgttgatttatacatattctaggaagaagtgaaatttttaacccatccaagcattcactgtcatcccaacttggtcaaattgattggtttttgctgtgaaaaagaagtgagaggtgtagtctatgacctaaatccaagggatattttgcataatatcatcttaaaaggtgaacttttccctcagttattatgggatggttgattattaagtatttctactatgagatgtttgctgaaataacaagataaatatgagataaatatgtaatagttatttattaatattattttctaacaaaaaaagctttgaaactctttctttggtgtttcactaagaattatcctttttttcccataataataatagcacttgacaattatttttctatgtacagatgttcttagctggacccaaagagtaaatattatactccaacttgctggtgtccttgaatttttacatacacaagaaatgccatatttggttctcaatatttgtgaatcacatataatgctggattgggttgggcctataattcacttgagtacactttattagttgttttttttattgaaaattaatcattttctttttgttcaatctctaaattctactgtgaatgaattttcaggattgcaatataaaattatgtgattttggcctcattagtggaggaatcataggtgaaatcagtgctttaaagaaacaaataacaattcccattggttatgttgatcctttttttgcagccaaaggtacgtgttgtttatatttgtttgatacaatgtattttagaatttattcctcaaaacaatgtacttgtcatctaaatgatgccactgttttatacttgatgggattgcatacttaattcacagacaaattatgttctatattctctaacagcacccaaatccatataaaatatttaaacctaaagaacataatatattaatgtgtaaaatttaaatttcatgttaacttttaaacattgcagactaaacacttaattgagtaagaaagattactgaaaagttagaatgattgaatcaatatagtctttctcaaaaaggagaaagcaaacaaatatcttttgaaaaatgctaagaaaactcccttttgcattttcatcaaatgttttatatttttaaattataaataaacaataaaatataattgtcatgcatagttaaaaaaaaaaaaaaaaa

SEQ ID NO: 46267 - DNA, 1531 bp, Cannabis sativa
gtgtgtttcatctatgattttcataaattttggaatataatatgagccctttgagtaaatgttgaaaagtaaaattctgtcatataagctctcaatacaatgtttgaaggaatcgattaatacatttcttttaagtgggtgtgtatttggaaatacctcattttcaaaaaagaattttgaataaaacactgaaaataattcgaagtacactccttaaagggtgtttctgaagccctctatttattttatgaattttagaatttgtttaaaaaaatataattttaaataactataacatacgattatagaaaaaaaaaaatatcttaatacagaaccagataaaaagtctatcaaaatatctttctaaaagtgttataaatttaagggatttttttacttttacattttaaagtaaattttttttgtatttttacaaaaattcacatagcaactaacgatataactttaatcacaactcaaattcacataacaaaactaagtgataataatataaacaagtatcttctacttaattcaaattgaaaaaatatatatacatatataaagtgattcccctctaacttaaaaaaattaaccaattaagtgataataatataaacaagtatcttctacttattaaccatttaagatttaaaatatacacgcatttctccctcaaaaagtggtaggtagctgcccacctgaattttagttcctctcttttacaattattacaaatatatcattgttaaattattcaaaagtaggtttttttttttcattttatcttttctactttgaccccatttgtgtgtctatagtaaatatattttacccttgattttttactcttaatatttaatatatatttatatattttattccctttttacaaaattttaaaataattctccaacaaattgcttttaagtaagttttacatacagtttttatattgacccttatttatgtttttatagtattacatatttttttcataccagcttttaactcttaatatttaatagaaatttttctatttttacactttaaaataaattattttaattttttttttttacatttttacaaaaatttacgtatcaactaaaatcaacttcaatgctaaaagttaaatttagtgttaaattaacactaaaagattaattttagcactaaatttttttctattccaaccacaacattaaaatttatactaaaaaatattctttattattatattattttattaaactatctcataatataatatatatacataaaaatttaatcataaatacattattttaatattaaaaatttttttaaaaaaattagtgtagtcaatagtgttccactatttagttgaacactatcgactctataagatagcatttaaagttctattggagcaattttgtatccaaattcaactatttttagaattttagtagggaaatttacacagtttactgtgttttcccattttctttcttttatactgttacactccaaaaataacttttgtact

SEQ ID NO: 46268 - DNA, 1378 bp, Cannabis sativa
ctttgggattgtaactttatttaatctataatccttgtaattttgttgcatagagttgtaatttttttagtctttttattcatcttattgttattcttctattaatatctcatattttcctaactgagctacattgtgtgctagtagatcagaattaaaagtaagtggatgaacatttttcttttgcctcaaaaagtttctaaggaaattgactgtgcaagactttcttcggggtaaaaaaaaacacaagtaaaatgcacattgcttcgtgggaactagtttataacctgagaaagtttagaggattgggatttcgtgagggtcagaattggaataaaccatcaccggccaaatacttatggacagttacactgaagcaagatttcatataggtaagtgggttagcaatgtattttgaaagatcaagaagtatggtcacaggaggaacgcgagttaattttgagaaggtagtttggtgtaagctctcagccccaaaacacactgtttcatcttatgtctggtaattcgtagtaatcttcttaggcgggataatcttgttaagaagcatgtttatgttgaatctactatttgtccaacttgtgagatgggcctagagaatcatgcttatgtattctttgactgtccatacttatggagagtgttacaacaaataacgagttgactagggagccaactgtggccaagttcctttgaggagttgagttgattgggtgaacacaaagaggccaagatggttaaatcgtaatttgtacatatttgagaagaagtgcttggcaccgaagtgtatagatagtcattaaagagaattcaaaagttagactgagttttgtacaaggaaagaaagttatcacaatatgatagatatgtgcttaaaagtgtaagggagttgtaatcaggtttacttggggctcatcccagttaaagttgtaaatatgctcagtttgattaatgaaatattacttcttgatcaaaaaggtgccaaacacctcttagtctttattgacgactgaatacaagaaaacaagtttttctatcctaccctttcatttcatttcattaattgacagccactaatcttattgttatcactaatcaagtatgtgaaattattataaattgaccaaaatcccatacaccaacaagagtcaaaccttatgtcattttccacaatagaaatcctgagacaagtttacatctcttgagcaattttggtagcatattcattcatcatgtggcttcttcttcttttccttcttcttctgttatttctaattcaaaaaaagctcaaagcaaaacaatacaacacatccacacaacttcctccaggcccttcaaagcttcctatcataggcaacat

SEQ ID NO: 46269 - DNA, 2062 bp, Cannabis sativa
tttatttatcacctatatcaatttggacttataacactctacactttcagtaatttgatttgaactttgaatactctgttatgaattttaaagagatctttatttttgtataaaatatgttatggcttttaacattttttttttcgtgaatgttaacattgactaaatattttttttcttttctgataaaaccctaataagttgtgtttctctataatagttacaagtagattaagaattatttatttattattattattacaattatgaataatgatcaagagatcaactcaccatatctacggttcaaatatcgcgaaaagccagcttgtgttacccctactaagacgtcgttcactgtctgaatatatatacatgtttattaaattataaacttgagaaaagatgttaaaatgtatcattaaaattcttcaagattttaaaagtgactaaaaataatataaattaataaatatataagtaatataatacttttggagtaatatatgttaattttaatatgcgactattactattatttcactttatattagataattaaatatatttcatatataaaaaaatttataaggtgttttcaatgttaaatattgtaaatctgaacataatatttcatgctaactaataaactttcaacattaatgcttaattcattgaaatgagattccaaaattaaaagtgataactaaaatactaagattaattgtgcattattttcatgataaacaaattatgtaacttatgaccagcttcaatgtgaatcctaaaaccattattccaattaaatttatagtttttaaaattatcttgaaaatataaaattagatctctacatcaaaattcatgaatctaaaatactaaaatattatttattattatttattttaaattaactaaaaatattctgttaaaattaaaaaaaaaattaaaaaacattatcaatatattatgatatataaaaaatgtaccgcgttcattgcatctttgattaacttgatgtcatccaaactaagtgtacgatgaacaaaacgagtaacagcaaattcagaccccttttggcctttgattggagtatttgtatccttgaggaacaaaatggtagccacatacgttacaaaatccacaaaagtattccaaactaatgacattgccaaccaaacacgcaacaacaatccccaaatccaactccaaggcgatgatgatgattttctcttattactagaatttatgttttggcctggaagtgtgggtagcttttcgggatcagaggtttggcgagtgcaagccaatagaagagacattagagaaactccgtccccaacggagtggtgaattctgaacactactgatgcctcagactgtgaagttttcaaattaagtatatgaagctcccatagaggcctacaactgtcgagtggtgttgttgtcatgtgcgagatgtagtcttccataaatttatctggatcgtccattgttggatcatcaatgtttggaacaatcacatgttcttctaggtttactgagcaaggaatccatccttcatccttcacctacaaataatatgtaggaattttaatatttttttgcaacctatgtatatatatataaaaaaaaatatcatattgctaatttctttttcttttaaaaaagcatataatatatatgtatattggtgaggtgtatggtaagaagtatgataatgtatgatattttatctcaaaattaattaacaataagaaagatagatcatggccctagttgattgggcttttaaaagttgcttttagagttccctgaagctccaaaaatacttagataaccagtaaatttttcatttttagatttgaaaaactcttttaacataaactaatttcagtagctttttattataaaaaaaaacttccttagaagctaaaagcaaaaagtagaaatttaatcaaacaaaattcatatatcttatatatagtatacattacacgagagactctttaacacaaaaataagattaagcgtatataaaaaaaaactaaaagataagtac

SEQ ID NO: 46270 - DNA, 2410 bp, Cannabis sativa
  modified_base (1319)..(1320): a, c, t, g, unknown or other
  modified_base (2075)..(2083): a, c, t, g, unknown or other
gtgttagaattatgggttccattttaaaactaaagttgaaagaatccgtgtttttatatataacttaatatttttacatttaatccaataagaatattttccaataaataatataagaccctccaacatctcatataactattaatagaattaaatataagattctgtataattcaaatagtttttatgaaacatggctaaccaccactagtttcaacaaaaaaaaaaaatcagtcgagtgattcattgagaaaaagtgggaaagagtgagtggatgagagaagaataattacctaaagaaaagagagaaaataaataaaaacaaaaaaaaaaacatgtggcagagaagaaatcagtaaatataaaagaaaaacaaattgtacagtataaatgtaataaatcaaatttattttagtatttctggtaaaaattcaattagaaacttgttcagattcagaccatggaattgagctcattggaggaaagcaacaattacaatctccaacacatttctgaggtaactcccaatcacttgtgggattcaatttcttcaatttccatggcccattcacagcctccttcagtggcccccaacactcaaccttgttgaactcaggaacattggagtgaaaatacacccacactaaagcctcctgtaattctggataattgtttaacaaatcttcatctccatgaacaaaagccttcacagcctataatatattattccatttctcaaaattaaccataaagttttgatttttatgttttaaatggaagaaataataaagatgtaatgtgtgtaccacaggaagttctttgctgaagatgacaaatctaagccttgcaaataagtctaataaaaaatggcctccactaatgtgacaatgaatatgaagtgacatttttcctttgaattttttccactctgctacaacttcatctctttgtaatttgttataccatccctgtaactgtcacattatagaagatctgggaaatgggttttgtttttgggatcatatggatttataaaaataaagaaagatttgattttgttgttacctgagaattgtttatagtctgggatatggctaaggtgagattagaagtgatatcactatgtgtgagtgtataagttctggggagattccctgggtgcttcttttcatccactcctaagaaaagaaccttcaattttgatgcttcaaatatggctggcccaaataacctcacaacctgaccaaacataattactcaattgttattttgtttctatatacacaaataaataaaagaatgagagagagagagagagnnagagagagagagagagagacttttacaggaaaaatagcttggttattcttcttatgggatcttcttctattaggaaaaagagaagtttgatgatgatgatgatgatgatgatcaataagagaaagctttatcttcctcaatggagagagaggagcagcagcagtaaatgaagccatctcagtctcaccacaccaaacaactacttctctctatttttagctccagctttgttgcttggttacttaccacataaaattaatgaatatttaatactacatacactattgaattgaaaaagaaaaaaaataataataatgagtaaggtcctcttttttctttggtttctaaattctatctttagcttgtttaggctttgggtttgggttttccattaggattttggtttggtttacatgttgtgtgagcacaccaatctgttggaatgggtgacactttaaagataagattggttgaaagagttaagttgggccaaggccaagccatacaattattacacgtgaatcatgggaccaccaaccaattaaaatatactgtgcataaaatattagctttctcccttttgatataaaacctcattaacccacaaaaatttgtgtatgcccctttctcttgctgtctactctatgctcagcagccttctggtattcctcctcagcaccaattggtctctttctcccctactctcatgttacaaagctaactaatataaatctatatatatatatagagagagnnnnnnnnngagagagagagagagatagagaggaattgatgagtcacgggattacactctttttttatgcaagaaatcgattaggagccaaatgcccaagaagacagtagctacaaacagacaccagtcccaaaggaaaggaaaggaaattcactctcatcaccactaccaaagagagagagagagagtacactttattgataatttgatattattggaagttcagagataacttttccagttacttggaggatctctatgttcttttaagggctcgtttagaacatgtattaggtcgtattgtattatattgaattgtattttatgtaatatttt

SEQ ID NO: 46271 - DNA, 1921 bp, Cannabis sativa
ttttatttagggcataaaaccctacagttacagtaatacatttttcaaatggatggcctagacaaccacatttaaaacaaaatttggggagatgctcatacataaattctatccaaaattcatctttaatcttcgctaggttgatcattcgaccataagggagtggttcgggtaccgatagcttcactcggattcacgtgaaagggccccatccctcatcaagagagtcttcatggacatccacaaactcaccaatggtatcgcctataacagttgctagtggcttggacttgcttaagaacggtagctcataaacatggacccaaaacccaatagataattgtaatgaccgtttagctttattatgagaattaccatatatttaggatttttagtcagaaataggctttaagttattatttttacaattacagatatatatttgaattctaggtgtattaattatattatatgtgaaatattatgtttttatattttatgttcgacaaaagtggaaagcggtaattcgaccaattttagtgacatagatatagtagagtagcttagaattagcggggcaagatagttagacattgagaatgccaagagttatcgataattgttttggctattttgcccctagttattcttgtttgttatgtgggttgataaagggcattttcgtcttttccctaaattaattactaaacttggttagtggagtttctagtgttattttttagtttttataagttgagagtagttttaaataaaaccaatgaagacaagattattcttagaatttcattaagtgaaaaaaaaaataaataaatataacccttatcgtgtccttctctctcttggtttggaacctcaaagaacaaccactatttttttatcattctccttcaattcaagaataattcatcaaggctttctaggacttttgtcaagaaaaaaatcaaggtgagctctaactcttcaatctaagtgtgaagttagatttttcatgttgtttaccgagatttttaaaaatcaattataataaattaaaactaaagaaacaaacaatttagaaaaagaaataagaataacacacaaaatttttacgttgttgggacgttaacgagctttagtctacgagtcgatattattatgtatcttaagctggaaatgcctttgggaataaaatgagcacaagttctcttagttttcctaagcaagtattgcaagagagtttaacccttaatccgaaggatttgttggatatttatattattctaagaaatatacctagtttccattttctcctcaaatgtggaatttacatcaaattacataatttgagttgttctcgtaaagtccagcccatgaaggagtcaatttattgactagacagattggatgagacttcaaggaggctggggacaaagcctattggttcacatgttgtcgctagggtaactttatataataaattttcatcgataagtcttattttttttctaaaaatacaataataacactttttttcttaaatataagctaaccccgagacagaagaacttccaactactgtgataacttttagcgattccaccataaagataacacttggcgcaacaagtacccacaacaagcttatgtaagtttacccttatattgatttctaaaaatttctttcaatttgttttgtattcaaattaactatttaatttatttgtttttataggatcaaattgttgaattggctgcaagtcaacaaacgcccactaaggattagcctgatgagactgttgtagattccacacagtaccccctagactttcttgttatgacgcaagtactcggggagcaatctaaaaatctaagaggctttggccatctcctgagattgaaggcagttggggccaaaagagca

SEQ ID NO: 46272 - DNA, 1038 bp, Cannabis sativa
tccaatcaacccaagttttaataaaaccaataaaagttaatgtaagtccaaataaaaagtcttacaaaaagaactttcactactaaaaaaggttaatttttcgattttttttaaatagtcaggaaaagatgtcgtcgagccacgtaactgatgcctattctaccgttgcaaaaataaaatgaaaaatgcgtcaataaaaaacaatcagatatgcctatgtcctaacggttctaaacagtcacaaagttaaaaaaaaattacagatctaaaaccatatcttactgtcggaaccagatttacatcaccaaaaccaaataaccacgatttttcaaataccacaaaatgagatctcaaccatccttattttcttagccagccaccacaaagctatttcctaaataatcagcctccctcgcctaaaaaaccaagagcgagagaggaatatcttgtttcgaactacacgacagtggaggaggaaaagatcagctgggtttgcgtgtgaggtggaggagactagttggggtagaggaatatctatgtaattttcttacaaaaaatgataattacataaggcactttttgtaaaaaaattacatttttatgtttaaagaattttttttttatatttttacggttttccatagaaataacacgaaaacaatataaaaataacatgaaaatattatctaagtaacatcaaaataacaacaaaatataacatacagataacaaaaaatcaacaacaaattaataagaatacaacataaaaaactgtattttatgtaaataaaataaaaaaatcgtaaaaatatttaaaatttcgtgaaactgtatttttgtaatatttttgttatttttgtgtatttttgaaataataaaaaatgtcttaaaaaaattaaagggacattgtagtaaattgccttaaatcataggagtatgttactttatgtcctctttttaaaaaaatatagcaaatgaccctaaatcataagattatgttagtaaatgtccttattagaagcaaattatttaaacatt

SEQ ID NO: 46273 - DNA, 2627 bp, Cannabis sativa
aaatatttataaataattttccataattaaacatgattaactgctaattttcaaattaaactaagcggcctttacattatagttcgtataaatcatagttaatttgaaataaaaattattgattcataaaagaaaaattaatcgattacaatcggatggtaagggttcaaaccattcgaattccagtgatctaacggtcaggataaacttgcaagatgaaaggaaaagggcagttgaaacgcttaagtacctctctaacaactgcattaatgaagggatctgtcaaacaagcgggaattgaatcgttgcctatcaaaaatgatgtaaaatgattataaacaataaatggcccacgcgcacatgggatttctaccacttcactccctaagaccagatgcaaggtaaaagtcctattttataaagttttaaaataagacttgaggggtaaatgttgccctgcttttatcccaatatacatggcaactctacgattggacacgtggcagttaaagcttaaggcccggaggtgcttaaggacatcctaaacatgcttatgatttaagtggatatattcaaagggactcctcatggagctatagtaggatatccggaaggatcaaccttttgttcatctccgggagctaggcaaagcccagctcaactgggcctagggtcctggagatgaactattccaggcattaaatgcgcatggaagaaatatctacggacggatatgaaaagacatgtcagacgcattaaacccattctttggcggttacgcgttaatcaagaacgttagtgacgactacataatgaactgtcacatcaatcaggcaaggataagggcttgcctcacctaaatcctacgtaacctactaggtagaggcgcataccctactttgctaatttaggaacttgtgcaaagccaaggtggacgcttgagacaatagaggccttttccctctcttaaaacaactataaatacccccaaccacatttggaatggggatcggaaaaaatagagtagaatattctctgtaaagaaagacctccatatttaatactagtaactcgtgaactaaggctaattaatgccccaaccacgtaaaaatactcgcatttactctaatctaatcattttcagtgcattaattacttagttgctgaaaatcttggtcaacaatgcaatactaaaaaaattatataacttaatttaattattatatatatattttttaaaaaaataatatatagtaaatgtatttttataatttttattaactaatttattatatttggccttatatttttaattattatgtagtaaatttatcatatttaattattatatttttaaatcaagggtcattttacatcacaactctatttttcatatataaacttagagttgggcctagagacgtgtgaaacaaagaaagaaacaaaaagcaaaaaatttcaaaaatatatttattgtatatatgtagttaagaaatttggggccctaatttttgatgggcctaaggcatcagcctggcttgtcgtagctcaggaccgggcttgtttggagtgtaaggtaactagaaatttaaaagggaaacttacaaaaatactaggttttgaacaaatctttacaattttaatgtcacacgaaaaaagttatatttataatgtcctgcctttttttttcttttatactgttaacaccaaaaaaaaaaaatgaggcatccatcttctacacccacagacaaaactaccacaacaacaccataatagcaaaaaaataactattaattcgagcaagatgaagcagaaatattaaaactattaatactggagctgtcatgatttttttaatattatttttggattgttccactgttgtttcgtatgtttaacaaatattggttttaaattacacaggttaaatcaactactagaatgaaagaatggacagtaataatcttacttcccattgaaagggtgaaatctaaaagaccaaaaaaaaagaaaaagatggaagttggctgggagaaaaaataacataacaaatatagtaaaatatgggaagctgagacacaacaagagaacgtacaagagaagacatcaaaaaaaaagaagaagcagaacaattaaaaatcaatagtggaacaatacggaggaaaactgaatatatattggagcataggatactgaaaaaaagataacttacacacaaattttattattttcctatttatattaaatatagagtagtacaataatatttggaaaaatgtgagaaagaaatgaaagaaacaatagtaaaacaacattaaaacaataataaaataaagtagtaacagaaaatggtaggttggagaaagagggtggacttagaagtacgatagagatggagccaacattttgagactaaagagactgaagaacatgaatttagttggagtttctgagatatttctacaagaagctcatcacaaagtaggctctccatttctctctcacacactcaaaactacacccttatctttctcaaatcttcttcttcttcttcctactttacatactctttttttttagttacctactacaaaaagagagggttagctttgttggaaattatttta

SEQ ID NO: 46274 - DNA, 2758 bp, Cannabis sativa
ggaaacctagaacctcaatatgatgggactaagtataatctcgttagaggcacaataatttgtgaccctccaatcgagctcttcttcctgcataagaatggagagctccatcatcaagaaaggaatgtgacattcttatttttgttaatcaagcttcgttgatgctgacatgataggagccattacagatgtagaaaagaaagtaaaagttgcaacttgaaattttggcaagaaacggaaacaaagcaagaaatgggaaaattttcttaatggtgaatgaaaatgactatttccttaaacttaaataaaaaaaaaatagaaaacgtgacacttaagaaaacacttcaacatttaaggcacgcccaatcgtattcctcttagttcccgaacgttgcactcaaaatacgggtgagtggtaaacatgcgactaatcgacaatgaccttgatcaagattacaggtgttgacacgtggcccaaaatatgtgttcatggattttagagtccgaccctagccatatatttcgatttaatctgacctagattcaaggggcaattgttgagcccaaatattttgacccacttttccttaataaataaggaaggttaactcccaaccaaaggataccctagcccaactgtgtaagtcgtgaaagagtcgacacacacatgaggtttccctggttttgacgaaagcatgaacatatttttactgacatcatcgacgttctaaaatgggaaatgtgtgttgctgtcgccatcaatccacgcataagcgaaatgtccagaacccataattcaaattattgtttagtcaactacattttgcaagcacaatggctttcccaccttctaacagagctctattataaagagcacaaaaactgtaaggagagggttagttagttgaaattgaattctctcactaaattcaaattctagtttttttgtgctttttctgtctaagctatgaatttgtaagtttaagagatagcaaatagaagtttggactcttttaattcttttagcagcttcctccttagttatatatttcctttcctctgacattagtgtggaaagcataatagaaagtatgagcagcaaaatagaatgtacaggtaataagactcatggttccaatctcattgttaagtggagcttataaagaaatgatatgatgttctcaatttacgaagaatattacagtagaaagagagagagctgaaagaaaaggtaattaatttttatcaatttgattaagcttgccaaggccattgcaacgagcacaaacgatctgagtctcatcttttcttgctgcatttgctcttaaggttacccctgactttcgaacgaaccctgcctcacactcaggacatctgcacacacaaaccacacaatatggatccttattaggcttcctatgttgagtcttaacattatgaatttgagcaaagaaaacagttgtatagtaataaaaagagcaaagggtaacttttcatacgtgtcttttcgggagaataggatagggaaagcagttccaagtagagccacagcagctgcaccagcaatcaagtaagctgttccatcggctgatacatccccaaccgcagccaccacagttagaggtcttgtcttcttcttgttcttctcacttaggttccaagaaagagctgtggaccctgctggtgatgctgttgatggactgcacacaccatactgagaagaagagcttcttggttttgcttgaaagatagtctgcagagaagacattgaagccatcttttagagatgtatgggatcgatcagaataatgagagtcaggagcaaaaaggtatggtctggtttatgagttgttgaactccctcaatggataaggaccacgtcagaattcaagattcttgtgagtttgaagataagaatgggacccgctaacttaactggttcatatagagccaacatctcacaacaaatataaatggatagtcaaatagtagagctctaaaaaggtaaaaccaacaatagcatatatagccgacctggaaaatgacaaactatcacataccacacatgaaaagtattaagcttataccacacatgctacaaagtcaatgaaatgaaaaaagtgatcaatttctcttcaaaaaaataaaagtttcaatgaataatggaaaataatgatcactttcaaaatatgtgaggacaaacaaatcactagcaaatttgcaaatatgtgtggttcattgatcgcacgtttttgaataaaaatcttcccggttagatttttgcatcgaaattgataattatatttagcaagttgaatgcacaattttctatcaagtctttcagtgttggagctccactcatcacgagtgacacttgtttattgaaaattagcaagtcataaaaagcaactagtactcaacattatggttaagagcagaaaaaaatataattataaaagtacatttagacaacagtccttaactatttataagaaaagtatatacagataattgctcatacttctcactcagctgcatttggttagtcggaaggaatcaaaacacaataataagactaaaaataagaatagaataaaataaaatttaaaatactagaaataaaaataaaaaaaatttagcggtatcttttttttatttcaaaaataatcattctattagaatgatattctaatattttacaatattactaaacaagaaaaaaaaattaaaaatcaaatctttttcattcaattatatt

SEQ ID NO: 46275 - DNA, 6560 bp, Cannabis sativa
attttaaagcaaggattgctgctactcggactgctataaagaaactccaggcgtgatgaggtctctcgtcagcattttgatgaagcaaagaaaaatctggcgctagtactggatcagcaggaaactttttggcgccagatatcaaagcaattgtggctcaaagatggagatcgaaacacgaagtattttcactctaaggccacgactagatggaagaataatacaactcaccaactaaaaaattatatgggtcaatgggttgactgggagcatggcttgggaggtcatggtggattatttttccaacattttctcatcatctctagttcaatggcatgagattattgattgcatcccttcggctattacggctgatcataatttggtcttgttgaaagttgttttagatgaagaggttaaagaggcgttgcttcaaatgcatcctgacaaatctccggggcttaatggtatgactcgtcttaagggattcctttccaatgtcatatctgatgcgcaaagtgcttttattcttggaagattaatttcgaataacattttaatctcttttgaggtccttcattacttaaaacagaagaaacagagtcgagatgggtatatggctttaaagttggatatgagtaaagcctatgatcgtatcaagtgggagtttcttcaagcaattttgaccaagatgggttttgatcggcattgggtgaagttgattatgggatgtatttcaactattcggtaccggattggccttggtggtcaaagtctaggtcctattatccctacatgtggtattcgataaggagatcctctctctccgtatctttttatattgagtgttgaaggtttgtctgggcttatcaggaagtattcaaaaaataaatggctacatgggtgtaaggtggctaggggagctcctgttgtttctcctatgctgtttacggatgacagttatctttattgtcgagccaatgaaaggcggccaagattatggagctcttgacaaagattgaacaagcttcgggacattaggtgaataatgctaaatcttctatcttttttagcacttatacgtcagaggtaaaccgtgctcgagttcaggaaattttggggatgcatgttgcaggtgatcaaaatttgtatttaggtctttataatactatgggtaggaataagaatgttactttgggtttactcaaatataaaatgcataagcgagtggaaagttgggacgaaaagtggctctctaagtcaggaaaggaaatccttttgaaattttccgctcaatctctccctagttacgttatgagtgttttcctgcttccacttaagctttgtactgaaatggagcaaatcatgtgtaagtattggtggccggaaagtagtaatggcccaagtattcattggttgtcgtgggagaagctaggggttcttaaagataatggcgggatggggtttcagaatttatatgattttaatctagctatattagggaagcaagggtggtcgcttttaactcattctggttcgcttgttggtcgtatgtttcaagctcggtattatcctcgttgatcgtttttgtctgcggagttggggtcgaatcctaattatatttgtagaagtattcttgcttcttaagagttattgaaagttgattccaagtggtgcgttgttgagggttcttctattgacattctggggcagtcgtggcttccgtgtgaagagaagttcgagattacttctttccatcctagtttggaggaggagaaggtcaatcaaattatggtgggaggggcccgggtgtgggatgatgaaattcttgaggatttgttcaatgcttctgaccgacaattaattaagagtattgtgttgaatgataattttgggtcgagtcattggtactggtttaaagatacttcaggggtttattcgatgaagagtgcttacaagcttctccaggtgcttcatggtaggtggtcggaagattataattcaagcctttggagggcattatggcaactcaaaatttctcctaaagttaaagacttactctggagggcatgttctgggtgtttaccaacactaacccagttaatagatcgacatgttgatgtggtcgtcgtttgcccagtgtgccaaggtatgaatgaatcaaatctccacattttgattacgtgtcatttagccaagcttgttggcagcgggttgaagggactatttgcaacctttcgaccacagatttttcaggatagtttgatcaactagtcataggatttctgtagacattggtttgtcatgttgcgatgatttgttggtctctttggaaagcaagaaatgggcttgtttggcaaagtaaattttgctacaaatagggtggtggctgctgcgttgtcttactttaagcaatggaagattgctcacgaaaattctgcaaacacagtggattctagtccttgtgttcgtgtggagcattggtcgattcccagtattgatatgatttaagtcaatgtagatgcctctgtcacttctgggcctttttattttgggattggaggattggcctgtgatcatcatggagttgtcatttatcattggtccaaacaattgattggtcgtgtctctcctcttttggcgaaggcaattgggttgaaggaagctttgagctggataaaagaacagggcctagatcaagttgttgagtcggatagtaaaagcatcattgatgctctgtatagtttggctcatttattgtctcttttcggtttagctatttctggttatcgtacttgaatgtctgatcttaacaatatttcttgtgtttttgttaaatgatctgcgaataaggcagccaattagttggcgattgccacttgccacttattcttccccaggtcgtggttagggtggggggcttgtccctactacttttcaagttattttggtggataatttgtccgttcatgaataagatgcatctctttttgtcaaaaaaacttaagggagtatatgtaggtaatgaaccaaataaattgatattttccataaaaacaaaaggcgtaaaaaagtatatatagcacagagaattaagattgttggataagccaggtcaaatttgtttaccatagaaagagagggcttaagggccgggcttaggtcttttatttaagttttattcattttgttttgagtgttggctgagttgttctttttgtatttttcagcagcttgtaattaagttgctgatgtggcaagctttgttcactatatctaggggtttagaactcagttcgaggtaggctgtaatccctactaattaaattttacacgtacaaataagaacatgatgtacctctcctggttcagctttctttgtacatcgtacatggtgagattcatcaacaattaaaagagcccattctcgctcaagcatgcttttcctcaagcgatgaagcatagtataagaaataacgacgactttgggaaatctcttcaaatggacaggattattttgatggccaaaaactggaacaaaagtgaccaagtgaattctaagaaaaacaagataaatagcattgactggcaagtttatcttgacaatcaagttatgcctagtaagataataaaaaaaataaaaaatcagttggaggagcagaacaaattaaatacacaagaagaaggaaagcattacctagatggatatcagcaggcaaaagaaatggaacccaacgttccaattcttctgcccatgaaaaacgcaaaatagctgggcaaacaacaagaacagaaccttcatccataagacagcaagcaattgcaatagcctgaatagaaaaaggagtagcatgcaattttcagtcaatctacggtcaaaaaaaaattgttgaatgctctttcaaagcaaatagtagaaacagcatagcagattgatgttgccagcatgacaacataggctgtttttttttccttctattattctataataactatatggttttcttaatttttgcattcccaccctgatctgacaatacttattatataaagtttcgattagaaagaaaaagtaaaagacaaatgtaaatccacaatgcacataagaatagcaattcaacatcttattaaaagttgtaactgcatttgttaagtagaacatctataatccaagcatagagatttcctttttaggtagaatcatcaggacagaagtccactgcttcaaaaacacatgaaagaagtttttatttgaaaacatccctagtaagtagtacctgcagtgctctcacagtgccccaagtcaacttaaattttggcctgtctagccaaaagaaacaaaaccattcatgacaagccaaaagaaattaaaatatttaaaatgtagacatacctgcagtgttttcccaagtcccatttcatccgcaatgagacaccgacctcccctctgcaacccaaatttaataccatcaagttgaaaaggcaagagtgcttccaacagtgtcttcggtagctttccaatcaactcgttaaccttttcatcagaaaagtgttctggcctgcatggtatccatctctccaacgaatgtgaaagtctctcaacaacattaaaagttgcccaaggtatctcctcaacttcaacattcttgctgctctttaaacacttcaacaccgcaccataatccctcaccttatacacgcaagcctttccaccaccatgattttgagtgtagtgagacgaaataacctggaaagaaaatcaacagtaaaatcacatagcagaagctcaattcacttccatacaccacagccttaaattcttcatctctcgagaattaatataccgaaattcagtacacccattactctttatttttcattactcccattagagacttgaaaactccttttaattttttattaggattagttatacttggtttatttttctgtttagtttggttaatacactcagttaggttgttataatagttagttaaagtttcacttaactaactctttgctttgcctatttaaggcctctttgtattcacacctgattttattcaatgagaaacagctctttctttttctactctgtttttctctcatatggtatcaaaggaaactttgcccacttccatggtgagaccttccacacgagatctcaggatggcattcccccatctacaattgggaatccttcatcagaaattcatcttgatgttacttccgctcctattgctaccaccatggctgcctctcgacgaaacacaaccttcaggccacgacctcagaacgccactgaaactctcgatcatcaatctccaagatctaaagaaaaaattacaactccatctcggcgatctcagtcttctctcaatcacaatgccaatgaagatgtttccagtcctttgttccttagctcaggcgattattttggcttggttcttgtttccaccgttctcaatggtgccaactaccaatcttggaagcgaggaatcactatggcatcagttgcgaagaacaaaattgctttcattgatggctctcttccacaaccagatactggtaatattcttctcaattcttagcttcgctgcaataacatgctcatgtcctggctcgttaattctgtttcgtctgaaatttctcaaagtatcatgtactttgatcttgctactgatatgtggcaagatcttgctgaaagattcaatgagggaaatggccctcgcatttttcaattacaaacgcagggctgcaacaaggtgatcagtcagtcacctcttacttcaccaaattgatatccctatgggatgagttaaaagagtttcaaccaaatacaaaatgcacttgtgatgcgatgaaactttttcttggatacaataaccaaaaccaagttctgcaattccagactggtttaagcgagtcatacgcctcagttcgtgctcaaatcttgctcaatgaacctattctaaatctatcacggattttcacaatgatcgtccaagaagaacatcaacgcactcttggctctttagatatttcatctcttgcctcctctgttcgtccttccaccaatcctccacaagaagccttgatcttcttgttctaattgtggtaaaccatgccacttggtagacagatgtttctttatccatggcttccccctggctatggagataaaaagaaaccagataaaggcaaggctaaagcaaatcaagcttccaacagttcatttactgatgatgtaactggtcactcaatcaacactgacatttcttctcaatgtcaacaattgactttcctcagccaacaactcaatcaagttgctcctcgagtcgatccttccatgacttttgcaacatctaacatggctggtaatgatctttatttccctctacgatatggattcttgacacaccacatgtgttttaataaaatgtgttttaaatctttttctaacacctcttttcttttttttgaaaaagagaaagaggccaatgtctaagattgacccctcccccgacatatatagaaagcctcacttgtggcggagg

SEQ ID NO: 46276 - DNA, 1325 bp, Cannabis sativa
  modified_base (622)..(639): a, c, t, g, unknown or other
gcattaaagtccccaatgataagctacggatcccgagaattatccctaccaattctgttcaggatattccaagtgtgggccttaagagagtcaaacggagaaccataaaaacaagtaagatggaaaaacaaataaaatattgacttcaagtttatatattttaaataataacgattctagagcatgtctgagctaaaacaatatatatttattatacttttattaatttttttttttttttatgtttagactttttattgaatttcttttagtttccaaataaaatattgttgtcaaattaaattaagtgattttgtattgcataaatagaattattaagcttaaaataagaatggttttgttgtacacttgtagtacgttataaataaaggttattgttacgtatatttagttatatttttaatttttttaattatgtatatttataaaattttataaataaaagtaaactacttattaattatttaatttttttaaagaataatatttaaacttttaaaaatttgagaaaaataaaagtttgaaaatattaaaattgaacatactctcaatattaaaaataacaataaaaataataatgttacaaataatatattaatannnnnnnnnnnnnnnnnnttaatctaaaataaataatattaatatgtatatatatttataaaactaaccctattaacaccattaaatgaatattcttatattcttaaaatattttgctaaaccaataaaaattgttagatggtcatattttatctataaagatattccaaaccactcattaaataaattagtttagagctttgttaccattccatttaagttccattataataataataataataattaatgaataggtcgctcctccaaacctattggaccttaaagggctaaatccaatgtcactcctccgaacttgttggtgggttctgagcctttctccgacgagcgtgcatcggactgctaccttcttgcttctcagattattttttgtcagaaattagactccttaggttacagatttctggaatcaatagtttggagggggctttattttggggttttttcttcttgggttaagtttctctaagcttcgattgcctcattcccccttttgaattgccttcccctatttttgggtgtcttggactggtttttggtttttttccctctcgactagtgttcttgctttctcttaagggatgttggtatggtttgtactgggtcagttatgctctatcctagagaccggacaggtcgtttgtgccctataagggttcaatccctttctcgccttcagggac

SEQ ID NO: 46277 - DNA, 809 bp, Cannabis sativa
tttttttataaaattccatccaattccctaataattataatcagtcaatgaatcttttgaatttgcaagttctgctagaatcaaagagggtcctacaacaaaaagcaatataaaactacccttttcttgttttaaatattattataattccagctaagctttaagatattcctctaagaaaaataaagttcgttttgattttagattaaacaaaactaattagaaagattctgtctacaagttctatcttaagaatcaccttgaactaaaaaatattttaaattaacaacacgactcagaccccaaaagatttatacaagtttcatatcgttgaagaaatcagttcaaattcagctcagctagtctaccatatatataataataattactaaatttttattattactatttttttttttgtttgtaaggatttcactcaccatagctagtctaccagaaatgatctcaaagtcttggctcttcttcaagctctcgatgtactccgataaggttgcaaagaacggagaaatctcatcgccaacctcctccgaccgagtcttcatcaccactccaatcggatcggatccgtaggacctgagagtacaaagccggggttgtaaaacgatcttcgtgttctccgattccatcgccgctggattaggtttggcgaccgagatcctcgctggaacatcgacgagttccgaccctccacccgatgtcaactttggagtactcttcagttcacagcgaatagcacgcgccgctgcagccatcactggatgagaaagactatttcaaaaatcaaaagt

SEQ ID NO: 46278 - DNA, 1392 bp, Cannabis sativa
ggtttttggattgcattttcagttttgatttgtgtttaattgttctttgttgtgtgttcttgaatgaggtgaattgtgaattcatcacaattttaatattgagattcacacatttataaactttataagaaggtagccaaacaacaacaatctaggagaacaccaagatatttcaaatctaaagacaaaacacatagggagagactccacaaaacgatacacaaccaacactacaacactaaaattagagtatatcatttgtatacaattttttttttcacaaaatttaagtaaagcttctaaattaatctcatgatgttattttgtattatttttttaaaaaaaaaatagagtttaaattatcatttaataaaaaataagatataatcaataatttataaaatacaatattcaaaatgatatttatccataattataagtaggaaactaaaaaacattgccatacaaaaaatgtgtatttttgttctatagtagattagttttattatgagtcattgaatttgatcgtatagcttgatcctttgtcacgtcttttccatttttgctttagcctatgaaataattaatagtaagaaaacatattctgattaaataaatctgatatgagtccattggaatctcattctcattcctaatgagttgtaagcaattttttatcacgcaatattaatagtaatattagtattaattaatcaattatcaaacgtggcaaatatgatagtattattaccacttgctaaagtccctaataaactacttaataatagcatgacacatcacataggaaggttaatacacattttaccatttacattaatgggcgattatgcaattggattcttcatttttaatagtataatttatgtctagaaattcatgtgtattttttcaattatactttatttttattatgtttagataataagtggtaattacatattgtatgattgataattattttatgctcatgattgaaaaatattataaaaagtagcaagggtatctaatttacttaaaaaaatattatatcgttattagtgtaattaagtattattaaattttatataatttaattttataattattatagaatatcaataacctttacaagacctttaattaatgttgttagacactactggtaccttataattatactcgtaataattacacaatgtaattacaccaaatatttattcaagttataaaaattagagagagtgtaattgtgacacttccgtttattctaagggtgagtgcagagcatagaacagaaaatatataaacaaaaatgtggtttattgaaaggggagttctatttgcaccccataaaatgataaatacaccatataaaaaaaaatataaacttaa

SEQ ID NO: 46279 - DNA, 1829 bp, Cannabis sativa
gcaaataccaaatgaaaatataatgataaattgagctaagcataattaggagacaagataatgcactacgatctgttgagaaattaagctcacctgcaaccatgctttcttatctacttctacaaattcctctctaatataaaggagagctccagaaatcactcctgcaacatccccacaatacaaagaatcattttagaatatatttacttggataagagtcttcattttcacaatgcataggttaggaacactcatatgtatacattgttactaaattatgtaaataattattctataccaaattgttgacaaggacatgcattgttattaattaggagggatccaatccacttaccagtgtcatatccaaaaagaagtcctccgattccggcagtgagtgaaagacgcataatatagggagttctccaggagattctccagcattctgaaaattctgtcttatctgctttgtgatagcctccttccatttcatgcaaatctttaaaaccaagctactttccaccactgatcagtttcctgtttgagattaacattattaattaagttaaagataattggaatggtaaattcgtgtaaaattgttcttgttactatgatacctttttttagcacaaaactgataaagcatgcaagaacacaaataaaaaagatgggagaaatatgtgtttataaaatctaaccaaactacatatttgaataattttaatttattaaatgaatgcgaagcaatattaggtgtgattaatattcttaatttggatttaattaagaggtttatcgcaattaataattttatgttactgtcgtaaacttcctaaaaaattattggtaaatataaatttccttaaagataattacatacatttgagattaaattaagtgtgtcacaatcagattttacctactataattacacatacacactatggtgtgcatttaatgttaattataattaattttaaatggagacgcatacattttttattataaacatatcataatatatatacataatgtgtaaattaatctgagagtgtatgtattattttatatactctttttttaaactacattatttgccaaaaaggagaaaaatttgattcaataataaaatgtaatgaatggaattcatattagagattaaaagtaagaagacgagtacctcaatgactttttcttcactagtagagtactatatagttaaatatagatttataatgataataatgtagattgtcttgcttaaaagtttttcttgctctctatttttgattatggtgggagttgccatactagttatttatagagccgaaaatgtcctaattgtaatataattacattgattaggtttgtcaaaaaaataaaattgtaatatgattaggattaggattaggaaaaatctcaaaattgcattttaaaaaggaaagatatatccggaaaaaaaaaagaagaaatgatatatattttaaaaaatatatttaaataacaaattatttttactattattttcgttttgtggtttaatatttgatttttatatatatatatatatatataataataatttagaaccttccctgaaaattcggctgagaaaagatataattataattttaatatataaatacaacaacaaattccaaataattagatttttgttattatattattttattttcgtttaataaaagaatatatgtttattaatttatcattttacaacataatttatcaaattataaaaaggaataatttcacaaatacacaaaaacaacaaaaatacagtttcatggaattttaaacat

SEQ ID NO: 46280 - DNA, 1697 bp, Cannabis sativa
  modified_base (901)..(909): a, c, t, g, unknown or other
tggaaaattttattgtgaatccactatttgcatggatgcactattttgtgtttttgacaattaaatagttttaatctttgattttctaatgttatgtaataaattttaaatagtttgttgcatgtgtatttcttttcttttatacgtatttggaatgagtattgttatcgagtactaatggtgtttaatatttctaacatgtcgtgttgcgattgattagagatattctttaaaaattattatattaaattatatgggacctaatacctagttggactagtagtgatattgacacataagaaggtatagggagaagttgaagaattttttttttttacgttaatcgtacccaaattatcttcacaccctcacataattaagatataatttcaaacataatagatttatattccttggagatgaatgtgtaggtttgtgggaaagttaggacaaaatttttattagagaaaaatagagaatatcgtgaagtaacagggataaaattggtagaatgatttaaaaaattgtaaacataataaattttaagaatggagataaaaatcaaagacatcaatttaaaagagatatgtagtgtaattttttcaaggtattaaacactactggtgacttttagcattgttcatctaaaataaatagtttgaactttaatttatttattttaaattattctaaattttttaaaattttataatctgtttgaaataattaatgaacactatcatataaaataattaaaagagtaactatttatatttagatgttaaaaacataaaaaaaaaaaatctattgatatactatttttatctcttaaattttaacatcttcttttaattattatttaagtttaatttaggcagagaaataataataataataatannnnnnnnnataataataataataatgtatttgcaaaattacccttttttaaaaaataaataaataattatcacctaaaaaaagaaaaagggtaaaattctttaaaaaggatacataaacaagtttgaaattttgacatgcatggaatgattagttggcactatagagaaaaagtatagtgatagcaatgtatgcaactttgcaagttggtactcaatcctactcatgcatgttaagatgggccaacacatagtccatattcaaaattaatttcacaattttccattttctttaaaccaaaagaaaaaaaaattgagaaccaaaaagaaagttcatgaatttcactactatatactattgttattccctatgagatgaagaatatgacataggtatataaacacaacaacattaaatttaatggattataaaattctattcaagtttattataaatatatatatatatacatactcggtacaatcatgaccattcatctaagctatatgactaaaataaataatcatgaatatgaaatatatattaaaagatattagagaatattattttatataaattaaatgtaaacgtattaagttatatataagaacatagattattccactcattactaattgattttaagatagaatctcatattttttgtcatagtatcagagttatatctctaatggactttcaatctatacctattcaaatatagttagtcagtcgcacaaaattaaatgtaaaagtatcgagtcatatgtaagaatataaccatttatttaaaagta

SEQ ID NO: 46281 - DNA, 2690 bp, Cannabis sativa
ggtggttgagatattctttcgattgattattagatatttagtgtaaactaaatatttgaatttagaattaatatctatagcagaatcaattacaactatttatttacatattatttattattttaaataaataaacaaataaatattttatttaattaaatctttcatattattttattgtttataattaatatattggtataaatctaaatgtatatatttatataatatatttaggaacctaaaaaaggttaagaaatacaagattaaacccaagaataatattgtctatatgatctatcagcccataatgatactagtgtgttgtggttaatcataaatatcatggtgtgagatattactgttctgtgaatacaacttactaaaagacttgagaacacttgatagtttttcaagaggtcatttttttcgttcatcttttcgttttattatttaatatatatgcatgtggatgatcataaagtgtggtacgataataatcttattaaacgtgtttgctgcaaatctaattatattagtacctctttacacgcaaatttattgtttaatgatatttcctaatactcttttttttctttcttgatatttttcttattaggtttacttaaaagaagttttaatgaagccattttctcaataaattgaaatactagcagtaaggaaagttgcattcattaatatttgtttcatgatcccacccaaatacttattttctaattaataaagcataaagaaggtagacaaagtaggctaagaaaaacaaaaaaaaattaggtgttatctatttaagaacagatacccaaggaaaactttgttaaaaagctttgtattattgatactaacttgtacaaagtatttcttaaactcaaagtcacagtgaagcctcattaaatgaagttaaatacacttcttaatatgccttagttgatagtaaagcatgtggtatcaaagataacattacaaaacaagattccataagaccataagccaatctcttcactgcttaaagtaaagaattagcaaatgacagctctaatattgtgtcaaacccaagtaatgaagataaaatagctaatatcttgtttaacacacactcgtcggatttaatctcttttagtccataaattaagtagtgtgataccaacaactcttttaatgattttattcactaactattgtaaaattacaagatttcgtaaaaatttataaataaaaataaatgtttttcatttaacttagaccaccatcctatacaacaaaaataaaataaagggtgaggagctcagtaggagggcctttgtgttgtctcaaaactggtacaaattcatgtatgccttacacttctcccttggactacaaaactttgtttgctatatggcgaatgggagaaatgctcaagaattatatcttatgaagtggaagtggaatcgtcaatggcggcagaagttcagcttaatgcaattgcactgcacagccattctcaaatttgggacgaccactatacttctcagtcaccattcctttctccagggctctttctcttgataagctgctttaaaaagaaaaaaataataacagtaagattcaacaaaggcagcatatggcgatactatgttgcataaaagtttgttaaatgtcatgtttcctagtcagcaggcctggttgacactgattcatcgcagttatacatgagtaggacaatgaatgagaatgccataatttattgcattatttcaacaaacttaaattaacccatatctgggcatgcaagtgtctaccaaaaacatcttgggccatgttaaaaagccatagttaaaataagtaaatacaataggttttacactagtaatgcaccatataggtaagcatgttttcctatttgaatataggcatgtatatctacatgtattcttcattattcgattttttaaaactttaaaaatgatcatgtacagttactgagctaaaattatggggaaaaaaataagatcataaagtatataaatacaaaagacacttccttattatgataataattggatggaaagaaaatgtacaaaaaagagaagcctaccttgtagaaatactttttccgaagcttgattgccatgcgcacacatctttttacattaatcttcagtatattgtcattaaaaatctgaaatagggtaaatatataaattacttcaacaatttcaacataggaaccattaacatctttgaagatctagatattgtaaggatattcataaaggttaaacaaaacaaaataaaaagaaatcactcagaaggaaattgggcaattcaattaaatattttctaatttgtatatatatttatagaactcgttaaacatataaatcaagactctttgattactaaggtaagattaccaatgtgaggttcaagaaatgaaaagattgtcaattactacatgataaacaatataaaactcagtacattcacccacctttatcatatcatcaattgaacgggtctctcgaataattttattacgatttatgacaaggactgctgccgcacaaaatactggtaactcatcatcccctttcttagttgatgacaatgcagtgcagatctccattgaatcattccttgtccaaaaatttcttgacaagccacaaaagtgatgagttgtttctgactta

SEQ ID NO: 46282 - DNA, 766 bp, Cannabis sativa
aagtttctggctcccttgcattctctctttcaatttctggttcaccggcatattctgcctctcgcatctcaaagtcatcttgttgtcttctaaccacttctgatacctcaattggtgcttcataatcaggtgcaacttgctgtaatggttcaaccactctttcaacttgttgtgtgttaggttgtgtgaaaggtgcgtcatcttcaatttcttgactttcctgaatggattcttcttgcatattgaccattttcattccaccataatatagctcaacagtgaaaaggttatcatcatttcctgtacaatataataatgttattatgagatcaaataaatctacaacaaatatttagtgagagttatcattagttctcttattatattaagttataattgttttaacattaagcacaaaatccataacatacaaatgcacacactgttaaacaattctaaaagaaaattaatgccttatctttttttgaaaatcaatcttgttcactctttctcaacctcaaaggcactttaaatgaatataagctgaattgtgacagaggcaaggctaacaccatttaatacttgagtgttatattaacactcaaatatttagaactaataaaagataaaagtctttttcgattattgctaaacaatttttagaactataaaaacagtagaaaacaaaaaacatgtgaccaaacatatgttcaaatatagggaaaatcctttaattttttatcccctcataatgagacaatatagc

SEQ ID NO: 46283 - DNA, 1555 bp, Cannabis sativa
caaactcttctttgtttacaaaaccagctccttcaacagataaaatagacacaacaattcactttaggaatcattcggcctccgtttttcatattgattgaaaactttgaacttgttgaacttgttggaatattttatatttgtatagaaactctacaacttatcaaaatgaatatgtaaacttattggttgagagtagtttattattattaataattattattattattaaagagctctagtccaccattcaacaatttaatatgcaactaaatgacctaaattaatggtgatttacagaccaaatattttagaagactatgcaatctcaaaaaacttcaactttcatacaaatgaacaatatattaacgattatcttcattcatttctagactttgaatagatcaacatcaaagccactatcacaactacttcttagtacttactgccataattttcataggaatgccaaattctaaggctctatagatcacagaccaacccaactcaaaaatgtaatacaaaaaaataaataaaacagcacatatcatatctcttgggcaaatttcaagagtttatataatttttagttagcctaatcaaagtggaaacgaaatgggtaattcgtgccatcatcccacatattctccattgcttaataagcataatagtagattaggttaataacttaaagtccaaacttgtcccaaataaaataaaaatattttaaaaattactaatatactttaaaaattcagaaacatcactaataactcaaaatattagcataaactaaataaaaaacaaatgggtcaccgctactaaattaaactcttattccttgtattttccttttggatcattcattaaatgagaaacattattacccggtgatcattgtcccagctccttcatcagtcaaaatctcgagcaatagcgagtgtggcaatcttccatcgatgatactcgcggtcctcactccttgcgccaaagaacgtacgcaacaattcaccttaggaatcattccacctgcaattttcccctcttccatcatctgcttcacccttcttatatcaacctcctttactaagctactggggtcgtccctgtcttctagaatcccagccacatcggtcaacaaaatcagcttctcagcacccaatgcggccgccaattctccagcaaccgtgtcagcattgatgttgtactgctgcccgaattcatcagaagccactgaagcaatcacgggaatgtggccgtcgttgattatggaccagagtatggtcggatcaacccgggcaacctctcccacaaaccccaatttagcagcgttggcagctggcctagccgtgacgacccgtccgtcagtgccacagagcccaatggctttggccccagcttggttgatcagagacactaagcctttgttcacttttccggccaagaccatagagacaatctccattgtcttgtcgtcggttactcggaggccatcgtggaagttaacctcgatgttaagccgtttgagccagagattgatctcgggtccgcctcc

SEQ ID NO: 46284 - DNA, 1988 bp, Cannabis sativa
tgcgctagcttaagggagggtattgaaataatcgatatttattagattagttgaggtgttagtagctgttagttgaagtgtaattaatgtctaaagtttgtactcagcctatttaaagcctttaaataggctttttccaatagtaataatacatctgaagtgtattttatttctacattgtggacaacttatcatagtgtaatacaatctaatgaagacaacttactatattgtggttttactcatctcttgtctcgaatgagtgcaatccaagggtgaattcaaaacttggcccaacctattaattgttctcaatagtgtaatacaatctaaccaagacaacttactatattgtggacaaaatgttttaagcagaggaagagatgggtgatccaacctacaatgtgcatcgaagggggattgtacactagaacaagcaactgatttaggtatcggtgtatcaagaatgtagatgctttcagattcatatcctttatcaataatttgcttcttcataagatccataaacaagcaatgatcaggaaaaaaagagatacaacagttaagatcacgagtaagttgatcgacaaagatgaaattaaaagaaaattaggtgacccatcgactaaggtaatagtagaagaggaagcatgagcttgaagattaaaaaagaatctagaattacctgtcatatggtctgtagcaccagaattaatgatcatttggaagacgaggaaagaaagacacgaatttgatttacctgaatcaactatagtagtgatagaagaatatgaatgcttaagagagactcagataatgtaagaattcgacatatcaattgcagaacaagaactggtcttttagaagccattacaaatattatgttcgtcccaccaaactaactcaaacaacaaaccaaccaacaaattcgataaatgagcaaacaaaatgagacaacaaatcgacaattaaaatctcacaaccaaaataggaaagcctaatcaaaaccacaaacagagaagagccttggagataaaggataaagaatcacaccaaaggatgatgaacaaacctcaacgatcacaaaagaagaaaacaatggtcgaaatagatgcaccaaaaggttaaaaacattgaaaaaggcaaccgacagagaaacggctgcgaaaaaaaccctcatgcgcgctcacacgccagtgcgtgtgttgtcgcctatagagaatagtgaatagaattgtatgttgtattccatggaatagtatatatttatatacaaagttaggagactaaatagaaaactactaaatacaaataagaaactattaaatacaagttaccctaattttttacaactaatattctaacatcgacaaagcttcagggggcacgtgtagctcaagcgtgacgattccgaccaccaaatttcggagttctgttctgcaaatctgcagctgggctgtccattggtgctggcagtgaaagctcacgtgctctctaaatgtgttttgcgaaaaatgaaccttagaatagatgaagaacaaatcctaattacaaacctcaattttgggataaatcctaatttctaattttaaatttcgaattttgctctgatatcaggtaaaaaatggtgagtgaattatatgttttattcaatagaatagtatgtatttatataagaaattagagggagtaaataggaaactacctaaattagagactaaatagaaaaataactaattagctaatatccttatcaaaaaaaaaaaaaaaaaaaactaattagctaatatatcctgacaatatgatttgactgatcccatgatgagagctcatgggtcttccaagaaggaacaactgtaattaagagagagaacacattttgaaatcatagaaattacaaagaaaaagaattttaatgtttaaagaattttttatatattttcacggatttttataaaaataacacgaaaacaacaagaaaactatat

SEQ ID NO: 46285 - DNA, 1538 bp, Cannabis sativa
agtagacctcagatcctggtaaaacaaattccaatagtcacctccccaaacaaatactttgaatcacctgcatagaagagaaaaagggaggtgaaaaacttgacaaagtgacaaggtacagacaaaactctgtccaatcgcacccaagggtacttgacatataaattacaccatacaaggctgggtatcaatgaagtattgtctaagtataccaacttagacaagtggcgagtcttaagttgtacatttaatccaaccaagggccaactagggacccaagggtactggacatataaattacagatgtgaagcttgaatcatcaaaatggtgcaaaaatctcggagatgcgttactatgtgcgtcgtcctctaaagagaaggaagatctttgaagagttactttttgtagagagagattgaaatgtgggaaatgaaaagtgatttccctcccataagcttatatagcttctatgggaccccttctcacttgccatgcatcatgtaactaaaaaacatccagaagagtaatgcagttaacttactgctaaggaatgtgatgagacagccatgaccaaatatttcaaagcctagttatattgcatgattttccaagttaaggctacatcagtcccaaataagttggaaagtccctattcacacaaacgtccacacatggactttggaaaatgttatcctaatttttttcccacctaatgttgcaggaccacgttgccaatatcaatgcaatgtgggagtatagctcgccaacaagaagtccaagccatctagtcggcacttccatcaacgaggcatctgagtacttaggagggatgacagaatgacaaactaatcacctcaagggggttggctaaccacctttagctgaccctatggaaagcataggccgacaaactattggacaccatatggctggccagcatgcactccgtaggtgcatggccgaccaatttttggcctgacattattttggtctgcaactttcatccgtggacagcaagtcaaacaacgaattgtgctaaacatcccatgaacatagaaggaaaatatcaacaatgtccctattttcaagcggcaatttagtcatttgtattttattaatttactatgtaaataatagctttatttacgtatttttaagggatattagggatctaaactctactatataaagagcattagtcaaagtctcaaaccctaagccttaagctctaagcctaataacttatagcatctctccctctctcacacgcccattgctctattatcacttgagatttaaaaacttcaattattagattgtaatcttaagagagcatctttagatcctattactataatggtgtaagtggtattatctctggtatcaatacaactaaaaggggagtaaatcgttacccactaactatgtgggtcaaacttctagaaaatcttgtgtctatttacttttctattctaattgtgtaataagtggcaagcattagtatcaaatttaactccgctgtcagttggccaaatct

SEQ ID NO: 46286 - DNA, 1293 bp, Cannabis sativa
ggggggtccgatgggcaccccgatgggggggtctgatgcatatgcgggttgggaaaaaatgaagctgggttatgagatgggtatttttgggttttagataaaagtgtcacatactttttagtttgaaatgtattggtttaaaaataaaatattaaagttttttaagtatagaaaatcaaatttcccttacaggaatcctaggattcggctctctcccttgataatgctaaagttttgtttatggtaaaattacataaattattatttttaataaataatttacggtaatttataaagacataaaaaattttatgaaaataaaaaaatttaaaatcataaaaatatttaaatttcgtgccattgtattttttttcaataattccttatggccttaggttgctcaaatatttgttttatttggcttttgcattgtatctgtgattctttggcattttgctttaatgaatttatcttttcttttcttttaaaaaaaaaaaaaaacctaagatttttgtataagaaaaccattggtgggtggcccaaattgtaattataatgtagtttaaagtgacaacctagctatcaaattataaaatgaaagtcaaagagagaatggtacgtgtgtggctagcattggttggacaggttttcaacacggaataagctaataattgaccttcaagatcatgtgttgtgttctagtacaaatatttttattagtatttttttttgttcgggttaaaggttcgaattttattataaccgctcataagagagtatgtttaagtgattggaaagctagtttattattgtgttgttatttttaatgagattaaaactctcgaatcgaggtacatactgataattcaattcaaaaaaataagtaaaactcttataatttgcgagtgattcttaaaattatttaaattactgaaagaataaaaaaaaatatatatcacgatctattcttaaaataaaaaaaaaattgacttttgagaaaaaaaaaagtaaagaattaaataagagagttgattttttcaacaaatagatttaaattatgagaaatgctaaaagacatcagtatagtgttaaataccttttacgtgtcaatattattattagtctaactaaatatcgagtcttatatagtttaatataataatttttaaagaatatcgctagtcaatcacaaagcgacacgtcttaagaatgctaagcaccattagtaccaataacaatactcttaaattattaatgataagtacgtacttagtagttagtacatacctcaaa

SEQ ID NO: 46287 - DNA, 1649 bp, Cannabis sativa
  modified_base (377)..(377): a, c, t, g, unknown or other
aaaataaaaatgtgttctataatttttatttttttttttattttatttaagtcagatttaaatccgggtttgggatcgtggtccgagtctaggattggaaccgtacctggagtccacgtctcaatatccagataagggccagagtttaatttcttttcatgatcgcactcattgtagctatttaggaccacttgtaaatttttagaaaattctaaatattttatagtaccgaaattaaaatttaaacagttactcactacttgtagtacacgattataaaaaaaaaaaaactcttttatacacctattacatggtatactcattttactttatttgttttaatttttacctcgatttttatattctttaagatatanccacttttatagatgatattcctattagactccttagcttaatctaaattatatgctagacttaagtagaaattgagtgtatattgggcaatccactcaaaaaaaaagtaggtatatttaaaaaatatatatatacataactttcaatttttaattaatagataaaaaaaagatgtattattcaacttatctcctaaataattaggggtctactaaatatatctataaaagatcaactataaatttaccctatatgttatatccaacctggcaacttgtaatatgtttatattttacttttatcaaaatacttttgatatcatatcgttgtgcttaatatttaatatgaattgtttagatttgtacttttcattgttattgtatcatttgtaacattgttaaaatatactaataaattatgagaaatttagtactaattttttctcatttattacattcatattgtctcacactattacatttttactgttttttttttattcgacagtagactgtcattgggtatcggtttatatattctttatggcttacacatgtcttcacgggatttcgccacgtttttttttaaaaaataatactttaaaaaagttaaatttgacgtgttgtatcactttttgtggcagttttttctctttttttgggtattattatttttaaatatattaaaggttttataattattactttaaacacactacccaacctttcatgttcatcttcttctagtttctaaggcgtttacaagttgtgggtggttttttttcatttcaaaatttttcagttgacatactattttttcaaacttccctcttaattttccccaattttccttcttatttctttataaatcctactcatcctaaatctaaatggttgttatacgttcatcaccatcatccggtacaactaaaaatctcccaaaacaacccaaaaaaacgaaacccaaaccaacaatgggtaagaaaacaatatattgtttattaaaattttttggaaaatgagaaaacaaaataagtaacttgttaaaaaaatgtacattttaaattaattaaaattttattaatgacaaaattatttccactttattttagttaacatgttaataaacaaaaccaatggatctcattcaacaacagatgatggggatctcatcaaataaagaagggaaatttgaatttatatgcttaaataattaaaaaattttattattataccaaaaatttacactataaaaaaactatactttttttt

SEQ ID NO: 46288 - DNA, 2655 bp, Cannabis sativa
tcagccgcatagttaattaccatattaatattacgattccaaattagacatgaacctccagcaaggccattcgcactaaaacagcttatctcagaaaatcccaaattacgagccagagcctccattttttctttccttactttcgtctccatcaaaaaaatacaatccggattgtattttttaacccaaaccattaaggcttgggatgtcgggtctcttgcgaggccccgacaattccacgataggcacttcatggggaggttgggggcttgataagggccgcctcctcgcccgagtgaaaattttgtgagcattccacctgaacctcaacaaggttaagagtatcaataagatttctatttgtttcatcttgaatagttttcgttgccttctgaattgcctctttctcagcagtcgtcttccttgatcgggacccttttctccggcgtttatcattctttagagaagaggatgtagcacctgagcccatcttaaaagaattctcaagatggttgttatgtattttattgttctcattggtttactatttaatagttagcattttagactcatccttaattatttttaaggcaagactttaaatacttttctacatgcagtatcttttgaggcgcattgataacattttaaattccttaatatgccacctccttcattaccaagctcttgtacacatgttgatgacatattttctgctcaaaatacacgtataacagcttcataaattgaaaatttgtccacaattaccaagatcgcattcaagtctcctgtctttggctgtttggtaatgaaagcaagtgacacaaaataatcacccatggcttgcttaagaccatcaagggttgtaacaaacttggcgtcttatgcctctcaactttgtcttgctggtagatgagacatgttttgatgtagtcaaacacgtcatcctgcatatgtggtcagtagtacccgtgcttcaaaagagcatgaatcttttgccactcttgatggcccgctcacaacgtgtcatgagactcacttagcaacatcctcctctgatcgctcgcctttggaacaaacaaatgaccacctttagcccataataggtgattctctatgcaaaactagattatctttccttttcttgctagggttataatgttcttggcgattggttccttatctaggttctcctagatgtgctccttgatgggtgtaaccacctggctatctagaatactttctagcacctttagaactgccaactcgcctttacggctcaagacatcggtttcttggtttagatttccagccttgtgctcaaagtagaagttgaattctttcaagaattcttgtcatcgttcttgcttgaagttagttttggctgcatgaggaaataactaacaatagtatcatctgtcctcaccacaaactttgactccaacaagtaatgcctccacatctataaataattaataactgtcagaagatctttcccttacgcaatatattgcctttctgccttagaaagcttacgacactcatatgcgacggggtgactctcctacataagcaccccttccaaagcattatctgacacgtccttctgtacttcaaagggcttgcatacatctggtagggcaagtacaagatcttcaatcatggctagtttcaaactttaaaatgcttcaacacacctatcagtccacgtccaaaaaacacccttctttaacaaaattgtcaaggatttctcttcttaatttaccctccacgaatcgtctatagtagttggctagaccaagaaaagaatgtaattatttcaaattggtcggggtcatccactcttggatcactcgcaccttctctaagtccatgcgaattctctcacgttccacaacatatcccaggaacttgatatatatacaactccttttttcttaacttctgaaacacttgagctaagtaatctcgatactcttctaacatggcgttgtacatcatgatatcatccaagtacactacccaaacttttctaagtattaatgaaagacttcattcataagtgtacaaaatgtggctggtgcattcgttaagtcaaacaacatgacagaaaactcaaatgacctatactgagtaacccaagttgtctttggttcatccattctacaatccaaaaatgatagtagcctaatctcaaatccaacttcgtgaagtattttttctcacttagctagttaaacaaattaacgattaagagaatggggtatatgttgcacacaatcaccttattgagggcgcggtagttaatgcatagtctcaagctcccatccttcttattatggacaaatacaggtgcaccaaatggtgcctttgatgtccttatgaacctgaatctaacattgatgttactttcctcttcatctccttaagttcttggagaggcaataggtatgccacttttctagggggctttacacccaataccattttcattcgatgataaactcctctcttgggaggtaatttattcatatagaatcacatcattatactcacctaacacctgttaaattttaggttggggagattcttccaccttatcatcgaacttggcagatacaatgataaaagtttgtctcttcttcttcagacccc

SEQ ID NO: 46289 - DNA, 1444 bp, Cannabis sativa
ttgtggtgatgggtactttaaagtctctccttgatatatttctggcacacatatatataaagccattataattcaaaatctttgttattattcttaccactaatggaataataggaagccatagatgattgtgaaagcctgcaagaatttagacaaacaaaaatgtcattataagtaattggaaattttaatattataaagattactcatacactataaagaaatcgtactatatataaaaaaatcataaatataatataatctttcttactatgtgcgttgaagaacaaaaagagtacagaaaaaatccagatccaccaactgcataatgaaaagaataaatttaagaatgttaattgttatgagctaatgtagtactaattgtgttgtttttttaattattattttttgaggaagtagtactaattgtgttatgatgaatttgatatcatattagaaaaatatcgaatcttttgtgatcactttaattaagtttaagcagaataaaagtttcactatttaatccttgaagaagtttttccacaaagagaaagagagagatctatgaggaagactttagaaaagcttcactagattgaaaagtgggaaaaaccttagttattatttaaggtgttatcttatttatattgatcaagaatacagaacaattagttacagcaatcttgactccaacaacctctaaacagagtaacaaaactaaagctaactaattctaaaacagctaattaatactaaccgtataaactgcttagtgtcttggctaacatctcccctcaaaggaaacgggaatagaccaaatgaagtttggatttcaagtacttaaaatgatcagtaggaagggccttagtaaggacatcaacaatttgataaatcgatgggacatatcagactaatagttattgagcgagaattcggtcacgaacaaagtgtagattaatctcgatgtgcttcctacgagcatgaaacacgggattcgcagaaagagcagaggctccttcattgtccacccacaaaataggagcttgagatagtgaaacttgtagctcaccaagaagagaaacaattcacttaatttcagcaaccacattagcaagagcacgaaactcactttgagtgctagatcggactacaacttgttgcttttttgcacaccaagatatcaaatctccaccaaggaacatagcataaccactagtagagtgatgatcattggggaagctagcccagttagcattataacaaccatgaagatccatagtagtagttggtgtaataaaaagaccctaagaaacaatcctttttcaaatatttaagtaactgtttgcaagcttcccaatcaacaatagtaggatcttgaaaaaattgaactagtttattaataataaagacaacatcaggtttggttaatgtgaggtattgtaaa

SEQ ID NO: 46290 - DNA, 2361 bp, Cannabis sativa
tgttcatctcatcaatttttcaaacggtttcaaccggtttcaggtagttaagttctttaacattttgttgaactcacaatctacgcagaggcacatttctcttgacttggggagatttgcaatttgtaaaagtcatcagtatcttctcaaaatccaagggacaaagtaagtagaaaagaagaaaaagaaagaaactttagaacttatatcatcaacattggctttctatacacatgtatgttcacggatcattctaatgtattttaacataatctatgatatcgttttgaaatataaggttttgagcttagagattgtttagtgctagtattagaatttgttaatctaaaatagatgaagttgttcattgtagttacttaagattctcttctttcattatccttcttagttttctcttttatttcagtgaattcttatcaatagccatttgggtttttttggattagccaactagtagaaagaacaattatgtccaaacttgactaccttcactactcattttctgtcaataaagaacaattatgattattggttaaagagttacaactaaaacttgagttttagtgcctaacttctagattacttaaaagggaatggtattatcagaatgcatgtatgtttctatgtatcagcaaattctttcttttcaaaagtagcaaaattaaattccataacagaactttttctacttgtacgttatgttagatttgattttgtcataaagtgtatgtattatttttctcaattttggatggccattttatgaaattacaacaacatatgatgcaatagttttcaatatacttattttaaaagttattattattattattatttaacttatcaccacattttacaatctttattttgtgaaagaaaaatgtttagcataccacatggaatataaaagactattatatttttcgcctttttatataagaatgctcatgtgaaatgaacaatctcaatttaaatataatgtaaaaaaatctttgatattttattattattaaagttacttgaatgttacaaattgcatatttagtaatctatgttcatgtgaaattaacaatcttaatttaatataatgtaaaaaaatctttgatattttattattattaaagttacttgaatgttattgcatttttagtaacatttgattcacacaatttgggtaaccctgtacatgtataaataaatatttatggtaaagaaataatatactaaaattttctccattatttgacttggtattagagccaaatcaacattttttcttactttctttgttaattttccctagccaccatcatttcagatgtatccatgaatccaccaacattctccgagtttaaactacttcagtcattcctaatatctgttcaaatcaccatgccatttagcttaatgatgataatttttttagactgtctcaatcattcatgatatacatgcgaggacatgggaagatgagctacctcaccagagaaaagaaggctcccaaggaagatgatttgacgtatgttgcatgggctgctgagaactctatgatgatgacttggctggttaattttatggaagaggacatcattgtcaggtttatttttatacatttttagagtccattttagtatatgttttagtagtttttatttacttttattcagatttacagtttttttctttttgtttcagattttaatagtcaaatatatcatgtgggttaaaatgagaagaaatatgctaaataatatgaattttatggatttagcattagttttggaattgtaagatacaatgagtgaaaaattttaaattttggatgcttaacacgctttgtttgtgactaaaaataaagcctgaagtttcaagctaatttttgaccattatccatccacttttaagaaaaactttctaaattaaagctctaaatctctctttcaactttccaaaacatattgaatcatccaattccgagctatatcaagagagttatggctaaaatactatcggtcatcgcaacagattatcaggaaatgagagccgcgacttttgcaaaaaaaaggtaaaatttctcaaattttgtttataaaacgagttggagcaatgtttcctttcattcgaacttggagaccaattttgagcattgaagaattttgggaaaccttcctaattatgtatttgaaggaactgagagcttagatctaacacaattggaaattttagaaaattctgagtgtagaaagtaggggtgagcaaaaaatctaagaaactgaccaaaccgagtacaccaaccgtctgaataccgaaaaacccaaaaactgaaaaaactgccttcgg

SEQ ID NO: 46291 - DNA, 2967 bp, Cannabis sativa
tctctctctctctctctttattgtcttgcggtgggtataattatttgaaattataggtttgatttttcttattttctttgtgttgtggggatgaaattgcagatttatttactagaggaatagacatacaagcagtcaatgttgttattaactttgactttcccaagaactcggaaacatatctgcacagggtatgtggccagcttttatgcagatttattcacttctatagttctattcttatggtttattttgtattcaggttggtcgatcaggaagatttggacatcttggtttagctgtgaatttgatcacatatgaagaccgcttcaacttgtacgtgtattgttttatttacattgaaattttatgcctatcatttgagtagcttgtacttttgagcttacacaacatgtaaaattatcctacaggtataggattgagcaggaacttggcactgagataaagcaaattccaccgcacattgatcaggcaatttattgccgataattgtttctggaggtcatgatgtgtggtcaacaatggtgagtaacatttaatgtatccgctacatacttttatgttacaagacaaaggataacaaggtttctccatctttctttaggttgatatagtccccaatcatgaaggagacagctctgcttcaagaaaacgaactgagaatttggtatttttgttgaaaactcgtggttgatgatgtggatggcgtcttccctcgtggaatgtttttattagtttattaacttttgtagccctgagacattaacaggcccttaagagaattatagattggcttataaaaatccccaggtagatgttgggtccagttcgcagtccctttgattttatatcatactggtttggtactactatttttttttccttcctttctagtttggtcgatgttaaacctgttgaaatgtgtactttatgcaaccagccaacactttgaggaaaaaaaattatttgccttttttgttttttttaatattttctttctgctctgcttaatattattctttattgttaaatgttttcattacttgatacatctgacttagtataaacagtgtagtcgaaagccaactgttaaaatctcacaatttttttttaatcttttttgttcttgtgaaatcttataacgtgccttttctttttggtaatggtatagttggtgatggtgactgaaaaagaacccagaggtttagattttctgtaaatggtaaatccgagtctttaggtttgggatacaagtatcgtgaactttcttcttctcggtcagttatttcaagttaaattgctacatgcctggcagtgctgtgtattcagctagattagagcacgtttcttcaaattgcgtcaatcttcaaaattttgaagaaaacctactaaaaatgtgctccacttgatgatgtaagatagtttttgattagggtataattctcactacttttatattttctttttaatcatttttgatacttaactctcaagttggttgtcaatatataggggtattgtctacattaacctatacatatattgatgcatgtaaataagtatttttaataaaaaattatattttttttcttttttttttcttatctttttcagatttttttttatgctccctattccctctcgctttctttcttcttcatttacagaccactacccaccaccattgccactgcaacctaccaccatcgctcgaacccatgaactcgtgcaaggtcaccacgtaaaagagatcccatcttcttatttttcattttttcttttgttcaaattttcagatcttacttttaagtgggctctcctacgctattcgattcgaggtggagtttcaatagaggagtgaggtggagtttgggaggactaaggagtgaggaaaggtggagcttgagaggaggaccggtggtcttgacctccatctagggtggtggtctaagtattagacagggaaagtgaacatagatgaggaaagaagatggtagggaattaccctatatattatatttgaacttttttttttgtcaaatttacggtttagattgcttcggaggttgttctggtagtttctatgtagattgctatgtgagtttttattgcgatttaggttgttccgttgattgctatgtgaatttctataaaaatttaaaaaaaaaagagaaaaaaaaaccgctttgaagtataaaaatgaaaatatttcgttgggtcgtggagatgaactggttgtggtgatgggataaaatcggacttaggcgagctggaaaaagagagacgacataagtgatggtgggtaacaacgagttcaggtgggtttgttttctagttcagatgagaaaggaagaagaggaagagagttctggtgagaaggacactggcaactatggaggtttcaagggggagaagagaggggtaggggtctgattgaacgggtaatggtcagaagtagaaatctcaacattataaagttaagctaaaggaaacaaatgaagccaagattgcgaaactagagctttatctaacctttcctccaccctattactagatcctttgcctttctcctaagttaacgggtaaccttccaaccttaaatcgtgcaagccacattgttttagtactgcccgaaacccctccaccaaccgattggggtagcttcgcccaccactcttttcatcttgaccccccaaattatccatgtcacctattaaacaccaaggcaattgagactccgaatgtaaagagcaaaaaagatcccacatactcctcctcaacgctcagtttggttctccatacacccccgtcaatctccactgcctagtctcaacggaattggcatagtcgtcgaagttgctgccgtcaccaggaaagtcaccggagttactgtcggcaccgaaaagtcatctgaattggcattatcgctggaaaaatcacaaaaaa

SEQ ID NO: 46292 - DNA, 975 bp, Cannabis sativa
attttggagtccccattgtattttcccgcaaatattgatcctgaaggggaattggaatactatcctttattcccaacagtccaaaacttctatgtcaattaatcgatggttgcataaccaatgtgaccaatacttcggaggccaacgttcaaattgctctgtagtactagaaacaaagatactttagcacttaaattaaatggtatataaactttcttccagagaaattattttaaaagggaaaactaaacctaacgttcttccataaaaatttcaagcatcgaagccatgatgtctcaaacttcccaaatcctacaagctatgcatactaaaatggtaaatgctgcatacttcaatatgtgattccttttgagaataattattgtcttaatgatggtttagaaactaatacagctttgcaaagtaaagaacaatttaagttcaatctagatatggtacaatcatttttatttttatagtagggtgttttatatttgaatttttataattttaatttattcatatttacttatttagattattgttttattcagttaatatgtaagaattatattaaagtaatttgtaattcacatacttagcttcaagttttttatactttatattttattaatatggtgtagaaactatgaaagatataagtaacagagttaattcgttttacttattcaaatgtttgtttataaaatactaagtaatttgcggtataaatacttaaatttaattctcgcttaaatggttgcaaataaatacttaagtttaattttttgtagtaataatatctaagttatatttctagaattagggatattcattgaatcagatccaatagatttggaccaaaccaatccaatccaattatttattggatattaatttttgtcatccgatccaatctaatcgaatttcgtcatccaatctgatctgatcatgtattggattggatcggttcca

SEQ ID NO: 46293 - DNA, 1391 bp, Cannabis sativa
gaagcatttagaaaagtatcatcagggaaataccttgctttgtagattttgcaaactagggagtcggtctcagtcaatagtctccacgcttgtttgcccaataaagctagattatactctctaaagtctctaaaacccaaacctccaacggctttgtgtttgcacaattttttccagctatgccaactaacaccatgtttatacttggaagatttccaccaaaaagaactcattactccttccaaacttcgacaggtttctaaaggtaacaaaaaaactgacattgcatagcttgggaaagcttgtgcaactgtttttagcaatgtttctttgccagccttcgacagaaatctaccttcccagtgttgaattcttttttgcagcttatcttttataaaacccaaaatagccttcttgtttcttccaactagagatggtagtcccaagtacagactagttccatcagcttctttgatgtgcataagatggccaattctttgttttgtaacgatactggtgttgctgctgtagaagatagaagacttgttgaaattcacaatttgtccagaggcctcttcaaacatcttcaataaccgaatcacatttgaggcttctctctcgtttgcacgacaatagatgtaactatcatctgcgaatagcatatgagagataactggggcaccatttgtaactctacatcccctaatgtaaccggcactttcaaagcttttgattaaagctgagaaaccttcagcacatataaggaataagtaagaagacaacggatcaccttggcgtatacctcgagaaggcactatagggcccatctccctaccactattaacaatcttgtatcggacagaggagacacaactaagaattagatgtatccaatgatgatcaaaccccatcctacacatcatatccttcagaaattgccactctacacggtcgtaggcttcactaaagtcaaggcttagagccataaagccttctttacctcttctctttctcttcaagtaatgcattacctcataagaaatcatgatgttatctgtaatcaacctccccgggacaaaagcactttgattggttgatatgagttgtggcagaacttctttgaggcgatttgcaattactttagatataatcttgtacacgacattacagagggagatcggtctaagttcattcatagaagatggactctttacttttggtataagaaccaggttagtgtcgtttagaccttgaggcaaatctccagttctcatgaaactcctaacaagattaataatatcagatcctacaatgctccaacagcgttggtaaaatcctggtgtcatgccatcagggcctggcgacttgtcaggatgcatttggaaaagagc

SEQ ID NO: 46294 - DNA, 1575 bp, Cannabis sativa
  modified_base (67)..(72): a, c, t, g, unknown or other
atgcaacataaaatgtgatttctgatctttattaattagtaaatctgactatattgaaatgagtttnnnnnngggcacaaaacccaacagatgacatactaggtactggacctaattcgaagttaatttccaaactcattgctgacctgaatacatcatttgtcttaaaagacttgggtcctatacactattttcttgacattgagatttatagagatgttgcaggcatgtatctttctcaaagcaaatatgtgactgatttactagatggtgtcaaaagctgccccaatcccaccagttctacttagaaattgtttgtggctgatggtgaaccttttcaggacatcactctttatagaagcacacttggtgctctgcaatatctcaccttaacacggtctgatgttgcattcatcataaataaactcagtcagtttattcatgccccaactgtcaaccattgggaagtctgcaagcgtctgcttcgatatctaaagggcactatttcacacggcttacttctcagaccagcagctttcatggatatttgtgcctactctgatgcagaagcagaatgttgttgctagatcgagtactgagagtgaattttgatgcctagccaacacttctctagaaatcaaatggcatgttaatttgttatctgaattgcacatcaaactagctcacacaccagtcatttgggttgacaaccaaggagcagctgctcttgcagctgattcagttttccatgctcgaagtaagcacatagaattcgatctacactttgtaagggatcaaattatggccaaagaaatatctgtcagatatattctaggaattgatcaagttgccaattcccttacaaaacctctctcaacaaatcggttcttgcatcttaaaagcaaactcaatatggttgctaccccttttcgtttgagggggatattaactaactagtgtttgtttttactattttagttagttagttattgtagtttgttttctcaactctcttttgccttgtaatactgtgatataaataaagggattgtgctcatattttgagttaagtttttcagctaaattctctctatttcttccctatcctctctgagttttctttctacaagtgccctgaaatctatggtggagtttggagagaagaaaagaagacatgagaatgtgaggttgatgaggcatcaattttagtttcattcaaattgttttttctttcatttgtagtgtaatggataaggatgaagatgttgatgaagagagaaggttcctctctgtctaggttgggtttgatggagacagaatgcatgaagaagaaggaatattttattatttttttttattttattaattttataactttaatttaatttttttaattttaaaataaatttcgaaataattttttaaaatttttaaataataatattatgtgtactaatataaaaataacacgggtaaaagagttatccatattggtagtttagtaattttgaaaattttactacaaaaattaaattttgatagataggaggctttagtcaggaaaaaaaaaaaaaa

SEQ ID NO: 46295 - DNA, 1977 bp, Cannabis sativa
atccacataattattaatatttataacaatgctttttaattacatgggttgacttaacacttgctgaagtgtaataaattacatacgattgaactttttcagttttaccttaaatattttttcttgtagtattgtcatcttttgctgaaatttgttttgaatttattaaacgtattttatggatgttgtcttttaatttcttttgcatttacttaaatattgacattttgttttaaatgtgggtacccagactttgcaaactatttttgaataaatacaacattagtattttgatgtaaatttatttatgctatttttattttaataaatgggggcattacataactagctactcccacctcaataaaaatttaaatattatattcacagtagtaatcagttactaccatgttactaaacatgaaaactacttatttcacagtagtaatcagttaccaatgcattaaaaaaaaaattagtaagtagaaactatgaaaaaaaatatttttatactagtaaccaattacactcaactactcattacaataaaggaaaaaaaaaaaaaaatctttcatgaaatgaaacgttagagcactcccattaatttctctaccatatctttcaaaacatatcatcaaaatcactctttttctaattatcctcaagttttcacattacacactggtctattgccttacccacaagtgtgatcatattgttgcaacacctattttaggagcttggaatcccattatctcactatcttattctgtggtgtgacaatcttggagcaccatcacttgcctcaaattatgttttccacaccaggatagaacatatagaaattaattgttatttcacctgacatagggtgatcacacaattaggttgacattggtcatgttttcacaaaacaccaagttgcagacatatctttacaaagactttgtctatttctcagcttcaacattttaaaactaagttaacacttagctaccctagtgtaacttgatgggatattagaaatcttaagttggtgattagttagttaggagctgcttagatgtacttggtttgacttggctatttgttttatcaaaatatccaatgattattgcttatggtgaagtaaatatctcaacaaatatggagcagttgttgttgttgttctccaatcgagactcatcagttatgaccacggttagtggtgacacttatgtagtcctaggcatatacatgcccgcgtctagggcccactcattttaaaggccaaataaaaaaaattatattttaaaaatatatatatttttaatattttttaaaaatactatttatctttataataaggtctaaaaaatttttttgcctataaccatttcaactcagaactggccctacttatgtatagttggtagtgttacaaaaaactgcaatggcacttagataatgttgttagcgacataaacaaggtaaagcgctcctatctttatggtttatgaagctttaaatattagtggaccactttataaatttaagttattggcgaagaactataaactgaggatgtttgcagtgtaagcagtatagattttagttatatttttcaaacaaaaccattacaatttctccgtagctacaccacaagacctcaaaactttaaaaattattatgcaaaaatatagtgtggtgtggtataatatgggtggtttatactattgtcaaataaataatagggaacttacaaaaatactgatttttagcttaatcttgacaaaaatactgctatacgccagaaattacttttatactggattgggcttttttttttcttttatactgtaggcacagaaaatcagtggcggaactaatacttattaggaggaggggccgatgtacatattaattttaacaaaaaaataaaaaaataaaaaaaaataaatactattttttgtcaaaaataaattagtccacattgcc

SEQ ID NO: 46296 - DNA, 1143 bp, Cannabis sativa
gcacgatttagtgcgtgcatgtcaaagtgtcaaagttcgggtcaaagttcgggaaaaaaattactaattagcctaaatattaagagagtttcaccgcaaatatctcaaaaaaaaaaattaaatttatatgtttgatttaaaatatatttatataaaaaatatttaattcaaaccctatgtttaagttttttcattgaatatatttgcatcattatatgttattttagcaggcagttttatatgtttggtgtactatatcaaatatgtattttgtacatataggaatgttatttttgatataaaagaaaaactttattattaaatataacattactcactaattatatgagtcgaaaacattttttcactcactccaaaattcccacacaagaaatttctctatatcatattttttttcttttgaaggggtcaactttcattgataaaataggatagttctagttacactttacaaatttggaatattatcattccaaatcctctttatatatatctctaatgtaaactcagcaacgtaatgaatccagtattgctggtaagggaattgcacaaccagccattatattgcatcttgaatcataaattacactttccaatccaactttgggtgccttgagatctattgcagcatccccatttcaacttgtatttcacttctacaggtggcttccacgcattttcctttggagaaacttttcctctttcttgtattccatttccatacctcttcactcctgcctcttgatattaatcctgcacataagaaataacccagccaacagcttcttcaactgaattagaaaactttagagacaatgaagcaatcctcaaattccatatttcccatataatacccaagaaaaaccaaagttagttttgttatagtttcaaaaccttttagaataaactctctaatatcattgtgcttgtaatatttatgaaagagactaaaaggtaaatttttccaaactttctttgcccgaaatcaatctaagaaagcatgagtcattgtttgttttaaaactctacatctggtgtttagactaacttgcctagtgttgagaatcatggggttccatctcaaaaccaattggctatgagtggagtagtccatgttcttat

SEQ ID NO: 46297 - DNA, 2267 bp, Cannabis sativa
tgtgacaacagtccttgcccaaccatcaagagtctccacgaaactattcttatcgaaaatgcctcccatccatttgccttgaccatccacaacaccgcgaatagcagcacgagggtcacaagaattttcgggaaagtactcaacaagcctctctggaggatccaatgaaggtgtaatagggagaggaccacctacatatgatggaacatagcttaaccattttagaatagcagatactccttcaagatcatctgaaactgtcaaatgaacaaccccattagttgccataattttcggtccgccaagttgcatgtgagagctgtaaacctcccggccaagaagtgtgttcaatgcagagaaaccggttagaattatcggctgatcaagcctctgtatgcaacgcataccaagccgagcaaggtaagcacctattccaactgttctaccactcacatatgtcaaggtaaaagtctctttatatgctcttgaatatccactagcaatggctccactgccagccaaattctcaacccctaagccatcttctcttccaacaatggtatctataacccatctggtttctccactctgtagctttaactcatgtgctatcacagatgatccaactcgagcataatcatcagaggttaaatatacatacttaaaaccgcgctcggggcttaaatcatcataccaacaaactttgaaacaggttttgatttcttcagctacaccaagacgggcaccagagtttgctgctaagtatattaaaggaagtttcttagcacaagcaagatcactcactgcaaggaagaatgcatcctcttttcggccaaaagaccctgctttaaatgtcacatcatttgcaacaaccaagatgttccttccgaatggaaactctggagttgacatctccatagaccaagctaccatgccaacatcattaagcccaagcggtcgcgaaacaggaacaagaggtgtaccccaactaccattttggtgagcaaattggagctctgttacattgaggatagctttgtctgtcggttttttgatactaggagattgagatgcccatgactgctccaatgccgtctcaaacgcctaatcataacatgtagatttgtaaatgtgtgtgtgagagagagaaagagagatcatagtgttaagcatagtgcttaccagtggaaaatcatagcaatatgttgtattgcttctcctggccaaaaggcgtttcatgtcaagaactcctaaaggttgatactgtgcattcactagaaccttgtgcagaggacccatcctagaaattgaactgtacaccgctttgtgttggctattttcctccaattctcgataaacctgaattttcacaaagcaataatacattattttagcaataaaaactttgtaaactttgaaatttgatcagataaaaacttacatggacagtgcaagtacgaccagtcacattcgttactacaactcgccaagcaccgtttgcctgtcccgaagatgataaccaaagcttcacttcccattcccaaacgcctagcttatgcattcttacgccaacagatgcatgaatgttacgtgccaactcttctaagattgcctcaacagcaatttcttctacactctcatctacatccactctcctgccacaatattccaaatgtaagaacaaacagaacatatcgagtttagtcataaaagagttgagcaaatatctaaactttttcacctggggtaaggcacaagatcctctagttgttgctcttgtaagatatacaagtacatatgagcatgatcatatttgagagttgtgttgtgtgcattaagttccaactcctccattgcagtgaataaggaccttaaaatgccccttgaagtaaacgccattcgggttgtttccactccatttgttgtaggctgccttacaagtgttctgagaaacatcctttgcatcggtacacatttgtctacaacggcatacaagtgccattgacgatcccttgattgagtatactgtatgttctcatatcctttaagcttgtcctgaaaatattaacattttacatcaacactcaacaaactttagatccatcattcatagaaaaagacttttttagcttagaataactaaccaactccaaatagatggacagaggaggctcgatatggcgaaatagaggctcttcttcataatagagcctttctgatgaccagtgaaatgagtgtctcacaggagcacgcccttcatccctttg

SEQ ID NO: 46298 - DNA, 651 bp, Cannabis sativa
tggaaagcttttcagaaacttcactttttcctcatcatctgtggtaattaaattaaattaaattaatctattaataaatatacatataataagctaattatttaattaggtgagaaacatttgtaattatatacctaagttgcggagagtagcatgaacagtatatcccttggataaaagcttgttgatgagccaagaggcgatattgcctgaacctcctgtaacgcagactttgcatccatagttattactcttctccatcgatattcttaattaattattgatattgtctattaattcatcaaactaaatttagttctctcaagtagttaactaatgtatagctatataaatatatatactgcaaaagcaggggttagctgtaataaataactacgaaaacgacaatctttgggtagtacaattaacacggtcgatggggtcatatccacgaaggattaactgcttgtttggtacgcagaattggattggattagacaaactaatttgtacaatttagtgtttgggcatattaaaagtctagataactaatccagctaatctcatctgtctgcaagtagggctgcacacgggtcgggttttcgggtgatcgggttcgggttttcggatgcaaaaatcagcagcaagagg

SEQ ID NO: 46299 - DNA, 2611 bp, Cannabis sativa
attgtcatagtatcatagtatgattcaatgattcaaatcactctctcactctcaaaaaaaaaaaaaaaaaaacacgcagatcacaaatatttggatggaaaaaatcccaccaatgttttgttcaatctttttgcaaattcgatcaacctcatacaaaaagaataaataaaaattctcatattactattgatttgtgctcaaacctagagtgctttccactatgctaggatgaagcatatattattactattgattatcaatatttcactaaagatcaagttcatttttttttgagtgtaaattctcttcccataaactcgcaagtcacaatttcttttcataacctatcttgaaaggaaatatttaaataacacgaaattgaaagttcttcctaattacaaagtatatatatatgagaagaaatttcaactttgtattatattttaggatgcaaaaatgtataatgttcatataattgtaaatagagttaagaaagaaatttgtgataagtttttcattttaaaatgaagagagaaaatttgtagagaggattgaaattggtttgagaaattgaggactctcaattacttgtacattgtaaaagtacttttcaatatatataaatttttgtatattattaatttcatagatacaacccacttctttctttaaaaagaaaaaagaaaaaaggtcgaggtgctagtccacattataatttatataatcatgatacaaacttgagaagaatgagctataacaccaacaacaacaacataaaatttagatataatacccaataataacaatcataataataattaatttaagctctagtagtggttttcaatttgtagccacaccccaaaatataatcaataaaggaatcaaactcatgagaatcattgagatttatggaacgatcttcatctttatcagagaacttcatagcttgacgagttctcctagagctccatttggatccaagagttttgaacacttgcttggcctcatccttggaaagctctccattgttgtctctatcgtattgtttaataaactctataactgtctgtctttccatatgagctttctcagaccctttctgattacaaaatgtggttccaattccaaatcccataattaattggttattgaaaaatataaacacaaagaaaactcttgtatggatatatatataaatttgtataattggaagataattataagactctaccatatctctttatatattatggaaaagttgatgttgaaggaacttgatatatatcccttttaaatgatgataagaaaaaacattggaatcggccttttgacacttgttaagatagattctctttccctttcaaaaaatgagattctttattctttacaattttcaaaagatcatgatagtgggtgcataacaaaatgagctaattccataccaaaaaaaaaaagaagctaattattaataataaataattaaatcttttaaattaattaattaaataatataaaagataattaagttatgacaaattatacacttgtgaaccctacaataatttttccattttattttaaatcaaataatgactcaaaatttaattatctttttctaatttgtttattaattgaattaatccatttaaatactaattttaatttaataattataaattaaaatatatttattaatttgacccacaaaatatgataattaacaaataagtatttatctctcttatcttctgaatttaacgtacttagaatttatttttcaaatttgacaaagttaatttttaaattttaattgattaaataaattaattaattgaaacatcaatgtgatattattctagatattgcggagaccatggcctataaaatcaagttccaataagttatcttaaaattaaacaaataaaatttttaacttattaattccttgtaactctagtatagattcggaattaaactcataattacatagaacactctatacaaatgtatagatacgttatgagttattcattgtttcaatcataataatcaatgatcttctataaacggtttacattgagtagagacaaaattattgttttaccctccaatgtatttgatcctctatcatatatcgcctttaaccaagctcaaaggaaaccattattttacttctagacaaatatagaagctataggtgtccatatctataattaacgttctcacgcaattgaactattgcgttttcaagatgtaagtatgaactagaccgacaggtaagctgataacgaataagttaaagaactcaagcaatacaattagctgaccgacaggtgatgtaattgattcttacatgaaaaaagtgagagcataatatcatgatgactatatttttatagagagaagcaaataaaataattatgtaatttaagatgatgaaaagtgaaggtttagagcaagagacatgatgtcatgatttacagttatggtgttgtcatcattcgattatgtaactcattatcatgtaacaagtaagtttattaatcttgatattataagggaaatttgattttctatacttagaaaatcaaaattttttttccctaaa

SEQ ID NO: 46300 - DNA, 2442 bp, Cannabis sativa
cccaatcttcttcataattcttgagatgtattccatgcctaagataagagaagcagagacattggattctcttgtctcaaccctctcttggcctcaaaaaatccatgtaaggagccattgatcatcagagaaaatctttgagtttgaacacaagtcattacttggttaatgaacttgagagggaacttgaatgcatgtagcatctcttctatgaagtcccattcgatggtatcatacgccttttaaagagccaacttaatcatacagttggaattacttgtcttccttccattgtgcctaataagatcttgatagatcataatattgtggccaataaatcttccatgtacaaagcctccttagttttgtgcaacaaaattagaaagaatcaacttaatccttgagcagattaatttagtagctggtttgtataacacattacagtaagcaatgagtgtatagtcagtcattgtgttcagacacatggtttttgggacaagagtcaacaagtagagttaagctcctttagcagttgcccaatatgcaaaaaggaagtgatagcctcaaaaatatcatgaccgattacctcccaattgtcctggaaaaagaaacttccatagccatccgtgcctggtgctttgttccctggaatatcaaaaatttctttcttaacttcttcaacagaaaaatcagaaaccattgcatcaacttgagcctttgaaaccataggaccctaattgatgacactagccacaactaatttcttgtctgcaaatttactacccagcagcttctgataaaaaaataagaaagaatcattgatatgttatggtttctccactcttattccttccaagtttgtgatggagagaaccctgttttgtgttcttctagctctaattaaagagtgaaaaaaaccagaattaatatcccattcctttagccattgcaagttactcttctgctgcaaagaagagtgataattgtccaaagcctcagcataagcattccttgcagtcagttcttactgttgcgaatcatcattcaaaggatcatttctcagattatcttgacaataatccagcatgtcttttgctttcactgcagctgctactttagagccttaaaagccaactttagcttccttagtttcgacacaacctggagcatttttatacctttcacctgttgagaccacacttcaaatactatttcatcatacttaggatgattagaccacatcctaaagtatctaaacggccttttgctcccaaaattcatattgtatactgttaaaatagcaggggagtgattgaaagtatcttcattttggaaataaacttctacagcaggaaaattgtccatccagatctgatttgctaacactcaatcaatgttggagtatatcctatcttccccttgctgtttattactccatgtaaagaattttcctgtgaattggatatcttccaactaacatgtttctacacactcattgaagtcaatatacaccttgtatcgaactctattgccaattcattcttccttgttgaggatgtcattaaaatcccctagcacaagcaaagactccttcacagccagatcttttaagtccttccagagagtccttctcctatcctcagtattgaagccatagataaaggtgacaaaaaaatttctttcctatctatggttttaacatagagatgaattatttgactagagcacttcaaaatattcactaaaaaactatgagggttccaacttacaattatcctccctcacttatgccaagcacaattagaggtaaaacaccactttgagaacatgcaaacttataaggctccaagattctgagtcttaactcttgtctcgaggagtccaaccaacaagatctttggatttccaatcaattgcttgactaaattttgtttttgttggctgttaattccccaaacattctaactcattattttatccattaacaagagagggatctcccccccccccccctgtgttaacatccccaacctcttattcttgcttcttttcactttgcttggttttctcatttccattttctttctactgcagcacttgaaatggattgcttgtgcctgctgccatgccaatctatttatccttagctttccaccctttgatcacaacctgaaaaccatcagcattaacttccttttcctctgccttatctttttttctgtggattcttcacaattcaatcttgtttttgttcagttttcttcctacaatcagcatctaagtgccccattctagaacaatggttgcacactataggcttgcactaataggagactgcgatggtcgtgttgtaccccttctcaactttaatttaattagttcaaggtattcttgctgcagtgatacttctataagatgttcagttttgtgccctaaataaaa

SEQ ID NO: 46301 - DNA, 3582 bp, Cannabis sativa
ttaataaaccttctgcctcaaccctacaagacaagataaaacgcacacaagggaaagcaataaaacaaattacaaagagatcgaacaaagcaaattagcaaaataaactaaagacgtactctggttgggaagaaatatatattttgattaagtaatatatcaaacacaggctagggttgtttctaatttgacctgcccatgcatgtgaaagaaactttatatagcaatatagtgagagaaaaatatttacactctaacagctatatattaatttctatatacatacactcatacacatgatggttcctaaaatagtttggtcacaatggtgatgagtaggttattatatcaatctctatcaattgcttaaggtgccccatctcatattacaatttacacatgcctcaaatagcattattctttcacacacatgcatagtcttgtaaatatatataagtaatatcaaatgcaggctagctaggatatataatttgacctacctgcattttaaattcaattaaattatttttttccccactacaggatcctacgagagtaacaactaacaagactctcaattaaaaaatattaaactttttttttttttgagaaataaaaaatattcaacttataaagcgttgtccataccggataaataataaaatatttctttgactgagggtaaaaaatgtatgtgcaattcttacttctcttcttcttcacccggccacaaccttttacatgtttattatggtaagatttccaattctatgatcaataatacttcatttgtttcctataaaagttatgaacccaaaaagaaaaggttaaaaggattggagagaaggaattcatgttatttttgggattttttttttcctaaaaaaattgaatgtgaaaagaactcatctttttgctagctagaagagatgtttagcatcagaaaaagaaaaaaaaaccaaataaataaataagtaaaataaaattctatttatttgtttgtgctggaaaaattatgaacaaaaacaaaggaaaaaaagaatgggatcaagagatgaggaatttacaataaaaaaaatctagtttaagttgatgtttgatattttttatccgaatacatttttatattttaaatatttgtacttttaattaaaaaaaaacaagtactagagttataattagagaaatgctaaaatgtatcactcttgtctaccaccctcctagaaatgcaattaagtatctcatataatttaattaatagtatctttagaatatatatcgataaccaatagaaggtgtcggacaccactagtactcaatagccatactcgtttactaataactaatgaagattaatgataaggtagtcattcctttacatttgtttacttattactttattaaaataaaaaaaaaaaattgataacttgattaaaaagggataaaaaaaaatacttccccaccaattttttaaagaatgctttatcttattttttaatatctattatataatgacaattttattttttatatttacaatataaattattattattttatctttccaagaaaattaacaagtaatttattacaaatattaattccaattattctccatttattttattatattttttttattaatttattccattctctgctgtaaatatattcggtgttttctccgttattaaataaattgtccgtaaacagggaaaacatgcaaaggtaagtaaagatgaaagatatagaaacgaaagctacaggcaatagaacaaagctatacgaggttgaccaaaatagatagtaattaattaaacaaataagaaaaagaaaataatggaaagtgaagaaatactattgtcttctggtatcgagtcccctgcgtaggtcagatttctcaccgcattcttattttcttagatgtttttgtttttgtatgaaaataataataacacaataaaaactattattatttaacacattaaacatgaaaatcacaaaagatagtctttcaacaattcattattattaaacacattatgactccattacttttgtaaaagttaatatttaaaaatttataaatgaatcaagtatttttgttttaaaataatgatgagatctcatgctttggttatttttaataaattaatttattgtctttattataaatggttttaaacggactatcaagtgtgacgtctcgggaaattggggcgttacaggctctgacccgagctatcatctgaccttttcttcagggtctgaaacaccttctgagacatggctgcatatgaacaatataagaaatttaaaggcaaatatgatataaggcacgacacaggatgaataaatataagttaaaataccctgcacgtaggcaggagcattctcccgaacaagcggggatggaggttcattgtttgaagagtcttcttgctcctgctctgttagaacgacctttccctttcccccctctggggcggatggtcgagcaggtctgtcgggctcctccataattttgatagaacattcagctggtgcttgattattgggaggagccttcttcttctttttgctcaatttttcctgttcggttacatcctcctggtcgggctttgccttctttgccttcttcacggcccttggcatgaaaccagctgggaaaagtttatacttgatgaaattggcttcggaagtcaatagataaatgttccgtgcagcggagggcagttgaagaatcttttgtgccgtgtccctgagctccagagtgaaaggagggcagcaataagatggctcatgttggaagctagtgtgggcagtgtccattccttggacgaagtaatactcattcacaaatttccctattttggtcaccttagtgtctgtagtgccagtcaaccatttcccctcgatctaggaaaagtagaagtaccctgacctgttctgtttaggatttgatttcagatcgaagcaccagttagtatcatgcgggaacggctcaccccatccttgcaaggcatagagaatgaacagggtagacaagtatttgattcccttaggagtacattgggtcggacttatatgatagtagtccgcaatcctcctgaagtatgggagcaaaggcaacatggcaccctacttggtatgaacgcccgaccaagagcaataaccttcccttgggctagtcgccaactggttgggggagggaaggaagcatttgacacctcctaaatcaacatgcattgtgcaaaaataaaaaaataaagaatacaatgctaactaattgtaaaaaacaataaaacatggttaaaatccatagtccaatgattacaatcaataatacatacactcatctaacatcttcaatattagtttatacttagtaatttgaatattactcaacactctcatgtagtgtattttccacactattgtctgcatgcaagtttattgtatcgatttcaacctaaaagtacaacaaaaaaaatataaaagtggcaagaagagtcaataactattataatagttagaatcagatgtaatgtaatgatttatgaggtttcaatattgtcaatg

SEQ ID NO: 46302 - DNA, 2533 bp, Cannabis sativa
aataaataaataataataaaaaaggattattttgtaaagggaaaattacatagaatattgacttttctaattttattacttttataaattacttttatattatatttttttttttaaagttttatacaacaatataccaccttttatcaaaacctatttttttgtccttttttgttccacgtgtctttccaaggtgaaaccaaatttatttatacaatatttttctataaaagttttgatgtagacgtgggatgtcactttagtgatagtttttttctttttatttttttaatataatttatattatttacggttttctcatcaaataaatcccactctcccatttcttttttacttcattttcttcttcttttttttagatggttattgtgtttagtgggcggttttaattttttttttccaaatttgtttacttttttggttttgaatcataagttttcctttaatttttcccatttttttgttgttcttctcctataaatattgcttttcatcattaagtatggttgttacccgattaacatcttcttctctagttgtaaaaaatcccctaaaaatacaaaccatgatcatcaatgggcacgaacaatttgaagggtcatcctcctagccctaattccccagttcctactaaaagaaaattagttgctggaacttcgaagaacaggaaatctaaacacccttgacctgttttggaaaattctaactctgattttgagttggagccagagtttttaaagtctcccaaagggtataaggtaatatctattgattttctattgttttagggttttttttttacaggttaattatattacagatttctctgtgtgtgatttatttattttttgcacgtttctttttgttaatcctcctattttttggttttgtgtttgtttgactgttgtcttgttgttgttgttgttgttttgtgaactcataggggaagggtaaatcccaagtgaagaatgttcaatcaaatgatatgtttgaggagatcattgggaaaagggttattgaggtgtgttgtttcattattttagttttagtgtttttaatgcttgatttgttattctttatgtttttgttttgttttagttttattttagtagttttttttattgtgtttttataggactgggaatgcaagtacagccgtttgaaatatgatcattctagagttataacctctggctattattctattattaatgatattaaaactattctcactgaaacccaattacaatgttttcaaaaactatgtttggtcgttttctccatattctagagcataatatctattttcaactcattcatgctttgctgttgagggaggttgaacgggcaaatgagttggaattttggatttctctgtaaggaaaatttctgaggtttagtgtcgagaaatttttgttaattaccagtttagattgtcatattggctctgacattttccactacaagcaggatgataatatgcttgttacacactgtttaaagggccataaaaattaccaagaatgctatccaaattgcttttatttttgacaattttaagaataatgatgatattgcagtcaagttggttgtgttatattttattcagtgctatttgttgggtggtcctcctgggaaggttgtttctttgaggaaatcgatgttgttaatagtggttgttacaacaattatgggtggggaaatgagtgttttgatatgataattcaataattgaagggtcagattgattctggtcttaggaaggttaagtggaaggaagaagatggtgcgtattataggttattgggttttctgttggcgttgcaattttgattttttgagtgttgtccctatgttattgggaaacttacattgtattcaaatattagcattctaaggcttcttaaatggcctgaaatgccaaagcaaaaactaccccagttgaagatggataatgtgaacaacctcgtctttaaccggtcgttgaaggaggtacttgtttatttttttttacaatttttctattgttgttttagagttatttttcctttagttaaattttttattcattttcatttttattttattcagtttcttcagtttgtctataattttttgtttttttttttttgtagttaaaactgagaaacatttttccaatattgctggagagagtaagttcgaacttgcatgactatttcttgggtgacacgactttgaactttattgaggttaaaggtaaagacacacatggtccagaatctaagtcaatccccaagtcttatttgcaagctgaatatctgggtccatcttaatcaaatgctaatgagcatgtcacccgtgttgagtatgaggaattaaagaaagatatgtccgttgttattatccaacaacagattcttatgaatgcttttactgaaatgaacaagaaattggtcattcttattgaggtaatctttatgtttttttttttgttttttatattgtttttggtagtttttttttttttttt

SEQ ID NO: 46303 - DNA, 1739 bp, Cannabis sativa
gcaagtttgttaacatcagaagagtccgatggattttcagaggaatattggtgtgtcgtattggggggttgggaattgtcgtttcggggttcgaaagggaggtgtggatatagagaggttaaaggtctcttcttgtggatggaggctttattagtcttcttcttccatgttaatttcatctttcctaacccagaattgcttctgtcagcttcacacttcttagcaatactaaatttgtgtaaggaaacttagtattcaaactaatctaatgcaaatttgtgtgtggtgttgacggcgtgtttgattggattctttggttttttctttttttgtacttattgtcattgtgtttgtgtgtgttatttttattgactttggtcttgaaatagtttctctaatttatgttgttcatgtattagtatatgccagattagagaatttgtttaaataggtaatagtaataccctcattttgatagggatgtatatttttaggttgtatgacatttttattatttttaataaagctattcattgtcattaaaaaaaaataaaaaatgttaaaaggcattcatgatgcttagttgtaatatcgttattggtataattcaatatcgagtcccgcttgtttaactttaataaatattattaaaaatcattatctaattataaagcaaatgcctcatagtaaaaaaataaaacaatgagttgagaatgatttataatattcttaaattaaaaaaagtgtcatttaatatcaaattctacttattcggatgccatgccacctcataagtatactagatatcatagttccttacaatgcccaaaacaagagacaataaaaagaaatgctcaaaaccataagaaatgttggatattcacttttagcaatgctctaggatactactctttgtttggaggaagaccatgaaatgatacgatctccaaggaatacaaagtaatctttagtgctttgatgatatttggattggatgctcaatctgtatctgtgaaggctataaaaggtgaagagagaagttgcagacagagttatacagtgagatttggtgccaaagataacaaagtattctcttgattgctactaagtgagtagtggttggagcatgcataaattgacatgccctgttaacaacaaaggctatgtttgaacgagtcataagaacatattataaagagtatacaagacttctattctctataaggtattcaagaggttcaccattatgaaaagataaacctattagtgtgatgcttatcactaccagtaagaatgtcatcaacataaaagtgttgtacgtgatgaatgatgtagaataaacaaagagttatcaacttttgaccacatgaacccccaagcaggaagaacaaagctcaactttgagaaccaggtacgaggaatctgtttaaggccatagagagtcttggtgagcttgcaaacataagagggataatccttatcaatgaagctaggagattgggatatataaatagttttcgataaatccccatttaaaaaaagcattcggaacatcaatttgtcaaataggccatccttttgagagagagccaaagtgagggccactctaatagttcccagccggcttgacaactttgtgagaagactctgaacaaagaataatcagccaaatatttttttgaggaagacttttatatcaatcagttattgagctaattaactattattattattattat

SEQ ID NO: 46304 - DNA, 1887 bp, Cannabis sativa
  modified_base (407)..(412): a, c, t, g, unknown or other
tttttttttttgaagtattttccaaggatgatttaactttattacttgctcttctttgggtcatatgagaaagtcaaatgatactttatttgacaaatctcgattacattacactgatattattttttgggtgagatcttatatagctgatttcagggaattattcaattggcagggaagtcctcactaagtgtttacacccaagaatcttcttcatctacataaaattcttcttacaaaacccaaactcaatctctctcttttctctgcacctctctctacctctcattcttttctctctcaagctctcaatctcatctctctaagttcttaatctcgtatatactaaaataactactcaaggtggtatgtatagccttacgatcaagatcttaaagtcagtggcnnnnnnaaacgaggttgttaagttagttagaaataactaacttaaccaactcctctttgagaaatgtctccatgtcatcttaagtatcaaagcttccaagaatatatatgagctcccggactcacagaccaaggacacttgttgaagacgctttccgaataggatagagcctgcatgagtcgtctatccagaactaccattccatgagggacagtaggccaactagaactccctctaggagagtggtaagctttcttgaagactggaccctgagcggacatggtagtcattcgggaactctcttccagactcgactatcattccacaagactccttctgggactggcaaccgtgagtgaacaacttttctaaaaattacatttgaggagaccttttcatttggaggaactataccacaaattcaacctatagttacttcaaattaaaagaatgatgatgatgaagaaagaatgtagccatcattggttggtgttccaggaatctcagtatactaacttctgagattgatcaagtttaagcaatgattgaacttgtttaaggttaatactgttatacccgaaattcggctggtactttagaaggtgacacatgtcagtcttagagaacatggatcaacaaatataatggcaattatataattatatcattaaatagaaaatggaataactcattaaatatagaattaatagagtatatttatagctcgctgactacacagtcttaagcgagatcaaaatgtacgaacaattgattcacgtattgacgagaaaccatttcgcgtcagaaggcataatcccaaggaggacgtatataacgcatagagagacatccatctcgctatgtataagaaggcattgacgaggcgagtcagttattaaaacacttaacgtataatatacattatagtaactaagtgtaataacttgaagggcatgattgtccagcctgcaaggccttatggtcaaacagcggttcttaagtttgctcagtacattggtgctcatgccattggtggaaggcttgtgaataaaccttgatgttcatgtactaggcgagatgcctcagcgggatgcattcggcagcgtgtcctaatcagcgtcagcgttgacttccttaaaaacggtttaaatcacaactatgtgattttcaaatgttaactgcatttatttacgtcgagcgtaattaaggcccacaattttggagaatattgttatggaatttgaacttaaatgtaaataactaccaatctatatcactataaataggggcagattatacgaaaaaagggacgaaaaatcttagagagaaaaatgagaatactgattacacaaaaccctagttctgaatcagaaatatctgaagaagattgactcgtggactatgcagagttaactgcaaaaccacgtaaaagcttggtgttatttctgtttctattatttctcttagatctcttataattt

SEQ ID NO: 46305 - DNA, 2438 bp, Cannabis sativa
attgtcatttttgttgaaatattagcaattatttaagttattctcacttttaaatatattctaaaattttaattaatcttcactttcaaaataatcttttttcaggggaaaaacattgaaaaacaaatatttactaaaaaaaaattaaagcattttttttaatctagatttcttgtaaaaagaatgggaaatatttatttcttatttgcatttccatgtgggttttgttcataacatattattcatttcaatttcacttaattttcttttttaatttccttctatataaatccaaatatacaagaattaatatgtgcttaatcctaatgtgaattgactcctatatattaagtaagaatttaaaataataataataaaaaggataattcatacaaatactcaagattgaatcttaacatatagagataaaaatccaaagtaataacttttgaaaaaataaacacaatgtaggaaagtaataattgttagagattttatatataatggaatataaatgaagataaattataacttaattgtaaaaataatacgagagctaaaataagagattgattacataaatgttataatacatatatacactatatctattatatataagttggttgaagagatgaattacagcacgtgtaatataatatgaagaataaaatatatatatactcgctcacaatcttgagtgtagattaatggggatcaccatgacttgaacaagaatgaatgtttgatgttgttcaaattgcaatcgaaatccatagcccattggtttaaattacaagtagctactttgagcagcctcatcttggtcgaattctagggttgagggttggccaaacgagaatgtcagtagtgactattgactgagatatttttcagtggctgaaattttcaacatgtatgtaccacctgaataagaattcagaactctccaaggcgctccaatgtgtgagagagaattgagacccaaattgttctttatgtttaattttttctcagtcttggcggtttaaaatcacgacacgatattcttgcaagtgaagtagatttttttctttttattttttttttcttgttttgattgttttgaaataagctaacctcttaacaagagaagcggataaaagggaaacgaatttgttcacaaatattttatttttattttaaaagcgtaatctaagttaacagataaaaaaaacgttaaaccaagattttctattaaataggcactttcaatttataaaaatatttataaagtaatattaatatataaaaacaattttatttttttaagaaatcagcttattgtatttccttaaccaacttgtacacctaatcagcaacctgaaaaaaggtttgaaattttctatacatataatctttatttataaactctcaaaccattctctatcctttcaagatactattttttggcattacacttgaaattctgtatcttacatcttgtttcactttaaaaattagtgtattcattgtaggcaaacaataattccataaacactcatttttacctctccaaacattataaacaatagctgccacaactgttacaaaaacttgttgtttgaagctaaatttcttggcttctatctcacaaatcaaacaagaatcgtgataaaaaatattaaacttcaatagtcgactctttgtctgaaatctatccatcaccgaaagccataaaataaacttgtgcttaggaataatgaaccggctccagacctccccataccacagcttaacgggttgagtagtaacaagagttccatagtcaagtttaattgtatacctacttaacaaaatttattattaatttaaaaatacaattaatgtatataatgtaaattaagtgtgtgggcaactaatatagaaggtttatagtacaacctctaaaagagtgttttggtagatcttttatctaattcgactttcaagagagttttttattttatttttttcatgatcgtgtacgttgtagttatttagggctatctgtaaatttttagaaatttttgaatagcttacagtaatgaaaataaggttcaaataatttattgcacgcataactatttcttctaatataggtggtaaacaactatttgaattttattttcaatattgtaaactattcagatttttctaaaaatttataagtgatcttaaataactacaatataatcgattatataaaaaaaaaaaaagaagataagagtgtctactagaatgtattacagatttttcttatatagtataattttaagtatttagtttattaaaaaaaataaaatatattacattttaataaaaataaaatttaaattgatttttaggatagaattaactttataaggcaattgcttattaaattaattttattaattctggctcaaaattatttacta

SEQ ID NO: 46306 - DNA, 1081 bp, Cannabis sativa
aaactaactagtttcttatacagaataatagactaaaaataatattcaataaattttggtccagtttaaaaacaaaagataaataaataaattttagggattacatataaaaaaaaacattttaaaaaaatactctaaaatttcatccaattcggtctaaaaatattacatcaaaagtattggatgtaaccgatctaatacagagattcatccattgtatggaatcgatccaatttaatatttttttggatcggttcggttcggttgagcctacagtattgaattggatcggttggaaaaatctaacatataatgtgtaattagattgaatttggatgggtccaaaaatattgaatgtgattaaataaataccttaaaatatattatcattattattagcataagcaaatatatttgttttgttaatttatctttttttgattttttaggagttgatgttatttttgttggtcttatgtaagttgatttccagttatccaaacagaaagtgtggttttacttgtagtattggattggattcttagtctttccttacattttgtttagcagttgtaaatacgttttttaaatgcttttttttctttagtaaatttagtttcttattagaagatttagctagtttgatgttcaattttcttgaactttacatgaattagctcggcatactcttcgggtggatagagaattagtataatttgatgagatttcattaggatttcttaattctttgtatgacaatttgatttctttgaagttattcatggttaaaaaaaaatcatttttaaccaatctatggtatctcaaccttcttcttcttccctcttgtgactcctctgaatgagtttctattttctcccaaccactgcttctctcttccttcctcgcagccaccgcaacctatctctctcgcctcctttcggttattcaccaccgtctttctcaaacgtctatgcctatgctaccctcttctccctttttccgtctaatcttaagttacttatcactcttgattttgaatcgattgttgtatggtatacttttaatttgatgttcctaaaag

SEQ ID NO: 46307 - DNA, 1141 bp, Cannabis sativa
agagtttattttttgaaaataaaacttacaaattcttaataatacacttttttttaattaattatatttaattttttatttttgaaatcttaatttaaaacattacatcatatataataatttaataattattataaaagaaaatcatgtaaaacatcacatcataataatattcacagcactcatacttaataattaaccattagagaaatactatttttttttcattaacaaaaaagggaatcatagtaaaactaaaatggttatcagttgtgctgtgagattcactggctttatattttagtcattttgtcttaattaaattggcataacttaacaacttcattttttacttaaccaaatatacattaagaagttgagattcgtagcaacatatcactttgaaactacaatcatttaaatatgagactgataaatgaactggaaatttcagtaataacaaaatcaacataaaagtttgatccaacaaattctttagcaaaaagtaaaccatgatataccatttgatgatgattaattttccataatacccctacttcatatatcctaataattatatattatacattaatgctaaataaataaataaaaaagagacacttaagtaacaaaaagtaatgatccaattccaaattaatcaagctacaaggaaaattcacactctataatagatagagaaaaagaaaagagatcaatcatcacaccccagatgagatttgagtagcaaaattcaattattttaattaactatatagttttcttttaaaattttgaaattcttcaatggtcaaacttgtcaaactgttgaagcatttgaaagatggtgagattctgagttggaagaggaggcaaaggtgacattctggtcaagggcattattgtcttttcattattacttctataatcattatcatcaccatcaccatcattaccatcatcataatcatgatcatgatcatcattctctgcggttagagtgatgtgatgcctcttacgaaccggacgaaccgtaccagtaccgacctctttatcatcttcttcaaatttcttctcttctgctactgctattctcttctcttgttcctgttaaaattttctcatcaaccaaacaaacaagaaa

SEQ ID NO: 46308 - DNA, 2032 bp, Cannabis sativa
  modified_base (1933)..(1950): a, c, t, g, unknown or other
atttaggacacaaaactcaacaattttaaccttcatcggttaccccaataaaaaaaactagtctttaacctttatcagttatcccaaaaaaccacctagatgattttttttttggttttgaattctattttgagtaaattagacaattcttgttcatttagaatttaaaatttttgtccttttcaatattccaatattttttctactagttctttgatttaaaattttattgaaatttacctcatataaagaaaccttaaaattttttcttatcgtacaaaacgtaaattgaatcatgagaattctatcacactttggtttaagtattatggttatatctcccaatggagaatagaaagacttatttttgacagaatttgtgatcctttaatttaataaattttagattttataaaggagtaacaaacaaacataaggaaatcaaatgataaaataaagtttcattgtttaagaatttatgctaaattttggttgatatttcctcatggtttcattaaatgatcaataatagcatcttgtctttaaagatgactaatgaaacttattttgttcacaaggacattaatcttcaggcgttgtttcttttatattttcaaaaccatagtggaaaaatcaacttggcaaaaaaattaaagtcgtcaaaaataactatggtggttaaaattgccagcgtaggtatgacaatcaagtaagtaacatctaagatagttttgcaaaattactaaagaaatgtaattttatcttccaatacaaaatgttaggcaaacctagcatgacgagtatttgagacatgtaattaacatttatctaagaacatggtaagaagtgtgattagtcattcttctttaagaaactcattgtagggagataaacttaaggatgcaacataagttctgaacaaggtgtcaagtaaagtatagttaaaattatttataaactatggtgtggttagaataataatctaacataaagatatattatttttcgtggatgtccaactaaggtaatgtcctataagaacatgaaggaatctgagctctaacattgtaaggaactatactttactgtatctctagtaattaaagagcaacaaattttgtgatcccacactaaggttcaagtttgagacgagaaaagtttattatttggaggatgttgagtttggggagaaataaaattattagagatattattcttgaggaggaattgacgttaaactcattttcaattatcatttttgacaatgtttatctttctatgcctttaattgatcaataagtgaatccagaaccttgataagataatatcaaacaattttccattcaagatatggtaaatatttcagataatcaaattcaacaaccttaaagaccaatgtcattaaagaaatctataagagaaagaacataaataaataatggaatgatagacgacgatccaatcaaatttaatcatgccataaaggttccaactctcaatactggattgatatcataaataaggagtacaaattaatgtgagacaataaagtttcaatatttttcctattgctataaggtgtaaaactaattggttataaataaatatttacaatcaagagatatgcaaattgtaatgtgaatatatgcacattatgtcttgtatgtaaaccattactcataaagcatatattcattttaaataaactttcttttggtttaattgaaagaccatttcaattcaagcataacaatgattgctcattatggtcttcagttatatcaaatgaattattaaagattcatttttcaatggtaatattgatgaaaaacgttatgtggagcagccaaaaaattttgtatctaaatatcacaataatattgtttgaaaatttggaaaatccatgtataaacttgttaacgcagattttcgnnnnnnnnnnnnnnnnnncacaatgataattcaacaccgaaaaaataaaagctatagaaaaattatatatgaacaaagggtttttttacgtggttttgca

SEQ ID NO: 46309 - DNA, 1531 bp, Cannabis sativa
tataaatgtatgaatagtttggaagtagtggaacattggaacaacatggatttgtgaggaacaagatttggtcaattgataatgatccaccacctttacctcctaaagattcaattggtaaaacattcattgatttggttttcaaacccactgctgatgacatgaaaatctggcctcaccggtaactacataaccatcatcataatcataatcataatcataatcattaatcttgtgattttgaacttattaatctttttttctagtttcgagattcgattgagggtgtgtttgggttcagaagggaatctaatcttgatacctcgagtcagaaatcttgatacaaagccattcagcttctcatttgcctttcatacatattttgccatttcagatatcaagtatggcaaaacacaaaaaaaaagcttcattactaatccattattgttatgttgtcttattattatctttctttcatttatttctaacagtgaaatcagaatagaaggacttgagacactttattatcttgacaatttaaaagaaagagagtgtttcactgagcaatatactgccataacatttgaatctgaggtaaaaaaattttttacataaaattcattaattgttcaatatcaaaacattgttaatttgttttttctttaggtggatagaatttatgttcgtgctgaaaatgttgtagctatccttgatcatgagagaaaaaagtctttcatcataagaagagagggtcttcctgatgttggtaaattttttgtttctataaatgaatagaaaattcatttgaccccatttcatatcaataagtgttgaaccattttgttgggtgtatgtatatatgtagtggtatggaatccatgggcaacaaaagcaaaagccatagcagattttggagatgatgagtacaagagaatggtttgtgtggatggtgcagctgttgaaagaccaatcactttgaagccttgtcaggaatggactggaaggttggaactcacaagagttaattcatgtttagatgacttatcattattaagatgatgatgatgatgatgatgatcataacaaaattgattcatgtttaggtaattgcttgctgaccccttttactagtttttcatattgaagtggagattatgcctttttttgttgttgtaattctctccattatcagtatatatgaaaaactaagtatttaatttcaactgtaaatacatccaatttgttaataataaacattgcttgagtaagcatcaattgaataatagttcatcatatgtttgacttcatattaacattatgtttggtgagaaggaaatgtgcaaggatagaaagaaagaaaatgagagtgaaaggaaagattgagggaaatgctatcccttcaattttcaaatcctcaaaaatcaatcctttcaaagagtgaaggattttattggttgcaagggatcacgtcggcaaggtgatctgggtttctacaaaaagactggatttttctaatgctctctgtggggaa

SEQ ID NO: 46310 - DNA, 971 bp, Cannabis sativa
tcatagtgaggatttaccggcactgatttttagtaaatatgttaaatgaaaagaattaaacaggtataatagtccaaataaagtagatatatagctatatataattaaacaggtatgaaattgtgtacctgtaatgaaatctacatctctggaaaaataataaaataaaattagtagagtatagacctttcaaacgatataaaatataagtaaatataattgagtagtgagtttgggacataataaaggtgagaatttattaattaaaaattatttttgtgaattaatctaaatattgactttgtataaaaatcaattaaaattaaataatatatataatagataataccgattatttctggctccaatcattgttttgtctaatactttgtgtttaaggaggagttgacgcaatttacgttggatctgtcatataagaaagaaaaaacattccagagaaataaatttattaattaattagatagcaagaaaggaaaaaacacaaaagttcatatatatatatatattttacgtacgtaccttcttatcttcttttatatctagacgattcaccatatttataatattcatgttttgattgttggatgccatcctatccactcttgggttagacaagaaagcatctaaaatttcgacatgccatgatgaagtagcagccatatgaagcaagggagtatctccctcaatgtcttttccattcaaaaagcagtagtcattgccaattaactcatgttccaagattgtttttactagataaacatcttgagttgtgacagcataatgtagagcgtttctgctcttattatcaacaatttggcagctatctggacatctacttatgatttcattcgttaccctcaaattgttattggcaattgccatgtggagaggtgtcataccatgtttatttttgatgtaggcactactttcatctttttcaaccaacatct

SEQ ID NO: 46311 - DNA, 2275 bp, Cannabis sativa
ctgaaaccggcctaactctattggctcaagctggtttatctatggaatattggtggcatgccatgtcttctgctgtgcttactatcaatagactaccaacttcagtcattggaaacattagcccttatgaatgtctattcaagaaaagacctgattacaatattctgaaaccatttggttgttgctgttttccccacctaagaccatacaaccaacataaactggaacttcgatctgaaccatgcttattttgggttactcatctcaccacaaagggtacttgtgtgaaaccgtgatggcagaatcatcatctctcgtttcttttaatgaaacacaagtcccagcacaaccgacaacagttgagaccaatcaggtaaatgaacctcactcacttccttcatttacttttcatacttctcataatggttctcatactaatattaatacttcatctcatatgcatgccaccactgcaccactaaaccgagtccacacaaatcacacacctgttatacaacctgtcgaaagaacctcagacaccaaaaatatcaaaagctatccaacaaccatcccaccacctataacaactccaccaacaacccaaccaacaacaaccacaaatgaccaacccctgacacctctaccaggctcaaacaatcaacacttaccaccaaaaaccacaactcaacctgttgtacagatgcagcaaccccacaatgccacaaatgacattccctcacaaacaaatgcatgtattaggactcatgccatgagaaccagaagtcaaaatgggatcaccaaacccaaatcctacttagctacaaaatttccccttcctgaagctcttattccctctgagccaaagaatattgttgctgcaataaaaagcccccaatggttcaagactatgaaagatgagtatgctgcattaaagaaagctggtacctggtcccttgttccctatacaccaggtatgcctgttgtaagcaaaaaatggctccacaaggtgaagctaaatgctgatggcagccttgatagactcaaatctagacttgtggcaagaggatttctacaaacacccggaattgactatgaagagacattttctccagtagtaaaaccagcaactgtaagaataattctaactcttgttatctctctcaactggtctgacaaacaattagacattagtaatgcgtttctaaatgggacattgaatgaaactgtttttatggctcaaccagaaggatttgttgaccccaacaaacctaatcatgtatgccttctacataaggctctctatggtcttaaacaggctcctagggcatgaaatcaaactctcaaagaaacactcacaaagtggggttttcatacatcaaaatctgacaactccctatttacgtatggctcgggtaatcaattgatcattttgctagtatacgttgataattttcttgtcactggaccaaatgacagtctcattaacaagttcattacccaactacatcagtccttcaagcttaaagaccttggacatgttcactattttttgggagttgagattttcagggatacaactgggatgtacctttcccaaaccaaatacataactgatctacttgtgaaattaaagatggaaggagaaaaaccatgttcgaatcccacaagtgccagtaccaagctgtcattaaccgaaggagaaccacttgctgacaaaacattgtacagaagtacacttggtgccctccaatatcttactctcacaagagctgatgttgcatatattctcaacaaactcagttaattcatccatgctcccactacagttcactgggaagcatgcaaaagacttatgcgatatctcaagggaaccattactcacggcttacatatatcacctgcctcttcactaacaattcaggggtactctgatgcggattgggcatcatgcattgatgagaggaaaagcacgggttctttggaggaaatctagtgtcatggtcagctaaaaagcagcatgtgatggcctgttccagctctgaaagtgagttcagagcactagcaaatgcagcaactgagattaagtggctcgtttccttgctatctaaacttcaagtccctcaaactcaatgtccaatattatgggttaacaaccaaagtgttgctgctattgcagcaaatccagtatttcatgctagatcaaagcacatagagattgacttgcactttgttcgtgatctcatccttgccaaagagttatcgattagatatgtgc

SEQ ID NO: 46312 - DNA, 1372 bp, Cannabis sativa
ttacaaacataaaactttgagtacttatgccgctatttaccctatatatttaaaataaatttttttgacccctaggctgggtgagtcctaggcgtgcggtcacgcaagcctagtttatcttaactcaagctcgagctctgtaattacataaaaataattaataaattacttgtaacgtaattataatttattttattttatatatattatgtcatcaataataattttaatttgactcgtaaataaagtgtgtgttgaaattaaaatttcataaggtaaaaaaaagttaataattctatgcacaaattagctagattttgtggttggcaataatttatttgaatattcgatattgtagctgttaagtatagtgacaattttttattaattaatttatttataaatgcaatattcctaacgactaactgtttattattatttcttttgtttattttatagatcttggtttctgtccctttacgattttttttaactcatttaatttatcattgtgcccattatgactaacttataaatattacaaaaatcaagaactaatcgatttagataattaatcttttagagcttgtataatattatatataatccaatataattaatcaatgtgtatataattaatatttgattgaaaattctgtggttggttttaatcatttcatattgcaaaaattatatgtagatctttttaagattcagttaactttttctttttacaggcttttcatctcattataatttcaataatgcatatattcatattttctcaagtatttttttattattaataaaaataaaaattattgacctagatttttgacaactattaaataaatattaatatagataattaggaaagatagataaaaaaaaaattacgtcgttctagtagtgtgaatgttctcttaattacaaaatatttaagttacagtatgagagctcacttttgtatgtgtcttaaagtctattttcccattatttataagaaaaagaagagtcaaaggagaaaaaatgtacatctatcttcggtctctaggtgctacttagcctccgtggtaggagtttgatgagcaagatttgtcccatgtgcggttaatgtgaatgggtcgtcaaaacagtataagtttgtaatgatgataatcatgcgtcccagtaatcatgtacaatgatctgttttttaatttgcgtaaaaagaagtctaattttagtaaaacaaaaataaagttgcattgtaaatattataattaaagggcttaactgttaaaatgtgacagtcagtaatcccgtgatccgtaaggggaaataccgggtaagctgtacaatctcacaccgcctggggaaggtcaagtgggat

SEQ ID NO: 46313 - DNA, 2395 bp, Cannabis sativa
ttcttgtttcctttcatcgttaacaatttgtggagtgtttgccaattcttccgagggaggtgccatgagaacgtacctactttctttttggtgctagcttgagattgaatttttgttgttacaatgctaaaataatttatctattggttttgttttatagtctctaatgatcaagtcaactttacacggcatcttcatgctttacatatagtgtcaaatttgtcacctcaaaaagcatcttctttgctacataccaaattaagtaaaaggatcccaccacctaatgtccaaaagataaaaaaataactcagcatgttttaaatcacagaaattattattcaccaacttgtcagattcatcagtgcttttttaaaataaaaaataaaaaaaaatagaaggttccatgtatttatgctgtaaaagatatacattattaaaatgtacaacataaaagattagaggtatgaagcatatgatattcatttgtggctgtattttactgtactgtgttagtatctcttatctagataacattttatttaaataatgagccatttataatcaccaacaacctctccaaacaccaaagacaagagcacaagaaagtatggaacaagagaagatttaaaggatagcaaacccatacatcaaaccactttaggacccttatgccattggcatgttttgggttcacaacaacgctaatttgtgagatttatattacatttatagctaccaagccttaactatatgatagggttttaaagtgtaacttaatttgccaatctatatgcctcaaatataattaatcaaaatcaaccatctcattatggttcttattatatcatagctaggcaccataccatgcatgtaaatattaagttatccttatatgctgataataataccaagtgggcaatacttaattatatgtcaatccacttaaaatgttctaagatactgcacatcctatcttccattaagtatgaaaaatatgataattttaattgttatttaaaaagaagaaaagttgagtgtggatcattattaaattaaccacaccggttgtacttcattgagtattttgaattagtaaagccataaatagttaattaaatataaatataatacaggatttaactacttgtatcatcattttagtgaaaataacaaagtaaagctataagtcgttacgagtgagtaggtacatttcaatatcaatttgaagaatgaagttgtgaaacattcaagtttggaaacgcgtataaagacatgtttgtcatgataatcgatattggaaggagaaaagtataaattttcaaagttaattgattaaaaattcaaatgtagtagtagtagtggtcccataatatgatcacatctatctttatttgattggaaggagagagccagctctccattcttaccaacaaacaaacaataaagaagaagaaagattccgttttccatcaaacttcttaacaactttattgattaatataatataataataatcattattattaaggagatctgtgcaaatccaacaaagctttttattattattcttattattttattttaaacttgtcaaattgttacgaaataattaagttatttctagaagttacatttaaaaggatcgtgtgagttttgtaaaatacaacattcaaatttcaagactagctagctaaaagcaaaaccaaccaacaacgggaacagtgttaacccagcatcagaatgttgggatattacagtgcttaagcatatatgctatgcccagtagctatgacaatttatatatagtgtatatttgtgttataatataataaattgaatattttatcaaaaaaaaataatatcataaataacgattaaaagaatatattggaataatatatgtaatggcatatttggtgtgtttctttttctttttcttttttttcttttttttttttgaaatcaacttatatttggtgttcgatgtaacatcaaatatcctaagaattctttttggtgttctcctcgagtttgactcatcacaaccacatccactagtaagatcattaaatatttaaacagtattttaagttttctaagggtcattatcgcattctttcatacttggtattactcataaataggtgttattaaaaaaatttaagatcttatcttagttttttatataattaaaaaaatctctcgattttacatgtgttaagattatttcattagttcgttgaaagaaataaataaaaaagaagataaaaaaattgttaaatttaaatatttttatataagtatttttttaataaatatataaatatgatatagtataaggaataggtttcgatggttacatttttattgtaaccatggttacatttttttaagc

SEQ ID NO: 46314 - DNA, 1411 bp, Cannabis sativa
  modified_base (1352)..(1362): a, c, t, g, unknown or other
aaaatgttatcacatggctccatgttttgccaaacaaaaaatagatttcaaaaccagtgccacatcgatccatgcttattaattattcaattaataattttataattatcaccaatttcactttatatatatctaattaaataatcgtttataatattacttaaatcttttattttcttgaaatcacagaaagtaagaagaatagctcagtaagagcgactaaaaaaagtttaattaattttagtaaaaatcatttatttataacataaattttttgtaattaaatttgactttttatcacaacaaacaaattaattacttgtaactaaagcataatatttagaaacaagttgtcactaatttagttttagtcgcaatactaaaataaaatttagtcacaacaaattgtgatttttgtaactaatatatttagctatggactttttagccacaatataaaaattgtgatttataatttcaacttttctatttttatttgcaaattttgttgtgactaaaagtaaaaaaaattgtaaagagagagagagattctgcattgctattgttaagtctatatttatgtcattgtagagtctatttttatgtgtatttttagtttttttatattttattgttcatttatttttgttttgttcttatttcaggttgtaatggtgaaatatgatgtgggttaaaatgagagaaaatatgctcaataagatgatttttggatttaggttgaattttgaagttttaagaaacaatgggtgaaaaattcaaaatgtatagatcctcaacactctctgttggtgataaaaaatagtctgaatcaagctaattttttactattattcgttaactttcaggaaaactctgtgagtaaaagttctagatcttactttctgatttttaaaacatcttaaatcgtccaactctaagatatatcaagagagttatgaccaaaatacaatttattattcaaccaagatatcagaaaaaaggattatcctaaaaaaaaagtcacaggccacggcatgggagcatgccctagctaggctaaggcaggctaggcccccacctagggcccatccatcttagggacccaaataaaaaaaaaatctttttaaaaacatacatatatatttttttatgatttttaaaaataccatttattcttataataagggcctaattcaagtgagaaaaagaatttggagaaagagtagctttaccaatgtgagagattacaagtctcttactgttgtgatattttgcacacgcaagtgcacgtatcgtgccaagtagtaaactcacctggggtgagatcgatcccacgaggattgtagttaagnnnnnnnnnnntaaacttttacttctatttggttgaataaaaattaagaaaggattaaaa

SEQ ID NO: 46315 - DNA, 1548 bp, Cannabis sativa
cctgctcctagtttactaaatcctcataaataatatttttaataaatagaaataattattattataaaatttttgttcttttcaaaactaatgtttacagtgaataataacaaaaaagtgtagagagaaacatagattaagagaaagagaataccaaggtgagatctcccggcgacaatgatgatttgagtaatgttatatccatctcttagtcttactcggtgagggcgtggcccaaagaaataattgggagagattgagcgagtggctgaccttcaagggcaatatagagaatagtttcaacatcaattaagtagcttcagatttaaagataatagcttgtaggaaggatttgatggcctgtaattaagaggccatggacgtagccatggctctgtttcctctctacagcagaacccagtcaagaattagtggagctttcgatcgtgttggactttgaaaacgttttatggtttatttcattattgttaagaggtttcatcactaaatcgctttaccaaaaaattgcaaaattcaacagattaatttagattttgaaactaacaaacaaacgaggagcaaggagagatgcttagcgtcgaagcgttaatgtttcgtctattttatttagaaaaagctccattaaaaataatcgttaaactaaaaattatcgttacatagtcacttttaatatataaagatatgatatttttaagagataaataatattttaataaaattttatttatacctcaaaaatatataaatattctttattttatcttttttattttacataaaatacatatactctttttttaaaaaaaaaaaaaattatacttacataccactaagatcacatattacttgttgtagattgaaatatttttcctctctgtatcatttaaattttcttcaataaaaacctaccaaccagtttgaaattaaaacataagaaaatgggcaagccaatgaatacaattttgtcacttaaacaaaaaaagccaaacataaaataaaactatattacaaaaattaattaagctactcaaatttatcttaagaatactttttcttttctcatctatggccaattttcgtgtaattacattatttaataataaagtatacctcaatattcaaactttttttttttttttaacaaaatgtgtggtaataagatttgacctttatacatagttagttgtacgaaaatcaacacgttaatagaaatcaaggcgacatcttcaataacttaaaaagatatatgttttagtcacacttatatatttggttgtgttggaatatatttaaaattcgtttatttgaaatatatttttgcactgggaggggaaagagaaattgagtataaattataaatatatgtaatttatgcaaaataaaaatagtaaagcgtgaaatatttatataattttggggtacacataaaatttcactaaaaaaatatcatatctctaaaatgaacaaattactaaattagtaaaatagaaaaataatttaatgaaaatgacaaatatataataaagt

SEQ ID NO: 46316 - DNA, 1656 bp, Cannabis sativa
gcagctttcttaacattcacaagctcttccttgtctttacaagcaaacagatcggataatccatttgctatatcactaagctggaaattagcatttttcaacttgtcagcccacatttccaaaagatttccctcgggaacttctctagctatgtgtccaaccacgttgccgccctcatccttggattgagctcggatggcaccaaatatagcttccatgagcccacttccatcatcattttttgccttcacatgcatcacaacatcaataccaagactctcctttgcaggttttttcacaacatcaagcaaagataccttcttctggctgcacaaaaaatgaatctgcttcttcatgaagaccataattgtatcaggaaattcatatcccagaagccaaatgttcaatgctgaggacttcagataccgcagatcctcagatgctggcggagtagctattgcaagcacatcagaagaaccccacatgtcagatttgtgttcattccaatgtgaataaagagtcttcaatcgctcactgaatttgactagatcaatagagtacgcagccccagtggccttcccgttaggaggttggccatttccattgcgatgatcagccattctgaactattcgtctgtgcagcaataacattcaaattaaccaggtaataaccattttttcctcgatttaataagaaaatgaacaagtaagcagtaaaatatcatattcaacttttttcccatttcctttaaatttatcaaaataaataaagcccacaagaaaaattcaagaatcttcatgtataaaaccctagctgcagtatagataatagaaccagacacaaatttataattgattcatatgcccagtgcagccaaacgaagaaacgaaccacatcaaaaagcaatataagtagaaaacgtacatttccaaaccttcactctgacctttcaggtcagaaatgggaagatgccagtaccagattaggttttcactatcgggggttcaacgcgagggaaaatcgagccaacctctccgaacatgaataactaaattttaagagaataatcgtacaaaataagaagagaaagaagaagaaactagggttagatttggggacaacgatatggcgaattagggttgataaatttgtcttcgttggagagagaggagctgtgtcttcgtcggagagggagggctgtgtaggttccgtcgttggtgaagattccttcggcgacttagggaggagatgggcgtcgtcgtcagcgagtgggggagaagatgctgtcgtctccgtcgtcgtcaattggctgggcagcgaatcaccgtcgtcgtccactctctgggcagtgggcaggcggcttcaaagagagaatacgagagagagatagagagagttctgccttaggcttttgtttttcttttaaatgttttttatatatctaatcaaataaacaataattagcaattttgtctcttgaataatattaattttggctcttaaaatatatgcttcttaaaaaatttcttgaacttttacacactagtatattgttgcacgtatgctatgttttatattaagtattatattatgagttcagaaggaaataaatgaataaaaaataaataatatttaatttagagagatttgaataa

SEQ ID NO: 46317 - DNA, 2694 bp, Cannabis sativa
ttttctgcactgtttatttttctgatttcttctggagttacagagttgttttctgtagctacaaaaaaattatttcagtaccactttcattgttccgcatttaattaaattataaaactgggaatatcaaaatatgaaatttcaaggtcatcggggtaagtgttctggttctatagcactttctttccaattgttgatggtttgataattttttgctaagtatcttctctttgtcttttcaggatgctcttcttttcgagtgttgcgcaaacacaataacaaaattgactttggagctggaaaatgttcgggttgagcaaaacgccaccgaaagcgaaagtattgcaggagttgaagagtaccaatgcaactctagagaaagccaaaaggccctgcaccaagacactcaagaaaattgtgccatgatagacaacttcgcgaaggttcagaacaagaaattgggcgctaaaattgaatccacaagataggcctatctagaggaatgaaacaaattaattaagacagctgaaaaattcaaacttagttatacccaaaccccttaccaactcatcacatatgaagccaagtataaggaggcggagagcaagttacaggctcttgtggagaagttcgaggcacttcagacggacatcaactcaaagcttgagcaagttcgactcttggaaggacaaatccaagcccttaacaaggaatgagacaatgccttgtctacaaaagaagacctaaagcttgaaaaagatgatcaagagcttcaattaaatgatacgaaagataaatttctgacatgaaggtggatagggtgcgagagctaaaagaagcctttgaggtggaaacctttacgaaatggcacgtagaatgagacatgtctctcgcatagtttggcgtaaaggataaggagacgggagctaggtttattgctcgagagcaggatatactttggaaggaagcacttgaaaaatatcaagaaacatgtgtcgactccacatcttaggaactcacttttatccatccggcacaagagcccgatgccatccttctgtcccaagaaaaagacaaattttattgatcttctagctttgaaccccactgacccgaaggattcggaggggaccgtccagcctcaagtttagctaactttttccttttattttttgtttaggggacctgggtcgccgttttagtatttgcggagtcaatagttttgccctaaccgcgtggcttttatagttgtaatattttatctatcttttgacaagttcctgggaactaagacaacttttattactttgaatataattttctgtttctgattcatatagcattataaccttatggaatttttactaagttatttctggattctctaaggctccaggttccaatggcttgatcttaggcttcaatcttatacttagttattgttccaaggtttttattaagttatctacttctggattccctgaggttccagttccattggcttgagcctttggatttcaatgtgcttactttaacccgtcaattttaggatagaaattctcacaaaaccaatttacttccgattatctgatgttctagttctaatggcctgaaccctttggacttcaattttcactttaatttaagaattcccttttcattactctgaatttgcaatttcgaaagcttgaactttcgtttattgtctaccttagttaacttataatttattgatcttgtagtggtatgaagtttttacccacaaactccctgaggattccaatttcgacggccttatagcttgccaatttaaacatccaccctgagaccaaaatgtgaacgcttatacttaaaactctctcaagtgagctattttgtaaggtgcaagaaattattagagaagagtgatttttctgtattgtaaccttgtattccaccattgttaacatcaataaagcttggccaaagagtagttcctctcggaaattagtcaccacagaaatggcgatgaaccacacttgtgtcagtttctttaatcttcagtctattacattttctggttttgtttattactttgtttttcgatcaattcttgataggtgttagttcaccacatatttaaacacaagggttcacctataattctataaacacagctagcttagtatagcaattatttcacaggaataaagaaataaaaaaacttaagcatatataataaaagaaaaattggatagaagaaaattattatacttatataaaaaatatatatatatatttatgaaaacaaagtttacagtacactctttacttaagaacggatgactcaatagatagagaacaaagtttacaacagacactacacttgagtacacatacacccgagtgagccattattccttatttcccttatatattagtaatgatatgagatatcattactaataacagagattattatgagatatatatatttattcaataatgaaaaggacgaccgaatactatatgaatgtgtacagtgtacatataagaacacgtactacaaggcatgcatgcatgcatgcatgcaatattcaacaacgtctatttggaatgcaaagatggccagtcaaatgccaactttcaccttcatcattaagatgcaatgattttggtattaagggacgcattataggacataatgagggttgt

SEQ ID NO: 46318 - DNA, 1251 bp, Cannabis sativa
  modified_base (981)..(983): a, c, t, g, unknown or other
cttccattgttataaaatctctaacattcagaagaaaagaaaagccaaaataaataactatataccatactttccattgatttttagttacttattacaaaaaaaaaaaaaaaaaaaatgatttaagttacactttacaaatttatatatgaaattttttggcataattacatatctcattcgattagttacttattttaagtaataattttgacagcaaaatcactgcaactttgttagggttgtaactctgttcttcttaaggctactaataaagttacaatctagtactaattattaaaagataataataataatgggtaaataaaggataaaaaaaattagtggtaagatagttattcttatatattgttgtttttatatttgtttactatcattaaaaagagagagaacttcaccttaaaaaagaaacaatttgatttaataaaagataaaagaaattgaatatttacctaacaattttccaaagaatgtgtaaagacttctatttatttttatttttatatttaaaattaaacataccatgataattttatccttcaaaatatgtctcacaaaataatattatttaaatattttgattatattttaacgccaattaactatacatgctcttgtacttatgttacattaatgaaagaaatattgggggcacctaggggtaagtgatatttcaagcatctagtcccccgagggcctccaaattctccatgaaattgagtatctatgagtcgcttgtctaaagggtcttttccaattttggcaatggagagtgaactttcaactaaaggtccatagggctatagctcattgttgacttgtattattatatgaactccaagtatacccataggcggacttaagggtgttgagggacggctaaagcccactctgagatttaaaaatatattaatatacaattgttattttcatatatacatagtagttaaatagaacaannngttaagatactttaaatttacatgggacaccatgtttttaatttttttgcccttttttttatgtgtatctacattttatttattaaataattaaataaagtataagattcgaattaggatcaaacttatgaccactagaataaaaagatgctgctaaactactattttattccacttaaatttaactagttatttatgttagacatttatatgtataaactgaaatatatatgtttaagtataaagtgcggaattaatcaaacatata

SEQ ID NO: 46319 - DNA, 1895 bp, Cannabis sativa
caaagtgtgatgaacaataatgtagaggttcagccatgtatgacataagttataggtagtttttcctttaattaacatttgattagtcacgatgaacaataacaaaaatgggttgtagactagcatcgccaaactttcattgggtgttcaaggaataccattctagcaaagttgaatgaaccgaatcatggagtattccatgtgttgagtcatattgcccttggacaaaattttggagtagcaaagcatgaagcatacattgtaaggggtaaacgttttcatacaaagtcaagagatgatgctcgagaggttcaaaatagtggcatacgtatcgtcgcagaaaccatgcattttgcaagtgcaatagatagaaaccatgttttataggtaccatgacatattatggggctattgaagaaatatgggagctcaattattttgcattatgaattcaactttttaaatgttcttgggttgacaacaatgttggagtaaaaactgatgagcttggttttactttggttgatttaagtaagagaggaagcaagaatgatccattcatcatggctagccaaatagtacaaaatttttaaatttttgatccggctaatgacaaatggaccgttgatttatcgacattagagaagaagttcttagagaatgaaaaggatgaggagaatgctgatttatgttatgatgacttcattgttgggaaaccaattcatgaaaaagttgtgaaaattgattgtaaccttaaggaagatgatgttgaatacattagaaacgatattgttatctagttttttgcacattaatgtggcgataggatcttgcgacccgtgtcctatatttcggatacctggacagagggaaatttccctggcaacccgcacctaactagtcaatgtttatattaatcgaatatctgagtagggttgtagagaagacgtccaacgaggttgaagcctattgtgtcgagcgacttacaagagataacaacttcagattaatcttgttatgtccagacacgaaaacaatcccaatgattgttggattgagtcagaggaaaatggcaacttgtcctagtttcctattttatacattgtaattatgtaatcattgtaatttcctattttatgcattgtaagcaaaagggaaacaatccctcacgcattaagcccctataaatagtgacctagcctcactatgaaagggatcgaaagaattgttgcagaaatatactctagagagaaaataatgatctaaagagttactcagagattagttgtaagagctttcaaggggaagaacagtttgttccttctcttaagtcaatttaatacaaggggagtaggctattacaacactcacggggtcgaacctttttgaaatcttgtattcactttaccttttggttttgttctcttttaattatatcatttaattgcttattatttgactcactatcgttggctagaagcgaggtcaacattttggtgcttttattgagagcaaaaacacaagttctttgtcttatgttttgacaggaaaacacgatggttgtacaaaccctaaaggccttaataatcagtgtgacccaatggtgacagatcgtaacgttcaaattcttggaaacacgagaagaccaccaaggacaaaccccaagcaggctaatacacaacctcttactgtaggccatggagtgacttcccctcatgctgggatcacaacaagtgtacaggatactggaaacaccagtttgagagccgatcaatccactcccaacacagaggtcccatctaccactaatactgaaaggccagttagagacgacactaaaatccaaaacctccgagtagcccttgggctcatgcaaggtgttgggttttgtgccc

SEQ ID NO: 46320 - DNA, 2223 bp, Cannabis sativa
  modified_base (670)..(672): a, c, t, g, unknown or other
atatattatataataatattatggtatatatatatataatatagtatatataatatagatgatatataatctatataaaaagtgtatataatatgtatctatattatattaaatgcggttataaaacaaaaatattgttattttttaaaaaatattgcaatttaaatgtaaactcactacagatttctctcttatcttatatcttatattaaatgtgtttatataacattttttttttaatattgcaattcaaatataaacccattgtacatatttaaaaaaatatatatatctttttattattattttcttaccaaaaaaaatatatttctattattattattcaaaaaaaaaaaaatagaaaagtatgaacaaaaacaatgaaatgtattataaagttattagtattacgataataaaaaataaaattataattaatcaacgataaattttgaatatttttatatatttttttttataaataacacttaaattaaagatttaaaaaaaaaatatatttgaataacatccacacacaaaaaaaagctaattatacaataaaaatatacatataattaaaataaaaactaagaatataactaagtatatgtgtattacacgtaatgtatataatactatatagtagagatataatatatatatatatatnnnatgtatatatatatatatgtaaaagtgtttagagaagaagaatggagtaatataaaataagagaatagaacaaagtaagaatagaagaacaaacacccaaagtggagatgtggatcgatcaccaaaagcttgaacaaagtttctacacatttgaccaagaaaattatttccaccactatgaaatacttaagactttttggaaatacttctgaaaattatcaagtcttataactctctagttttttgtttgcaagatagaagagaagagtatgtctcaaaggatgaaccaatgtccatatttatagtgtttacgatcacacgctttggaattcaaacaccctacacccaatggcagttaccatctcttaattgggtataaatgagtgatttgaaggttatgggagttgttagaaagcatccacattgtcaaaaacgttcaaattataaagctaaaaaaagtaactagttactagtaaccaaatttttcaatttttgtaaataactcttcaaagcattccaaccatttcaactttattttatatcacttatacacatttaaattacaaaaataaattccaaatagctatatttttattatagctttgaatttcaaaggattaagttgtgtaacctctctttacacacttaattagtgacaatgtagaagttacaaaatgtaaataactctacctcttatgttaccatttatatgatgattacattgtatgtaactcccaatcaccttatatattatactcataataatatatatattatataacgtacttttaatcttaaatattatattatttaataaataatatatcatttctctactagattaaagtttgtgatacatcattgtaacacttatttaatcaatcaaacatatctcatatatatctcccactttgaataaatcaacactcttagagagactttgctcaagtgcataagataaagtgtctttcaacttgaactttatcatagtgtaatcatcacaaattttattaaaaattttgttgacaaagtattgaacaaaattttctttataataaaacggtaatgacacacacacctttgctaggttcacccaagaccacacgtctcgctttgcacccttaatggtcttgtgcacattctatgtattgacctttttaagaaaatagactccctaattctcatttaatgaatttgaaaaaaattatttatttattacgaaaataattactattttgccaattcaaaagaaattttcttcgaactctttatccctacccttgacaatatttcaaggtagtgattcgggatcattgacctataattctaagttccaataacctagattatttattgagtttgatcaatcaaataattattttttttttattaatttcatgattactcaactataaatatagaattgcactcgtagtaattatagaattatatttaaagagttttactacaatgtttattgatataatcaattccagtgattagccctctatgttagttttagtcaaaatactattttaccttttctaatta

SEQ ID NO: 46321 - DNA, 3565 bp, Cannabis sativa
aggtaatgaaatggaatagagcagaaagtaattaattttcattcattccattcctttctttgtttgtttggtggaatgactattctgtgtttaaatggaagtaaataccattccaatgcaagatggttaaagaaatttttttatcatgtattctcaaattgattctattctatttatattctattcttattcattttcctattatttcattctttccaactaaactcacctaagactttcaagatgacaaagtgaataaaataaagttcgatacttactttccttttaaaacctctggtgccaagatgccaaatcgacttagaaattcaaagaaagtcctgtaagtagggtaacccgaacattttatccttactgcttccaaaacgccctgtaacaataacgataaaagtgaatgaacaagcatcactcaataacaataataatagaacacaaatttggcctgattacttacacccgaacgtaattgttgtatgatgctcgtattatcgaaaatcgagggtttcaaaagatcatttggcttaacacatctaatatagtgaggctctgtagactttaatatttccataagttgttgtagttgaagctacatgtatgtatataacaaagtcagatataaaatttcacctaagtggtaaatctgctaattaaataagatgatagttaattaagtaaccttaaaacgcgaaccgatagaagagaacttggaagatttagctgactcatcggaaagcgaaggaaataaaccagatacgaaagaacatcttgaagaacttaacaaatcttgatgttcgggaacaacataatatttgttcttgtcaagaaattgatcggattgatattgaacctagagaaagagcactgaaatgcataaataattcaatagcagaaaatcgaagaaaacagtttataattgcagaaactaaagtcacctctcctgcataatgcaataggctaaaatccgatcgagccaattttggcttgacgaagcgtttgtgatctctgtaagtctgataaagcttttgtgcaaacgtttcataagttgactttggaaacatactgtgaaaaaaaaaaacatgtttccatataagaaaatatgaatataaaagaaagtgcacaataccactatttgatttggattgtcaaaaaaattaatagcagaatcaatttgattttgtatccatgacaacaaatatgctaaattgtcatccttgaactccacattgaagtttaacaagaaaaacagtttgtcaatttacaagcaaatgattattaaggtccagttaacaataactaggtgaatgatatttaaaaagaaaacattggcaaagaaagcacaactgaataatgaaaacaacttaattttaatgttaaaaattactccatacagaaattaaacgagtaaaaaagtatagatagcatagccatgtgtatatgcatatcacaatcagaacaaatagcattgacaaacaaggagatcataccaggcttcatcgagcaaagcgataattccacctggtttctgcaaaaatgaaaatgaataaaagggatagggtaaaataaagcaaataactcagtagttcacttgttgatcattacttatatgacacaataatctgaaaaatgatccaaatgattatatagatatgcaatattcatcaagaattctagtcaagtacaaatataaaaaactctgccacacttgacttcaaagaatcaaacaaaaagaccatgaagccaatatgatttttcatagggatgaaacagagtgtgccgccaatattttgtcttgaggaaatgacaacggggccctcgtgaaggagttcttgagagctaagttatgtaattttatacgataatgcttgtctcagtaggagctacaagtagattttttttttctgctatacataacgaaaaacaaagaaacaacaaaggaaaaaaaagagcagataaggacaccttttcaatgagatccaacacgtcttgattatcaacatatcctatgtagctccagttgatttgctcttttatgtattcctcttgctccatcttgaacacatgctgtattacacaataacattaagaatgtacattcgaaaaaagagttacagctatggttgtcaagcgactaacctcgtacctggttgaaatgttgttgcagcttctcatttgtaaaattaatacagaactgctcaaaactggatgggatattgaaatatatggagtcaaaattacatcgcggtacaaaataaacatcattatgatacagaaatttcatataatttattgtcacctattatttttgaagctttcaaagccatatatatcaagaacaccaatcaaacagttggagtaaggatcttgtcctatggaatcattaattttgtccaccaacctgaacatttaccaaataaaaaaaaagggaattaagaatgacataaacctctgagtaataacaaaccgtaaaggggtataattaccaatcaaacaaacgagaatatattgtcttagctaagccatctctgctaactgttgcaccgataggatcgaggcttctcttaataacttcttctggcgtgatcattatacgcttacaaagtgcatcttctaatgcattgggattgcacctgtaatattaggacacaaatatagttcacaacagagttaaattataggaaaacactaagtatgtactcacatgagaagttctgctgtcatttggagatggaataacgacatttcgtttttaaccaccgaagaatcattatcttctcccttagcaaattcgatattgcccaaatgaagaattgctgcaacaactttgaaaattgcatcctggcaaagagaaattactctcggatttgcttttaagtgacacttattaaggatcgaaacaacctttgaaattcactttcttacctgttctttttcacttattccaacaatctccatggctctcttggttgtgagataatcatgagcatcacttacaccaaccaattcataacaattagattgattaaggtaatgaaatgatctaggatcccccaatttatatttctctttctcctgaaaaagacctgatatatgttaaatgaatgtaattatcaggaatagacaatacaaaatagaaaaggtcatctacctgaggaggagctgcacatagacgataaaaacaatgatagttgcgctcgggatctgatatttggcaaacacgagatctttccaaaagataagttctaatggctgctcctgatattttcccctgcttgtcaaactgaatctccacaaatttcccaaaacgactgcaaagcacattccaaagatcagtatctatagatttttgagcatgtcgagtttaacatgaagcaagaaattaagttcataattttctcacctagaattgttatttctgctagttttagcattgccaaatgcttcaagaactggattcgactacaccatgccaatgccaagaaaagaaatggttacaaccaattgaagtttgtaacatggaaggcaatcatatgagtattcaatatatcca

SEQ ID NO: 46322 - DNA, 1136 bp, Cannabis sativa
aacgatagctgcagattgccttctactgagaattttaaattgagcgtggatgcttccttagatgtcaagacaagaaaaatcggtataggagttgtgatcattgatagtaacggggctgttgttgctgggttatgttcttcttagcaagaatctctactcctatttatgcagaagccacgacattgcatgttgtcttatcttggtgtgtgaccgtgaattttccaatagagttggtggacacagattaccaagttttagttaccaaaatcaagcataaatgaaaagatagatcttctctttttgatcttgttcaattggtacaaaactctttatctttccttcttaatatttcaatcagtcatatttttagaaataacaatgtataagcttacaattttgccagaaaatcattgggctttggataatgaggtcatttgaataatttttttccaaatgggttaatgtatctgaaacttagattctccttgtttgaaacttactttacattgtttttataaaaataatttttaaataatatagagaagatatataataataaaaaaaaaaaaaaagcaaatgtgtttagtctcacaaagaacaagccaaaaaaaggacgactcagacgtggcagatttttagaagaatgagaaaacatttgtgaaaacgaaaaagagaaactgtttgatattagaaagaatagcacaaaatctggttttcatttccctccacacattcccattgccttatctttgagctgtcttcatgtctctcactcttttctttccctccaaaaaagaaaaaaaagaaaaaagtctttccttgagtctcagactcagaaactcagcctctacttctctaactctttcatacccagaaattcttttagcaaatatcataaaaaaaaaaaacctctctctgtgtgtctttctttgacctcttctaatggctagcaagttagcctttactttaacttcaccaaggcgcccttttacaactattattcaaagaccctttgctccactctcttcgtctagcaccaccaaagttcaatcttttcacttcactggacgacagctttgccttcgtcgtaggctctcagtgattccctccaaggccactgctgaccaagaaggttt

SEQ ID NO: 46323 - DNA, 1902 bp, Cannabis sativa
tatatatattttttatttatttttttttatattattagcagtgggacatgccgctaatactattaacgatggacaataacggcggataatagcaatagggtctactgctaatatttttcttaaaaaaaaaaataaataattagaattaacagcgaattctgattccgccgctaatgctactattattaagggcgaattttgcccgtcgctaataatattatagctattgataaattttgttatagtgatagtatataataagatgatcgtcaaacttaactataaagtattagcacgtggatatataatatttacttttgatataaattttttttttatttaagcgtttatatattaaaacatgttttacctggactcgaacccaggacctctaacactcacacatccacttatggccacttgagctagccccagccccaaatggtttacttttgatataaattattacttataaatatattaattgctccatatacatataagtactcagttctaaaagtctgactttactaaataaatgaattatattaagtttatatttttggtccaacacaaaatttatgattttattaaattctccactcattaaataatataaatatttagagcaatattttaattaaggtactagctatgtctagtagtactaaataatacatttatttttatttaatatataattattttattaatataaaaacaaaggaccacatcatatattattattttatatattattatattcaatatatattgtgagtaccgtaccggtctgaaaaaaaaaaaagtgagggattgaatccatggccaactggtttattaattactacttaacgtgcattgcagcaactacaattacgggcttgctggagaaagccttggactagatttgattaaccaccctgatttggtagcaacagacccaattatatcgttcaaaacagccatatggttctggatgactcagcatgacaacaagccttcttgtcatgatatacttatcaatgctaattcccaagtgaaagtgaatatcccaagctatggagtgattggaaacataatcaatgtagataatacagctactaatgccatcggctactacaagaggtactgtgacatgttaggagtgagccatggacataacttgaaatattggctcgaccaatcggttgatgctcacatccaaatgcctatctgatcgatcatgaataaaatatgagattaccaaaagaaaagaaatgatgatggctctatgtttggaattacgaatggaaaagaaactatatatacatatgctttgctactagaaccacttccttttatgttatgtaatgtaaatatgtaataaagaggttcaacttaggttgatcttctcttcttgatgaataaatgagccacatacatgtttttgtttttattgttagacaatttatatttcacaaaaaaattagcttaaacaataattgaccataaatacagtaacggctagtacgagcctatatttaaactaaaagagattaatatttagtgagagatattttagtagtggtaagattttgtttatataatcctatttgtcttaaaatgtgtatgtgtgttttagttgtatttatttttatttatttcactatctaacatatattttcttactaagtttagtagtacttcaccttaaatattaaatctaccatggacaaatcaaagtaacaaaaagtctagatggttggtgataagtaaaggtggcgtttggtaatattttttttaattagttttttgaaaatattttttaaaaacctgttttataaaattgttttcactttttaattttttaatcaagaatcaaaattttaaaaacaaaaaaaaaaaaaaaaaagcaacttt

SEQ ID NO: 46324 - DNA, 1234 bp, Cannabis sativa
  modified_base (900)..(921): a, c, t, g, unknown or other
ctattcgactaacaatgtaggggccataacttggggatagaccccttggcttacaggctgcatcttttcggctcaagaggcgatcgattgacttgcacaaggaaaagtgaatctcactgtgaagcaaactatctagggaatattggtaatattttctcagatactctctattccagtaccctggtaccagcattgtattcaagtggtagtcatagtgggctaacttatttattctgggttctaacgcttctatgacaatataaagtccctccctatctcattaggagtattcagtgttgctttgcatggtccaatcatttatcttgaaaatttctacattaaaatttcttggtcaacatatttaggagactcataggacacatcttcactgctgctcctctgttcttgatcactatttgaaacaaaaggagaatcttcatcactgtcccctgtcccgagtcatcttgataagtaggagagattcttcattttctctctcctgcccaagatcatcttgagaaacaatagggaattcatggtcactgtctctctgctcgagctcatctagggaaacggataagaatctatttcattagaggcattccgtgttgatttttcttcattttcctagtcaatatccattcgagactcaggaaattgataagcagtgtaattggttgcttctagatgagcaactcctctaaccttcttcatgtcctcttcgagcttaatgaagtcgtcagctctatctaaaaactcttaaatggtgtgtatagatttaagtttcaagtctttctagaatggacaataatatttagtcgagctatcattgccatgacctcggtgtctttgtaagtatctttgtctgtgtggttgcctctaagaatcgttgtaggtaannnnnnnnnnnnnnnnnnnnnnttgttgcttgatgtagaccaaattattgagctcgattaatctatgtcttgacagggacaattggtcatagaattcttgtttaagtgtttcccaagaatcaatagaacccaagcatgagataccattattttgctatttctaatagcgtggcttgaaagactcggcatcgagaatcgtcttaaatgccttgcaggtcagtttgtacttaaaaattttgtatgtgagagagtgtgtcttctttttcaatgtataaatgccacactggatttttgaacttggagggaatctccaaagccttgattcaatctgagag

SEQ ID NO: 46325 - DNA, 2442 bp, Cannabis sativa
tattttctgtaatgaccgtgaggtgtgactatttgtttccttctaatatatatacgctttattttcaaaaaaaaaaaatgtatttgttcaactagctatttatacagtaagtatgttgctaatattaagttattttagataagacgatcaacaaatcgagtaacacatcatgttgctagacattttcggttttaccttaattgtagcattttctatttttctatttctgttgaattccagcatcttttatattcaaaatgcaaatttaatttaatgaagttgctatttcatttaaaaaaaaaaaaataagtaattgaaagtaattaaggggtttcaattacgcactaattcttatgatcccatgagaattgagtgtaatttttacactgtgtaattacacaatatttcatttttaaataactaatattgtcaagttatgtaattactaattcatttgccaaacataaaaataaaaaattcatatgcgactaccctaataattacacaattgtttccaaatacataaatattatatttgcacccaaaaatatataaatacatatcatgtttctacattaatttttttttattttcataattatttataaactaatatttttaaataaaaagaaactagtaaaaagttcttatatattttatattttcatttttctcattaatattcaaaatatatttataattcttttagaatataaaaaagaagaataaataaagttaaaattctatacgttttatgtaaaaagaaaataataattagaggggtatatggtgttaatataatgcccctattactaactagttacaaaatatattcaactaatagatcttgtccattacatcttctcaacaacacaaaacaaataatagaaagaaagcaaaaagagtagtactacataatacatatacatatatatatatatgttatatagagtgtgatttttatattaaagaatttgctaggaaagttcctcattgaggaaattactcacaacaaaattgaacacaggccctcaggcctagggacatatataaaaaggcttcattcccctaagattaagatcatcaagcaaaactcaaaaaaaaaaaaaaaattacatattaaacaagtagtgaagtgaagaagatatcttcaatcaattatatataattgaaaatgtctttcatggagattgaagaagtgagcaactgtgaatctctgcctttgttgtctttaaaccatgtttcaattctatgcagatcggtttgggcctcagctcgattctatgaagaagttttgggctttgttctcatcaaacggccctcttctttcaaattcaatggagcttggtatttttctttattttatttttcaaaaaattcatattcatttttaattaatttgtgaaaatgttctaattagtatgtttattataggttgtacaactatgggattgggatacacttgattgagaatccatcactaatggatgaatatgattccatggatgaaattattagaccaatcaaccctaaggataaccatatctctttccaagtaagaatatataatattataatgtgatttttttatggatgtttttgcatcttattgttatcattttcaaatattatattctattacatagttacattagccagccacatacataaaatgaaataatatatatatatttagtgttttttatattgtttcttgctttttaaaattgtattttaaaaaatgaatagaacacaaaaaaacttttgttttttgaaaaacaaaaagtgtttggttcatagagtaatttgaagaaaaaagtgattgaaaattttaggaaacaacttttttgttgatcacattttttttaacttagttttaaaaaattatttcttgaaaataataccaaacaccttgttcaaaaactttttatatattttttctttaaataaaaataataaattggtgagtaattttcagtataatacttaagtttaactcctagttgtagataaatatttaagtttaattttttacggtaataaaatctaagttatatttttggaacttctaagtacctgaacgttaaatgtaaatcaatgaccacgtggcagttgcttattggtccaggctattaaaattttatttttaatttaaatataccaataaaataataacatgtggataataacttcacacttaattgctaggtacttacgaaaatttcaaaaatataacgtattattaccgtaaaaaaataaactaaaatatttacacagcaaattatattaagtttttaagttattgtgccaacattaaccctcccgttactatttctactagggaaatttgattttctatacttaaaaaacttaaaaaaaaatttaaaccaatacattttacactacaaaaaatatgatacttttttcaaaaccccaaaaata

SEQ ID NO: 46326 - DNA, 581 bp, Cannabis sativa
ataataataataattaattttttatctttttctatcttatctaatatctatccaatcaagactaaagcaatttcaatttaattatttattttgattactgcaatttcaatttacttgtgtacgtgtgttgttctttttttttttttgttaaatactttgttttacataaaaagaaaatattgaccatttgtttatagttatctatagagaaaaagtcgtaattcgttagtctaattgaattttaaaaaagttaataaaactttaatgaatgtatttgtcccatattctaagctaagctaactgataaagcttttctttagtaccaaatgtcatcacactcttcctttaaataaataaatcatctatttttttttcttgaaaaggaataaatcatctattttaagaaacaaatttaattcatgagtacgagagacagaaaaatatactatcaccaatataaaattggaattctcatttaaatttttatttattttataatattattttttcaattattatacatatatcattaccgtttttgtaccttgttagtaaatattatgagtttttttatttttaca

SEQ ID NO: 46327 - DNA, 1643 bp, Cannabis sativa
tttttgttattttttttttgttatttttgtgcatttgtgaaattaacccttaattatattactataatattgttttttctactttgactataaatgttgaaattaaaagttaaaaataatattttgtgtgaaaatctcttaaataaatagatcattcaaaaatttataatatgtattcttaaatttatgatattctcaattaattttacgattaataatttaaaatataaatatctttttagagatgtatcaaatacaattccctcccaaaaagcataggatataataggtattatcacaatacagagcttcacacatcaaagaaagataacccattttcttcccaaattggaaattcttactatgatcttatcaagtatgatgatcttattggagattgaaaacgagtttcaatcctattagctcgagtgagctgaaaacagaataagaaagaaagagaaagagaagaagaagaaaagtgaatcaatagaactattattcatcagaaactgaaatgatacaaagtgtttgacagcttatataccagctgagattacaagagaaacaaacacacacaaaccaactaactaaccgatatccaaccacctagctaacttttttactaactaaccaagtcactaatcaagtttaatactctccctcaagatggggatggactgtagatgtctttcaatcccatcttgtcttcaaaaatgttaaattgattaggaaatagaggtttagttagaatatcagcaatttgatcttttctagaaacatgaactgtcttgatgatgccttgttaaaccttttccctgaccaaatgacaatcaatttctatgtggtttgttctctcgtggaacactagattggctgctatgtgctgggcagatttgttatcacagtataacagagcaggcccttcatgttcaaccttcaattctttcaaaacagacagaagccaaaatacttcacaagtggtgttagccattgctctatattctgcttctacaaaagaccttgaaatcgtgtgttgcttcttactttcccatgagatgatagatgatccaacaaagatacaaaaaccagtagttgatctccttgtatctgggcatgctgcccaatctgagtcagtgtaggcatgtaatttgacttctgtgttggcagcaaagaagattccttgtccatgacagtttttaagatattgtagaactctttgagttgcatgcatatgtgtgactcgaggtgtggataaaaactaacttagtttgttcagtgggtaggaaatgtatggtctagtgattgttaggtactgaagtttccaaacaatctttctgtacaatgtaggatcagctaacttctctttttcatctaggccaagtttgagattggcttccattggtgtattcattggcttactccctaaatacctaaggtcttttaacacttgtaatgcataaggtctttgggaaacaaagatacctttatctgatcttgcaacttctaaccccaggaaatatcttaattttcccaaactcttgagctgaaatcaagcatgcaatctgacttttaatgcttcaagttcatctaagttgttgctggccaggatgacattatctacataaaccagtaggaaaatgaaa

SEQ ID NO: 46328 - DNA, 956 bp, Cannabis sativa
  modified_base (636)..(639): a, c, t, g, unknown or other
ggtcagattttgatattcattacccgatttgatttcctaaattatttgtcaaaatattctgataattaatgtggcgtagatactgatagagtatctcacttataaatatagagcctcggtcctcgatcaacaacaacaaaaacaacaataacaataatttatctctactgctcttggtcaaaaaccaatctctgttgctctcttcgtgtaggcattctctccgagaattagattatctcaccacatttcggttcaatgtgaaaaatatatattttttataaatacataaatatttatattataaatacatagacaacatagaaagatgatcgaagatctcgtgtgggatgaagaaaatgattggagctcctccacatgcgcgacaatgaagatgactggagctcctccacatgtgcgacaaagaagacgaccagacctgtaaaaatgcaatgaaacaaagttagtacgaggctgcaactcccattgcgaaccattaacaacatcaaaataccacttgtgagcccacccaaactaaagtagaggagaagaaatggaagagaattgttggtgatcttctctggtttaaaccattaatattttgtcttctctggtgataaagagagagagagagagagnnnnagagagagagagagagaatgatgaagagggacgacagttgggcttttgtaatatttacaaatataatatatatgtaaccctaaataatatatatttgtaatatttataaaataggcagttgggcttctaaatgggctttgttttgttaaatttgttttaccgaaaattttaaagtgtgggcattagtatagccaacgattttaaaccgtcggcatactaaagtccattatttaaaactaacgggtttaaactgtcgaggatatcttcttaaaattcaaaattgtcagggatacctaatttttcccaacggttttaaa

SEQ ID NO: 46329 - DNA, 1721 bp, Cannabis sativa
tgagaatttcattatattgtgtgtgttttttgtttagagaaatttcattatattgatagaagaatatcatatacgcatagtgtgttacaagttacaactaaatgaatattttagaatttatataaaccaactgtatatagaaaagtttatattgaacatatctgaaatgaatatttgaaattaataatagaatagaatatggaatcatttgaataaagagtatgaaatgataacgaaaatctgaaaaatctaatgcacccgcagaggaaactgtctcaaaaattctgacattttggaattggatgatggacagggcatctctgtcgaaaataaaagaagaaaatatactaataataatcaaagaaaataataaaattattcacaataaagaaattttttgttatgttgcatgtgctgatatatcctaattaattagcatatttccactttatatttggcagcctttctaagatattacacatacattgaatacaaaattatcttcactattcatttagttagaaagtagaaaaagatgaattgacattacaaaattattactttattgcaaaagcaactaaaaacttacatgcatacaagatttaagtaattaaagaggtgtttaaaaatgttgttacaaaacaatattcgtttgataattcttcttatagtgacattctccaacacactcacacctttattcaacaaaagattacaaaaacatcataaaaacacgaaactgcattttatattttgaatttttcaggtggttataaatttcttttgaattattaaaattgttaaatttaaggatttttgtcaaattttattaaagaaagtccaacataaataaaaattttgagagcacaatttaattcatgttaaagttaagaagagatgatttgatagatatcaaagtttagggacacaatttaatatatagacaatcgtcacattagcaaaattaaatgaaatcaaacaaaaatcattaaattcaacaatctcaatagtttaggagaaatttttaaagacctaaaaagttcaggggacgtgatttgaaaattttaatcatattttttccacactttgtaattcgtacaataaaattttgtgttttaaaattactaatttattaattaatttaattaactgcaaaataagaatattgataatgaaatagttattctatagctacagaatacaattatgtaaatggaaaatttaacagaaaataaacattgcagacaagataaaaacacataagatttttatacatggtatcaacaatccttgtagattgttactagtccacggtgccacgcccagagataaattcattagataggtctcaaaaatacaaagtaattgacttatacataaatagactctatcttattgtatgccacaagcttgatgtattccacattctcaaacgaatcttgctaaaacttcaagtgcttgaactcttttcgatcttctttgaagagtgcttgcttcctctcaaggcaagacttgaaaagctatctcccaaaagcttgaagaaccttcttccgaaggttgcactgttgttcttcttctttgtagacttgattacagactcaaataatacaaaatacataaacacataggaagagacgaacattaatctcttctctacacaacaaatacactctttttctaataatataaatgacttttgttgatctcacttttagccaacg

SEQ ID NO: 46330 - DNA, 1825 bp, Cannabis sativa
tttgtaagcggtataaattcaatgttaatttttagaggtataagtattcaatgtttgtaaaattgtaattttcctccagtttcgccagtacaattctattttaaatttgttaaaacattcagaagtaactgatattttatgattttgtctagacccaatgatctagaatctgtgtcttctgttttatatgttgtttaataacagagtttgtactgatgaaattagagaaaaattacagttttacaaacatcgggtacttgtgcttctaaaaataaacattagatttatgccacttacaacttgaaactttggatacttatgctactatttaccttttcaattaattgaatgactttttcacatttggtggaatggttattcaacttcaaaataggttgaaagactattctaatacagataaaaaaaattaattttattcggattcttattttcattcattccaaccaaaagtaccctaagcttcttggatggattctattaccatggtaaagaaaaaacaaccttttgttgatgtcaaaacacttttccttatatttattttggtaagggaactgtgagacttctattccaacctggtgaagagggtggtggtggtgcatcacacatgataaaacaaggtgctcttggtgttgctgaagcaatatttggaatgcatgtcgatttcacatcaccaactggaaccataagatctaagtcaggacctctcttagctgctgtaagttcatttgaagcaaaaatcataggaagaggaggccatgccgccgaaccccatcaaaatattgatccgatcattgctgtttcgttttcaattttggcattacaacagcttgtgtcaagggaactcgatcccctcagcagtcaggtacatatttggtttctctccaaactcgaaagcatgtgtatgtatgtttttttttgttcatattgttttgatacattgttttgatgaaggttctatcagtcacctttgttagaggtgggactgcaaacaatgtaagtccatcatatgttgaattcggaggcacactcagaagccgcacaactgatggtttgcatcaactcattcgtcggttgaaagaggtacaacacatccttaattcttcaagtactttaaggccccgtttggctcggcttttaaaagctgcttttgggcttcttaagctccaaaaacacttcttttgcttttagcttttagctcgaaaaagatttttcaatagaaaccaactttagtagttttctccggacctaattcatacgattcatcgtttaggcctggccttgggctaaggcgggttaggtctgtgcttagggcccactcaaatccagagcccaaaatttttagggataattacgtaaggcaccattttttgtaaaaaaattatatttttacgtttaatttttctttttaacatttttacggtattacataaaaacaacacgaaaacaacaaaaaagctacataaaataacatgaaaatagcatctaaataacatcaaaacaacaacaaaaaataacatacaagtaacaaaaaatcaacaataaattaacaagagtacaacataaatgaccatataatctgtaaataaaatcaaaacaatcgtaaaaatgtttaaaattccgtaaaactgtatttttataattttttttgttgtttttgtaaaataatctcaaatttttatgtagtatattttttgcattgaaaaaaaatgatatttttgaaaatttttgtaaaaaaaaggtccaataatactcacattttacttcagataaacacacactcaacaaatttcttgggcccattatt

SEQ ID NO: 46331 - DNA, 4230 bp, Cannabis sativa
taaaaactcaaaaaaatccctcctcataaacacaatctaccaatattaaatggctgataacaatcaacataacgataatcgtcctgaggaaacaacccgtcatcttggtaaagaacctatgggatctcaaagacccattacatctgaaacaccacggtcagggaggagcgatggtaattttaatgttgatggtgatcaaatcccataaaggaggagtgaggatgcctatgatcctaccagatacgtaccattggtagaattagagaacatgcaacttcaacaacgattagttgaatcaaaccaacgaaacactgagttggagagagagaagccgcgccagggctacacaaagaacaattcctcaaaaccaacctgatcctactgtaaggagaccacgaggctccaggaccaggagacaagaagcaaaccaagagaatccaccaaatactcaagaggaacaacctcagaatataagggatgtcccaatggataaagcaaatcaaccaaatcttaataatacaaggaatcaagaacatcgacgagatgttccacaaacttcccaagaatttcctaaccaagggaatgaacgaacttacatgctagaattttctcgcatgaatgaagaggtgagacaacctcgactagggaaccagggatttccttgtgataatgaaagaaaccctggaaaccaaccaatgtcaagtggtcttatgtcgagacatccttagcatccttctcgcgcggatagagaaaatgtgtacacatatttaagtagaggacgtgtgtccaatctcttctgaagaagaagaccaacacgagatgaagcaagctcgagcacaggacaatcgcaatcccgcgggcatagtaggtcaagtagacaaatgcgagatggaagtagatctcgacgttattatactaaccaagaaagcatacgtaactcacgtagttgtccgagagctacttggagaccagatctgtacgtaactatgaacaaaggcatcgcgaacctgatttgcgcgagagattaaatcgaaggcagcctgaccttcgcgagcacctaaatcgaactgcccccgatttgcgtaatcaactttaccaaaatgcaaatcagcaaccaatggatcccatccaattacatataattcaacttgaggataaattcagaaagtatcaagatggaggaacatgacaaattgccagggtacaattcaaaaacgaagaaaccgagccattccatctaaatattttaaattcaaaatttcctcaaggatttaataaccttcatgtctcgcaatacgatgggaccacagatctggtcgctcatttaaacaattttaatatatgcgagcatgcaatgttttaataacttgtgttgcattttattcccatattccttaacaagagctgcgagcaattggtttgataaattcacccatcattccataacatcttgggaacagttgtcgagggacttcaaaaagcagtttcaggctgcaagagaccgtcgacctgaagtgtcatctttgaccagcataaaacaacaacctggggaatctcttaaagcgtacttgagctgcttcagtacagctgctgcaaaagttagaaactttaatgatagtattctgctaacaacacttcaggcaggaatcacaactaatttatctacagcaggaggtgaactatgggatgacctccagggtcgccctatgaggaatattaacaactttaatgaaagagcacaaatctttgtgcgtaaagaggaagcaaggactaaaatgaagttgttgaagactcactcggaaaataaacccagcacaagtacgacaacatcgagcacagtcacaacgaaagtagatatcctggtggatcaaatacaaaaagaaaggatgagtcaaaagaatcatcaaagaacaaaaagaaatagaaaaaacatgagaagtatgtatccatttacttggtatacactgagttgaatgaaactcgcgagaatctcttcctttcgaatgagaacagggttgcattttgcaaacccaaactaataaggcaagcaaggcacaagcgagattcaacaaaatactatcgattccacaaggatatagggcatacaaccgaggaatgccgacaattgaaagatgagatagaaagtttgatctcgcaagggtactttaggcagtatgtgagaaatcaaggaaatgagcctaaccagcctaaaagaggtatataaatgaagtgaaaaatgaacaatcggcattcgctcctgaaccattgaagaaagcaaagtcgaatgaaccaccaatcatcttctctgaagaaaatataaaacatgtgcgatacccacatgttgatcctctggtaaaactacctggcaacattgagctgcaaaaggacacgaaaccagaacatgaaactcagtctcgtctgccaaattacacatgggacatgtcttttgcataggaacatgtttaatatgcagctgagataatgttatcaaacagtgagataaggctccccaaagcaagttgagaacctttgggagtacttttagtttccacaccttattccataagctatcacaatcgattggatgccaccttattaacataattacttaattagttcaatatgacaaacttataaaattagttaaattatgaaaaaagatttcttataaattatattacaattttttattaactttatattaagctattttaggtatatggccacattaatatattgttaattctttttttatacacgtcaaaagaaaaataaattgtgtttttatgattatattattattaatttttgttatagtaatataaatttttttatccataaaaataatttatgatttgcaaaaatataattttatgcgtgtaatttttatttgaaaacattatacatgtaattatattattatgtattatatttgtaagtgtttagtgttctaagagcattttgaacatatacactaaatttgatatcacactaacactaaatttaatatcaaaaactatttccactccaaactacaatactataaatcacactaaaaatattctttattattatattaatttttaataaaataaaatattcttttcaataattttttacgtaaataataattgaaaataatagtaatttatggtattcatatttaaatttatacacaataaattaaaaagtatacaatacaccactccaaataaaagagttacgcatgcaatagacaatttaaatcttatttttggtgtattaaatttttcaaaattttgcaaaatattttaaataattataatatacacgaccatacataaagaaaaattaaactgaaaaaatctctcaaataaaagtacatttcaatttacacacaataaattaaatattaattttataaatacaaataataataaataacttttatacataaaatgtagctatctaaccgtatagtattagtaagattaattttataaatatatataaatattaatattatttgttttaagttaattatatttatactaattttaaattaaattaaatatctataaatattaatatattatttttaatattagtagtatgttcaattttaatatttttgaacttacatttatttttcttaaatttttataactttaaatattttttttttaaaaaaaacaaaattaaaaaattaattagtttcttttaatttataaaattttaaaactactcataacaaaaataaaaattaaaaatataactaaatatacgtgcaataataacctaatatattaaaaggtatataataacataatatataaaaagatgtataccgttactaggggtgtatgtcagtccgtttggtcggtttacatttcattttatttaactcaatgtaaaggggttacaaaaatctaagtgcaacccgcccaattaagaaaaaaaaaaattgcaacccgcccaatgaatttatcgatttggtcgagttaatccatccaaaccgaacactaatgttttttttttttttacattcaattattatattatagttattgtgataatgagataaatataaaaattaaatttaaagttcaaatcatttgtcataaaaaaaatatattagtttaaactttctattttttaaataggtatctttatatattaaaagtgcctatctaacggcaattcttggtttaacagaatattcttaaaaataaaaagaatattctgttaaat

SEQ ID NO: 46332 - DNA, 1909 bp, Cannabis sativa
aataaaataaaaaaatcgtaaaatatttaaaattttgtgaaatcgttatttaaaattttgtgaaatcgtaactttatattttttttattatttttatgtatttgtgaaataatccatatatttattgattatgaccaattataatcatatagttatatatatttaaaatttatatatagtgacttttttttttgtacatactaatgcaaggagaccagtacaaaggtgactctaataagagagtcaatatgatgcatcatatatttgtacctttttttattattattgatttccatttttgataagtgaaagcaaatttgtttcttgttattcattatggccatttctactaatgctttgcatgtgctttgacaaaatttaatggatgctatagtaagagatagacctacaataatattttaggatgaatatttttataaattatgactagggggcataaatgaaaaataaaattgtaaagaaaactcaaataaaaaaaaataaaaaatctaagacattataaaaaaaaaacaaatatatatctatataaaattaaggcagatataattttgcaggtagacaattaccaacctcaggaacatataggttcatccttacaataatagtattttttattttaaaaaaattaaataataataataaatgatatttgtggtaaaactcttttaatatattaataattgttaccctagtaaaaaaaatatagtaaaattatcttattttacgatttgtcacagttatattattttttagttgttaagtaccaattaaactcgttaagtgccggcttaaaaaaaacatgggaacatatttttttaacttatttaatacatattacaataatatgttaacacgtatttctgagttgacacttaatagtccaaaaatggtacaactataacaaaattgtaagattaagatacttttgccgtcacttttttttattagggtcatatgtataacaattgtaaatatgaagtgaatatcgcctcaaatatctctaataataataataaaagctcgtagggacagccctagttgaacccattaaagaggaaagaaagcaactaaataggcatttgataccacacacaataacttgaaaagaaagcacttattcattccatatattaaaattctttttgtcaattttttgtttaaatgaaagaaaataaaataaaattaatttattaagagcataatatatcataatgggtttccaatttaagactagtaataataagttaataacatgaagaagttgaagaagaaataatagatatttgattatatttaaaataatataacaataaaaaaaaatataacaataaaaaatgaaaaattttaaaacaaatatttactcattttatgggtttttatatcttgttaaatatatatattatggaaaaaattcaaatcaaataaaatcaaatcaaaatatgagaaaaagtgagtaaccagttacttctttgaggtaactagttacctgtactattttctctatatttttaatttttttttttaaaaaaaaaacaaaaacaaaattcccataaaataacttttttgaaacacatttttataaacttgtgtcttaaaagctataaaaataaaaattctcctatacgtatgtttgttagaattacagtttttaaaaatactatttcttcctcaaatgtaacagaattatgtatgttaggtactatgttttgagcataagctaattatgtgtgtttatcactattctctaaataattcacacacatcatatcattaaagatatatatatttatatatatatatatatgatatgatatgatatttaagggtaattttaggataggtactttggtttttatattttagtgatatggtacaatattcttcacca

SEQ ID NO: 46333 - DNA, 1041 bp, Cannabis sativa
aaatctagcagataaagagacatacatcaaccctgctaaagtaaattgatccatacaatgaaataccgatgcaccaattgagaacaagacccgctccaaccgccagaataataaaaaactctactagtccagtaaataagtgacaaatcactattattatgaaataaaattaacataaaataacattaaaattaaacacaaaaatgggcaaaccaataacgaatcaacccagaacaatcaccaatctccaccaaactcataaaccaagaagatgatagtgaacttttgccacagatccgtgcccactgaccaacaccacacccgacatatcaaggacccaataccagccaaaccccttgccaaaatctagaaccatcctgacccacaacctctcaccacctcaacaacaccaaaccagagctaagacacctactgcccaacaactccataagggatcagagatcacacccaaaccaccgacaactagaggaagaataggagagaagaaagacaacgagaggagaatcgattcgtgaggcccaccccaaagtaccactcaaaaatctgaccaaaaccatacttaagcccaggaggggccagcaacctggttggactgagagatcaaagaagaactttaaggaaaaataattaattaacaacatatattttatgtaattttgtagttaaatctatgtagtccacgtgtctctcttatttttgagttttttatttacatagtacagaattcaagaatgcaagaaataaatgaagattttctctctaggtgatcacttgaaagattggtcatctgccgcatagtaaattcttcccctatttataggatttttaaattgacagttattccgtttggtcttatattgataactgctcctaaaacataaataatccccacgtttcattttatttacaacatgtgataaattacataactgcttaaaattcgtcttgtgtcattatccacaaaaatagatattttaacgagaagctcatctatttcatgttgctcgcaggcgactttga

SEQ ID NO: 46334 - DNA, 2242 bp, Cannabis sativa
taagtttctctaagcttcgattgcctcgttcctccttttgaactgtttccttcccctatttgtgggtgtctcgaactgctttttggtttttttccctctcgactagtgttcttgctttctcttgagggatgttggtgtggtttgtgtagggtcagttatgctctatcctagtgaccggacaggtcgtctgtgccctataagagttgaatccctttctcgccttcagggacgtttgattggaacctatttattgttgttgattggcaatagtgaacctattggaacctatggtgtagtgaacctattggctcctttggtgagtctactctttgatgaacttctccgttttgggagatttggagcttggaatgttcaagctttcaaatggtggattaatagtctcgatatcattctgtgtaacttcatgaaagtcctctcttcgaactgttgtggactttgtcgtgctttgatttttcaacatctcaagacggacttaaagactcatagcctaatatggtcttcctctttgaaacaagacataaaagtgacaaagttaaaactcttattattaaactccagtttggtagcatggaaattgttgatcctcatggcttatctagaggtcttgctttgtgttggaggaagggtgttgatgctaagataatttctgcggactcaaaccttattgtagttgagatctcttcggaccccctaggggcagaggtggctatttttggccatttatggattttcgtctttaagtggtagagaacaattatggtctagaatggatactatgattgattctacaagggatcctatttttattgttggagatctcaatgggactctctcggatgctaaaacttttaactatttaaaatcgagtaacacttctctctattcctttgatttccaacagatggttaggggctcgggttcggttgacattgggactaaaggccctctgtctacttggaggaagaagtcttataattctaaaggtactccttgttgaaagaaagacaaacttgataggaccttgacttcgatagaatggtagatgttatttcccaaggctgtggtttctactcttctggccagcaattctgatcacaatcaaatcctcttagattcagacggtgaaggtgaccctaggcagacctttcaaatatgagaatatgaaggatagagatcaccactccttttggattgttgaaaaatcttgggcttctatctctgaggggaatccaatggtaggactccacaagaagcttcctgaagttataaaagccttatctagctagaaaaaatctcagttcagccacttaaagaaacaaattcttcatgctcgagttaagttgttcgtgattaaggctaatccttcgctacctagagtcattggtgggctcagcaagacaagaacttaatgatgctctttagaaggaagagattatgtggagacagaaatccagaattgcttagcttcaagatggggatcatggcataaagttttttcatgttattactatcgtagaagacagagaaattttattagttcgctaaaaggtgccaatgatcagtctcttacgactcgcaaaccagattggaaatggtttcttaattaaatttctagatacttttcaagataatcccactaactaattttcctcatgatttcaaaggttgcatataacgcgctaatctatagggacactatgtgtgtgattttataaaatagttaaatactaatagaataattaattattaaaaaccgtgttgatattaaaaatttgactaaaataaaacactaaaaatggacattataacggcataaaaagcgtgtttcggggatccatgtttcaaaaagttttactaaagaaatatatacaacaaccatttaaacacaaaatcaaaatacacagaatgtacagcacgcccaaaacaactcttggcaactcggcacgcaggccggtgaggtcaatatatattgctagacaaggtagtcacctcatggcagctctaactttttcttgcccttacctgcaccacatagcacccgtgagtcacaaggactcagcaagaaaagcaataataataatcatatagtttattatttgaatattatcatttatacacaatcataatcaaaccattacgcattgtagatgaaatccaaatcactactggcatctgccatgaataagcattagtatacaaatatctggtaatacaaaaccat

SEQ ID NO: 46335 - DNA, 2507 bp, Cannabis sativa
gagagagagaaagagagagaggatgttgttcttaacctatttctatttttaattttgcataaaatgaaataaaaggggatatcatctaattaataataaggtatatttttagattattaacatcacataacatctctaaaggaaaaaatctaaatagccaaaaggactattttttcctcactaaaaccataaagcttcaaagacaattaggggtattttggtcaattataaattgtcgactaatcctgacatttctaatgtcaaactatattgccccgctatactaaaaaattactaaaatgtaattctaatggccaaacaccgcgttccaatattgttgggcacaaaatatgcaaaaacataaaattccatgtatggcatatacaatgcattctgaattcaaataaatctccataaaacgataaaccataaatatcatgcaagtttcataattaaaccctaaatatctgctaatttttaaattaaagttaagcggtctttacacattaggcgcttattatcagccatcgaaatacacaaagtaataacatctataccaggctggatttgctcatttgtcggattggctgtttgaaaaatatctgtaaaataccacgccacttcaccaataatcttctcctaaacacataattacgtttggccagtttccatcataatctccgtaataatatttttcttctttctcaccgatgctttgttatgaaaatattttgtgtttctatcacctaccatcatccattctgatcttgatctctgcttccaataaagttcatctttattaattaggtcatccaattcaagttctataactttcacctcatccactcgaacatctcgcgcattagcactcaagaatttatctatctccttttgagtttccacaatttttttagatagcgacccaaacctttgcttattccaagataaaaggcgatttccacagtgatcaagcgaatcccgaattgatcgacaattttgattttgtcatattaaaaaattattcactaaaattaaacgcatagtataaattcaaaattcgcgacggtcccaaaaataatttttttcggggaccgttgctaacaatattaagtgactatttataaccgtcagaaaaaatgggtattcccgatggtttagaacactcaaaagggaaattcgcgatggttttatgggttttgtcgtgattttaaatagtcgattatacctgacgattttaaaccatggggtataactgacaattaataaaagtaaaccctagctacatctctctcattcagcgttcttcctctcattaagtctcttctctctctctctctctctctcacacactagcagcgtcaataccccacaaaacccacccacgatctccctctctcttctctctcatgatctccctttgaagcctcaaagaagaaatccacatccactgagaaaccccatttgcagcggcatccaccatcgacgaaggataaccaccaagaaacacccatttgagttccactaccagcaatactttttctctttcttctcttggtccgtttgctcaaccactgaccatttccaactacgatcgtcgtcttcctcctggccatcggcgcccaccacctcctttaggtatatattaaattatttattgaaattaattcataaatattttatatatactgttatatatacatatacatatatacttatttatttaatacttatttttaaatttaatttagattaattgtttaatttattttagatttaggtaatttgaaaaatatttagtttagattatttggtgttacgtaataaaaaaatttatttagattgttttttgttaggcaataaaaaatatttagtttcgattatattaattgtttaggtattaaaaaaatagtttttattaattacttaagtattagcttgattttcctttaagttttttattaaatcgttatgaaaaattttatgtttagattatttacttttatttgaattgttattgaattttttatatatatttttgactttttttacggtctttttggaaaagactccttattatcggtaatatatatatttagttgatacatatatatataagttgatagtagttgtaaaatttaaaatttaatcaatgttaatatttttattattttttaggtatcgagtttttggtgttgattgaagaacgcaaaagtagctagctttattggcgaaatgtacaattactaaaactttaaaactatttatttagtggagtttgaatatcttggatattcattcgtagtgaagcaggttctacgatcagttgtattgcggtcgaatgggtgtataatttttgtattgttaatgttattttgtttgttttgtgtacgttttatttcttttttcttatacatgtttgaaatttttgggaacgtccgattatagttattatgatgtcaaaattttgattgaattaggataaattttactaaaaatgtataaatatt

SEQ ID NO: 46336 - DNA, 4030 bp, Cannabis sativa
tcaagtatggttcaccttgacctttcttactctggcttcattggtcaactccctattcaattgtcttacttgtccaaattagttacacttgatttgactgagaattatgatgtgaaactagagacatatagttggaaaaccattgttgcaaatctaacaaatcttagagaattgtttcttagttatgttgatatgtcttctacttcacctcattcctttatgaatctctcaacttctttaacatctcttgatcttagtttaagtcgtttgcaaggtaaatttccaaaaaatgttctcaatttgccaaatcttcagcgactcgatttgagtcaaaatatcaatctcaatggctcttttccacaatacaattggagcagcccacttagagtgttgaatctttctagctctggaattgtgatagataatataccttatctttgtcgaaagttgaagtacttacatgctttgtctcttagtgattacaaattcttaagactatctcccacattgcttgacaattgcacacaaatcactttcttagacttttcttctaatgattttgaaggttatattccatggtcatcaattttaaatctacaaaagctaacatatttagatctttcaaagaataatttcataggtcaaattccgaagttttgtagtaactatttaaccgaaaattcatccttgtgtgtctctcctcccttgtttttaacaaccctggatttatctgtaaataagcttaatgggacaataccttcttggatatattcccttccttcattacaatatataggtctaagttccaataatttcagtggtaacattcaggagtttcaacataattcattggtatatcttggtctaaattttaatagcttacaaggcctgtttccaaaatcaatttttcagcaagtaaatctcacttctttgaatcttttatcaaataacttgagtggtgtcttgcaattagaccagtttttaaggttgaaaaatctcaaagtcattcaaatttctaataataatttttcatttgtatctaataataacaataataataatacttttcccaatactctttctagattgtatatgtcttcatgtggtatgaatgagtttccatacttcctaaaaagcttgaaaaatttagaacacttggacctatccaacaatcaaattgaaggtagtgttcctcaatggttatggaatatgggtaaggattcattgcttgtcttagatctttctcacaactctttgacccaaatagatcaaattccatggaagactctacaattcattgatcttcgcttcaaccaacttcaaggttatcttccaatcctcccacctcatacatcattcttttcaatttccaacaatttattcgtaggagaaatatcacccgtgatttgtgatctcagtagccttgatgtccttgatttttcgaataacaatttgagcgggaacattccttcatgcctaggaaattcaagttctctcagagtgttagatttgcgaaagaataagtttcagggaatcattcctctagctttcacaaagggaaacagcctaagggctttgaatcttaatgaaaatcaattagaagggtcattgccaaattctttgctcaattgtaaagagttggaacttttagatattggaaacaacaagataaatggatcctttccatggtggttggaatctcttccaaaacttcaagttcttaccttgagaaataatagatttcaaggtccaataggcaatcccaagataagaaatccctttcaaactttgagaattatagatctcagtggcaatgaattcactggccatttgccactaaaatattttgagaattttgtgggaatgattgatgctacttctgatggcttgaactacatggcaacaaattcctaccaaatgggctattatcaaatcagttcattgactataaaaggaaattatgttgggttactgaaaatccaaaccatgcttatagccattgacttctcaagaaacaacttcattggaatgatcccaaactcaattagtaaactcaattcactcaaaggtctcaatttttctcataacaagctaattggtaatatcccgtcatcattgggaaatttgagcaatctagaatggttggatctctcctcaaacgagctcagcgggaagattccatggcaactggctgcaaatctgaatcaactcggatttttgaatctttctgtgaacaaattggagggaccaatacctcatagccgacaattcgatacattcaatgaaaattcatataatgggaattcgggtttatgtggatttccactctctaaatcatgcaacgaggacaaaccatcatcaccaacctctcaagaagaagagaatgaggagcatgggaatggattatttaattggaaaagtgtgttgatgggatatggaagtggaatggttattggtatttctgtgggatacatggtccttacacataaaatcattgatgggattgtcgaaagagtaaaaggagaacaatggcttcaattggcaaaaagatcaaagcgaaatgctcgtcaaaattgtagaattggaagaagttagtttacattttccgcttttcagcgatataatacctcataaaggtgctagacaacatgagtataatgtcagcccacaacacttctttttttgctctttctttttcttcttcttttattttgtttctattctataataaagtctcttaaatgaaaacaaacaaccccaatacaatctcaatattaatatatggtttgatgagatgcatgttttccaactccaatacaattgtcttttttcatcttcaatattaacactttaaattaaatgagaaaagtaatgtatcatgaagacatgaattttatagataagaagaaaaataatgtaattatagccgtttgattcattcgacaatgatacaaatatttttgaagactagcttagtggtgagggagggatgagaaaaagggagaggtcatgggttcgaacccaggacctttaagctattaagctaatatatgattgtaaaaaccattacgctacactcaaaaaaaatatttttgaagacatgttttcttcttttagatatgttaagtaaatgattatgtttatttgacaaaattagaaatacaatgaaagaccatagatctctttttattgaatgtatgatatgtaagaatcccaaatgacttatcaaaaaaacaaggtttcttcatacatcattttattgatcatccaatttgtatcaccaagaaacaatttttctatctctttctaagaaaaaagctataccttgtgctgtattttcatctccatgatcatctcacgagcggtataagtaaatactcggcataaaataactgtgaagaaaaacaaacaaacaaatacaagtgaataaacgaactcgttattcatcaaataaatacgtgacaaactcgcttcatcaactgtaatttaaattcaagaaccttagttacttaccttccatatgaacatatagaaagatgttattgcagctttgctgctcaaatcaactgacttggcattagaccaaagtattgaagccaaaattgtgtgtcccaatacctaatcaagggaaaaaaatataataagtaggggtaaacatagtgtgggttgagcggtaaattgatgaaaaacttaaccaacccgcaaggtgtggttaagtgaaaatcttaactgcacggttaatttcatattctttaaccgtgcagtgcgaaatgatgtggttagccacaattaagttactagttttacatattaaagaaaaataggaaaaaactcaataaacatattcataaaagtttttaaggatcaaaagaaaagcatcgtcatcattgtcaacatgatacatgtatcttttttacattaaacaacttttgttaatctaatatgtaaaatattaatattatatacatgtggtgcagtgcggatattgcggttttttaacatttgttttgctaaactgcatcgcaccgca

SEQ ID NO: 46337 - DNA, 1539 bp, Cannabis sativa
aaatcactaatttattccacttaggcaggattattacttatgaagaacaaattaacacaacttaattaaattagacccttaactatagtccgttggcaaacaatcaagttataaatactttctgtacggacaactaattaaaaattagcttatataactagatctaacagccttcaaccaaaccaagtaccaatatttaaatataaacaaacatacatggatccaaaatagtaagggcaattccaatggtaaaatgtcatatttggtgttaaattaacactataagtgtgtactattttaacaataattttttttttacattccaactacaatactaaaaaaatatattatttattattataattttttattaatataatataagttttgatataaataaattatttaattgtttattttattttataaagtgattattaaattattaaaaaaaaattgcagtaatattgaatggttagtgggacaatatagactcctacatatatagagtaatgtttagtgtttagttggagtaatcttctgtgaaaacttcactatttttagaattttacagttctattagagaagccctaaaagaagggggactttgaatggttttattacatgcttttctttcttttgcttttctatttctttttacatgtattttgttgtcagatcatggataagggcagccgtgcttggtgatgaatgattacatttcaaaataatgtatgctaaagaaaaaacaacattggtattctaatttgagttttgaagtgcctacctagctagctagtactttgctatgagcaatatgtggacattgtggaagccattagaaaattataattaaatatcaatttgacttggggggtacatatgcttctactgtgcatgaaactaattaacagatatatgagaaggcaaaacctaatttttcacttgaggttgaggaaatagtaatctcatctatggggaccaaagacgtacagcatatttaatggtctttctttaatttatcagcaaaagtcttgtatattataacaattttatttgtaagggttcgtctttaataattgtgtagacccttattattatattcagccacaatatttcaaattttgagccccggaggaaaaatctacaaattaaacctgactataaaatcggagggcatacttaatactactattaataattaacacattgcaacatttttttttaagatggaacgacccaagggagttacaagggaaggggattgaggtcattgccattccaataccaagtattatctaatcctatagccatttgtgccaagttatgcgcgattgaattccctttcctccggatatggttaagggagatagcgggaaaagaagataacacttcttgcactgaatttacaattgctccatagctcgataagatattatagaatatcagagataagattcatgcaatctacttcaacttggtggagggggtgttcacaaattatcagatccaatccaatacgcacgatcaaatacaatc

SEQ ID NO: 46338 - DNA, 2604 bp, Cannabis sativa
ttgtgatgatgagttcgtctctaaggttgagggggttcttgccgaggacttgatgccacgctctatagaattggcatcgcaatttatgaccatgttctcacgggcttttgtcgcaggttccaaagagctttatcttctgaggaagcagaactcgcttctacaagacagcgtaaagaaactgaagctggaagtgaccatgaaggacaaagatatcaaagatcgtggaaagctaaggagtaagcagaggaaaaagtcaaagtcttggaatcacgagttgatgaactcggttgtcaccttgagaatgaaaaggagatctagaggaagcaatatgatcaggttgtctctgattacatttacactaccttgtccaagctgcctgacttcgacttcccatttctcgtagaggaggcagttaaaatagtcgatacatttcatgctatgtcgcctactgagacccagggacttaagggaaatctttaccctgagaatgctaaaaatgtgaatgcaaaggaagtcgtagatggtgctgctagcaaggtcgcggatgatcccaacactccagccccttagtttttccttaatttcttttgtattgttgaacttcctttcttttttagaggtacatggatactcgcgttttgtactttaaacaacttatttaacttatgttatcgaacatcatatcatttcgaggatatttcttttgcatacttatttagcggtacacgtgtactcacattgttaagttgcatttataattaatacttattttatttttgtaaaagttttcgtggatctattcatagcttggtgtgatgatttaaagtattcaaacttgcgaataatgcagataaaagttctaaaactttgaaaatttcattaattaatcaatagtatagtattaatggttatacccctatacttagtacagtttatgaaataaattgactaagtataaatacatatgattactattgatagtaatactttaaactttcaccattctaagctcttttgatggctgtaccgtcgaaattagataatcgataagtcgcattgccaattttttagagattacgcgtattaggcataaatttgcgcatcactaaatctcctactcgcaggttcctttccttaagctttgagttgaaatagcgagttgttcgctgttgataggctgcatttttcaaatgagcctgatcgcatttttcctctagaaaaattgagttgtagcaactaattttctgtattgctgtctatattgaagacgtctcttctcaaagatcctgttccaacttcgactggtacgatggctcacacccataagaaagcgagaagggggtttcaccgctcgttgagcgaggagttgtattatatgaccataaaacttgtcgaagttcctctagccacatacctttcttttcttcgagcttaccttttatggtatgcttgatgattttgttgtctgcttcagtttgtccattactttaaggatatgcgactactgaaaaaaaaaattcgaatcccaagtcatcacacagttaatgcatctccttacaataaaatttcttaccattgtcagaaattagtttataagggatgccaaacctggagatgatagcactatagacaaactcgcgtaactttgaggtcgttatggttgcaagaggattagctttggccgactttgtgaagtagtccacagctattacgacatattttggtcctcttttttcttttggcgattcaccaattaaatctatgccccaaaccgcaaatgaccaaggactagtgatagagtttaattggctaggtggcctatttacataggtcgctattcattggtacttgtcacatttcttggcgaagctagttgtgtctgcttgcaatgtcggccagtaatatccttgcctcataatttttaaagcaagggaattacctccggcgtggttgccgcatatcccaccatgcacttcgtggagtatatagtcgcattcatttccatcgatgcacttaagcaacagttgactaaaacttctacgatatagcttatcgtcataaatgacatatcgggcggctcgatatcacagttttttagcttcggtcttatcatctggaagcactcttgttgttaagtagttaacgattggggtcatttaggtgaccttcttgatcgtatcgacctccatcatctcctctcgatgaatagtcggataggttaagacatcaacaggaattacatagagtaattctacttctcttgtcgaggacaatgtgccaaagcatctgcatgagaattgtaagcacaaggtattatactaaaaattatctttttaaatttatttaataattcacaagtgtaggaaaggtatttggccaaacgccctcctctggccagatattctccattgacttggcaaactacaatttacgagtcgttgaatgcttcgaggtattcaactttcatttcaagagcaagctttaaccctgtaattaaggcttcatattttccttcattattcaatgtaggaaattcaaacctcaaggcagcgtgcaccttgaatttgttggggcttataagaattattccaccacctaatccct

SEQ ID NO: 46339 - DNA, 1276 bp, Cannabis sativa
ggaaccacaaggacctacttagatgggatattttcattttttaatcatttcttttgaacttcaattattactattaacttcttatgttagcttttgcttgttaaaaaaacttaagagttaagattacattttttttaatctgatcttctacaaatttcttgcaactatagtccaacaacctccatctttatcggcaattaaaattcgacaacctccatctttagtggtaatacaaaatcgatgagctccatcttcaagcaatcaaaatctagtaacctcaatcattagcaacaatgtgagctttcatttgtaaagggtgaattcctcccgtaaaatccaaatcactaatctcatctctgtaattttcaaatttcattgcattttagttgaagtgtttaaagaaggtaagtattccaagatgattgtgttctttgtttttgttttaattatttaaaaatttaattttggtgctatgtccatagctgcaacactcgtacgtccaacaacatagtagcagtagaggcataattcatcaaaattgttctacgaaatttgagaaggtaatacaatattatttatgtaaaatatattttataaaattagaaatgaaaataatgtatcgtaaaacagtaaaaaaaagttatttacagctaaattctctgaactaacagagtttggcatgatcaactccctttacttaagttttgggagcagaactccctaaaccacagaattgttttgctctccacctttccgttagtttttggctgtaaaatatcaaatagacctacacattgtacacatggcatgatttcattaatccacatcattttatttattcaaatattaaaaaatcataaaagaatattcttaaaaaatatatatttttcttcttctaaaaccctaatctctatttttctctctctcagctcctcttctgtggactaataaaatcatgccacgtgtacaatgtgacaggtctatttggcatttaacagccaaaaactaacaaaaaagtggaaagcaaaacaattctgtagtttggggagttctacccaaaaaatttcaataagagaggttgatcgtaccaaactccgtagttcaatgaatttagccacaaattactctaaaaaatgttaaacttccgtataactagtaattcccctaaaaaaatttattctcataaaactatgtataaaaattgttaaatttgaataataataataataataataataataataatgtgtagcctgttataaaataatatagaata

SEQ ID NO: 46340 - DNA, 1019 bp, Cannabis sativa
gatgtgaaaatcagtttgtgttgaaaaatttatattgaaaacactatcgcatgaatttcgtatattggagtctttcaactttttgttcgtggctaaagttgagctcacttaattggcttctggttactgtaaggcatccttattgtttcagatattgagttaattaatattttgcaggttgattatgcatgcacacctgaagaagtgcagcagcatttccaatcgtgcggtactgttaatagagtgactatactgacagataaatttggccaaccaaagggttttgcatacgtagaatttgtagaaactgaagctgttcaagaggcacttcttctgagtgaatccgagctacatggccggcaattgaaggtaaagaaaagaaaaagggaaaaattattgattttaaagacctgtcatctcatgttacaaataatttatcaaaacttgcttgttcatgttcttctgtgtataatccaggttatgcctaagagaaccaatgttcctgggatgaagcagtaccgccctagacgtttcaatccttattcaggctatcgcttcaggcgaccatatgttccaccttacttctattctccttatggatacgggtaagcttgtttctgttgtgcacactttcattaccatagaagataaaaatgaggtcgttaattttcccttaaaacatatggtacgcctgcaggaaggttccccgattcagaaggtcagcccgatacatgccctactattagaatgttcaatcttatatacgtcttgtggagttgttacccaagattgtttgcatcttaagaactagcttatacatctagtggatgtaatatttgatggtggttttatccaaggaccaaggttgatcagttgtaatacctgatattttgttttgacaatttttttttcattattgctatgatacaatgcacttggaagctataaactagtagattgagatattgaaaattaggactttgcgtgcactgcaagccaagttactccttgcgtgcgtt

SEQ ID NO: 46341 - DNA, 1906 bp, Cannabis sativa
  modified_base (100)..(113): a, c, t, g, unknown or other
ttgacaaaaaatcaatgcagggtcttatttgtaccattttagaaaatacagggtctattttatcatttaacaaaacagatggtccaattaataacttttnnnnnnnnnnnnnnccaaaataatatttacccaaattaaaattttaaatcactcaataatattgctaaccataaactttcaagttcctatgctaagttttgataaagtaagacaccatcacttcatatatgaaaggaaacttgatacaaacaagttacaaatctcacctacttaaaaaaacaaaaaacatcttttcttaataacattatcctcaaacacaaaataacactaaaataaaagataccccacaaaataaaaagtcataacttagctgcatgtgtcttaacccacaataatcacgggtttaagctttccaatgttggtgaaatcgacccttttaaattttgatttggtaatgaaaaaaaggagaacaaagaaagacaatccaatcacacaaatggtgatggcaagagcattggaaagtgacaacactgcataggtaccagtcacaaatgctatcaccatgaatcccaaggcaaatattgctaaattcatagacatgatatagttagatacaaactcctcctttgcatcttcaccaaaagatgctatagtcaagaaaagattgacaaagacagatgtagtggagagaaccatagctattgtgtctgttatgatgaacacttgaaacgctgtgttatttctaagaaccgcgctaccttgttgttgttgttttccatgtccaaccttatcgtcgcttatgtaacctcccggtaatgtaaatcctgctgtgaatgttacggttgcaatcaatgcagccgcaactagagtagactctctaaaattcgcgattctagcccttattttttcttttcgctcaatctttctcttcttggcattgctcaatatttgttcactactattgtattcattgtaatcaagatcataggccatggtatccactttttgtggataccatgttgaagtggcatgcatatgaggcaatggggtatgtccttcattatcctttctatttaaaaggtaattacttataagtggaaaatgatctgaaatgagtttgaatgaggaaagattttgtgtccttgcaacatggtgtagcaaatttcggcctttatcatcaacaacttcatagctatctggacacttggaaagaatttccttcactactttataacctttgaaagtgttagaagctgcaatgtgaagagctgtggtgccatttttatctttaaaataggcactgctttcatctttttctaacaacatcttcacaatctccaaagtgttactggaagtggacatcacagcatgatgcagaggaattaaaccatccttatctgcttgttttgtcaaatctaataacttttccaaaatctttcttgttaggcctgaagaattgttatttttacagaaaaagaaatataatattaattagcagtacaatactaaatgagcaagggaaaattgcggcaaaaattaatatgtagttcactttgtcgcacttaaatacttatgtaaattttttagcaggaaaaattcttatgtattcattttgttacaatattagtccttttgttgcaacaaattgcgggactaatgttacatcaaatgtgttaaaatttttgctgtcagtgtcaaatatgttctatatgaactaaaatatttacacaaagatagtatttaagtatttaagtgtaacaaaattacataagaatttttttcgcaaatatctttaattataattttgtttggtaaataaaatatgaaaaaaacttaggtggcgtttggtaacacttttttaatagttttctatttttaaaagtggaaaagtgaaaatatttttcaa

SEQ ID NO: 46342 - DNA, 1167 bp, Cannabis sativa
gttagatctttaatatttttaaaattgatgtttataattttttttagtaactatctagagtattacttattaaaaagtgtatctctatatatgctaaattgtggtatatatgtactagtcatgcatgcatgttataaattttgggtagatagatagctagcaaaactttttatattattaaagaagatgattacattacttgtactatcataaaatatattcgttacactcctttttaataaataaataaaaagttttctacactttctaaataaaaacagctacaaataattgtacctgtaagaaaggtgctcttctttccagtaatttaaatttttttaaaaaaaaaaaaagaaaaagtacaaaccttttggttgaccactggtcaaatcccattaaggcggaaagtgaaagtacgcgcattagatgcgggtactgaatatgaatctgtgtaagtgtaagtctattattgatgaggacattgtacggtggtgaaagttgatgattggtgatgagttaatcagcaccatacacctgtcactcaattggtggttagtcctttcaccgccttcctccacagattttttccgaatctaaacctgtcctcgacctcacgccccactaaacaccaggtggggatacacacataaaaatagacactaatataaagatactactgatatcttttagtaatttttttaatttattttatatttttttttctaaaattctttttagctaaccctattgagcatattattacgaagcaccaaattatttagtaccgctataagataatattttataaatgtttatatatttattaaaattattatcaagtaaataagtaagacttgatattgaattacattaataaggatattacaaattataagagtgttaggcactaatatcatttaacatttctcttctttttaatgttaattttctagtaattacaagaaatgtttttttttttttggaaaatcagcagtgtttttcattactccaaatgactttctttacaacctattcagtacttttttataaaacaaggtctgattttttccttctaattatgtacattggttacaattcattaaaccatgttgtatcccctattgaaaccttcctaggccatacactttgtattctagttttacaaat

SEQ ID NO: 46343 - DNA, 1648 bp, Cannabis sativa
tttaaagaggacatcaatgttaagattattgatatgatgccaatagaagaaggatcttttcctttgaaatacttgggggttcatctttgtcctacaaaatagaaagcttcagactgtgcggtgatcttggacaagctgaacaagaatctcaattgttgggcgagtaggaatttatctttggttgatcgtgctcaattaatccactcaattttgtttggaatcagaaatttttagatgagtatattcattctccctcataaaattacagttatcatagataaaagctgtcgtgacttcctctggggtgctaagggaaataggagtaaacttcatcttccttcttaggagaggagaaggtttgcctcccaaaaaagttaggtggtattggttttcgagaaggcatgaaataaaatatagcgttgatgacgaagtttttatgggcgatctccaataaacaagactgcctttgggaacatggatcaactccatctatcttaagaagcaaaacatttggagcattcctatcaagcaatgagtgagttggtattttaagaagctgctgaggctaagacaaattattgatgaagcttcgttgaggcaagctgaaaagtgaggtaaattttgggttaaacagttttatatctctcttgttgttgcttaaaaagttgtttatgctgaaactgtgtagaacaaactcctagtgcccaaacatagatttgtatattgtcaagtttttaactctcatctactcaccagagattatttgagcctataatgactatccattctattttacgccctatctatgacactgaaaataaaattcacaatcaccttttcatagcagctggctgggcattcatgagtggccaaattccttctcggagcttcaacaatggtatttgaactctactagtgattggaagaatcaaattagaaatgttgttttatctgcaactttgtattttatttaaaaaacaggagtttgattatgtttgtagttcagctagaagtattaatttggagatgaagaatgttaataaatgtagagtggtgagaatgggtcctcataaactcagccaaaagaacatgtatattcttaatgttgtagagggttgctagttgtttatttgagttcaactgctgccgttgtagactgcattttgggtttgtagaagctgtcgcttctttccttgtttgggtttttaataaaaactttcacttgttcaaaaaaaataattattaaaatagaatgtatatataaatttttagaatacaaataaaattctccaaaattaatctagttcaaggcattgtactgatctagaagtcagcaactggaagctagaaagaaaccaccaaattccaattttcttttggcaaagaaaccacccaacttccaaattgacctaatgaatctgacaccaactctttgttaagaagaatactaagtttaaattatgaatgcttatagtcttttaccacaataataatcaccaattatggttttctacatgacaacacaacacaacacaacacagaacccttttcttttaagcagccaaattgattggtttctttcacacaaataatgaatttcacttgtgtgtatttgtgatttgttacaactcacagtcaagtcaagata

SEQ ID NO: 46344 - DNA, 957 bp, Cannabis sativa
tgattaagataagatatgtaaaacaatacctgaaaaaatgtcactcaatggcgctggcacaggtgcaacggggagatcaacgtttattgggtaagcatcaccaggaactataatttataagaaaaatacagtcagaaatccgctgccaaaacaaagaatttcatcactattataagtctcatccagaatgacagggcaaacaaaccttttgcatgtttcatgatatgaaacacataacattacactgcatgataatactactcataacaacataatgatcaatcatgcgctcattcatttgagcactttttaatcaactgataaaacgaacttctcacagcttaacatacgcatcgtagttagtactaaaaaccaaagcctaaatgcaaagggttcgagtttgcttatcatagagagtgatttatgagtaattaatgatttaattcgtagaagaagaagccttaaataggggatgaagattcacagtttctttccatagaaccattatggtcgctaccaggctattcatagtcctttctttctgcaatcttaagaattattgtttacaacaagaacaaaggaataacataaacctaagaagatgacctcaactgaacttacaaacattgctaaagtgaaaacaatttaaagcacattttttctcaagtgcacacctaaaataaacttgttgcgaattagataaagtgtaatgagattaccatctaatgctatcactataaatttgtttcaaacgaaatcttaatggaattgccaccgatcaaccaatatataaaatgcatcagatcccaaatataaattaacaactacattcatgccaattcaaaagtaaaaaaaaataataaacaaaactcaaaatccacaactcacatcaaaaccaaatcttgtcattcaaatttaaaagtactaacaaagaagtaaaaaaaaaaaaacaaaaaa

SEQ ID NO: 46345 - DNA, 2837 bp, Cannabis sativa
  modified_base (58)..(67): a, c, t, g, unknown or other
atctgaaataattttttagacaaattttttcttatggtcatgtacgttatagttattnnnnnnnnnntgtaaaattttaagaaatttggaaaagtttaacgcaatgaaaaatacattcaaatagtgtgttgcacgtgtgactattttattttatacgcgtgtaaaatagattgtttgaacataaaattttgtaggttatcttaaatatgtataacgtacatgaatatgaagaaaaaaattagactaaaaaatttttttggatgtcgaaacaagtcaagagtgcatcaatatatccttttaaagagtgcattatagaatcacctaatattttatatatctactgcgaagtgcagaatgtgaactagtaaaaaataagatttgatacttcatacaagtagctcatccatgctatttgccttgcctttgactctctcctactttttccttctctctctgtcacgtgtattaccctattattattacccaccatgcttaataattcttttaccaattttcgggcttataacatccactcacagcacacgttttgggcacctcctgttttgcccttgtccttatcttatcttctcagatcatatgttatgcctagtcatttttattactttttactatcaataataaaacaaaacaaattaaattaaataaaattaccctttgcttcttacttatccattcagatctaaacaaactcttatttaattagtaaggtgatacaatcaaagcacttttaaattagagtgaatcacccaacccatgaacaaataaacataaaaataatttcgataagtaatgatctgtctattaatatcaacccacctgttttcaaaaaaagaaaatagaaatgctaaaggacactagtggtgtttaacactctattacgtgtcaatattgctattggtccaattaagtatcaggtctcatataatttaatataataatttataaagagtattgctagccaatcacaacgcgacatatcaaaaatgtactacgcaccactagtacctaatagcaatactaaaaaaaaaatatatcaaccgaccacaccactcctcgttatactataataataacaacaaatcaagagaggtcggcagtgacattttttagaaggctagtttagtaatttcacaacaggaaacctttcttgggaattgggtaaccgcctttgaaggcccagctctgggccccgtccggcccatcccagcccagatttattatttaaagaaaagcccaatgaacaaaacgactggcccttcaaaactattagcgcccgcaccgccatttacatgaggcggttccgttagtttttttgttaagtaaacctgtaaccgctttttcttcttcttctttgttcttctacccacctctctctcctccctcttctccaagtaactctctatatacatatatacgcatatatacatatatacacacaaaaatactactaactctcatcaccctttctgttttgagtttttttctttttgaaatttggagctttttcgttgtcaatctttatagaaagtaggaaatcttagttacccaataatgtgcatgaataattagtattttcgtatacaaaaattattgaactaatgttttgctttacgaattctcagcctcatcatcatcttcatcataatccctgtaaattctcctcttcttcttcttcgatgtataccaattcgtcgaccttaattcaactgactgtttttttcttttgttaaattctgatagaatagatacttttttttttcttctgtaaatcaaattagctttttcgatactttttagttagttatggactttaattcatcaaaacatgagattgtcgttgatgatcgattttccgaagagggtagtggagattcagcatcggagacaattcaagatcacgagtcatcgtctctttccgattgcgaaagtggggtatccggtgttgattcggagcgaaccgggttcatcaatggagatgggttggttcggttattagaaggagacagagtacatggtatcattaagaagagattcgtctcgagtttgggttcgattggagcgaaaactacaatagtagcgattcacagaaacacccattcgagcattgtgggagaagctcggctacattcgtttcagatattctcgaaagccatggcaagcaaatgtggaggtaatgccaatgtcaagttctgttggtaccaaccttcttctaaagatgaaatctcgaagatcttctcacatggcttcgctcaattccacaatcctcaacataactatggattgtacggtcacggtctctatctttctccagatgattatccattggaaaggtaagcaagaaagcaaagcactatttcctttttttcttttaattattattttggtaaaatggtacgaattcttttaattgttattattatttctattttttaaattaattcttattaaaaattcatgaacaaaatatgggtaactattgtttattaaaaacaattaaaaaaaactttttcatgatgtttcagaaagaaaaaaaaattcttgctcatcaagtttattgcgtggttcattgtagactaagtttaataacaataaataaaatatatataaaagctttgattgattttgtcaacttattttggtctaattcggcagagaatatcattatcgcgttgaccattttgggtctcaattgacattttttttattaataactagttatgaaattatgtatgaacgtgttgtaatttgatacagtgtggaaggttcatgcgttgatgaagacggcatacgacatcttttgttgtgtcgtgtaatac

SEQ ID NO: 46346 - DNA, 801 bp, Cannabis sativa
attttaaaaatacatgtatatttttttttagtaattttgaaatggcctaataattttgttgctatctaagactcaattaatctcagaaacaccttgcattagttgttctattttattttgagttgacgtatgagcttttagtatttgtcgatgacaatgaggtgtgcttctaattttcgtggatgatggaacgaatatttggtgcgtgtggagtatgcgatcgggttcctttgtctctttgtctttggctttctgcttagatgagtccttatttgtggtaagttctaacattgtgtagtttgattttgtctttgatttaatttcttatatttagatttcttagtttgtatttgaaattctttcaaactcatattcaattaggttatattttgacgaattaataattatttcaaggagataattcgtttattgataataaagatacttgccattattgtaaataaaataagtaatacaacttttaatctcaatagctgaaaaaaaaaattgtaaattaaggtagcaatttggtaacactattatttttaaattttttaatcataaaaataaaagtaaaatttttattttcaatcatttaaaagataaaaatatattttataaccatttttgttttttaattataataacaaaaaaaaaagtgtttgtaaatttgatttgattttttgattttatttaagttgtatctgagtctgggttgggtccgagttcgagtttggagctggggtccaagttcgggttcgggactagggtctgaattcaaattcgaatttggtctgatca

SEQ ID NO: 46347 - DNA, 1332 bp, Cannabis sativa
tagttaaattatgttggactcgttggtatataataaaatagaataaataaatatgtaaaaaaggaattttgtaatagttttatttattaagttgcttgaaattgggaaggtcacatggaagaaaaagactattcgaaataatggtggagacatgagatgagatgagatgagatgcctgctcaaagttgatggctgtactgtacccctatatcggcatatgcttttctttagtttagtttgttttgagtctgcttatttataacatgtgcttaattaatctactgtagccgtcttataggatttctctttaccaataatatttcttcttaatttttctaatttgggttaatatcatatacacatatactcttcttctctgtgtactgtactgtacactcaataaaattgtgaagaatagatcacctgttttcacattttaattgaccatgtgtatgtaatcacatgcacattgaccggccttttttatttttctacgtacgtaaaaattagttacttttttaatataactttataaaatgttattttgttttttttataactctatagaaaattgaatacatagattttttatttttaaaattctttatgcatccacacgtagcatttaggttggccaccgaatatgtgaatgtgacaatgattaaaatctcaaaatggcaaactaaatataaaatatgtaatttttaaataaataaataaaaaaagttgaaagataaaacaaaaactaaataacaatgatctatagctttaagagaagacttagtcgaaactaatatatgagcatgagatgagttggggccagtaacaagacttggtcacataatgcaaatgaattattttaagtgtgtacaacccaataattcaagccaattttgtctagttttggaaggtggatttcactttctcaattataaattattttcttcgttaattaaatattttttttctttataaaaataatagtaataataatgtatctcttaaaaaatgtatgacagacccacttcctactctaagtctaagatgcgtgccatatggacccacaatattaaattggaaccaaattctctttatatatattttggatgattctatagtggtcccataattttattaaaaaaaaaaaaaaaaaaaaaaaaaaaaactttccaattttcattcctttttttcattcctttcaaaaaaaaaaaaaaaattccaattttcattatttcggttcttgattattggcctggtttataattgaagctcttaagactatttttttttatgagttcttaagactaattaaataggaagctagttatccaa

SEQ ID NO: 46348 - DNA, 1412 bp, Cannabis sativa
agtgattagaatcatttatgaatttataatgtaaacattcgcacacagcatatgaacattcttgaacttggatagctcatcatctaaccgaagggtatactttgtcatactatgaactgctaaagtcagtgagcaatatggcacaaaattgtccctaaaatttaaacaataaaactataacttcctcaaacatcacactcaaagagctagggctttaacttgtatcattgaatactacacgccaactcattaacatattaagaatggtccccaaaacatttttaaaacaaaataagataataaaaaaaaattaatcgtcaggcgatgatattaaaacctaataaaaaaaatctcaatagtaagaatacaacaactctcaaataaataatatttaaaataaatttatcgacaaagtctctgtaaaagttggccctcctcaaaattgaccgacagattaacaatacaaaaaactcttagcacacaatttaatgaaaaaaatagctaatgtacgtaaataaatatggtaaaacaatctatattataatttgaaaacttgaaacacgtcggatctaaaaaatcatttgtagaaggcaagagtacaaaataaaatactttttgtacccattgagcacatcacaaatctcccttaaataattagggcaagcaaaaaaaaaactgtcacaaaagccataaaagcatgaaaaccattaaaaaaaataagtgcaaaaagccagtcatcaaacttaaaattattttaaaatgttttattataccttaaaaattaaattgaattttaatttataaaataaaattaaaaaaaaaaaaccatacaaggcacaactaactagccaattgaaatatggtacaaaaactttaattggctccaaaaaccacccaattctaaatagatgtattcacacccaattttttctttaatttacttcattcattttcaatagaaaaatgataaaagtcacacctagtggtgaaggatcgccacataatttaatttaataatagttaatcacttacaaaacttatttttaggtggtgactaataacaatttctttcaattaactaaatttatatttaatttagacatatgagaaaacacgtggcctagtggcgtgttgcctcgcgagaggataatccagtattaccttcctatccattgtctgcatgcatagatatatttgatattccctcttttttttgtcgtgttcatttcttaagcttataaacatcatcaatggagtttgtttcagtggtctttcagtacgcactaaaacctcgcctcagatgttcagttcttccaaccattcatgtaaggtttttcagtttctccttttatggcatccctccctttcagttcacttatccataatatgtgaatgttttagttaattacttg

SEQ ID NO: 46349 - DNA, 1536 bp, Cannabis sativa
taaaataatttccaacacatttatttccaattacatggcatccagggggaagggatacaactttccatgtattgtttttcttaagagcaaaaaactcattatccatagctttgagacattgagaatattgtttggcttggctatatgaagtaggctcgagttcaatatatgcttgaagtatagcatttcgaaaatttttatggagtctaccataagataggtatttgtcaagggggtgtgctgttgaattttgacacacaaaatccttgaagtggcctggtttattgattattccgccagctttagtttttgtagcagcagcgatttttggtttgttattatctgcagaaattgatgttgcagggtctggttctacaggttgttgctgttgaataccagttgaatgcctgtagggattggctcagccatgatgttggtagatgtggagttgcaatgcttgaaagtgggaggtctgggtgttgtttctacagctgcattaggaggcctgtgcacaggtgttgcaacattggtggggattgcaacagatcaggggatggggttattttctgcagtgtgttgggagaagaaatgatcaagattatggttagcagaacccttgagaggaaatacattctcatagaatattacatctcagcaatgaaaaattgttttggtagcaatgtcaagtaaggcataggctttcatgccattgggatagccaatgaaaatggaagcatgtgctctaggagagaatttatgtctcttacttgttagtgaagatgcataagctaagcacccaaaagttctgagatgatcataagcaggaggtttgtgatatagcaactcatgtggtgttttgtgctgtaggtgaggtgtaggagttcgatttatcaggtatacagcagtatgtataaaatatggccagtagacaagggcaagagaggattgaaaagctaaagctcttgcaacatttaggatgtgttggtgtttttgctcaacaactgagttttgttgaggtgtttccacacaagaattgtttgtttggatacccttttgggcatagaaagaagacatattcaattctttggcattgtcacatcgaattgctttgatgtttgttgagaattgtgtgtgtgaacaaggctatagaatcgagggataagctgtagaacatcagctcttgattttaacatataaacccagcaaaaccgactgtgatcatctactatagttaaaaaataacgaaagccttctatgctatgtatgtgaaaggggccccatatatccatgtgtataaggtcaaagctagaggtagcaaaattattatttgaaaaaacagtagcctcttttgtttagctagatgacatatagaacatggtaagattttatttgaatccttgaaatgaagcattttatttacaaagtttgtagtggacatagagggatgtccaagcctctgttaggctatttttagcctaagttttgggtcacattttatagttgtttttcttctttattattatttttggaatagaa

SEQ ID NO: 46350 - DNA, 1823 bp, Cannabis sativa
  modified_base (712)..(713): a, c, t, g, unknown or other
tttatgccgtattttttttttttttttttacatcaatcaaacataacatgaaatgagtgtgacctatgtcaaaaattaattttaatctcctacaatacactatattttagtggttatatccacaaaatatagtaagactcattttatttttaaatgcctacagatacattatttttttaagttccaacagtaaaaaagtcctctatatcaattttctatatctaaggcggccctatatcatataatattaattaagtaatagacttataatacatatatattgtcccatatatattattttaataaggttttccacatgtccatgttttccaataatttttagatctaatttagttgacgaaatcaattagatccaattgatttcaatcaaccaatcgaattggtatacaacatatatggtaattataagtacagtaatctattcgtgaccaactatgatttgatctgttcacacaaacacagaaccaagagaactagccaagaaattaattaccaagaagaaaattagaattaagaaaaatgagaagcaattaatatttattgaatatctgttattgaagtctataattattagacctttaacgaaaagagtacagatataaaagggtatatataatgtaggtttcagttatctaataataattaactagagtgacctcatgtacaagggccggccctaggcataggcggnntaggcccgtgcctagggcccacacttttcggggatccaaaataaaaaaaaataaaaaaatttattaggctaagtaaaatttaagtgtaagataagcaacaaaaatttatagcttagttggttgaggtggatgacataatgtttaaggtcatggttcaaatcctataacattctttttttgattttttttatgtatttttaagggccccaaaatttaatccgtcttgggcccatatattttcagggccggacaatattgctaatatgtgattaaaggtcaattacataacataaacttttttttttttttttgggtaaatgcatggtttgtttagtaaataattatgtaatcatacatcaagagttactaattttgatatattaatatacaatatatatttatatatttatatatttatatattaggattaatttttagaagtgatcatcatatatattaatccgtagtatttagtcttaattttttttttttgccagggagagtactactatagtctatagctaggtaggtatagcaatggtggaaattattaaaggcgttttaggaattggaaatatcgaaaccccagatggagctgtacatttgttggccccaatcccatgcatgcatgtactaattcttacaatattttccattaattcgacccaatcaaagtagttaacatctgaccattgatctcaatattgcaattaactggccgtgccatatatatacatatatatatagagagagagagagagtcgtggttgtgggtgtcgtgtttggtaggagagtactgattgtgattacagaagagagaatatatatgcatgcaagttgtgcgttgagggagtgggagacttttacttaagaaacccttatacgtactctctagctcacccttccctttattccttcacgtaccctaatataatatcccttataaatctgcaatgcttaatgcagataaaattgtggctggattaatggagaattgagacaacagatttgaatgcaattctgaggtggattgagcgatcaaaggctggcagattcaagaaaggctaccagctctggaaaacaagaaatgcggtgctgtgggaatcagag

SEQ ID NO: 46351 - DNA, 2164 bp, Cannabis sativa
aagttcgggaggaaaaattactaattagtctttaattgtatatatgttatccaaaaaaaaaagtagttgagtgagacttttcattttgtgtattggagcagctcaaacattccccaatagagtttatagctatgttgatgtgagagatgttgcattggcacatcttcaagcatttgaagttgcttcagctaatggaagatactgtttagttggacatactctccacatttctaaggttatgaagattttaaaagagctctctccggctttaaccattcccggaaagtaagttttcgttaccaaaaatttcggctattttgatattgttttctgttattggtttttaaaatcgcgttttcagcaatgataacacaaaataatttttatagttttcacaattttaaataataataataataaagttagtgtttttaataattgacagatgtgaagatgatatgcctctcatgacatcatgccaaatatcaaatgagaaagtaatgaatttggtcaaaaatttcattcctttagaagtgagtctacatgacactattgaagacctcaaggcaaaaggattatttcattaactaaagttttccaagtaatatttaacaatgaaaagggatatcatatacatatgcatataaatgtatatgtttatatataattatatatatttatatagattgaataaaagttactgaaaaataaggcatccttcttctcatcatttttctttatgaacacttttgactttcgttaataccttctttgtggcattcaaattaagaagcttgattagctattgatgattttaagtagatttgttttgaagatgtgaaaccaccttttactcagctattcaaattcaccttttacacactagtattaaagtttatcccacattagtaatgtgtggaaataaattgtcatatataagatgaatggactactcctctcactgtcaattgattttgagatggaatcccattcattttatttcccaaattgtaacaactagtattgttgccagcttgtatagtgtgcaccagacttgacctatgctatggtgtaagcttggtgaatagattcatgggccagcccaaaagaaacattgtaagggattatttcacaaatatataaaaataacaaagaaattataaaaatatggttgtacgaaattttaaatatttttacgacttttgtaattttaattacaaaaaatacagcttttttatgttttactcttattaatttattgtttatttttttgttatatgtatcttattttttttttgttgttgttttaatgttatttagacgttattttcatgttacttttatataattttgttgttattttggtgttgtttctatagaaaatcgtaaaaatgttaaaaaaaagtaaaacgtaaaaatatatttttttataaaaaaaaataatgctttatggaattatcccacattgtaatgcgaccaaatggatcacgatagactcttactatgtaggtggtctggacactagaacatctcagtttgaattcacgatgtaccggctagaaatcaaaattgcaataatattggggcgggagcaaagtaccaaaaaaaattaagagggccaaatataaattttctaaagaaaactaataaaagttttgaaaaatgcaattaaaaaaaaatttgagaggagccaagactcctttccattgccatgggtttgtcctagcatgtacagaagttgtgatcaaggaagccttatggccaagaaagaataatgagagcgatcaaaagaaaatgttgcaaatatcctcaccaaactttgccatcactgcctcaagatacttaatgtagccgaagataatactgtcatctataatatcctacccagtattcaagtcaagatggaaaattgttatatgttgatgactaggattctgcttaagtgttatttatataaatatatactgaataaattatcaaattttatattaatagcaatcagttaaaataatagcatgcaatccaattagagtatttcttcgttggagatatgactgggactagaattagaaaaacatatcaaataatcacccgcggcctaattcccaaattgtttgacaaaaaaattaaaaaaaaaacaaaaaaaaaaataagtaaactaaat

SEQ ID NO: 46352 - DNA, 1289 bp, Cannabis sativa
attttctcactccttactctctcacacacaccattctctctctacgtctcacacaagattaaacaaccctgtctcaattacaatgtttaaatttgttcatccaaataagatctaatagttcactctattcttgagtgtcgtagctagcttaaaagatcaatgtgcagattcttcaacaaaagttattggattggatgatcgttgtttatccgaaaagaaagaatactctaatatgcttcaagaggtattgtattcttttcaatagtttagaattaatctacataaattatgttaagattcttagacttatggttcatattagataaaaaaatatttttattgaatttcgctgcttttataactcttatatgcaccataaaaatttattgacagagcagactgattaaacaattaacaaacgttttttattttcaaacaaatagaaaaagagatgataaaatattggttcaattaaggccacacaacataattacactatatagtttcgatttctcattaagaaaaataaagagtagaacagagacataagtacagttgttgctctaattttgaacaagaaacgttgattgaaatataacagtccttacaaataggaacagcgaaacataggaaatcagttgtagtagagctcgaggcccatgccgtcatggacctcgtagtccttgagagtgatatggtctttgtagatgttgtaccacttctgaattcgaatcttatcagctctggttccggtctgagccgccaccagcttctttaggtcgccgattgtgtcatcctcgttacacttgaccttcaccttctttcctaaacgatcattaagaaccacctcaatcatcttccttctcttttcgaaaccctaaattcccaaagttttgagagagaatattatgaatggagaagcaggaaggaaggagagtatggagaaacaatgaaattctgttaatttcttcgagagaggccacaccacaccaaaatttcttccagatgatttggtttggttggatagtatttaaaggctccactcacccaccgccttatttcaaatattttatatccttactcaaattaggaataggaattactcaaattactaatattatcttttaataaattaattcaatccttaattttatatgctaaagaagaaaaaaatttaaaattaaaatgaaaacaaaaggatttaaatttatcaaaaaaaaagatttaattggaaaacgaagcgatttattagcgtagatatttatttaactgatatttttttaaaaaaa

SEQ ID NO: 46353 - DNA, 1374 bp, Cannabis sativa
  modified_base (235)..(235): a, c, t, g, unknown or other
tactgtggagtcatccaaaaccatatagctgtctcgaatgaaacaactgcgtctgttgcaactagctctgggttgcttaataggtccaatccgagtactttaccagctggtccgtaatatagttgctgattttgttgtcacaaaagtacataatacgtactaaaaagtattaaaacaaatataaactgcataatactcaataactgacatgcatgcatggtatatatatatatanatatatgtatgtatgtatgtattatataaaactcgatgacttactaactaatctggatgggtccacgaccatagtaaaattggccaggaacacagggccattctgggctgtcgatgcaatggggagattgatcattttgttctatgataaagcaatatccccaggcatatggtcctccctcagcagttggccatcctcctgtgattcacaaacataatcaacaaatttttgtaggaaaattatattatctgtatggaattctctgtgttcttttaagtggaaaaattataattaactcagcaataactaaaatatgatgttgcagttaaactaaaattattgtcatataacttaaatcacatttcatgtataaatgaaccagtatgtattcctgtggtttcctgagaagtttggccaaagaacgcagctagttctcttgtacgagtttcaagagagccagtagtatcaaagcccggaaaaattctagcagcagttatgaaggcgtcgtaagtgtagaagccattacttttgcatcgatgatcatttcgataggtaagcatctcctcgaaaagtgaggaagtaatgatgtgactatcatcatcgggagaaatcggaggtggtggcgtgaagggaggaggtggcggtgacggtggtggtgggggagatggggttcgacattggctttggcagttttcaggggcacaataggcatctgtctggccacagtatccagcgttactacaaataaccgtcatcacagagagcatagtcatgttgttttccacacttcccatctaggaatgtcagatcagatccgacctgatccagatcatgtacggatctgtcccgtcccgccccgctagatcagatacccggatcagatccgacccaacttttttttaaaaaaaaaaatatattttatatctaaatttataattatttgcttaagaactaataaggcattattttttcttctatatttttattttatttgttcaaattaataaaaaaaacatgaaattcttatcacaaatgtgatcatctataacctcaattctcgcataacctctctctcctttactcccctatatatacactcatattttcccatttaataactaccctcaataactaaaaaa

SEQ ID NO: 46354 - DNA, 2619 bp, Cannabis sativa
  modified_base (864)..(867): a, c, t, g, unknown or other
aacgatacccctaaagtcattatattaaactatatgggatcttatacttaattagacaatagcaatattgacatataagagagtgttggacacaacttatactttttagtatttctctatatattataactatttttttaagtaatatttgtgaagttatgatatttcgcatgcgaggatatctctcatgtgccacttgtttatatagcagtaatttctttaaaattactagaataataaaaaacaattaaaagaaatactaaacagccacaatagctcttgttttgagttcaagcgatttgagtgatattttttatatattatttagaatagttagtaattttatcacttaaatttttgataatattaattttgtattttaaaatatacagcttattaagaatactcttgaagttttatgtttagaaaaattaagtttcgtctcattattctgtttaaatacttacatatctttgttagttagcaactatgtcgcctaaactttgacaactatcaaattgtactacctcaaaagaaaaatgaaaaaaattccacattttttaaataaatattaaaaaattaatttagatcttaaaaaataaattattttaaatgattaagaaaattaaaagagaaattaaaattttaaaactaattaagcgatttaaaaaattatttattttttattacaaaattcatttatatataaaaaatatattaaaaatttaatttttgccaaagctaaattttacaagaacaaacttgaatctatttttttttcttcaaaattttagatttgtttaagtacaacatagccattttttagtttaattattaacattttttcaaaataattttatattnnnnttgaatttttaattattttttttaagatataagttcataaatataaataagtttgatcttttttgttttgtttttttttttttaaaaaatcttactttatttaaattatttattggatttttaatatttttagtttgatttttttttttttttaaaatacgtctttataaataaaattaaatttgaaatatttttttttaggaataatttaggttttttaagaaaacttaatattttttaattaatttaatatttttattaagttttttttaactattttattaattttctagaattaatagaatattataatttttaaaattaattattttttaataaaaggggacaaaattttattttagtcaaattttagggagtaaaaatactacaatttttaacagttaaagaaacgaaacctgatagaaggagcataattatataattgttatattttagggaaaattttcaacaagccatatatattagggggcagtaccaagtaaggtcaaaagtttaggaaacttaaatgttaattactctattatttatgatcaatataattatttttgttaaaaataatataattatttaaattttatcttacttaaaataaaactgtggactcctaattaaaataatatattttacatatttatttaaaaataaaaattattattattattattattattttaaaaagatataattttgtaatttaagaagcctttgaaatatttatttttcaacaaagttgttactttaaaaaatgtctttatctaaatttctccatcttgtcttgttggaaggtggcataaagatcttctttatggtgtaatgattctttttaacttgacaagaggaggatatcgcatgctgtaattgcttcaaataaaccaaggactttcaaagtttctaaatttttcataataaataaatcaaaaaacttagaagagagcacatattaatctaggatatatttagtcaaacttatttctatttgtttacttatatggggtctgtgtaatggaattgctaagttttttatgaatccaatattttgatgctttctcaaacaaacaaaaaaaaaaaaaaaaaagatgaagaagaagccaatatttggatgatttttctttgatattattgtaccatgaatttcgaataattggatggtgtcgattaagtattagtacattgcatattatctatataaaagttatatttcgcataattatattgcctttatttattaaaaattatatgcccattttagtaagggtaagagatcttttttttttttttttttgttttcattcgttttcaggaaagagaaagggtttgagttatgaggggggtatttttgggattttgaaaaaagtgtctagtaagggtaagagatcagcaattgaaaacattcgcttagcaatataatcgttttattgcttggcgaattttttgaggttgattgctcattagttgttatcttgatttttgctcacttgatgtggcattacttacgtgaacaaaattagcgtcatgtggcaatacaactcaccaacaagaaggtcaagttaacatcttagcaaacggggaccctgacactcaaacaggagatcaagggacatactagcttccccaaagaagttagccgaccacccctggtcggccctatgatcggacagcttctaaacaacagcaaggtcgaccagcctgctccttacagatgtctggccggcaagggaaaggtctggcaga

SEQ ID NO: 46355 - DNA, 783 bp, Cannabis sativa
ttggccaaggtaattaattatcagtatattgctggaagagaattatttacctgacctgcttatgatacgtatttagtttcttatctaagtgaagtaaaaaatgccatggacttttagcttactctgtgtcagcgtttccctgatatttgtttccttgcttgtggactctgttatacatcaattttcttttttcccctaaatttcatgagcagaaaaagaaaaagccttaatgtttattcacattgatttcagctatgttgattagaaatccccttgagctcccctaatagccgcgtttatgcagacatcaagatccagagcccgtcgatcgatttcagcgatgttgattggaaactatggtaaagggtggatctaagcctttggagaagagaatatgttcaacactgcaaccgcagctgccgctgtcaggaccatcaaccacttactccaacatgacagtaatgggtgggtaccactgtgtctcataagccacaacaggcttgtggggatcgcttatttgatgaaggtggttacaagcagatgtgtgtgttcatactgagaatggcaacatcaattatgggcactccaatgttcttgtaagttacaatgttgactctttgaaaaattttagctcaacactgtctcaatatgtgtatacgagaaaataatgaaatattgaagttttttggagttttataatatttggcagggtatggcctacaaaactacaaaaaataatttagttttttgttaattaaagtgaccgaggagatcaatcaaaag

SEQ ID NO: 46356 - DNA, 1027 bp, Cannabis sativa
tttttttattttttccttataaactattgtttattatcttatatatttatattcatatttgtcattttttttgtaatgaatctttgtctatgtatttttatgtttatcggtgttctttggctgatttttaacatatattgtggtttgatattttgttgtttatttatagtttaatactaggtgtgttccagttgttctcgttgtttttttaattttctttgctcattacacttttttagtttgatttcaagaatgagaatgcaaattcatttcatctattcattataaatctaaagttgtatcaacttgtagttatagaattattgagaatcttaatgccaatatttcggcaaatgtcaaggcaatgttctgtgctacccaatttgataaatatttgtacattccatcttttaaattctacttgaaaattgttcatgggcttctgttaagagaggtccaacaacccaatgtgaaggaatttcgggcaaacattcctagtcgttgtggtcgttttagtgttgaagagttctccttaatttttagttttgattgtatgggagattgcaacaaaactgatttttctcaggatttaaacctaattattgacacctatttttgcggtgttaaatagattacacaaaaatctataaaagatgcggtgtcgggttttgtatggggtaatgatgatgccttaagtttgaaggttgttgtgttgtattttattcattgttttcttctgagtagcacgaaagaaaaagagattagtggggttgaaattgacatcattgacagtgggagatgggatgagtattgttggggtagagaatcattcaagttgacattacactcttttaaggttaatattgctcatggtattaataagaaaaatgaaaatgtaggagaaaaagcttctcaaggttggtgttgactcaaaaatctagattagacttctaagccatcgcttgccagattggcaagaatgaaatatttgttaagtaaaaataaagagacacaacaaatttatagc

SEQ ID NO: 46357 - DNA, 1027 bp, Cannabis sativa
taaattaatttgaaagaagaaacaatagaaagaaacagttgagtaattcttttttcgtgataagaaaaaataaccattagttagacgtgagagtttaacacatttttttttataaaaaaaattaaataattagacaatgctatttaaccaaaattaaattatgtacaatttcataataatgattaatcataatttattgttttttttttttttttttcgaaaaatagtgttctcaggtatgatatgaaagaccttgagatacccacaattcatgtacttggttcccttgtcaagtctggaattcaagtgttagtttacaggtaatcattgaaagatagtaatattagaatttagatgaagtaaatatgtatgtgaatcataatataatataatatggttgaattgaattttgttataacactgagaattttaaatgtattatatacagcggagatcaagattcagttcttccactaacaggatcgagaactctagtaactgggctagcaaaggaattgggactaaacacaactgtggcttatagagcctggtttgaaacaaatcaggttagcttagcttacaatatacaattttgtttcaaaatctcaaccaccaccaccaaccaattccataaaatttagcattgagcattatcattgtccttcattcatgctagttttgtccaattaatatatgccaatatcataaaactataattccaaatctaaatgatggtagtttataaaataaattagaataattcgcggcataaatacttaagggtgcgtttagaaagccacatgtaattggatttgtgtgtaattggaggtaattacacaatttggcatgtttgtaattacactgtaactgtgtaattggaagtaattgagggttccaattacactcttcaattctcatggccccctatcagaattgaatgtaattacactgtgtaattactaaaaactttccatattaaatattagctactaaaaaatattattttttcatgtaattactaactatt

SEQ ID NO: 46358 - DNA, 1788 bp, Cannabis sativa
aaagaaagatgaagatttgcttggatggtaatatagttatatacatatgatgctaccaatagaatatgctaagctttaccaatattatcatgtagataatgaatcaaagatgtaaacacaaaacatgcatagctcgtccataatttctcacaaatttgttaatttccataataacaagatgtagtagcaataccaacactttcgattctctcttccgcgaaaattttcgttctcagctttttcttatctcactttcatgatgaaacaaaaaatccatccaaacatatgcccttaaagagttgtgcaaagcaagtgtgcaagtttaatttgaaagaaacaaagcaatactatttttctctatttgttggaaaaaaaaaattaggatcatttcacttcaaatcagtcttatcagtaaaacaagacaacaaagagcacattaaattaaacatactgcagttgcagcatacaacaaagagcacaatgttgccaggaggaaagaataaactaagtgcattgaacaagcacaaaactagtaattttttttcactaatttaggcacttaaatatccatggatgtaagtatctttctcttcagcagggttggtttctaggaacgtacccgtcacgattgatctctcaaggtaaattcttccaaggggtgaaagtatgaagttcttactgaccactgttacgagattgcagcctcttccgttcgaactcaacctagaaagtttgaatatgttagtaaagaaccttgcatatgtgtgtgtgtatgagattaattatcagactaataattttctatctctttctagtgtctcaccactttcttcacccgatctttggcagcagcagttcctccactaacacactcgggaagatatggactgcacacacgcacctcattcatcacaactatagcagtcttgtcccagcgaaccggaagcctgatatcaaccacaaccagtcagaaaaaccaacatagttaactttaggcatcacccactctgcagattcttttgtcaaaaaccaagaacaaattcaacatattgtaccttaaatttgcatttcaagcactgtcaaaaaaggtttaaattaaaaacaagaaatagaaatgatatttttaagcatccctgcatgcacagaaatatattggtcaaccggtttttgctcgtgtacgagtaaaacataaagacaaagcctaaactatatctcaagtccagtcaattgcctcaataacacaaattccatacattatgattatacatagtattatgctataaatttattgtactgtagaataaagtgcataaatgcaagaccgtatcttcttctaaaaaggactttacatgtcttcataaggggaaaccaagatccttaaacatcaaatgctaaggagctaagatactttctaaatcaatcaagtacaacactatcataagctacaaataaaccagtccatgaattcgtatcttttatagatcttttagctttaagagaccaacagatgagttgcctacattaatgaagtaggccaaaatccattctaaatttcaaatctactacgagctttaagcatcaaacttggccacctatgagtcaattaaccaaatcaatccagcttatatcttatattatgttctctagatgaatttaattcctcattccaataaaatctacatttatatataaagctggtgcatcatgaacaatgaactacaataaatacataaatttacatttctaaactgaataaaaacaaccatagttgatatcccaacaaagaaa

SEQ ID NO: 46359 - DNA, 2022 bp, Cannabis sativa
tgatatttttcaaaaaaacgagttaaaggcgggtaccaaaaatgggacccgccaaggattatgagttttttaagttggaattgccgggggcttgggaaccctcgggtggttcaattcttgaaggaaattgtattccaaaagaagcccaatgtgatctttttgtgtgaaactattagtaagaaggaaaaagttgagttcgtaaaaagtagtttgggttatgaagcttgttttgttgttgatgccgtcggacatagtggaggcttggcaatgatatggaagttccaacatgaaggtagactcctcagttatagcactaatcatattgatatggtttttcatttggatggatatccggaatttcgttttaccggtttctatggagagccacaaagaagcctaaggccgaatacttggggaagaatacggcaactttccaaggaatctacgttgccttggtgtctcatgggggatcttaataatgtcttgtctcatggtgataaacgtgtggggcgtccttatccacggtggcttgtagatggttttcaagaagttgtagacgagtgtgagcttctggatatggatcttgtcgggcatccttttacttgggagaaggggaaagggactccaaattggattgaagttaggcttgatcgtgctctaatcactagtgcttggaacactcttttttcggctgctaagctttttaacatggaagtctcagcttcagatcactctccgctttggcttgaccttgcatttcgaaaaccggaggtgttcctcaaaagatttcggtttgagaatgcgtggagtagggagcctatgtgtaggcaaattgttcatgatagttggggaatgtttaataatgatcctttgcaccagaaaataaagtgttgtagcacttcccttgctgaatggggaaaagatataaccggaaatttcaaggatcgtattgctcgatgtaacaaggagctgaaaaaattgaaagggcggcgagatgatacttcgatacagaaatataaggatactcatgcacagctttttgagattcttacacagaaagaggtcttttggagacaacgatcaaagcaactttggttacaagcaggggacaagaacacgaaatattttcatgcttgtgctaatacgagaaagaaaaataaccagattgtttctctcaagaatgacaatggtgtgtgggtggattgggatagtggattggctacggtaatgattgactattatacagtcctttttactgcttcggatataagctgggaacgagtcactaactgtgtccaaggaagagtaactactgagatgaatcatgatcttatggctccgattgaaagtgaagaagtgaagagagctttgttccagatgcacccagataaatcccctggtcctgacggttttaatccggggttctatcagaagttttgggacatagtcggttcggatatagtgaagctggtgcaaaacttttttatgtttggtgagtttccgaataatctttatgatacccatattgttcttattcccaaaaagtctaagcctgagtctatgaatgatcttcggcccattgctctttgtaatgtgatttacaaaatagtctcaaaggtgttaggcaatcggttgaaaggtgtccttcatcatgtcatttccgaaactcaaagtgctttcattcctggaaggcttatcactgataatatcttaatttcctttgagattatgcattatctgaaacgcaagagctcaggcaaggagggagtatggcaaaacttgacatgagtaaggcatacgatagggttgaatggggttttcttcaggcaattatgaagaagatggggtttagtgaacaatggattcatttgattatgtgctgtgtccgttcggtatcctacaatatcctttcgggaggaaaggaattgggtcctattgtgcctacacgaggtctaagacagggtgatcctctatcgccttatctttttctcttgtgtgcggaggggttgtcggcactcattt

SEQ ID NO: 46360 - DNA, 3055 bp, Cannabis sativa
  modified_base (75)..(75): a, c, t, g, unknown or other
gccttatcgctttttgcaaagcgcttctcaattttagcaaggatagttgtggcatcggtgacctcctcggacacngcacccctaaaagcctcaggtatgtcgcgtttaatgatcataagagtcatgcggtttgaacggtcccacttctcataaatcctcctttgctcggaggtactggtatccgtaagaggagcaacacgatccatccttaatgcaaggtcaagatccatgcagccaagaacaataaaaatgttatccatccagtccttaaagttattaccattaaagaccggtatcgaattaaggttagcagatacactagcaacagctgaaaagaacaatacaattacataaataacatgcgcatataagaatccaaataaaacaataaattcaaataatggttagtcccatctcaagataccaaacacaacattaatattaagtctttggacagtaatattaattgtaagcggtattgttgtcgtagtgaatattatatatccttaataaatttctaaaccaaaatttgaattaattgttactcaattattattatttaaactgttatttaataaactgtctaacaatatatatataaaatatataatatataataaactgaaatgattatataatttgtgaaatatttaccaatgtactgtaaagaaaatactctggcctttaataaacattaacagaaggaaattacgattattctttaaaaactttatcagtgtaatagcatttaagatgtcagtgtgcatgtatactttacgcagaacacaatttcagcggcacacacacatttacacagtaatcgagcattacaattaaattataggaatatacattccacataaaccatttgatgaaacaactatgccgacaccacgtatatatccgcaggatgtatatatatcgacaccttaaacaataatgaaagtggaggcctctacttgggaaacccattgattctctctagaaacaagagtaatgatttctcttttcttatcgagagacttaaatcaaaacttgaagggtggagggcgaagactttgtcctatgctggaagattagtagcagtgaaggcagtggcaatggctcttcctgtctactctctatctaccttcactctccctgggaagatttgccatcggatggactgtatggtgagacggttctggtggactggtggtcaagaaaagagcagattctatgcgccaaaaagctgggaaactctctgccaaccgaagtaaaatggagttctaggatttaggcgatttggagacgcaaacaaagctcttgtagctaagttagcttgggaaatggcgtgtaatgaggagaagttgtgggtgaaaatctttaaagaaaaattctgctcttgggaatcgttttgggaggttaggactaaaaatggagactctagtgtgtggaaagggatacttgaagctagatctataatccagcaaggcaccaagactatcattgctaatggaagggatatcaacatatgttggcaaccatggatcccatggattagttatgatgagtttcgaaacacaatggaggaagtcagagaaaaggctccacagctgagactagtagccgatctcctacatcattcgcagacaagatggaatgagaggtatgttattcacttatttggaaggaatttgggggagttgattataggaattaacatagtcaatgggctggaacgggatacgttgattttgaaaagggtggcattgggaaagttcactgtcaaagaggcttactggttggcaaatgaaagtcgttttgggcctgtgctttcgggatggagattaatatggtcaaacaagctgcacccgaggatttgcctatggttgtggagaatgtgcaatggagtgcttcctactcgcgacaaaattcgaagtggtaatgatatggagtgtgtgatctgtaattgtacatccgagactcctaagcaccttttctttgagtgcaactttgcatgaggtgcatagtttcgcagtcctttagcagtgagaagtgatgagattcaagggaatacgatccttgataaagtggtgaacctgtgtaaagacagtgaaggggggagcttggagaaaatccttacttgctgttatgttgtctgtgatgggatttggcggtatagaaactcactgatacatggtggaaagcagatggagctaggccgttttttggaagaagcaaatgcaaagtttgaagagttcgtttctgtgcaaacatgatcttgtcaacgctccctcagtcctggcaaaaggattggtggaagtggctcccttcaattcaaattttattgtcacggatggggccttcaaggatgggtggtgtggaatggcgataatggggaatgactctcgacaagagaagtggtacacaaagtggagaaggtaaatctgccttggatgctgagttaaaggcaatcggtttggccttggattgggctgttgagatgaattggaggactttcattgttttctctgattgcaaaacggctgttgatgctttacaacaaaggaaagtaccagattggagagtggccatttcgttctataatgtaatggaaaagatgaaaatgtttgagttttgtaatcttaagtttgttaagcggaactgtattgcttttgttaatgacctggctattcaagcgaggctcctaaggttggttgattatcgttgtaacggggagggattgccccctgtcaatcctactttgttttaatcctaatgaactgaggttctctttcaaaaaaaaaaaaacaataatgagatatatattttcccattcactaaattgcaaatagaagaccacaaatactactatataaattctcaaaaactaatttagggatgctctgataccacatgttaggaatactgtaaaacttaatttagctttaattaattcaagagaatcaaacaatagaatataaattagcggaagcgtttcagaatccatataatcgattttgtaatgaccttgattggcatgatcttctaatttgcatcaaaacctttctct

SEQ ID NO: 46361 - DNA, 824 bp, Cannabis sativa
tagtatctgaatctccaatcttttgttcactagttaaagagtactccaggttcaaaagtgtctgaatagtgactacggttgaattgaactccaatttctttcattatgggcatcttcctgttgatatctcatgaaagaaggagagaagtataattgattaaaatgtgtacaaatcaattgaaatgaaaatgagtccagtgaggttaatcataaaagagagaagaaaaaaaagacctgaaaatgagattggacaacagctgcaaaatgaacaagaatacatgatatcaaacaaagaagacatatatatgtataaagattagacactaatgtagctgcaatgcaacacccttgaaatcagaggaccttgactcccactggacaaagacacaacccaggcatttgctgagacaataataagaaacagaatcacaaaaactcagttaattttcttttcatgatactaagataggataataaaagaaatctacaaaacatagaaataaatatcaaggcctataagtattgaagggtcagaacagaacacttggtaagtggacaaaccttggcaaagaagccagaagacaaagaaactcattcctaatagtaataaataccatgtgaaacgatcaaactcaattttggtacattttgtaaaaattcattatttcttaattacagaacccaaacaatatggaaaatctatgtgaccaacatgaactacactacaccagaagagcttgatataaaacacagaaaattgagatgagacaccttcgaagttgtgagtagtggattatgatagtattactctattatatgttctc

SEQ ID NO: 46362 - DNA, 1443 bp, Cannabis sativa
ggtgcagggctagggacctttcccaagtcgactgctatgactctagactactcaagtccgagttattttctttcttgtcatgtgtcaaacattgatgtccacgtcactagggtaagtttttaagttaacacatgaagatgtcaaccttaggtctaaaaccctaggatgcgagcactgacaccaaggaatggttaatgcttgcatggcattcttggtgtgtcatggggtactcaaggtaccttgtaatctatcgttcaggttctaaccccgttggtcttttcgagtcttggtcaaagtcttatttgtttacttgagtattttcaagttactcgaggcttgtggactctcgtgggggatagccattttattttattttttcgaaaaattaggtttaacgaggactatggtctcacatgtaaaaattgtatgattttttttttttgttaatatccatacgttgctaaaattacaaaaagttcaaactcttgttgccaataaatagtcttatggcctcgcatgtaaaagatttgattttttgtgaatgtccatacgttgccaaaatctagagagagctcaaacattctaataatccccaatacaagtgcaagttgaattctatgggtgcgtttaataacacttttttaatcagtttttttttgttaaaaaaaaaaacagaaaagtaaaaatattttccaaaatgatcatattctataaaactgtttttacttgttaatttttttaattaagaatctaaattttaaatacaataaaaattcactttcaaaatttttttaaataggtttttttaattaatattttagactcggatcccaacatagaccttggaaatcgaacctggacctggccccagacttggacccacccccagtcccaatttcgaatccatcggacttgactaattaaataaaatcaacaaatgaaaatgaaatttacagaatacatttttgttttttgtttttaaaattaaaaaataaaagtagttatataacacatttttatttttcaataataaaattttaaaaacaaaattttacttttatttttatgattacaaaatttaaaaataaaagtgttactaaacatcattataataactgtatttttttttttgcatatgttgaaaaaatattgatcttttaagtcataattaccaattaagtcaaccaaaatagtatttataatcataaatcaaaattggttgagtctttttttggtccgctagtgtaataagaagaatcaaataataaaaaataagaagatgaagagaaagttgagagaaaaaggtcaacttcattaattttgggcaagtctgagttcatgatttcataagctcatgccactttgtcgaaggttgatcttgacattttatatttcataatgtgtttataaaaattaagcttaagacaaatctaagtttgttag

SEQ ID NO: 46363 - DNA, 1270 bp, Cannabis sativa
ttttttttattattattaaaataatcagatggtgcatatcccttcctcactcttttagtatttttgacaattttaaagaccacgtaccaataatagagcagggccgacttaattacaaggcaacttagataatcgcctaagacctcacaaaatttaaactctacattttaatggtaatacatattattattaaagtattattattaaataccaatagcacaacacttaaagatgacatcctacaattaattaattaattatattctctaaaatttatcatttaaaattatacaaaacttaatatttaattacacttaaaatactatgtcccgtgtctttttgcctttatcttgttattattattattatatgtggtaatacatattaataataagtcaaagcgcacgccaattgggatttattgagaaaataataatcaaaattatgtattattttcttttcatgctagcttctacgtaactgtgaaaaaagtggtcctcctttcctttttcttttactttttattatttgggtctacttattatttaagtgaaataataattaaatgggtagttagtggttgtggctatggttagtacgtagtagaagtattagatttagtggtaatcttatagagatagattaatattttcaactattacatacgtgtggacttttatatatgtcccaagaataattcaaatgataaaatgctagatatacgtacaaaaattgtacataattttatacaatgattatatataattttaatggttatattcttcagattaaattatatattcttgagtatagaaagtgtattctaaaagtatgttagagttactataattatattgttggactaaaataggctcatatgtatatttgtatgtattgttatacaaaagtttgactcaaataagatataatttagtaattgtggatcataatattaaagtatgatagactaaatctgtaaatatctttaagaatatttttaatttattaagtgattaaattaaaaataattaaaattaataacctagtatatattggtagtagctctcaagaaataagagtaatattattctcatctttcaccatgaagagagaaataactaaagaaccctaagtcatatatactcgaaagaatattatttactatttataaattaaggtactgttagaaatgttgtgaatattttaacaaaatatataagtgtcttagtgtgtgtgagttggaaagagtcccacatgggatatgaactct

SEQ ID NO: 46364 - DNA, 2349 bp, Cannabis sativa
  modified_base (1134)..(1135): a, c, t, g, unknown or other
cttttaacaaaaactagttttataaagagagttctcagaaagcagaagaagataacctagctatatcttatatataatattaatatatataaaattaaaagcatttatattagattgatttactagccaactattttataaataaataagtttttttgcccttgatattattattttaaatcttgctcattgaacatttttgttagttaaaaattttcctcaaaatattcttataatattgcttatagttatgtcttttctatcagtttcagtcttatatatatatacatagctaacaaaaaaattgtgttgattgacactatatatgaatatgatcacttatgtaatattgctacatcaatgctaaatgtataaatacaattacaaattaatcttaaattacaattaaaataatttaaaaaattataaatacaaaatagttaaaaataataaacacatcaattaaaaaaaatttaaaacatatagcacaaagattagagatatatagcctaagcatagtgtgtgtatatatatatatattataagggtttcacatatattataagctaaaaatttattaggggggcataatgaatcaaaatcctcagttaaaaagtgatgtctcgtaccgtgacaaactaatttaaatttgacacgttaattaattttttatttattaaaaaattaaacctttaagtgagtcaacaaaattagttagcatatttaatataaattaactcacttaattaatttatcaaaattaaattagtttaacacagtatgagacatcaaaaatcgtaattctgggacttgtccctaacaagttgtaacgatcgaagagtatgtattttgccattgcccatatatataagcactttgttggctacgtataacacaaattgatgataataaaaaagtataattcagtataaaattagttggaagagaatttttaacaaacgaaaaatggtaatagttagagataatcttatttattaattaattatgcatgtgaggtaatatgcatgaagctgcagatatccctgtgatcactaaataataatatgtttttatatttatattatataatagggaatatatccacatgtgcacacatatatatatatatacatnnatatatatatatatatagatatgccttatgaaaagataatgacgtgaaaagatcaaatatgcctctgtcaaatccaaaagcctggctttgttatatattactagctgcgactaagtaataatttggaataaataaagggtttacaaaagggaatcaccaatatatctatctacctatataataataatatatgtataattaattatattattttctgtctttcaatatttttttatttaaatttagtcacaatataacttactataaaggtgagaatttttttttattaattataaaacgtcattcttatattatcactacaaaaatattaatcataaaaattataatttatatagtgataaaatatatttttaaaattaaattaataataatttttatttaaatactatattttaatcataaataattttttttatgactaaaaattacaaataatgaaatttatttataaaaatgtgacaaaattttttgtagtggtttctagtttcatgtaggttagattcatttcatttatctaatattaaatagtaatgacaatattaaaaaagaatataatatcaacttaattggtctagattccactttaataccattcaaagtctgatcatgcatatataaaaagcgtgtttataatatatagttcaactttaatattatccaataaaaaatatatagatacataagctcaactttatattctaatatattttattcttaatatatagaaaagtgatatttattattgttcaagaatcggtgttggaaaactatcattattagaagataagagtaattttgcagggattatggaaattgtgaccatgaaaagaaaaacattatatgagctgggatggggagacagtcaacctcaaattaagtcaaataaaatatatatatataaatatattgatcaccatacgaagtagaatcggattagcaataatttataaaaattattatattaaattatattaaatttaatatttaattatgttaataaggatatattttgagttagatacaccaataattatagctacctcaattaagtgtgtacaaatgatttttagctcgggatagctctttgactacaataagcaatagatcatactataagtataaaacaagcccaaactatccatgcggacaaacagtcctggataatttggagaagcgtatttaagagtccttac

SEQ ID NO: 46365 - DNA, 2772 bp, Cannabis sativa
  modified_base (2290)..(2291): a, c, t, g, unknown or other
tcatattaagccataattaatagacacaattgaaatcgaaagccttaacttttattcattgttaatttgcttattaatttacttgcttcttactttcaccgtgtttattgtttcctagttttaagttttctcttcaaattttatttagccaaatagaagtaagaatttaattttaacgtacttaactacaatcatcgtgggatcgacctcactttttgtgagtgtaatacttgttcaaaacgatatgtatacttgcgtgttgcaaaataccacaacaatctagttacaacaaagagttctataatagtgcaagtgtgttttgttcacataatataaaactcatatttcatacatttaacacacagtttggatccattaaatgaaatagatgtttacaacttgtgaaatttataccatagtgttaaatatattctagaaattgtaattaaatttctatttagaatctaaaatttaaagtcaaagacataaatttataccaaatatttaatgagtaattatttaagcttggacaactactataatactaattcatctctatgttcaagtttccctaaaaaacctttgtaaagaagtacaaaatgaattatagaatctgaattaataattcaatcgaattatattctctataatacatgttcatagaacaaaataattggtgttaataccctatatttgtttgcatagtacttctaaatgctagatatcaatttcagatcattagcaaactagcgaatgtttaattgattttttagtagcatggtaagtaggagattttttctaaaatttgaggattgttatcattacaagatagaatatttagaatatattcattcgtgccactcatttttttataagaaaatagagcaagatcataagcagatgtttataaattgtcttatccaatgatgtactatcataagtaatttcttaatgaaaaatctaataggaaatataaagagcaatttcaattaaagtaagaatccaatgatatcccgtttagacgagagtcaaagttattcttattttatgagtttctattatttcaacattgtaaacactagtctaagctgtcatttattgaggacgaatcatttagattttgcacttataaaatacttattagttgagatctaacactttttgatcatctaacggatgatcatcctttggggatgatcccatttaaaacaatcaactaagtgttcaacaatagaattcaaaaaatgatattacataattaataacagaaatcaaagttggttcaatataaattcatacacattttctagaaattgtaagcatttattaagtaatgaagatataaaaaatataaaacaaacatatctcaaatatttttcaaggtttttaactaaattctatatagtatctcggtaagcgagagtcaaagatacatcaatcaaatagagttgccggctcatctaaaataaatacactttagcaactatttattctatcaaaataagaatctaacgttgtcccagtaagcgagagtcaaggttattcttattttatgagcttctatcattgtttcataaatgcaacccaatttaagtagtcattaaaaggaatgaagctcttagaatttgaaattacaaattatttatctctcgagatcttacgtgttagattgcttaatggatgatcacccgttgggggacgatatctagcgcctcaaggtcccattaaaagcaacaatcatgtaagaccaacaatgtagatcaaatgtcttataattaaagctcattatttaagaaaaaacaatgcatatttattgcaatctatttgttttaacatttatattcatttagatagaattactaatttagataaactaaatataaatttggttatcctattttttacaattttgacgtggtaatgagttggatgacacgtgtcttgcgttttcctatctggacggaaggaagtattcctagcagccctcaaaggtttatataaatgtttatcataacaggatgtccgagctgagtaattaaaagacaaagtataatctagtgatcaactcaaatgcaccgagcagcaggatatgtgagttgacaattttcaagaagataataagtagtcttctctcgcttccaagacacgaagataatccctatattcgtgggattaagttagagaataaaggaaatataccttggtttcccattccttgcattgtaattatagaattaatatagttttctattttatttattatagattaagggaaaccattcttcatgtnntaaggtcctataaatagtggcataatctcactattgagggacaaaaattaatccagaagaatgctctagagagaaaagtgatctaagagagagaataactcagggatcaattgtaagagctttagagaagaagaacactttatttattttttctcaagtcaatacaacaaaaaggagagtaggctattaccattcttacggggtcaaacctttagaaaatctactgttctttttaccttattgttttttgctttctattatttgctttatttaattgctttatcttgactcactgtcgttggctagaagcgataagtcaacattttggtactttcattaagagcaaaaacacaagcttttgttttaaagtcttgacgggttaacatgatggttgtacaaactcgaaggggaggccttaatgatcaaggcgatccaatggtgaacgatgcgaacatgcaaactcctagaaacacgagaggac

SEQ ID NO: 46366 - DNA, 2895 bp, Cannabis sativa
  modified_base (26)..(26): a, c, t, g, unknown or other
gtgagatttactacttgattgcgtanacttgcgtagcgtttataaatttaagcaacatgactctatagcataattacaatatataattggagttgcaaccgttcacaaatgtctttaattagttttgaattttaatctattaattagtgtaaaatctctcaacgcgtaaatgatgatagtaattagggatgaggaaaatgtttgttcaagagtagctaatactattagcatgccgccagtaataataagtaaaatgggatctcatacattatattataataaaataatgtatctcactcttcctttgtttatttaattttcctccaacatggcctagttgcagtgatatctttctttctatgtatagctgctaatgctaataatatgctatatatatatatatgaaattaatgttctaaatcgacagacttttccttacgttagtaggtccagtacaaagacttcgtgattgtgacgcagattaattttcacaccatttattagatatatagttgtcgcagtcatatatatgatgccagagctgctcgttctatttatccaataattattaaaaatagtatgaagaaattaaataactaatatacatcaatacatatacagaaatagcattataaatagagcaatttacgtactataaaatttgattacatgtttaatatatatatgagatcacttatgtatgaatactctttctacgagagatgcaccttctgagttctgatcttcagcactcttttttataaattaatcatacattaattttttattattttatttcgggcctttttaattataagatcagaacttttttatatttctatagggaaaaattaatttacaaaacttttaagtttgatatataggtatatctttattggttcgtcaacatggtgcaaacaatattctctctaatacccatttgtgacttggtcctcccatatctgtaaataggtatttgttgtgctagcctcacttatatttttttgggctttttaatataaaagttgtgacgtacacccatagaaaaatatgagttgtgtcgtatatggtacaacaattttataaggtatgctcgacacggcccgtaagtccagtaattttgtatcatattttattcggagaaccttttttctcaaatagatcaacttatttttttatacgggctcaaatttatgttctatatttttgtatttttattacaatgagctaaatactaaaatatatgtgtactttatagttttaacaacttttatatctttttcaataatagttgcacatgtacaattatataaaaataattataattattataatttgaatattacaatcattttaattgataaataatatttatcaatgctataattatcaaattattgggcttcttaatgtattatgctttcgagtaatctatttgtgcttacatatttgtttaccacaataaatttactaatttttatttttatattaccaattatttcagtataacagtaaaatacaagtcgattccacgagaactattatcaatttatcattcataaattagtaacaagaattaaaaaatgagttcttataattatataaagattaaacaataaactagaatgcaaataaagatattacgctattaagaaatagttaagagtcaaatctctccaccctcaacaatcatattcaatattattaataataaaaattattctgatttcccaattaaattattaactccacaaaaagcgctaagcagtcaatttttcgactctttctattacgattaatcttcaaggtgaaacgcttaataattaaatcttttttattaagcaatagatccacgaagcatgcaatctatttaaactaagaaaattattaatttctatggagataagttaatttatttaacaaatcaatagagcatataattcatttaacctagattttattttttatcacaattaatgatacatttgacattactattataattgcaaattatcactttatttaaaatcctaaactattaggtgagaagtaattctaagataatagtataacaatgaaaaatcttaattagttgtacagctaataagaattcacaatattcaagaatagaaacaatttaatatgagagaaatcaagaataacatccattattaataatcaaaaattcatgttttaggattttaaaataacttacgcttaactaaaaagaaactactctataatcacaactataatcataaacataatcataattaattaaaaaattaaagaaatttgggggaagaaaagaacttgatgaataattagtgatgtaatctccctcttctccatttgttatgggtttcttcctcaaaaatacagtctaaaagttgctaaaaacgaaccctataagtcctataaatactcctaaaaatcctatgatttgaaaaaaaagataaaatttgaaaaaataattagaatcatgctctcgcagcgaagggaagtgctcgccgcggccatgacttgttgccgaaatattttgtcgcgtgttcagatttgtatattggccatgacttcttcaatacaactcagaattggatgattgaagatgttccggaaagctaagaacgagatctaaaattttcatgttcagctccaagttcagttctgcttccaaagtcgtcgaaatttacaataagttttgccttgtaaaatcgagctccttgacttccactatttttcattaaaatgtgctaaaatccatccaaattaatgactccaaatgcatgattagtctttatagtctaataaattataatcacactaatcaatactttgaaaaatcaatttaagaatattaatacataaattggttatatttataagaaaaaatac

SEQ ID NO: 46367 - DNA, 1591 bp, Cannabis sativa
  modified_base (650)..(651): a, c, t, g, unknown or other
catcatcaaacttttaatagaatgaacattttcttaattttttataaaaggggacatttattaacataattattagatttaaggccattttgcatcttggccctaacatttatactataaaaagtaataaatgaaacacatgaagcaaggttacgatatatgttgtggaagtctgaaagtttttgttgaagtttaatccatatctgttaactatgtgcacatgaaaattttaaattataataatataataatattaaaaatgagtatattggaagaagattcaaccaaaaaaaaaattgttagtacgtcaaaatgttcctaataagtgcatctctaatagtagcatccttaaagaacgctaaaaattaacacattatctaaaaatataatattttattttatctctcttccgcatcatttttggtactcttactactaaaaacactccaatgtatagcacttttttaaagatactataattatgatctcacacattattatttaatatatatataccaatttttagctacaataactttttagcctcaattaatagcattgatgctacaacatatataacatccatgcaaatttctataatgacatcctcttctctccaattgtatagcatctcaatattttaccacatnntatgtccacctcaccaagcatcctttaaatttttttcattagagatgctttaaggcttagtggacttgagttgcgcgattgcgccacgaaattagtgtgtggtgtaataagttccgaatgagctttttattccacaattatagaatatgatactattagagttaatttcacattgtcaatgtgtgaaaataaaatatcatatatatgttaaataagctacttttcccatagtcaattagttttaagaggaaatctcatgcatcttatcttgaattcaaacatggtattagagtcaaactaaaaagtcttcagtatttttcttgtgcggacgaaagcatcagccctcagtctgggtaacacccccgacctgcacatttctgaccatcaactagacctcggcaggagattaggaggtcttcctccttttcttgcatgggttctctttctgacaaacttgcgtcggtacgtaactgccgtgcatgtctcttttttcagctctcaatgaaagcgctaaaatatttaccgagtttttcgacaacgaaatatttttttagagttttggaaagtaaatatagaataaatagcaagataacaaataagagatttttatgtggtttaggcgttaactatccttagtccacgagtccattttattaggctcatcggccggtaactgttaatacaagtagagatacgatggattgaaactcccttccaccatgttcctcttgaagaagacgaagcttagtagaaatattttggagttgatagtagggttacaaaaatgcattttcttaggatgaggaagaataagtcttccttctcaaaaccccgcggtcccctttccttgtacttttttgggggtatttataggccaacttctttgtatgtcctgcctgttggaattattttaccaggatgttagatctactcacaagta

SEQ ID NO: 46368 - DNA, 1226 bp, Cannabis sativa
  modified_base (1075)..(1085): a, c, t, g, unknown or other
tttgtatatttgtgaaataatccatgcatgtttaattttttggaattttttcaaaaatacaataataagtgaaattttaatcacttctacggtaatttagtttttaatcaaaaaaaaaaaatgtataagctacaaattttaaatcaagattacttattttgtttttttgtcatatcctcttttactggcaatcaaaacccgaccaccccatctttagcggcaatacgaattcaataagctccattttacccgtaatcaaaatttggtgatctctattttttgcggcgaacctgtttatatacttaccatacacttttattttgtcccaatatcgtcctagtgtgagatatctatatatgagagaagaaagtcaccattcaagatctctttgtgaaattctctagacatgcaaatggagaacggtaatgggaaagaaagccatagccatcataataagtatagccaataaaacctcaaaatggcaatctaaggccaagaagagcacctgtgttggacagtgtgaagaactttgaaacaatagaaaataagagtaaggtcgagagtgaacatgtgttggatgatatgaaaatcttgaaatgatgaagaagaagactaatgcaaagggtaaacataatgaagaagactaaggctcacacaaaattgaaatgggacatcctacagttgaaattaaaagttgtattttactgtaaaagttaaaaattcaaaatataaaagtaaaaagtaaaaataaatacagtaaattggaaaaataaatagcaaaagaacaaaaaatgagtaattatttctaattttttttcttttgatgaataagaatatattgaataaccagcaatttacattactatagcatccaatcttatactacataaagaatgattaatagtctaaattgttatccaaaaaattatatctcatattcttactacaaaaaaatcttacttttatttacaataaaactgataaataaaagtaaagaagttgtgacaaattataaatcatcattcctatattataattaaaaggtccgtggttaaaggtattagtcacaaaaatnnnnnnnnnnngtgactaaatgtgtttttatttacaatatttggaacaccaacaaatcattgctctttattgattgagcaaaaacatgtacaatacagtcgacatcgattatataaagagttctcttaaagtgttttaactctcacactctt

SEQ ID NO: 46369 - DNA, 2388 bp, Cannabis sativa
gggggtgctttgacgcctaaacaatgtgctcatctaaataacctgcggtttgagaactttattcaaacgtatagtcaatcacagtcgcctagtggttcatcttctcaaagttatgtcgctcctccataacatcaacaacaacctccttcgcaacaacaatttcgaccttcttcgcagcaacaattccaaacaatatcgcatgcagcaaccccaatctttttctcaacagcaataacagtctggtccgccgttgggaaatcagttcttatatagaactccatcagagtctcctctgctcggctcaaattttgatgattttgaattatttgggagttcgtcgcaggaacaacaatttttttcaactcctattctcaatgaagctgagctggggaatctaacactgggttcatcatcagagcaaccatatgttccttctccgccatggccattggcaactcgtaatgataataatgcggatcaagactttataactcgaaaccttaagaaagattttatggaataatttgtttatattttttaataatttagtttaattttgagacaataatgtaataaaattaaggttaaagtagtttatgttggaacatttttaaattattaataaattttattggatttaaattataatatttataatttgattgattatatttaaattattatttatatatttataattaattatttatttatataagcattaattatttattaatatatttatataatattatttataaaattattctttctaaaattattattattttttttatatttaaatgatattagaagcgggtattagggcaggctcccgctgctaatgctctccgtagtttcgaagtttgaaactgacagagtgtattagcagcgtggttccgccgctaatggtctgccgctaataatagtattggcaactatttattagcaggggaactttagtgggggacttccggcgctaatagcctattgcgaccgaatggggggctattagcggcagattggtctgcctctaatgagataatatgttgtggtgaacatcctgaatgagcctaactcaaactatgagtgcccatgttgacattttaacctggtcagtcgtcatcggtgatcacccgagcatctaaaattatgcctaacgccctagaaatcaagttctaggcactcacccacgaagtgaaagatatttccggcaggagctgccgtagctcattttacatacttttcattctccctacaagatcatggcttctctctccttactatttcactctttaaatattgtgaggtgaagctacacttaatcattttttctttacttctcttgtaagaaaattcactttgacgataataaaagcttgaagtagaagtagctctatactgtcgattcacaaggagtgaagtactataattttgtggtgttccctttattttttttattctttcggaggctgctaccacttattaaacggcatgaaattggtcacttttcagcgtcaatagttactccttaaattattcaataagttgatttagaattgttaacgaaatatttttttttttatataggacagctttcttagagaagcttttaaggctgctttagaatggttgcctctggttctataccaatgccaaggtcagacccaatagtataatagcattgacgtcgataggaggatttgataactgatgctataaggagattaacagtgttacacgagaactcattttttttccttgtggatgaagtgtagttttgtgagttactaaaaaaaacattcaattaagtcagccacatttgcaaagtaaattactttgcatggtgatttcatatcaggtgattgaaacattgtcaaaagatattctgccaaacgaaatttataaaagatatcgtgccgacaaagtatgtaaagaagatttacaattactagttaagagcaattagtttcttaattagtcactagtattaccgctcaacttaatatttagggaaataagttaataaagatttgtttgaatatttattcctttttcgagtaaaatacaggtgacattaaataagacaaattactttagaaaatcccggacataaatcaaacaggacaaaattagcgaaacccactttctttagtaattatcacgtactttgacaactgattataaaagtagaaacttgagacaaaagaaatctcttcaataagatcgtaacccaaataaagatatttctaattacccaaattgggggtgtgatcaaatatatatggcactataattagttcatacagccaaaagaatcaacccatatatagatcaactgtgactatagtaataactacatacattaacaccacactatcattttca

SEQ ID NO: 46370 - DNA, 1921 bp, Cannabis sativa
  modified_base (1545)..(1550): a, c, t, g, unknown or other
  modified_base (1697)..(1704): a, c, t, g, unknown or other
ttttttattttttatatttaaaataattaattttttattttttttaaataattttttacgtggaccaataaaattgttccacgtgtatactgcgtccagtccaacatgacacttaacacctaaaatggacaaaaatgttaaattgctaacagaatgcgagtattacggttttatcgtccaaattttggtttttaggttgaataaaactaaaatgaaaattttggaggttttgccgtcatttaccctatatttttattgaaatatgctttaggagaattattaaacaatatgcttgaagaaaaataaaattataatatttgattgggcagccaaatgtgaatgaggccatgacattacttttttacataatatatatatatatatatatattgctaactaacaaatttatttcaatttttttaatcatatcaaattatataaatttttgtaattattaaatcatattataaatgatgaatatagtgaagcattcagtacttcacccccagcccctggcatgcacttgcccattcttcgcatgttgaaatacgtatggcaaaatcgtagaaaatgaataatatacaaattcaaattggacattcatatatattcattaattatatgtaattaatatctataaataaatatgatatatatatacagttgttcactaaccaaaatcattatattcgtccaggtaagcagtaccgaacttccaatattctatatatataatgatatgcactttatataattatatactatataaattctacaacatactaaaaataagtactttcaattataaatataagccgtggtttttatagaatttgtgtcaaaatattgtagctttgtcaacaaaaaaaaaaatcatgaaaaatcttcaaaagtatgaagaaaatatatatattcttatatatatataactggttaccttaaggagagatatttttttcgaataaaaggcatttttagattaatatcaaaaaattaagagaaatagtcattacataaaatattatctagtataacagaaaaatcgatcataccagttacattcttggcgaaagccctcttaactacattatagaaaataaataaaaaattacaacttaacaaaaaattagagagatatttatattgaaacacatagttaccaaaacctcaactggaacaagtttccttcagcgcattgataatcgtctcaaagtcactcttaatcaacacaaaagtatgcttcaaagagaccgctgattccaaggctagtaaataggtcgtaacttctctaattagaaagtcaaagaagttaagcatatttggttgggttagcataaaggaaagtagttaatttaatttgtttttcttatatttttagggagtaacttgtggtataacttctttaagtggtcaaatttttgcaactaacctccaaaaccccctaaactcgtgttctgttagcagtttaatatttccatccatttttagatgttaatttccatggtagaatgtctacgtggacatacacgtggcacaattttattnnnnnncgtaaataaatatttaaaaaaattaaaaagtaattattttaaaaataaaaaaaattctttttctttaaaaactaaaaaaataattttaaaaaaaaattaaaaaaaaaccctaattcactcacgccctcctcctcctccttcttcttnnnnnnnntcttcttctctgctaaaaaaaaccctaacctaaacctaaaacacatttctttcactctctctctcttaccagaccccaaccccgaaaccccttctgctcctctcctgaccaagtacctcggagctaaccgcctcatagcagtcgaagatgtccacagcgacctcaaaaagaccaaacaatcgctgagaataatgcacctctctctccctctgttcat

SEQ ID NO: 46371 - DNA, 1095 bp, Cannabis sativa
gaatgtgggcttctacaggttggagcgatacaacatgagtattccctaccgcacgagttccatgaaatacacgcacgacttcaatgactactatttcttcacttccagcttcccgttgaaaagggtttctacccttagtttggattttaatcttgcaaataagtctcatcctttcctttggatcttagagttctatttttcctcatgtctactgtattatgatcccttactttttatatttgctagacttccttccccattcgcctctgactccggagttggaagagaggatagatttttacaagtccttctcatccaaggagctacaagtagagaaacttgtgaccacaaagaaccttcgggaggtgggtcttatcgcgccacatatggatgtggctcatctttctgtgaaagaggcggtctaggatgccctacggggggacccagacgagggtaaagaggccatcatggttattactgctaaggaggctttaaaggcagtaaaggacaatgagcaatggctgaaggattggagaagacaattccctgaaggcctaaacgaggctgaagaaatttccatctacttcaaggaggtgatgcataacataggtgctccgggagtgagctcttctagtagtggtgagaaacccttccacataattagggctcccactatgtctaattttgagacggtcaatcaatgtgaatttgatccatatttcttgaatttagatcatcataagtgttgtcgaaggaatttggacaacgcccaataaaatatggatttaatcattaactagaaaaacaatgagtattcaacctagaacagtgaatactcaaacaaaatttcccagagaaatagaaagtaatgaaaacaatgaacacaaggaagtatagtggttcagccagatcttggtctgcttagtgcactgttgcaaggttttgtgtcctgtcttattcatgttggatcactcctttatatacaaaggaagtgttcctttagttacacaaaacctaattggttatagaaccattttacattaaatattaacattaaactgaaacataaatggaataaatgaagaacagtttaaa

SEQ ID NO: 46372 - DNA, 1449 bp, Cannabis sativa
tttgacatgactggcataaatcctgataccatcacccacaaatgtgaacccaaattgcatccccgtcagacaaaagagaaggaagattggcatagataggaagaaagttgtgaatgaaaaggtgggaaagatgttgaaaaatgacaccatcatggaagtactatacccggcctggcttttgaacccagtggtaatttcgaaaaagaatggaaaattaagggtatacatagagttcaccgacttaaacaaagcctgccctaacaacagtttcccactgccccacattgacatgctgattgatgcatataaacttcatagccttacgaataaatatgttgtaacctcaaataatttcttatatatatgttgaccttaaatttggtcaaccaacagcggagtctatttaatgttgatgcttgctacgtattacacaataagaatagaaaagtaaatgagacgcaagattttatagaggttcgatctccttagttagcggtaatgacctccttcccttttggtattattgataccatagataatactactcaaatcacaagtgttgtggaatctgcactagctctcttaagattacaatttatgaatcaagtaggcaagtatcaagagagagagagagagccttcgaggcgtgaagaagagaggagaaaagagagttagggttttaaggacttacagttgagagcatagggagctgagaggcttaatgacttagcccttagaacttagagaattagggttaggctaatgctctttatataatagagcttacatccctaatatccctcaaaaataggtaaaatgaaactattatttacataattaattaataaataataaatgactaaattatcccttacaaatggggaagttactaatattttcccctattttcgtgggctgtcaagacccaactcgcaacttggcttagtgtctgcgcatcaaaggcctaccaagcaaaagctggtgggccatacaatgtatgtatattgaggtttggtcggccatgctcctgccaggatcttacaggtcatgttcttgccagctttggcaagtgttggccagccttcgtaggtgaaggccagcctttgtaggtagaggccaacctttttttgatagacgtgaggcttcctcagtcaaacagactctcccttagtctgaaagacacctttagccggccagcttgtggttaaaccctagctgaccctacaagctcatcctggccggcctatgtactctccttagccggccagacatggtggtatagctccttgacggctcgcttaactcctttcacttgctgcttgacagttttgccataccttctaaggagactttattctgcaattagcaaggatgtattccacgtgtcctcacgtgaacatgccacgttaggtagacaaaatttaagataacatttgctccccaagtccc

SEQ ID NO: 46373 - DNA, 2582 bp, Cannabis sativa
aaatctaacatccaatatatgattggatcggatctggatagacctaaaaagattggatgtgattcaatgaacaccgctaggtaggaatgaacattttgactggatttgaccaagacctgactcgctcaacccgaaaatttttaagaacctattatgttcgggcaggtcgggtccaacccggtacaccactaggtgggttctcgaattggttttttatggtcaccgggtttcgggttgaacctgaactggcccgccaacccgatcactgttttttcatttttttttattttaattacatatattttaaaaaaatcctaaaacctaatcattttatttttattacatagataatatattaaaaataacaatatataatatattatatatggtttggaacttgacttttatattttagatttgaaattaatgcattttttattttattttaatctaacaaatatagattatgacattctaagtttataacttatatccttaatttaatatatagaaaaaatcacaaaaataaataaattaacgagttgaccgggtcaacgatccgatcaacccggtcaacccgaacccgtagatctatgaacctgcgagcctgaaacctgcaaaccgaaaacccgcaaatttgaaacccggtcaacccgcctgatgttcaaccctaactgtaggaggtggtcatgcaccatgtactgctgttgagtaagtggtcccaaggtgcagtaatggtggctgcaacgtatccttggttgaggtgttagtgcattcagatgatgcatctccactacttgtcctccccgtcattttcatactttgcaggttgcatggtcgtactttggcatacgtccaaccatgagtgtaataccctaagattaaggaataatatatattagcaaaccttaactagttaaatgtgtattaatgtgaaattatattattatataatttaatatatatgaattatactgataatagacatgttaagaccccattggtgagccaggggcattttcataattttgacccgagaagggtaaaactgtaattttaatgttatagcatgcttttggactatattattatagagtatatttgttctgtctttctctaggtgtttctgacaagtcgacgcagtatagtcacaaccaggtattttgggccgaatcaggttctgggcccgaaatacatttttcgggattttattttgacattttataaataattgaatattatgatatttatttaagtttggtgggtgatttaatgacaaatttgcccttgttgtatgcatatgtggtaaattggccctaggggcattttggtcatttgaccatttgattttttacaacaaaagagatttctagagaaaatgaaaaccatatttttggttttatagcacataaccgaaccctctcactctttttctccattttcatactttcctaatcttcttcaaattgataatgttggtgattgaagattatggtgcttggatttgtgagaaacttgaggtagtttttctacctctttactttgagtgttgtttctgaactttgatgttgatcttcatgagtatttaatgttcatagcttgttggattgcatgtatgtgagaatttgaagaattgggtgttttatgcatgattatgttggtagaatagtgtgtgttgctctttgtatgcttggaggagattttagagatgataatttgtgctttaatctgaatttggttctgcttgttattattttcaagcttggtaattttaagttgattttgatttaagattggtactagtattgatgtttgttaagttggataaattaattatagtgatcttgatcaaagcttgatttttgatgtttccaatctactgtattgatggttgttgttagtaaattataaattatgagtttgagcatgttgttgagtttttggtatgtttgggcttgagttttggttgctgaaaagtgttatttctaggtttgaaactcaggtgtcgcagccccctcttttaacgccggggcccgccccttgaaatcttggatttttcaacccaagtgtcgcggcatgcttgggcagtgtcgcggcccggttgggggttttgggcagtttgaatgttaaattttgtttcgttcataacttttcgatctggactccgtttggggtgttccaaatattgttagaaagctcgttccgagctctatatgtttatttgtatttgaatgccaattatatgattatgtgaaagtggatttaaggattaaccctatttgtgaatcccaagaattgtgactaggactaccgacacttgttaaggagcaggttgggattaagaatctccacgtacttaggatatcagataagacagtagttagcacgtagagttaagcgcggtggcactcatatttagaattataatggtggttaaatgagactcgagattagggttataaccctaatgtgagcggttggcctagggttactaccctagtgattaatagttttaaatattatgccatgctatatatgttgagtaaagaattctgtgttagtttttatgccctaaataaaac

SEQ ID NO: 46374 - DNA, 2151 bp, Cannabis sativa
  modified_base (699)..(714): a, c, t, g, unknown or other
aagaaatttcatttcttgctcaaaactccaccaaacgtaaccaaaccttccagagtacctaattagggtatatacaacataatccaaccaatatttcatcaaaagacatacaaaatcaatttatgtcattagagatcaaagctttgaactcaaagctcaaacttgcataaatccagtacaacacattaaaatcagttgcaagaacttgaaacaacctcaaatgaaccctaaaaatcaaaccataaacaaacctaaccctaacagcccccatttcacaaaatcacataaccaaaccaacaagaaacttgagaattaaagaagggtgctactagggcttaccttgggttcagaaaactttgaatccttactgaaattctagaaaaatgagctgaaaagaggtgatctcctctagtttagagagaaagagagagcttcaaggggaaaaaaaaaaggtttttttcctaaattttgatttttcttcaaaagggaaaggattttcctaactaacccttactgaaattacgaatgctaggtgtcactcaaacaaggcagccacctaaccccaaaccaaaggtaattaccgaaatgcccattacttaagacttaagtatttttaagactaggggtaaaatggtcaaaaaccataacccctctcaacctcagtattttattttctcaaaaatatttcccactaagaannnnnnnnnnnnnnnnacccatgtgatcaaactagccacccatcccattttccgttgtcgccgaacaaaaattacaaattttgcataattcacatataggacaaataataccctagagtttaataaaatctccagaattgagaaattataactctaatgcccatttcaaatattagggtccaaaaataattaaattcataaataattataaaaataacagaaattagtgctaatttcctttactaatccaaattacaaaagcggtcattacacatgtactctatcttgggttacgtggacatgccacattaggtggacaaaatttaggataacatttgcccccaaatccttgttcgaaatcttgtcgtatagggaccttctagctctcatcttgtttgtagtagtctttgttgagcagccttgtctagcaaagtgttgacttttttcatggcatgattttagatattgatcttctctctctacatacgtctcattttctcttctttgatatctcttctttgtacatgccaataattagtttcaagctttttaagcttttagtaactttttgattctcatgttagattgtaatctttttggtattttgatccacatgacagttttagaatgtataatgtgtgacttcccgataaaaaaaattatttttcccttcattgtgattcttcactctttgagtcataatgaacatgaggcacatattcgagttttaaacaaacacacatttggattcaaaactaaccttggctggccttggaggtcttgcttaaaacccggccaatcctaggacttaatcatgggagttggctagctctagggtttcaccctataaagctagccagttcgtgcctgggtttggtgaccttggccagttcttggctgagtcatgggaccctagacgaccctttcaaggcttgggaaccctggctggcctgggccttaattccaagtgggtggccaactttctgtcatcttttaacttcggcaagaatcctgtcatggccctgtaggcaaatacaaatttagtctcatacttggttcccttagaaaatctgtattaaacttaataatgagtctattatagtcgaatgttcaacttaagactcaacatttgtccaagttgttacacttgagacttgtacttcgctgatacccagccttgtataatgacagggtttggcaagtacccttgggtacggttgtctagagttttgtctatggcttggaacctacaaggaactctacctcttggcttagaacctgctaggatctctgccttagccttagcccagtacatggttcctataggaactttgtcgggttcttatctatctatacggttcttgcagggccttggccttatgcatgtgaaccaattttttattcatattctgccttaaggctttcatgttcttgcttttggcctataggcact

SEQ ID NO: 46375 - DNA, 1284 bp, Cannabis sativa
gcaagagaattgaaggttgacttcaacttgaaaagcctctcagaaacaacagaagaagtttcattttttcccttaaataaaaattcctcaacataaggagaagcaatcttttccagcaaaaaatcaaaggaagtagagagaaaggctccaatcacaagttcagccatggttttaattcacttcagtagctcagttgttgcagtacttttactataagaattcaataaaaagctaagagagaaaatgataatagtattaaatgttattgtatgatcataaaagcttatcagatatgccactgcccactgaccgctcactattattttacagagtgaatttgtgaggaaaagttaaagcaaatagaagtaatattgtttggcttatttttcagacaaacttttggtctcatcaaatactttttctttcttggtctcatcaaacactttttctctggtcacaaaacagctcactcaatctcatttagctgtgtttaatctcaccttagtatttatactttatcactagtaaagtgaaaacacataatgtatatattttattgtggaataacacttttgcatattttgaattgaagcattttgatttaatagtgtgaatccaaagtgtaaaaatttataggtccattgattcatttagaaagaaagaaagaaagaagatactcttttaaagtctgacttctgatatgaagaagaaaaacaacaaaaacatcttaacagattacaagtagctcctatcacacatacatacctcaatcataatcaactggatcagttgttgtgtggattattaggatgttagccttagaatttgacatttggtatgtgactaatcttggtccagtactcctcattcccactctccttggggtcgtactttttctttacaagaggacaatattttatggttaaagaagtgagggaggctggaaatccttcttctgacaatgtttgcaactcggggcaaaacaagattgaaagtgtttgcaacgaggtgagttgtccgagcccatttttgtctaaacctctaagttctgaaaatccccatatttcaagagaggtaatagtggtaggtagtagccctttcaccgggaatgattctacatcttcactaaaatttccaccaatagaaagattggtaagatggggtaatgtttggcaattgcatttcatcctctgaaatacatcacatgatatttcaagcgtagacaaactaacaggcagaccaccttcacctttagggaaagtctccatcaaaggacaatctacg

SEQ ID NO: 46376 - DNA, 591 bp, Cannabis sativa
tttttttttttttttgagagaggattttttactaagttagtaaaaaatgatacaacattagtattgaggaattgcatcagcataaatcaaaaggaatcatattgagaatcatattgtctgcaggaaaatgtatgatcatattatttacaatgatcattttttagcaatgtaatattacaacaatgttttagcttacctttgtgcgatgattctgcttgactgcacataataacaaagcactttttcttcagctatcaaattttttctactgttttgtaatttgtcaagcaataagtctaccaatttttatttggttgagaatcgttttcttttgttgagaaacaacttcggttctaatttttgatcgaaattctagagatcgttgttgaagcttttttcttcgtcaatgatgttttttttttgtttgttgagaatattttcaaatttgatactattttttgcttacagtaacactgaattgaatttgtctatagattcggaatcgacttttgattttgatttgttgattggagttttggttgtgttcgaaggttgttttttttttttttttttttttttaatgtttttttt

SEQ ID NO: 46377 - DNA, 4635 bp, Cannabis sativa
  modified_base (4556)..(4582): a, c, t, g, unknown or other
ggagcttgctcatatatgaatgtgatattatttaagattatgctcagtgggagtttgtacttggaatgttctatcaagttgacacatatttgtggtttgattctccagataacgtatggacttaaattttgagtattctaatgtatttttttttttattgaggtttaagtacaaggttagaaagaattgatataggaggatgatcagcatactaagattacatataatttccatgctaaacatgattgattacgtggagataggcatgattgatctaacaattgaaccataaaatagtaattttgaccactcgctttgatttcttttatccaatttcgatgtttcagtgtatcacttataatacaaaattagtttcgaactcttaaaattagatttttaagaatcggatcaatgtggttagatgttggggtcatggccctaatattttcagaattcccttgtcaggagaatttatgggatgtcttttgtgaaattcgtcctggtttgttttagggtattgtttcttttaataattgaatgaaagaaaaaaaaatcttaatcaattttatgatggaggctgatattagtgcaataagcaagtgagctcgttatgaagcgaaaatctcacctactgaacacaagtacaatgcagtctcttcttgccttgtttacatcttacacaggccttagttccataagtttttccttttcctttttaaatgaaatgattctcttcgctaaaactattataatacaaaatcacctccaacgcccatcatggtatatttctaatgaagaatctagtcaaaattcctactgcacatgccaatggatgtataggtgcatgttcataggacacaaaccttccaaacttactgaaagtttctatgcttctcatccacgactacactctttttattccaaaaaataaaaataatatatagtttaatattttccacaagtatgaagaaaaacagaaatttttatatacttaaaagttgctttgcttcaatttttttttcataaaagcattcctacacacacttttcgtgaatttcatacgatttctttaaacaactaaaattaggtaaataaatttttataataattggtaagaaaatcataaccactactatcgcgtaaagcatatttggagtctcttgtagactatagagagggagacactagtttcatttttcctatatatatttgtgatttaataagctagttaaagctctattctcttacgcaagttgttcattatctcataatgtcgacatttaattcaattatcttatatttgtcactctctcactgtctcacttcagttactatcttcgttttgcctttttatgtcgtcattttcatcctttacttttcttaacatcttaacataaatacacatcgaagaaaacttccatttcttgtccactctagcaatctctatctcttatatctttttcttctctgactctctctctatctttctaaacatgaagataatgacactctttggttgtattcttcttcttgttcttcctcttctagtttctggggattcaacttgcaatggaactagtttagacaatactcgtgataaagccaaagctttacaattcaaattagtagcaataacttcaattctcatagcaagcgctttaggcgtttgtatcccaatcttgggcaagaaaataccaactctacgtcctgaaaatgatatctttttcatgatcaaagctttcgcagccggagtgattctagcaactggtttcatccacattctgcctgatgcattcgatagcctgaccagtccttgcctcgagaaaaatccgtggggtaatttcccctttgcaggcttcgtggccatggtttcagcaatggggacgatgatggtggacactttcgcaacaaattattacgaaagagctcattttaacaaggcgcttccagtgaaggaggacgctcatgttcatgaagtggcccatgagggccatgttcacgttcacacccatgctactcatggccatgcccatggttccgcctttgtctccgacgacttatccaccgctgatcttgttcgacaccgggtaatatctcaggtaacattttcttctgcttctttcacttgtctcgtaatatttcccctgtatttctctgttttttctttttttcttctttctcttcttaatgttttactatttacattatttaaaattacataataaaatgcgaatttatggagcaaattgttcaagagtcatctgcatagtagaacatctaatctaagcataatatttattgatagaacccattagtgaaattagatattaatgtagtttcgttttcaagtatggaactttttcttattcattcgtacgaagagaaaacgactcagttatgtgtgacgaaaatatttatgatgctttattattagattcacaggtttagtatatttactttttataggcttagaaaatattattatcagttctttcattattgacttgtaatattgacctttgtttcagaataggattctttcacaactttattaaaattaaatatttagactaagaataatatgaccttgtcatctaattattttttcctattaacaagtaacacaaatctcagaagaatatctttacatgatcataacaatttcttttttctgaaaaaaataaaataaagtaaaacaatatacgttaaatttttcatttctttttaaatgttgtgcaggttttggagcttgggattgtggttcattcaataattataggtatatcattaggtgcctcatatagtcccaatacaattaaacctcttgtggcagctctaactttccatcaatttttcgaaggcatgggtcttggtggctgtatttctcaggtactttcaagcttgtttgtgcatctagtttttcctttttcctgttctattatttatttttatttttatttttggtgtatattccaataaagtattaattagattaataggtctagatatatttgtaataaactgggggccattcttttgtaattacataaaaagaaaaatgcacaacatgtcattcatgtgtgagtggagtatatagatttgttttgattctccactgtctattgctctcctttcttgtaccattgattttactgtgaacctaagaatttttcaaagtcaacttttactttaggttcaatttgtacgtccaagaaaaatattcaattaatcttttcacaaaaaaatgtgttttttgaattctttttgttatactagggaaatgagttaaatgttaactacatttttgttaagtgccttttagttttcagtcagggagacaacagtaggccctggttaaatgattagaaagaaaattcaattacttattttattttttatttttgaggggcgataaaatacaatatacagcacaaaaaaacttactctcaaatattacaaaatttattcattttaatttttaactactgatataatggtacagcgttattttataattataattaaactacacatttttctatatagaaaaattaagcattatttgaaaatatataaataaaacttcaatttttaattttatattgaaaatcagtggctcaactgatccctgaagaggctccataataggtacccaaatatttaaattttataataaaagtggtctactgttcattatgtacaagtaagaatatgcaaaaaagaatctaaacactgtaaacagtacagagtaaaagtgtataaagattaaagaatagtttatataattttcaggccaaattcaaatcaaaggccattgcaacgatggtactcttcttctcactaaccacaccaactggaatcggaatcggaatgggcatatcaagtgtgtataatgaaaatgggccaactgctctaatggttgaaggcattttcaactctgcttcagctgggatcttaatttatatggcactcgttgaccttttagctgctgattttacaagcccacgaatgaaatgcaatattaggctacagcttggggcccatctttcactacttctgggctcaggttgcatgtctttattggccaaatgggcctaaattagtactcattaatgctgctgactttattatctctttaccttcttccttgggtctccatgttgatgttttctttgtctatttcttttggttcaatccctattgacttctcttacttctcttttttattcctttcttttaattacaagtgtaatttgtctttttgataataacatcaaccattaacttgagggaacagtggttttgaagacaaggatgtcaagttagtccaattaacctaaacacatcccaattatcatatttgtattatttatatttaaagtgctatttattattatatagaaagattattattaagtacttattattcgtgtttttgaaagaagaacatgggtaatttcaacatcaaacttcaatcatcacagacccagttgtaggccaaatgaagataatggtccgagtttattaaagaggtcagtgttgggttttatgccctnnnnnnnnnnnnnnnnnnnnnnnnnnnatttacttattaatattgatcagaaataacatttaatgagatcggaagagcgt

SEQ ID NO: 46378 - DNA, 2361 bp, Cannabis sativa
aatcatcaaacatgtatataattattaaatatgtaatctttattaaatatgtaatctttatagtaatctttattaaatatgtaacaaaaatgattacattcacttttagttgttggatcaatattaaatgattgtgagtaggttagaaattaattacaaataattaataaattacccgtaatttaatagtaacctgcttttattttattttcttataaataaaaaataaaaaattatttaaaaatattaattattaaaaagattgtatttaatattttaatttaaaaataatttattttaagtatatagttaattattattgatatatgttgaaaaataaaatttttaccttttaacatgttataacatgtcatagaaaatatagtcattatggttgtaaccattgagtagtcatttatatatataaatatatacatatatatatatacttgtttataaaaacggattaaaaaatatgaatttgtactaatatatatttctcatgtatatattgtatataattttatgtatttttttttttaaaaaaaattcttataataagttatcattgcgtggtcgagttcaacataaaataccaacctcgtaatataattcaattccttttgatgtagttgttgaagcaagttgaaatctagtttggcgagggttaaaagaagctcttcgtgagaaggtagtttacggtaaagtaatatgtaaagtcttgcctctcttctttgaaagctctttcggatagggtgcattagggcatgtttcactaggtctagatatggagagctcaattgagatgtttccactaaggactgaagatgagtagttgtgaagataagagcttcatctagtatttcttctctgcgaactctcatttgtgaagcttcatacaagttcaacattcctcgaatgtcactcgaaattgattccttaaattttcctttctcattcttatatttggcaaatacctctatttttacattgacattccaaaccaattaacacattagtattttccatgtgattttgtaaaaatactatcatagtaattaacaaatttaattatcgaagatagtaaattttctttattatattattaactttgaagagacttaaaatattttatcataatgttgatgataaaataagaagaatattaaacgtgacatataatataataaatattaaagtgaacatcacatttaaaattattattatatatatcacgtttaatattatattactaatattattattattattattataactttactttaacagtgtatacttaccacatgctataaaatagccttgttccctaagcaaccgaaagcgaagagcatcagcataaaggttattatcaccaaaatcacgatgaagattgttattattattatgaaattgcttcaaaacttgttcaatttcattttcaaaataataagataaccccaatcgttgaatatcatcaatatattcaagtgtctctaaaggattttccaaaggatgaagaccatgaagtaatttcttcttcacttgttccttcagctcaataatcttcacataactctctttgttattttccatagtttcctgaacacaaaccccatgaagaaattaactagtaaatataaatgaatagtatttaataaaatcagtgaaataataatattataataacaataagcatatatactttaagggatgagtgatcatcatttgaagcacaagacatgaaataatctccccaaatgcttggagtaaactctgcaagattagggcgtttttcatcactactaattaatcatttttcttttttgttttttttagatttaattgctcactttctttctatatatttggaaataaagatcatatataagccacatatatatagtagttaaaatatgtgggaaataatatgttctattcctccatgttatagatttgactttgcatgcatgcaagtgggaaatcgtacaacgtttgaaaagtaggtatatataacgatcaaattatattggaggcggcagctacagaatatatatgtatataattattattattattattatatataaaagaataatttgtgaaataaatacttaaattaaatttttggtggtaataatatttaagttatattttttaaactctgtaggtacctgacccttattttcacgtgttattttgttattagtttatttaaactattttctttttttttttaaaaaaaaaagttaaccacttggaccaattaagaattacaacatggaaatttaattaacatttagccatatacccaaagacagaggtatgtagcagtctagggtatacactacaaaaaatagc

SEQ ID NO: 46379 - DNA, 1053 bp, Cannabis sativa
tttattgatattgaataatcttgattacattgaaatggggttttatttagggcataaaacccaacatcaaccccttacaaaatggcgctttaaatatagttacacatttttctcacacaggatcagattttttcctctctgccagcccatggtagtgcgcgtatgtactcttgggcacgctttatgcccaaaaacttgtgtagagactattttgtaagggagtgacctttgtacaacacgtgccctaggtcgtacaagggtcctcataagtaactctagaccacacgattaagaaggttcctagcagtggattgcagatcatcctttctgcaataccaaccttagtaacatgtagaggacgtaaccctatgtaggtaaaggatatgcactttacccaatgtgtgcctatatatatcctcgttcttgcaaagaggagggggactcttttgatcgattgttactttacaagaatacctagttctatttctttgaattcaaagttgttacattgtaatacattataatcttgtgatatctgccctaagaggctaatgatattgactcgtggactaaggatcattaacgaccaaaccacgtaaaaacctactgttcatactatttattatttcctttattttctcaaaatactgaatttccaaaaaactcagtaaaaagatatgatatccacgctctcaatgaaagcacgaaactattgacctcaaaaaatgatcaactaacagttgcgtcgcatagatctgatgtttgccacatgttatccaaacagaataaaaaagtaataaacacaaagattttttataaaggtttggcccccttgtgatagtgggttatgacctactccttttttggttgtactaatactgagggaaatactatccagatcactatagatgggatctgctatagcacccttaggattacaaagtatgaatcagtaggcagatctcaagtgttggccaaccttgtgtaggtgtgttagggagatgaagagaagagaggaagagccctaacgggcgtgtacaagagagagagaga

SEQ ID NO: 46380 - DNA, 1712 bp, Cannabis sativa
caacagcaaaaaagggatttctttagttgagagatgataataatttctgatggaggtcctaaaatttatgtgtttggtagagtaatgaggtgggttttgatttatatgtaaggtaatgtctgtcaggttttgaagtggcgtgagtgaaaaaccacaggaattagaggtagaaaagtagaaaccaatggtttgggataaaccatgtgctgtttatattattttaattaattaaataaataaataaatagtgcaccctaataactaataactaatagcaatactagtaaataatagtgtaacttgttttgcttgtcatggtattaggccacaacgtacaacgtggagaggcgtggacaagttttagtcgctagaattggacctattgatattacttttcttttcttcgtatcaaactaataaataaattaattaactttttctcttttgtggtattaactaccataaatttatttacacactataaatagtaaatgggtgacataaatgggtaatattagaaaattttgagtttttatggataatttttctatttaattagaaaaatttctccattttacattatatggactgagattcgtctatcagctaaaaaaaaaatattataaaaaaaaaaattcagcaaaaaagtgttaaaaaaagttgaatttgacttaaacatttttttatataaacatatttttgatatagtgtaaaaaagagatatttttttgatattttctttaattaaatagctaaattaattaagcatagaatttcaaatttctcttttattattcgctatcggaccaaaatttaatagtttaatatttgtaaaattaatatttatagttaaatttatttattacccattaatgggtaatttccattaagaagtattccaatagtaaatgagatatattttaaaatataaaaaagttaaaatttaaaataatttttaaaaattattcttaatatcttttaaaacttttctcttacaatattttatattactttcaatatttattttaattttattttcatatatttttttaaaattttgtaaatttattttttaataaaattttatataattttttattgttatttttttgttataatacttaaagtataatttatttttatttgataaggatatattttttaagaatataaattagaagaagaaattttttaaaaaaaaatgctaatataattaatatatattttacgtattagtaaaatttattgaaaggagatatattcataagttttttaggtataaataaagcatcccattaattagctttcagaaggaactttatcattggaattctttttataaaaaaatttggaaattaagcagtgttgttcaattcttgtattaaaaatatatattgttttattttttgaattcattgcaaaattatttaaataaggaaagaaattaagaaaaaatgcttatataaaggaccacatgcggtacacgtttcaaaactattaactgtattacaaaacataaaagtatagaaactacgttctttcttcttctggagccttctagcatgtcgttcctcttctcaactgagattttggtccctcacatggggaaatcagtccacccttcaatgtttagtggtggtttcaggtgtttctctcctatttgtaaatcacttcctcctatttctctctccttttcgagcatttattactct

SEQ ID NO: 46381 - DNA, 2108 bp, Cannabis sativa
aagtagtggggtaacttaaagcaagtcattgcataagacggaatcgcttgaaccactgatttgagaagaatttctttgcctccttttgagaaaaaagttgagttccacctattgaggtgggaccacacacagtcttggaggtaaacaaaggcttcgtttttcgaacgcccaaaagattgaggcaaacctaggtatttttctatagaagtacgaataggcacattaagcaaagttgtgatctgatccttcacagaggcagtggtattgggtgacaaatagagggatgatttgtcataattgacaagttgacccgaggccaagctataggtgtgaaggatatccttaatttgtgcggctgtaataggggaggcagcactgaaaaggatgttgtcatcagcgaaaaaaagatgggagatgataggcgcattctggtagatcttgagtccaagggcatgcttccagggaatgcgttgatggacatgttgggttatgagcgaagagaggccctcagaacatagaaggaaaacgtaggggagagagggtcgccttggcgaattccacgggatggggttacagaaccattcagctgtcggttaattgaaaaggtgaatcaggtagtggagatgcaggacataataaggttggtaaaattgggcgggaattgaaatttttccatgactctccaaaggaaattccattcaacacgatcaaaagctttggccatgtcgagttttaaggccatccaaccaacctttccatgcttgcaatggtttagagagtgaaagatttcttgttcgataataatgttactagagatcaagcgattgggcaagaaggcgctttgggccggatagataattcgttaaagaattggtttgagacgattgaccaaggtgtgggaaatgattttgtacattgtagaataaagactaattggctgatagtctgtaatggaaagtgggtgactctttttgggaattaaaacgatgatggtcttattgataggagataaatcagcattgctgtttaggaagctaagcgcagcttgagtcacttcattgccaattaagtgtcacttgttttggtaagaagttccattgaaactatctgggccaggtgacttgtcactagccaattgaaacactgcatgcttgatctcagcggccgtgaaaggggtctccaggcattagcgatttgtgtcattaagtctctcagagataccgtaaagaccaaagtccatgtgcatctcaatgggttgttggctggtgaagagttgagcaaagtgttgtttaattgttgtcagaatgcttggagtatcagtgacaattgagccatcttggcgtgtaagggaacgaatcgtgtttttggctcgtcaggaagaagaaaattggtgaaagtaacgtgtgttcttgtcaccaagttttagggaagtaacacgggagcgttgttgccaatattcctcctctttaaagagaagtctaccaagatccccttgaagctgacgacattggagaagcagagtgttggaaggttaggggttgttttgagcatatagagctgagagtggatgtttttgatttggcgaggaaggggaggtcctaccgtttgtttccacttggagagattagaagcacaactctgaagctttgtaataagactggatatgggatcctggtcatgaaaattattggtggaaatccatgcctcaccaatgcaattctcaaagtcagttttggtgagccatctgttgtcgaaatggaatcgttggtgggaggcagaggagctggcttcagtttttctaagagaaatgattaaggttcgatggtcagagccaaaaaaatcaccgtggcgaaggtgagcattgggaaaggatgatgtgcacagggggttcgagatcccccagtctaatcgttcttggatacaggtggggtgtgagtgtttattagtctaggtgtaagggttcccattgccatggatgggatggagtgtgtaagtgtctaagaaagttcggaaagaaggcgacggaattttattaatggagcctccaagtttgtctgcatgggagagaaaagcattaaagtcgtccattaagagccaagggttgttat

SEQ ID NO: 46382 - DNA, 863 bp, Cannabis sativa
agccatagcctttaacaaatttacgatagtaattggtgaggtctagaaacgtgcggaactgtcgcaaagtttttggttgaggctaatttaccatagctgccaatttaatagggtcaacagagacaccgtcagctgagataatatgacccaagtactcaaatactagcttgagcaaacaaacacttttttcgattgcataaaaagcatgttgttgcaattgggggagggcctctgccaaatgtgttctatgcaacgcccttgtcggggtatagactgatgtcttcaaagaaaactaacattgacttacgcattagattgcgaaagacctcattcataactgcttgaaaagtagcaggcgcattagtgaggccaaaaggcattaccaagaacttgtaatgttcttcatgtgtacgggaagctgtcttttccacgtcttgggcagccacacgaatttgatggtaaccagactgcaagtccaatttagaaaatactgtaccaccatgcaattcatccaagagtttgccaatcgcgggaataggaaacttatttgctatcattgctctgttaaaagcacgatagtcgtcacaaaaccatcaactgccatctttcttcttcaccaacaaaatcaggctggagaaaggacttgtacttggatggactatgcccactttgcatcatgtcagtgtcgaatttcttaatttcatccttttggatttgggtctgtgccttcctgaagagtgatagtttacgctcacgagtccaagatggtggtaagcccgggggcatttcaaagacaccatcttactaagaaagtaaatttgaaacgtcttcatggtggattgtcccaaacattcggatgtaac

SEQ ID NO: 46383 - DNA, 1930 bp, Cannabis sativa
gtaaaataatttccaacactcatacaccagagcatcctagacgtgtcagggctgctaggtatactagtacttgaaaaatattatttcattagttatacaaaataaattatagcgaactttatttattaatttacaggttccttgctaaggcatctaaactgtttagtaggaagaaaagggaagtttctgattctatgacttagaaacagagggagattgagaaattaaaagccaaaatcaaagcccttagatagaagaaaaatattacagaaaaagagcaaaatgaggaagaaggacaggtggttcatcaggtgtatgttccccaacaatatgcttaagagaatgaggatccaaaaaattatgctcaagaatttgtttccttaaatgagccacctgtcatgtataatttcgttgaacagagggtaggtaatcagccaatatttctctactcaagcaatattggcaacatagtggcccgagcttatctgtacgaacatcagggtccaacacagttcacactaagccttacgttgtaacatgcccgagttctcatttcataaatgctgcaagaggatgttgaaatcccaatctcaattaaggggtgcagatacgttaagaaagtagcaaacatgttccttccttggcctaaatagcttcttttaacacccgaggtaacttttgtcattaattaacaatcaatgattattggagtttaaatatcttaaatatttaaccatagtgaagtaagttctgggaatccatgtactgtggtcagatggatggataatcaattgtgttatctatttcatttattactaggcatgtttgaaacttttggggacgttcaattacagccgggatgctgccgaaaattttgtagaattaggatcaaatttgatatattatatgatattttgtatacggtccactaggtcaacccccagcaagatgtgatgtgtcaaagggaaaaggtcccatgccttgtcgaaaaggcggtggtgatgaagcgcatctattattcacaccagagatcatggcgttaatccccaaggcacttaaatagatggttgaagaatttctgagagttaaggataaaaatgagataatcccaatttgggtactacgtgaattcatagcacctcgtacccatattacgatatttgaagaagatttgcaacatgtggcgttgtgtgacttcatcggcaaccggagaatgcttttagaatgatatataatgttctttaatctaattaaccttatatactaaattctactaaaattattataaaataacaatatttaacaatttaatgcaaacacatttaggagtgcttaaatgatttgagatgaattttcaagtttgatgacctagagcttctcacagtaaatgataacaacaatttagagaaggcagagtcttttgagaattcatcacaagcataggctcattggttatcatcgatgaataaccaacaccaaatgttctttttttcttagaatatcgggtaaacactacttaagagatactttaaaaaaattgtttttctattattataacatgaaattatttttacactatcttacatacatcccaatataattttttagtgtgcattggatgctagagatcgttgcgcaaaattatccatttagaccctatacatgacacaaagttcatccacaaaatattacaatgttggaaaagtaataagttaaatactctttatgtaacaaatcttttaattaactaagttatatataatatgttaaggaattgaaatgttaatataatttttaaaacagagcatacgagattataggagaatcaaatgcctttcttagggcgtggctacgaatttcactagcaaattatccaagacaacctaaataccaagaatgtggtttttatgttttgaaatacatgattgac

SEQ ID NO: 46384 - DNA, 815 bp, Cannabis sativa
caacaggttgttctagagcaaagaacatttggaagtcttcaagattcaaacagttttaccaggcttataatcgaactgacattgcagatttttatcttcaggctcttcatcatatctctacacaggatttttcgatttttattgctattatctggcatatttggaatactagaaactcaattttattccagaaatctggttttggtaacaatgtggaagagtttgttattaattatttacaggattataatgaagctcaacaaagcaatcggacaaatcaaccgaattcagaggcctcttccatctctccgcatattcagcgattgcactcaattggcttccaagaagattctcctgctctttttgtggatgcagcccttgataatcagcatgctttaacaggaactggtttcattttcaagtctggttggcagcatactattgcttctcatcatcgacaattgccaggggcttcttctcctctttttgctgaagggcaggctcttttgcaaagtcttttatggtgtttggattcccagttgcggccaaagtttattttctctgattgcttggttttggtttctaaagttaacagtgattggcatgaccgctctgctctttctggtctggtgtctcggtttcggtggcttttctccaatttccctgaagcttcgttgcatttcgttcctcgtcaactcaacatggatgcccatggccttgcaaaagaagctcttaggctgagagaagctgtctagtggggattgatcggtccctgctttgctgctgttttcgttgttttctttctctagcagctt

SEQ ID NO: 46385 - DNA, 1161 bp, Cannabis sativa
ggctggccctgataatactgaaccttccaatacaccataatacacttaattttatttaaataaaagactaaggagactttttcatattttattttaggcttccaaaaaatgtgagctttagacacgggcctagtacacctatgctccggctcgtttccggttttaattagtttatttatttattttttttaatggaacttttcaaagttcacttactgaaaaagagcaatgggaaccacaagggaattccctcccactgaaaattcaaagcttcatgactagagcaatttctagcctttttagttcggccatgtatgatagagttatctacttgagaaatataaataatttctaacaactgaataataaaactaaatttaaaacttcaaagacaacatgccaattcagggggcacttagatttgttgaatgcatctgcagcaattaaagaatcagagtaagaatggcgatgtgaaaccattcaagttcaagcgccttgagcagggctacattgattggaaagagctccccttccagcgctgagtctttattatgactagtcatccatgcagtccacctaccttgatcaagctctccaccaatactagcaagacccgtgttaccttttttccatgaagcatccacaaagatgaaatgcttagtgtttagattgactttaaactttaaatacaggctttctggcagtagccatacaaacctcatgaagctcattctcacaaacagtttgaaactctctccacctagatgcaataagatgtcccattatcttggggtcaacctccctaccttttatcattcttttgtttttggcctgctacacacctatgagacatgctgcataaaataggaagttttcagcctcctccttactttgaagagagagagagaatttttctaccaaaaaactttgctagaactctagttctcactatttgggattgatttctaagttggcttccaattccaaagacatagcatctaggaattgccgcctcatagcctctagttgtggatcagtccttgtggctgctcctgttcttcaagctgatcttccatcacacttcttcgtcctccatagttgtgtctgacctcatctgtatattgtcctccatactattgaaatgacactacgtgttcctaa

SEQ ID NO: 46386 - DNA, 1767 bp, Cannabis sativa
acgcataatttatgtttgtgcacatagtttgaggtttgttaattataatttccaaacattattggaattaagtataatttatgatataagtttttaattttaaagtttactatattaatttaataattattataaaaaataatggttaatcaattacatgcaatgcaagattaataataaaatgtaaatttaattcacaccaaatatatatagcaaatagtaatttccatttgtgtgtgtaattttgttccacatgatcactcgtgtaaatgtaattttgaggttcatattattacaaatatttgtttatacatgaaaaatatatacaaatttcctatgattcgtaaatagtgatatttatatggtttacaaactcaatctaaataaataagatatattgtaattgaaaacacagacttagtttatttcaaaaataaaataaaaatatacggatccattaatgacacaaaatatgatatagatactaaaatcaaaataaacgtgtatatctgtattgtgaatctatgaatataagttagactaattagatctacaaattaattaactttattattcaagataataaattaataatacaacctaattcataacaaaaaattagttatattataagctaatttattatacaacctaataataattaataatacaacctaattcatttttaagatcttaaaaatgaaacttttaagagatctaaaagagatattaaaatccaaatattaatatatatattaatatatataatataagctatgcattttataaattgttcaatatgatatatgtatatatgtatatatggttcttcttgtgaggagttgaaaaccccctactatattgtaagtcaacaataataatattagcaattatgtcatatatatatttgagaaaattcactgttattataaattaattcattatgttatttacaacaaataaatgggggagaatactttttctccatatatatacaaaatctctgtctaactctaaattgtatatagctaaaccatgaacaattatatttatatattctaaatataagtaagtactatatagcactaggaaaaatagataactgattagaggtatcaaaaacaataatatatagattataatttaattgttagaaattttattatacgactaaaagataaatcaagaatacaactcaattgtaatattaattatacaaaaacaaataaaagagattaattaaataactattataacaatatattatatatatatatgtataattatatatatatatataagaaatatagaagatgagattacaatgtataatatataatatatgaagaagaacaacattcactcataatcttaagtataaattagtgagagattaccatcttgagcaaagtataattatcatatttgtccaaattatgtctcatatctataaacaattcagtttggttggaggtaattatatagaatggaatggaaaggaaataatcttcattctacttctttgcttggttgcatattaaagtattagaatgtcattctaaaatgacatttctacccttttggtagaatatttcattttgaaatagaaagaaagaccatcttaatgcatgatgagaaaaaatttaataattttttatcaatttttttatacattttaaattttattttattctattctattcctatttctatttccacttttattctcattactatatatttttattcttccaaaacaaacgccac

SEQ ID NO: 46387 - DNA, 3295 bp, Cannabis sativa
taaccattgatgcaacaacttggttatatagaacaatggaatggacacggaagtatggaggattgatcagaatacgccaaagtatgaagtgtaggtgctttcattgtccgaattgacatggaaggttctctaagaattctcttgccctactagctagtgcaagaaacctatccttaacacccactggttttggatataaaaatcgttttggatatttggaattgccctaaattgaagtggttgcctgagaagatgacttctctctcatctctagagtcattgacaatctgtagtcgtccattgatagagacttttcctgaaagtggtctgcctgttagtttgtgtgagctttatacatcctgtgatgtacttttgaggatgaaatggaattggcaaacattgtcccatcttattgttaatggatatggtaatgaagaagatgtggaatcatttccaaaggaagggctactgcctactactattttttttttgaaaaagagaaggaggtcagtgttcagactatctccaaccccgatatggataaaaacctcacttgtggcggaggaaaaccgtggttacaaaaatagagtaggtttcacatctttaaccaaaactagggaaattaagacaaaactcactgccctatcttaaaacaaataaagcttctaactccctaggggacaatcgcgagactgactccctcaccaaattaagtacttttgagactgcaccatttccgcttatagcagagatctccaatctctgattaggtctaagaatgaaatgtcttcaaaatgcttagtcttgtatacccatgtagctgtccagaatttgattttatcccatagggtctcaggtgagctttccgagccttcaaagattctattatttcgttctaaccacaacacccaaagaacagacagtaccgccgttctccataagcttgtgcttcgtttactgccaccaaccttacttactaacatgtaatgaaccgagcaaggcatagcccattgagtctcaaattcgtttatcaacattatccataaagaacttgcaaggcggcatcttaagaacaaatgagcattgtcttccccacttatcttacaacaaacacaccacccaggtgatatacacagaaatgggcgctttttttgcaatctagcgtgaaggttcaatttatctagagccaccaaccatccaaacactttgactttggaaggacctctacttttccataggatcttagtccagaaaaactcttcagggttttcgtttgaggtaaaccagcggaaggagaagatcccacaagaatctggtaaccaaatccgactatcatcaaacgtgctccaacttttgtaacaattgtgacaaactcggaatctctctatccataatgtttcttctaaaattaagatcccaactcgccacacaatctcccacctctccctcatcaccaatcatctcctgaatacttgcattcttagccctagatatcacagctaaatttggaaattgatccctcagtgaagagcccccaatccactcgtcttcccagaaacgaatacatgctctatttcctactttaaactttaccaacttcccatattcgtcgtaaagatctgagatatccttccatggtcctcttggggacagtctaaccccctgttttgtgtcccagaagttatctgctctgccatatcgactcttaatgactttgtgccacagagagttcgattctaaagggaatctccatagccatttcataagcaatcatttattcctcatttctaatcttccgattgccaagccaccctccgctctaggtttacacacctcatcccaagccaccaaatgatcccctcctgctaagtctcctccttcccaaaagaaatctctcatcattttttctaattcctttaagaccaccttcggagctttgaataaagacacaaagtaaattggaagtgaagagaggaccgactgaatgagagtcagcctccctcctctagagaggaaagagcatttccacccatccattcttgtagcacatttatccaaaacaggttcccaaaaagatctcttccttggagagccaccaagtggcattcccaaataagtcataggccacctacccacctcacacccaatttgaatcgcactttgggcaactgcgtcctcatccatacaaactcctagcagttgacttttattcaagttcacttttagtcccgaaataccacaaaatgcttcaacaatcttgactaacttttgaagagaagcctcatcttttacaaagaacagagtgtcatccgcaaactgtagatgactaagttgaatatcgtctttacctatctggaaccccgacaaagattctgtatcaatagccttgtccaccattcttccaagaacatcagctatcaatgtgaaaagaaacggtgataggggatctccttgtcgtagacccctagaaccattgaacttgcctcttaccctaccattaatgaatatggagaatgaagttgtcgaaacacatcctcgaatccattttgtccaccgctccccaaaaccttttttccgcataaccaaatctaagaaaccccagtcaacacgatcatatgctttttcaaaatcgatcttgagcacgaacccttttttaccacgactcgtatagtcctcaactgcttcgtttgccattaggaccgaatctaggatttgtctcccttccacgaaagccgattgggtttcagaaatagtctctcccaaaacacctcgaagtctagtggcaagagtcttggcgatgattttatacacgcttgtgatgagactgattggtttgtagtctttgactttgcagctgtttaatcttttagggatcaagcatataaaagtgtcattgatactgccttcaattcttccttctctatgaaaagccctaaacacttccatgagatcatacttgatcgtttcccaattattttggagggcctactactattacctctcttgacatctggtcttttaaaaaacttagaggcctggacaaaaatgggcttacacaactcacctccttgcaaagacttaaaatctattcttgccctgagttggagacattgtcagaagaagggcttccaacctccctgacctctttaatcatagaagaatgtgctttggtaaagaaaaagtacgacccggaggagagtaggaatgaggagtactggaacaagataagtcacatacccaaggtccaatttgtagccattgctgacattggtttgacatgctgaacccgttttgg

SEQ ID NO: 46388 - DNA, 770 bp, Cannabis sativa
cataagttggattttagaacacaacaatgtctctttttgggctattcgtctcatcacaaaggatacatatgccaagcaccagagggaagaatttatatagctcggaatgtaatttttaatgaagcacacttccctggtacacaacctgcatcagtaccatcacctgctgcaccaaatcaggtacattcttccccatatttgcctatttttgttcccaatattggtacacaatctcacccagttgttgcttctgttcctgatgttggtgtttccaatgctgaggatgctgctgtaccacttatgggtgctgctggtgtaacacctgcccttgctgctggtgcaacaaatgctgctgcaactgatgcaacaccagctgctggtgcacctgttgtcactgctaccagtttaaattctccaacagctgctgatgccccaccggttgtagctactggagcctcttcagttgtcattcctggtactcataataatatgcaagctgcaccattccttccccaaccagaaaatccaccatctagccgcctatctcctacccgtaactcactcaccacacagcagcctgcttcccatacaccttcagacaccaatatccacccaatgcaaacaagatcaaagagtggtattcgcaaacccaaagcctatcttgccacaagacaccccctacccgaatcactcttaccaactgaaccaagaaacatcaaagaagcccttaaaaaccccaaatggcttgctgctatgacaactgaatttca

SEQ ID NO: 46389 - DNA, 1522 bp, Cannabis sativa
gaagcatgttagtagcccgatagtggaataggtgcatgttattaatttccaaataagcggcattagcacgttattcttgattgcgatctgaccagactagctcttggttacgtgggctgttttagtagtgtggacgccaggcgaaacaccaggagtcagggtaactcggtcggattcaatggcggtcagggagtttggattcccctaaatattcatgcccgatgtagaggccttagaagcatggcacgtggacaaggtgatattaacccgccacaggctgcccaagctgcccatgattgggaaaactggcttgcagtgatgcaagccaggatcaatgagcaagatgaagagatttgatggttgagacagcagggtgcttctacagttcttgctccagaaataccagtggcacatgcccctactatgcaagccgaacctgtagttgcagtgaaccgaatggaacccctgtatgaaaggttccgtaagcaagcacctctagttttcctaggaggtctcgatgtcatgaaatccgatcaatggctaatagtgattacccgaatcttgagctttaggggcgacatcggtaatgataaggtggcttgtgccactttccaatttcaagaagacgctctagatttgtgggacatggtttctctgacccaagatgttactatgatgacctggaaaagttccaggagtttttcgacgtgaggtgttacaatgaggcaattcgaagcgcaaaaagaaaataattcatccaattgactcagaaagaaaacatgagtgttacagaatacatgactcaatttgatcgtttggcgaggttggcctctggaattgtgccaaccgatttcagtaagaaagagaagtacctagatgggttaaatttgaagatcaaacatgacctaatgatcactactgacgacagtaccacctatgttgaaatggtggataaggcactgcgagctgagggcgtagtggagtgcactttagagtctcgtgggactctggttgttgatggggctcctaccctttccgacatcaggctttagtaggggaggtagtggctcgaccactgatcagaaaagaaaggcacctattgcatccagtggctcaggtctaaacaagaggttccgagggaaccagggtcgaggcaatcgttaaggtatctccaaaacgatacacttacccagaatgccctagttgtaaaaagcatcacctgggagagtgtagagggtagaggtgctttcagtgtggcatgccagggcattacaaaagggattgtccccagctcaggaccgaaacaccaaagactacagcgaaacccactctagtaagggtgttcgcaataactcaggctgatgcagaagccagcccctcaatggtcacaggtcagctctcggtcaacaattgttatttctttatgttgtttgactctggggccactcattcctatgtggcgaccagaatttttagtaaattggatagaccacatgatagttatgaaataggatttggaacc

SEQ ID NO: 46390 - DNA, 2304 bp, Cannabis sativa
ttcacattaaattcaagcttaaagatatgaaaataactctaaatcttagagttatcaaaaatctttaaatctaacaatctcgatggttccagaagaatttttaacagccagaaaagttcaaaaaaacatgatttgatatatatgaaaatttagagaataaaaatcctaattaaacttatttgtttacatattttttttttttttgactagaaggtaccttcattgaataagataattatcattctacactaactcctaatcaagctctaaagcttttttagctcaagtatgaaaactaacattacattgtttaggtacatgcctaatagtgatcttagagaattcaaataaagagttacaaacatcaactacaatgtctaacaatacagaaagattctttttggcacttttaattttatccactaccatcttcgagttagtttctataatagcaatcagcattctgatgttaacacactattagagtgcaaatttaagagctacagcctcagctaaagtggaatggcaacacccgctagaggaagagataaagccaaccacaatattattaacccaaattcgtatatctcattgttttgatgattgttaatatttaattattatttgttactaatgattttttaattttgtagcaagaactaaaaaaaattaagcttttgaggcaaaatgactctgatagaaaaattgtaattttaccaaaattcttgaaagtcaccctaagtgaacctcaagactcaataaactcaagataagattctatgtttattcacattttctagtcttatacagtgatttacaagtttatacttaaaattttataagttcaaagtttgactcactaatttgtgcaataaattatttcataaaaaggatgactaaattcttttaaaatcatctttaagatcacgtatcatttaactaaaaaaatgcaattgaaatttttgaaatcggataagcgagtaaaaagttataagtgttttatgttgaaaaattaaatttttgtccataccctactttcgacctaccatttttcatagaaatggtaaagagtttaaaaactgcaagtcgtttttctcagtatttcgttttgaaaaacgtgttaatagctataaacggttaatttttgttcctacactatataaacttatttttcactcaaaataagatgttggttaagcatttattacctatgccaaacattttcaagtgaattaaggagctcctaaagttttaattcatccaaacacatttcacacactatgagccaaaatttatatttattttttctaagtgtgcttgcaaatcactctagatttttttattgtattatcacatttctagagtgagttttcttgtaataaaaaatacatattcatattgtgattgaggtgaggttgtgtaacgccctaacccttagggacgtcatgtgtgtatttttataaactagtttatgataataaaccagcagtttaaacaaaaatatgagttaataaactttttgctagctaatatgaattataaaattatggcataatcacttatacaattggggatttttttttaaatattacaagaaatgccattaaaataatattacgaaatacataattaagttcagaacatttaaaaatgcaattcctgacaactagaggtataagtttttgggtgagaataagacacttcttgttattgtgcgagtttctctatttatggtggaaacaaaaaagttgttgagggtattgaggaagcatatgagagccattggatggacattggctgacatcaaggggatcaacatctcaactgtaatgcatagaattttactagaagaaggagtcaaatcgaccattaatgcacaaagaagactaaatctgcccatgaaggaagtagtgagaaaggaagtgttgaagtggttgaatgctggggtggcttatccaatttgagatagtaagtgggtaagtccagtcgaagttgtgcctaagaaatgagagggaatgaacggtgaaatgaaaagaatgagttgattccaaccagaactgtaattgggtggagaatttgtatggactatcagaagctcaacaaagccacaaggaaaaagcactttcatctccccctttattgatcagattttggatagattggcgggccaagagtactactgtttcttagatggctattcagggtatcattaaatagctattgcaccagaagactaagagaagacgacatttacatgtccatatggcacttttgctttctgaagaatgtcatttgggttatgta

SEQ ID NO: 46391 - DNA, 1192 bp, Cannabis sativa
ctctctctctctctctctcctatgggctatggccacttctgcagcttttggctgtcgtcttcttccttcaatctatacatgtatatataaattgttatatatgtgtgtgtgtatagatagctataagcctataagcttatttgcaaatattgaatggggttttgaaatggttcgattgtatatcattgcttataatgtatgtcatttaaaacacaattaataataattttaagatttacttttttagaaatacatatatatatatatttttttaaaatatagttatatataatctgaaaagctaaaattgcagattatgttcttattatctgaattattgaccatttttatttttggtgataaaactttgagatttttacactatattgacattttatttttttttttattatggggtaaattttttttcaaaaatattgtgtttatttcaaaaatactgtgaaagtttcatactgtctgtgttacattttcactgtagttttacggttattttttatttgttctactgttcttaattgttctgttttatcattttacggttgttttataaaaaaatagtatttttgtaaaaaattccgtgtggtagtaaaatttgttccaaaatccattattttttttgtaaaaatccctaaaacttttcaaattaaaattttcttggcaaaaataagttagtttttgctttttactgtagcatttctatcatctcctatggacatttttactatttagctaaattttagttaaaatagttaaaaagtaaaaaaaaaaaaaaaattgttactctaattatgctctctattttagttagaattaattattattaataaaaataatataaaaatacttaaaaaaaaaaaataagaaactctctatctattttctattttaaagggttatttttttttcttggtaggtagacctcaacccttgagagttgagatccaccacctttggtgatatagattagacccgttcaattccaaccactatattgccgatatttggattcaatagaggtggatctcggttgatgaaggtctacattatgtagggttaaatgcaataaaatgtgaatataagaattttgtcgccaataaaatgaaaaaaatattacaataatacaatttacttgagatttcttttgggaaatttcaatttttgaccctaataa

SEQ ID NO: 46392 - DNA, 1998 bp, Cannabis sativa
aaaaaacaaaaaaaataaaaaaatgtttgaagcgttagatttagctgacgtgacacgtcaataatagtaataacattattattataaattaaatataaaaaattatatattattataaactttttgtaaaagttaccaattggacactctattttgctacatgataaaatggaccatgcattttccaaaattgtacaaataggactttgagctcaattttcaacaattttatttttcaatataaccaactttaagataatttttaatacaaacagatatagaaaatgtacctagttttgtcataacatctctagatcggattattattaagttttattttgacaaaaaatcagtttaagatcatatttgtacaattttagaaaaaaacaaggtccattttgtcatttaacaaaatagaggatccaattaataacttttacaaaatataagatccaaaatagtatttactctattataaaccttacttttattgttttcctaaacctcatcaaatcttaaaggcggcttgagtgataataaattattattaaacttaaaagctaaaaaagccatctctgtaattataaataaatatttgttgtagtataatattttatgtaagaattttagataattttgagaaatttgttaaacaaacacaaaaacactcttaattacaaacaaatagattaagattaattacgtagttttgagaaacttgttaaacaacaaaaaaaataaaaaataaattatacctcttataataataataatatttttcttatttacatcaataagttattacatacaatattttttttttgaaaaaaaaaaccacaatacatagaattttattagtactagtacatttaatttcaccaccaatttaagctagagtgattaattatttaatcaaaaagaggaaaataattaaaatggaggaaggcacatacccaggaagattatttattcaagaggagtaaaatacatttatacaagacaacctcggatagcaaatagcgagacatctaccttactattctaaaagaaaactagacaaggcgaatcatctgctgacacttaacgtttttctcatattataataatcaaggataacaacttagaaataaacgagatgttattgtacaaatcagcattaaccatcaaagagtcaagcgagatgctattgtccaaattagcattgaccattgaagagtcaagcgagatgctagtgtccaaatcaacattaaccatcgaaaagataagaataacaagcagttatatagttatcaagccttatccaacatatgatctaaatgaaacgcgggaattaatcatgtttcattaacgaattataatttgaattttaatgtaaataactgccaacttatattcctataaatagcagcagatctcacagaaaaagggaacggagaattggagagggaaaatagatacgatcaattgtatatcttgtattcagaaaatattttaaataaaatagactcacggagtatgcaaatttaactgcaaaactacgtaaaaatatttagtgttatttatgccttatttatttcttattatttatgtgtttaaatttattacaaaaaggtttattattagttgatgaaaatgtacgttaacagtaataaatcttcatttttatgtttttatatatatatatatatattttgaaaaatgtatttttattggttcaattctatgttataggtagtcttctcaatagacaaacgtggattggtatggaggccaccaaatatttggagaaggttaatatatattaataaaaaataacattaatatattaataaaatatattggagaacatcgtatatcgtatatcatgagtatatgatatttattgagtgtgatgtatagaaaatctcatttacatatgtatataattataaatatgctatatttttttttattaaatgtgtatttatttattcttcaattatacataatattgtattt

SEQ ID NO: 46393 - DNA, 1916 bp, Cannabis sativa
ctatcccaagtgccaaagttgcaccttatatacccttgtaaacaagggctcatatcccatgtgagactcattctttttcatacacactaggaaacccttattttgtcaaaaattcattgactttgtaaaaagttctaacaaagtgtgttagagaaaaataagaaagaataaacatgtaagaaaagatgataaaagaactaaacaagaaatatatacatatacaataaaaattttctgcaacacctagaaaaaacataaacaattttgaaaacaaataaataaacaaagtgtgaaactataatatttatatgttctagtgctcaataacaccgctaacttcatgtggaataacaaaactaagacattattaactaatattaaagtaaaacacaattgagatcaaattgataatatttcaaaaaaaaaaaattattaatggatataacctgattatcataatctgtaatgttaaggatggtaaataaaatattacataaatataattttttagataatagaagaatgcatgagaaaataatgtgtattaaaataaaaatcaagcaatatacatttactgttatcgttaactaaaagtattattatttgaaaactttaaaaatatataataataatacaaaaagtttaatatattctaggtatctttatataattagattatttatttattttttttttgtagcaataaatttattttttagattaatttttttttcataaataattaatatttaatattaatcaaaaaattgtgaaaaaaaaaacgaattagggagaatgaagcaattttagagcaatatgtgactgctttatacatttgcatatacagattattatattaaatattttcgtggcgtaaggaggtggtgctttaaaatatggtcagaattggttcccaaaatgaccaaaccgattaaaccctcaaaaactagctccagttcttataccttctcagtatactgtaattactgcaacatgtatgcaaaagttgcggatcaagaatcccacttactttttcgtttcaggtccttaattatattagccagaattttcatctgaaaacaatacaatatatatattttcaaaatgaccagcttccgttgttgtctgtttcaatgaccatatatatatatatatatatttatacattcccaaaagttaagtaaaatctcttgtgaatttcaattcttatgataaaaggattcaagtattattttttcttttctattaacacactaattaacaggaccctgatcaattaatagcattttaccataaatgaaataacatcaaagaagtagagaaaagcaacactctggccattacaagaaaagaggttgatatgaatgaggaaccaattaaaagaattagaaaaagccttcaaaaactcttcctatatactatcattactgtgaacttactctgctacgtacaaactcacagtcacatacatatttataactcatacacaaatcgagagatgtggtacacaccagctactgtcacacacacacacatatatatatatatatgcacacatatcagaacaagcagccaatcactagtcaatgatctcagaaccagcagtgtcgttaaagcttgcaccagggttcattagcttagtagttttcagggcatttttcggcattatatatatgctttttcttctctttttacttttttgaaaaggaaaacaaaaataggttgttatgtttttttatatgtaaatatatacactttctttacgttcttcaagaaatatacttaaaggaggggtttgcttggaagagaaaaaaggagatccgtctcttgtgttgcagcacataaaaggcttaaactatcttcagaaaagtaatagttcacttattatgatccaaattttgagagagagagagaga

SEQ ID NO: 46394 - DNA, 1900 bp, Cannabis sativa
caaaatttagtacatgtcaaaattcaaggaaattcaagggaaaaattactaattagccataaatatatcacataataatctaatattagaatacataattaattgaacaaatcttttaattatataactaatcatacataattaataattatatacccaccattcaaaaaaataataataattaaatacccaactatattataatataatctaaattaaactctctcatatttaataatatgtcatttactttatattttcttaaataaattttcaagatattacaatgatagtattgaaattgtttaggtgactcacataatttgtggtggcataatatgatgccacatatggattcttaaatcctcttggatatggagtattggtaatgtcaggatgaaatgacttgagttcttcatttgaatcgtaattagtcaatttcccaaattcttcatctttatatttttgaatctattcctcaaattgttgaatcctcatctagacagggtcacaatggttattaggagcatagttattcaattgttcccatatgtctggagtatttcgacttatctggtaacgtaaatctaagcgcctttagtttatttgatctcaaagatcatgctcattttcttagactattattttcgttatttctgttacttgatgtacactgctgtaagtccagctgaatattattgtatcaatcaattcaattaattcacttttcactcattcaatgaaagatgtctttctttttctctgtttcttctctgcctttctactaatatggtatcagcagaaacaatttcaagaaccaattaaagcttcttcaagatcattcgaaaagcttcaacaaggttccaacaatggtgagaactcgagcgacttcatcagctacttccacagatcttgaaaatccaatggtcgatgcttctactgctcctccaccatcaaatactttcgtcgggactctgcctcaatctgcaccacccatacaaggtcctcgatcagattcaattgaacgccctgcttatgaagacgttcgatccccttattacctcagcaacgccgatcatcctggcctagccttggcaacccctctcctcactgatcggaattttcaaccctagaaaagagacttcaaactctccattggtgcaagaaataaaactccttttcttgaaggtactttacctcaaccccttccaactgattctctttacagttcatggacacgatgcaatcaaatggtaatgtgttggatattacattctgtctcccctgaaatcaagagcagtatcatgtatcttgatactacttctgagatgtggatagtcctcaataatcgatttaaccaaggaaacggtcctcgaatctttgagctaaatgaatccttgacttaccttcatcaaggtgaagaatctgtcagttcttacttcacaaagttaacaaccatgtgggatgaaataaatcagttaaggcttcgaataaattgcacttgtgtagctgctgcccaatcacaagattatatcaatcatgatcaggttttacaatttcttaaaggtttgaatgagtcatatcatgcaatccgagatcaaattcttcttcttgatccatgtccttctctcaacaaggttttctctatggttattcatcaaaaaaggcaaagaaccttaggacatcgacccccaccacccatcattgcagctgcaactcacaccagcaatccaactcctacacctgacacaaatcccatggctaaccaatcttccaagaaacaatgacaacactactcctcataatcgcaaaacagatggatcttccacatctcgaagtatccctcaaattgttgggttttatgccctaaataaaattcatttcatataatcagatttac

SEQ ID NO: 46395 - DNA, 1953 bp, Cannabis sativa
gatagggcataaaatcccaacaagctgatccgaatgtgcgtgttcccaccaccattgaagtttccaagagcctgaccgatgcagcaaatcctggcaatctttgccaacctaacaggcctaacaaactcagccaatacatctaattcgattgcccccgctaacttggctaatcttgatgaacaacctttgctacccagaactcacaaactggtaattcacttaaggtgacatttttcaatggaccatctttggttaacctgtgaagtctatcatagcttatgtgaccaagtcgtaaatgccatagatatgtttcatcattattatcaatctttcactttttatggtttttaggtttacaacattaaaaatttcgttcttcagcgcaattagtatatctgggcttaaaacataaagctcttgttccaggtgagctacacataattgaatgccattacaaaaaatagttaaaatagaactcgaaaaattcaattgaaaatgttgtgttcgtcaacatgaaacactaatcaagtttctactataatttggaataaacaaaatattttctaaaataaaaaatatattctgaaacttgaggcgaatttttcctctaccttggaccgatactaattcgccattaccaaccttgagcttcaactcccctgaatttaagtaatcccaagcttcaagcatctgcaatgaagagcaaacatggttagtagatctggaattaataatccaaatggatttgtcgttctctaaaacacttgattcaaaaataaaagtattaccttcgttcttatagtttagaagtttgaacatcttgctttaaaatgtctcttctcttcatagtgagaacattgaagaatacatttgcttagctattctttgattgtctctattactcgttcaatttgaatggaaaaatatacaaataacacttaacaatggaaaatatttcggtataaattgtgagggtagagattgagaaaaagattaaaatagaagtgccttctccaaaatttatttacaaacaaatgcaaaaagatcccatctcttcgtaataaacctaactaactacctacgctacagttaatgccaccggcccaccacctacctaggtaatggcctaatgggtgcccacttttattacttttgaacaccacttctactcctctcaataatgctcagctgctataacaggaacccattggaaatatcaaaccattattacaaactacatcagcatccattcacatctaatattgagcatctatgtatgcataaaaaaagttggaccgtcgaccaaacatctcatatgcaattagaactcaaacacataaggagcccacaataatgaatgtatcaacggatcgcctccccatccccaggtgtcctaatggacagaatgagtcaattaaagaaaacaaaagcccaagaaaataaaataataatctctgagaacaagccttaggattcgcttggaaagctagcttcatgccagcgctagattgcatatttttctttcattcttccgatgagacttgtttactctgctgtaacttctaatttttcttccttcctgtcactctgtcgttcgattaattatggccgatatatatatagagagagagagggagatagaccaatattatggctggagcgttcttccttcctaagtgataccttgtattgctactaacaaatataactcgatagaaagtagttcagatgcatatatgaaccccacctatttgagttggtttctcttttcccttttttgggggtttgaactagaaatatggtaacaactaacaagcccctttctacgctccatataactaaggtaatctttgtgttaacatttactgatcattttgtagcgtagctcgcgactcacctaataaacatgacaagttagtacttcctgtcttcacacaacaaaatctgggacag

SEQ ID NO: 46396 - DNA, 2096 bp, Cannabis sativa
gacaacgatctgactaaaccactataattttcttgtgctccttatatttttcaatacgtctgagtgtctattctttaaaaactcgccattctaggtggagtacgcgtacattttaattaattattatattttaattttttatttggtgttgttaaaattcctccaacaacaattttgatatatattctcatctcaaactcttttgagggaagttaaagtcacaatggataggtccatttgtggtcacacaaggttttttcttatggtgcgatggaggttgtaagtccaagtaccgggaaggcatttaaagtaaattgttagtattaaagtcatattatgagttaacggtcgaagaacaaactggactgatctatttttttgatccggtgtatgtagaagaataacgagatcgagtcaaggtattgacgataaatttatcaaacttgtaagttattagttttattctacattgcaagacaattaatttttaaggcttagtattttaatgaatatcacaatcacataatgatatgctaacaagatctgcactggcctagggcgaagcggagctttgtcattgaatttatcatcacatgatcgagtcaagcggagctttgtcattgaagttattatattcgatgctgtcagtagtttattttattataaaacaaagggcaaacacaaaagccactactatctacatgtcttttttcgcagccttcaatgaaggaatcaaattctgacattacccagaatcttgtatagaattgcacccagacaacaataatatgtttaattaaatgaatggcaaacagtgtaatgatccatatcattgtctccactttttccacaaggtggcataaactttgtgagatgactaatattaatagcttgtctctgctgctcttaatttcttggaattgtcatgcaagtagggttatataggctaggcatatatatgttgggggtatcaatcaaggtaagaataggacataattatatcgtgaatataagtgttatacttattttactaatatgaaatttttttaaaaggtacccacaaataaaattaaaacaaacaatgtatatcatagtatcatactaatatagaaaaaggagcccaacaatattatgaaatggtaaggtcaactttttcattattaattcgtttgtatttagatattgtggatatatgtaatgtacccattacattatgattgtaacggttgagaagaatttatagccctttagcagacattaccattgttgtgattttattctcaataaatataatctaagaacatattccactggaattgttcatatgttcatcatcacaagaaaaaaaaccctcatcccatgttcagtggcatataggaccacgtacgagtatttttttcattcattttcattggcctgcctttttcccgtgaagaataatatctattaattgcacaagtagttctattattcctttttcagaaaaaaaaatgaggaaagagtagttctattattcattgggatagttatttagatttgtattagaatgtaagactgaaacagatactcaaatacgaaattttaaaacaatgtaaaatatgacaagtttatgtttgtccattttctatggcattttatgtctttagaacttttttatggtattaagtttgtcatatttttttaacacttatttggaaagcatatattttatatttgggtacaaagttcatttaattacactttgaaaatttagactttagaggcggttttttgaggcatacaacatcaattttggtgaaattcgcgaccgacactattgcatttgcagggatcgctaaagggggtgaatatatcgaaaacataaatttccttatgctgtcggttattataaaatgactgacgtcattggcagggtctaatttcaaaaaacttgcctatgtcgccagttatcatcaaataactgacattgtatatatttatatagcgtcaattgtttacataataaccgacgcctaatgtattatatatattttaattaattttgaaatcaaatctaagttttatataaaatcaaatttttatatttatatatatat

SEQ ID NO: 46397 - DNA, 1349 bp, Cannabis sativa
gactattgatctgaaaaataacccctacgtcatttttttgtgcctatttttaacagttccaacaagtttaaagcttcaaatggtttagttggtcttccaaatcatgtttctcaaggttctggttgccaacttgggggacaaaattgttatttagaagtaacccttggttgccatagatcagaaggtgacgggcaagggaattcaaactcaaatttcaacaagaatacatcccagcatcatgttgctgaatcttctgctttggggaaagttgatcaaaagggagttgtagataatttatcagtgtacgagaaaacatttctatatccacctgaagccgtgtttgttcctgtattgcaaaaatcatttacaagatcttctcttaaaaggtacataaacttaatctgtactatccatggccactttttcttttttggaacaatagggaatcgacatatttggtctcttgactttggtccttataaatttgtggaaattgattcttgaaaaaggttatattcttcattgatttggcttagagaaaatgaaaagaaaaagtgatgttagaaatattgaggatagagaaagtaaggatagttataattttattttttccaggaaacacaagtgacatttcttcggctattatttaatataaaattaaatacaagttctgtttgagaataaaaaaacactataaacttcatttttgttcttatagtttcctattttccttagctttggttttgaaaaaatattctctgagatgaatgcgaagtactcctatttgttctcatagaacaagtcccagaaaacagttattagtatcgataccaaacatttcttaactttttgttgagtttcctcatgtcttgtttttctgaatagtgaattcattcaataattatataaatcaataactttcttgaagtatcaggtctctttttaatcatgtagcctaatgatgttggtagccgaacatattcctgtagcacaaaaaaataaggagaaactctgaagtcgtaaattacttttgtctggtttttgaattatgtcatgctttgaacttgcagattttggctgcagaattggataggaccctcattatctggctcagctttttttgtgcaatggtcagtaaaatttatttttattatatgttttgggttggttattctatttccattctgctgctcttttcataagaatactcctcacaacaattgcctttccgttacatatttctttcggcctgacaatgatgtgttatcatcacatcattgtcttgaaaattttgtatatatgccctgaatctgatcattataatgatttcttaaatatctattcctttt

SEQ ID NO: 46398 - DNA, 1089 bp, Cannabis sativa
tccgtgaaagtacaataacgggacaaaatcatatccctatatatataaaggactagtaatgaacaaaaatacaaaatatatgtacccaccaaaaactttaaaggatcaagacagcgatataaaatttattctaatacctactcttagatattttatatgcataatacatatgaatgtgtatatgaaatgcgaaattaaatgaatgtatacacaatataattataggatcgaaataccgagctttagttttggatctgctaaataaaagaaaaattattagtgtggataatcgggcatctaaactctctctactctctttagatgaatttactatgtttcacagaatgatcagtagtgaactcagagaccgagaatctatatttacataggtgagaccttctattaaaatctctgccacattaattattagaatagtttaataattaatttaggaaattaaattgagaaatcacatatttgataaatccatatataaaatatatcaatcaatttattgtgactaaattcaatgaatataaaatatttattttattatatacatttataaaatcatttgattgattttattcttaacatataaaatattctaatttgaatgtcatactttttattaaaaaaaaattatattaaatacataatatattgttattattatgagtgccactcacaattggaaatcctctatccgaacataatcttatatgaatatctcaaaacagaaaagacattgtctttatcttaacatgtgtccaattgttacggggtgacatataaaaatatatatatatatttaaatatttatatattagtttagaaatttattagtacaccacttttttaaatagttgttttgataaatcttctatttattttggtatttaaaagattcttttagtataattaatgctcattataaatttttttacttttagtaaatattaaaatttgtaattaaaagtaaaaaagttgtaattaattacaaattattacttttatgttgtgattaaaagtctgtggctaaaagtattaagcacaaaaattacaatttattatgactaaatgtatttt

SEQ ID NO: 46399 - DNA, 1351 bp, Cannabis sativa
cattcttttaacataattaactctatcacttttacaaatagtctcacaaagaaaaataattgcgggtttcttttggaaaacaatttccttaaggaattgatccaccctcaggttcccaagccctcggcaattccaacttaacaaactcataacgattggcgggccccaaactgagtacccgccaaagaatcgtttttttggaaaactaccaacattagcttcagatttctttcttaaaaatccatgtccaccattgggcttttctacttgtattaccccactatctttttcataaaccccattttcaaaaatgccactttctccatttattccttcctgaaagatacccacgtccacttcatcaccattcaacaccggccccacaatatcttcacttgattgaccaagcacctcctccccattcacacgtctcctctttaaatccatattaaatataccctcattttgaatttccttatttcttcctacctccccattcttctccctctcctcattactgtccatgctaatagtgctagtaacagatttgttattaacaccaaaataccttccaccagtcactccaccaatcactccctccatcatcatcatatcctctgaatcatggtcagtattcaatgccctctcatcacttttctccatcgtactatgttcggcaaccccctccactggctgccccatattatcacgcagccaccgagccccgatttgtttagattgcctccggtcaggcgctttcatgaacaaaccataaggtttggcaatggtgtttgctgattcctcaaaaaacctatcacagaatcgttcggagtgtccgataataccgcaaataaaacaaaacgtgggaaccctttcatatttgaagttagcccagaaccactccaccttgttcttgtaaattcgcattcttcgtttaaggggcttctccacattaatcaaaacccgaacacggaagtaatctcgccatataccggcaaaattctttggacaagaggaaacatattgcccaatataagcgcccaccccctgcaggactctatccgatcgaaaccccacttccagattataaacttgaacccaaatctccatagtgttcagtgctttgttcctaggattctcgccttccttcaaacgttcaacaatcaaaggactcttattaaacgtccatggggtaccgtcaaggactctaccaatatccacttcatggaagaattggaagagatacttattagtttccaattccttgacgtacattcctttccctggcctccacagcgatgcctgtaaagacggcttagtttaatttggaaattagcagttaatcacgttt

SEQ ID NO: 46400 - DNA, 1371 bp, Cannabis sativa
cctcctcaaaggctacacaaggaagaacatattagctcgctgcttgataaaatttgaccttagtaaagcatctgatacagttgattagctcttcatttcggacttactcgagggtctgtgcttcctggccaaatttattgactggatattggtgtgtctgtgtggtacatcctacacccttatccttaatggtagatttcatggctttttccaagggagaaaagggctccaaaaggagatccaatatctcctctcctttttgtgctggtcatggaatacctcactcgacttctaagccagttctctgatacaaaagaatttgactttcaccccttttgtaagtctcttaaacttatcaatctttgttttgctgatgacttagtcatctattgtaagggaaatctttcctctcttcatattgttcaaaaggctttttctagtttttgtgatgctacgggtctagtagccaacaaatctaaaacctccatctattttggtggtatctcggctgatctcaaaaagagtcttttagacattgtaaatatggaagaaggattatttcccttgaattatcttggagttaaactgcatcctaataaatggaaatatactgactgtgttggtataatgaaaaaaattcaaaaaagtcttcatggaaggagcagtaggcacctttcttttgctggcagagcttaattaatctattcagttcttttgggcattagaaattattggatgtacatggattctagctgtttccatagtcttctgcatgacgaccattatatcttgcatcctcctattttgttccttttgcgcgggtagttcagcctcatgatcagccaccttttgccttagggccagtagttcggtataactgccatcgtcataagcatcatacccttccttgtttcttcatactcttcgtcatttgtttcgttttgttctttagtatccacgtttactcatgaagctgcttcttcgtcccctagattctaggagtcttgggggggacgagactggcgtgtatggtttctagtctccaccattgtaccttgaatcttctgttggtgttctttggacaaagcttcccacaactctcaatgaaagtaccaaaatgttgactgaggttttcagcaaccagatatttaatgtaataatgatagcttagggagagtaatgcacatatttttacgtggttcaagcattaatgagtcgtagtccacgagtctctattattaataggtgggtgtttcttacagaggatgtttctgtgttctttttccaatcccctcattaattttgttaaggggtattatagcgattggtaggaagaagaaaggtcttaattgtctttaagtgccatccatg

SEQ ID NO: 46401 - DNA, 4237 bp, Cannabis sativa
aactggtaaactgtagtcttttcttttgggagaagtttataattcttttaataacatatctccatacatgactgttgcagtgcgatgtctttatttatgtgtcttgtgcccaaacagctcttttggatagcaaagagtatttagctccagttattactccatttgaagccatgttagctttcaacaggtattaatttattgcaaattatctgttgtagccttgataatgtcaaaagagttcaatcccaattgattaaagtgcaccgttactctcctaggggacaatggacaggagaatatgtaatgcaattccaggatttgatcaattcatcacatacagagtcacagaaccactcaaaagaggcacgcttttcctttctgcgaggtggttatgtagaagattttgattcacaaggtaccaaccctcctatttgcttttaaagcctgtgatgagtgtgtggcgaaggggttcttgtcctcataatttatctgaatatataaagacaaatttaaagtgattgtctatcttgaaggtgcaagaatttttttaaaaatgctcacccatatttcttgttttaacattacggaccaaatttaaaacaataccacccttcatttgaattgttacataaacagagaataatgatgaagacaaaggaggtcttgctttagcacatttgacagcgcaggctctacaattgcgtgataatccaaattctctagccaagcgaacagcaaaatctggtgcagagtttctggcaggtcgatcatatcaaggtttagagatacacaacgaaaatgcattgccggaaccttatattgttgggaggagtgggagagcggcaaggtaccaaggtgagaactcttagaaagagcgtttttactttgattaatgtattaaaaagtagggaaagagaagaaagtggtaaagtgaatatggaaaggtgcttataattagtctacatgaagcgtaaagaagctattcatgaaaattttgacaatgcgtgctgtgaagcctgtgataggatttgaaggattttttatttttattacacttgtaagtcatcagtgcaacattttacttattcaaatatattcatctagatagcttcgatctttgttcagtgtaaattataatgataaattcaaagtggaatttatattttttaatttttgttaaatcatatctgtaggaatatcattctatttttagtattatttattgtgacattatattgattttatttctcttttaagggattcttgtacatgctaaatacatgcatttttatgagaaataatatacataaattaccctctttgttgacttggtatcaaagccaacacagaatcctaaaccttaatcccagcgtgcttttctctaatcccattccaccatgtttgaaagcagggagctagccaaaagtcaacataaattttatattaaaactgtttattatttttccaaatctttttatctttttcatagtgatgtttggggaccatcttaagtcaccactaattctagaaaaaatggtctgtaacttttatagacagccatattcgtctttgctgggtttatttgatgaaagaaaaaaaattaggtggagcagatttttttagctttttacaaaatgtttgaaactcagtttcaaacaaaaattagcatctgacgaactgataacggaactgaatactttaataatattcttgaaaaaattttgacagaaaaaggtattttgcatcagtccatttgtcaagatacatctgaacagaatagtgtagttgaacgaaaaaatagatatttgttagaaacaactcttgctgtgatgttttatatgcaaattcttaaatatttatggggtgatgctattcttactgcatcttatttgataagtaggatgcctaaaatttttttgaattatattactccattgcaatgtttcaaaaaattcttttcaaattctaggattcactctgatttacctttgaatttttttttgttttcctgcttatgtcctcattcctaaaaagtctaggtctaagttagatcctagagttgagaaatgtgttttttaggggtatcctcctaatagaaaaggatataaatgctttaatcctattactaaatgtgtttatataactatggatgtgttgtttgtagaaaatatctcttatttttcacaaaatttaatttagggagagaatttagtggaatcaaatttttgggagacggttgaacatttacctaagacttttgacactgatattaaggagattaatcctataatttttaaatttgaaattggtttgtcagatgaagaaatgctacgattgattaaaaatcgcaacaaccttgaagtacctgtggtttattcaaggaagaatgtcgctaaaagagttagagatcatgttatcatccaaatgcctagtcaattgccagccctagacaatggatcttcaaatattccaagtaattcttcatcttctattcctattttaaattcaaattctgatcctaagctgaacccagaattagacccaggaaatcttgaagtagataatcttcctattgctcttagaaaagggactcgtgcctgtaccaaacatcctattgccaaatacatatcctatgatcacctatcagaatcctataaagcatttgctattaaaatttctgaactgattatgcctagaaatattcagaaagcactagatgacccgaattggatgctagtagtgtttgaggaaatgaatgctctaaaaaagtggtacttgggagattatggtgttaccaaaggagaagaaaattgtaggatgtaagtggatttttacaataaaatacaaagctaatggaagtgttgagagatacaaagctaggcttgtggctaagggatttactcaaacacatggaatagattatcaagaaacatttgctcctgttgctaaaattaattatattcatgtgttattatctctagcagtcaactctaattgccttttacaccagttagatgtaaaaaatgcatttcttaatggagatctagaagaagaagtgtttatgagtcttccacctggattcgaagatcactatggagcaggaaaagtgtgcaagatgagaaagtccttatatggactcaagcaatctcctagaacctggtttgcatgttttgctaaggtgtttaagtgttatgggtatactcagagtcaagcaaatcacacaatgttctataaacattcagaagaaggtaaggtggctattctaattgtatatgtggatgatattgtgctaactagggatgattatagtgaactcaaaaagttgaaaataagacttggtgaagagtttgaaatcaaggacttgggtaattttaaatactttcttggaatggagtttgcaaggtctagagaaggtattttggttagccaatgtaagtttgtactggatcttctaaatgagactggtatgatgggctgcaaacctgctgaaacacctagtgaacctaatgttaaacttgaacctgtagatctgaaaaacgtgaaggaccaagagttgtatcaaagattagttgggaggctaatttatttgtcccatacacgaccagccatagctttctctgtgagcatagtaagtcagtttatgcattcacccgattcaaagtattttgatgctgtttacagaattctaaggtatcttaaggaaacgcctcgaaaatgtcacttgttcaaaccacgaggatatctagaaattgaagcttacaataatgcagattgggctggaagtatggtagataaaagatctacattaggttattgctcctttgttggtgggaatctagttatctggcaaagcaagaaacaaattgtggtagctaaaagcagtgctgaagctgaatttagggttgttactcatggtatctgtgaagtgatttggataaaacgattgcttaaaaaactgaagtcatcacagtcaactcccatgatgttgtgctgtgacaacaagggagcaattgcaatttcccataatccagtgcttcatgattgcacaaagtacgttgaagtagacaagcactttattatggaaaaaactgagagtcgtcaagtttgtatgccttatgtccctaccgaacaacaagtggaaaatatctttacaaaaggattatgtaaaaaacagtttgattatctaattggcaagttggctatggagaatatctttagtccagcttgagggggagtg

SEQ ID NO: 46402 - DNA, 1983 bp, Cannabis sativa
tatgcacacatacatattcatagaaatatatctttgagattatatatgctaggaatatatatactcattattatttaattatttggtatggggtgtatgtataatatgtttaagtattttcactatcaaaaataggaattaatatatgtatatataagccgagcaaccataaataatattcttatagagtttccatatatatatatatatatatactaattcatatataacctttatagattatttcttaaatttatatttttataattatatattaatctaagttagtgataaatttaaaagaggctattataggtcaagagaaaagaaaaagaggaaacttccttaaggtacgtgtgtgatcatgacattatcgtgaccaaaagtatgaaagtgtatatatgttagctatatatagcatccttaattattattaattagttgtgaatataagtactaattaattataattattataaaaaaaataatagtataattaatcagttgttaacttgttatatcttaattagtttgtagttaggtaacttgttatacatatttatataaatatagttacgaatttggtttcaattaaattaataatattaagacttaattagaagtaatatatgccacacacacataactataggtatagtatttttcacgtagtaatatattattgtaataataataaataattaacctggaaaaacagcgtggaattggaaatatgcatgatcatgaatatcccaaggtgaaatgtttttataaataaatttaattattatttatatatatatatataatagcaaaagaacaaagcctcaaatctcaagaaggaacaagccccgtgattcccgacgaaattgagctatatataattaattatatattatctttttcagtttttgggtctctgtatataacacatgcataaccccaccatctctattataattactatatatatttatagtattcgaaaattggatttaataccccaaataaaaaaaatgttttaatagtttaattcttgttacaggatttaataattatttggattagttttctctcttcctaatatatattattaatctaaaaatgtcagaatatataatataggttgaaattggtcagaaattggaatattatatatagatattatgtgagaacacagcacaaacacacctaccatgcataattataatcatgtatttttttttttattattatattaattagtgaatatatttttagtatttattatgtattctattatatatataaagatgattagtacaagaaatcaattaaaacttataattatacacatagtaattaaatttactaaataattgcggagatggttaaagagtaaaatgaagtttatgattattaattttagagacaaattgtactattatttttatttatttgattttcacacgagtactctcaacacaaatattaacccgatcatgcatcatcagtttttggtagcttatttttgtttctatatgtaaaagtaaggaagtagtaaaattaaatatgtcttgttttaagtaacaaagaataattaaggagaaattccataaatatatatatgtagacatttcatcatgaccaagcataaaagacaaaaattgaaacaaaaaagtctactatgattaaagcttaattaatttgttcaaactattaattacttggtatgatatatacgagacaagaagaaagacataagttgtaataaattagcaatacaacttctcggtccttacaattatttattaaaatatatagtaaataaccttgcagtttgtctcatttatatatattataattattagggcatactcacatagaaacataaaaaaattggaaaacaatgtttattcattttagttaattatttataataaaagataatatttagagaaatttgcggctaaacccccctatgtttcaattgttacacactta

SEQ ID NO: 46403 - DNA, 2851 bp, Cannabis sativa
aataataataatacttacttgaaagaagaaggaatagaaggccattcaggaacatatttgtgaagagggtaacaatggagtcttaaatagtctctccaattatgaattttctctttgttaacattaaaacttgttgataatctcatagtcttagatggatcatctgaataaagcttcaatttttcctctaatggaagatcaaaaaactcatgtgctacactctgcatcttctccactaattcactagacaccccatgattggtaacctatacatacatatatatataaattaaatttgtaatagatatatatataataaaaaaaaatagaaagaaattaattgaatttaatttaatttaatttacctgaaaaaatccatagtgtttgcaagcaaggccaacttgattgacaacttgggctctgtggttagagcccaaatcaattacaggaacattttcacaagctgagacttcagagagccttgggcgttcggattcgggtcggatatagctttctggtaaatttgagaaccggatacccgaagacaacacttttgtttccatttttctttctatatatacttttctttttattattactattattattattactatatatatatgtatatgtagctcttgattttaaggaaacaatttctgggttttctttcttttttaagttttgttagggggagagagagagagaaagaaaaggtttggttttgagttttgtaagataagtaggttcgtggaaagtgagcactagaaagtgagagtgttctcgtatttataataataaatttgtgtagtctttggtctagacctatagtactactattactactacttactactcatagtaacaatagtgtgtatgtagtaaatatggtatttaataaatttatggtatttaataaattattttagtatatatatatatttttattattttatgattctataccttgtagctctttaagattatttttaaatttttagaaaattctaaatagtttacaatattaaaaaataaggttcaaactattatttactatgcgtataaggaaaaacaatctaataaaatatttaaatcttattttcagtattgtaaattatttgaaattttctaaaattttactataacatacacgtgataaaaaaaaaaaaaaattgaactaaaaggttctattagttgccaaaacaaatagaaagtctattgaaacacctaataatgtattgtagacttactctatttattttatcaaaaattataaaatttgaaataaaaaaaatgaatatatatttggggattgtatacaaggaacattcaatcatacttactaaaataaaaatatatatgagatttgatacataattatattaaatatctctaatagagtactataaatgtggtttatatacatttttttagctaatttttataacattgaactccaaaattagtgtataatgtggtctaaatttgatatatgctaaaagttatgctaaatttagcacataaaagttatgctaaatttagcacataacatgagtcaaattttacaccacaataaatattacttttatatttactattttaccactcatcaatataatcaataactttttatatttttatttatatattggagtacaaatgtaaaatttaggccaaatataatattgagtcatttttaatctaaatttagtacaaaatttacattatctgttaaagatagtctaatagtttgtggtaatattaaagatgaatcattggtgtcctttaacattttacattgtatatttataataagtgcacgcaaaaatattatatattcaatgatgtaatagtattcttaagtcgatcatatattaaaaaagaatctaccatttcaaataagaataataattgtggcacatttaagttatagatatatttttataaataatattaatgtgtaattaatctcgactatatcattaaaattaaaagtgatgtaatttctacttaaaattaattaaaatgtgtgagatattatactcaatatgtatacatataaactaaaataatttatgacctaaatatttaagtttaacttttggttgtaaatatataccttttagaatgtataacagttaaatttgttactgtttaaaaatgaaaatcaattagaaacggttagaggttgttagtgtctgttaaggtcttttctcttcaaatgttattgtatccgaaacaatataaataaagagcttctcaatcattcaagattgagcattcgttctatattttctactctcctttttcttctcctcaaactctattttttagagttttgtcttagtattagagccatgtccaatcaaggtgacaattgcaacaattgcgacaatggaaatggtcatggagttcaaatcgattcactagctagagctaggattgaataaccacaagctcaaattcccctccccaacaatcacctccttcccctaaatctcatattagatcgcaccaactatactctttggcaatctttggtactagctattgttcgtgcatatgatctagatggctacattcttggcactgttccttaacctctagctctccttgcaggtaatgttcccaaccctcctcttcaataatagattcgttttgaccaattcttgatgtattggctaataaattctgtcactaaacacatgtggggacacgttatccactatcaaacctcctctgacatttggaccacctttgctcaattatttgccacaagatctcgtgcccaactctagcaactttgaaatctccttcaaaccaccaaaaaaggctccttatcaatgaagaa

SEQ ID NO: 46404 - DNA, 1153 bp, Cannabis sativa
gacaccagtgatatatggcttacgaagttaattcgatattcagttacacattgtggtggtgctttttacatgatctcataacgacaaagcttatcaataaacgaactcgaaaacactcacaagacattcaacattctttgtgaataatttacataaaagagaccgatttgttgacatccaacccacaacatcttggataagcatcatgatcacttcaaactaagaaggataagcaatttcgaacatgactgattagtgtggtaacaaaatacttaaatttgatttaaaatgattacgttttaagaggatagaacaattacacatacatgattatcccatttggtcaaagtaccgatttgttttttcaattgattttatcaataaaaaaaatcaaccaagagcagcaacaacaatgaaggttccagaagttgacaagtaatattttgagatatataagaccatctatagtgttggtgacacctcaaggagcttaagactacttaagtggcttcaccatatcgctgtggtgctatatcactgcgagtgtggtgctatatcgctgtgagtgtggcacgggaaaacgtttgcagatgcgaccatgaatcgaaccagatcgaaacattcagctgtcgacggacaaactttgccgaaacgttgaccgcaaacgaaggatgaccactcttgagagttcaaagatcaaatgaaaaaaaagaagataatttctacatgtgtgcaactttgggaaatcttgcatggcactatagcgacatgtcttcggcgcgtcgaccatacaattcgatatctatcatattttttatttttttgggcctataaaaagaacattatatcttcgatttttggatgattggagagatacagatacaacctagagatcagaaaatacattgaagagcaagagaaacagatttcaagcttaagcattatcagtttttattagagcatctctaatggagagctatacatgtggtttattgccatttagaatattttgctaaaacttaacccctatgtaaaatgtatgctaaatttagcaaaaaagttaacatggaccagattttagcccataataaataatacattttttaattacctctttgacactcattaatactattcattaataatttttttt

SEQ ID NO: 46405 - DNA, 5831 bp, Cannabis sativa
  modified_base (1267)..(1273): a, c, t, g, unknown or other
  modified_base (1531)..(1537): a, c, t, g, unknown or other
  modified_base (1710)..(1718): a, c, t, g, unknown or other
aagatttttcataattaatctatgaattatactaaataattcacaataattccaaataaattcagaaaattatgaaacttcaccaagcaccctaaaataatatgtagagtcgaaatctataaagaaagatgggaaaaacacctcacatcttcccaaattgtggtcgccagagttacgttggcgtagttgtcttctccgacgacggcaagccttcaactactcatacagttgtttttcacgcattatatattttgattggtgaagcttcctacagtgcttagaacctcaagccgaccataaatcaccaaagaatacggtcaaaaattgtagtcttcttcgttgtcggtgtaccgttaaaaatgaagtccaacaatgtcgatttttgttcagggccttaaagcttccattctccacatcaaaacagatccttggggtcctataagcttaaacacaatgtttcttaaacccaaaaatgacttaaacacgttcaaatttgaaatttctcaagaacatgcttgaacgtgcatgaaaatggtggatttcaaaacctgcgctcttagcgcgtttggtcatgactattggtttccttagatcgtacagaagctaaacccaaaaactctctaagtgtttcagaatcaaaatctccctttctctctctaagtttcacgcgaacactattggtttctctcgcacttttcgcacgacttctccaccttagatttagttctaatatagtaacaaattcattgtgaagcgattcttagttctacaattatcgatcattttgtttccttaagttacacaccgatataactaataataataataatactatcacaaatcaatatactatattatatttctagtaataatataacaaatatattacaccataatataaaataaatccacataattattattgttatactcacaataataatatgcataaaataaataattaaattactacaagtaattaattatttacctgatatgttttacactgtaaaaatattctaactcaagaaatcaaaaaaaaaaaaaattattgtcactatatacaaattatttacctgatatgttttacctgatatttataaaatttctaaatatacaaattaacaaaatatcgacaaaggaaaaaattacaaaattatccttttaagaaagaggatattacaattatatttattgagttttactgcagtatccatgaatatatataatcaatttcagtgattagccctccatgtgttggttcgtnnnnnnntttggtcaaattattattttaccctttgaattatttctttatcatttagtactaataattcactagtgaaagtataatttagatctcatctaaatttgtgcacaacattctagttctagaattaacacttaaagaaaactagcatttgatccgttaggaaagtcatgattccataattgtaaatcatgttctcagccacccacattattagattcccaaaacagaaattgtaataatcatcttctctgagaaactttnnnnnnngaatcaaagaaactaataacatgagcatgagttcgtgattacttaggatttaggtcgatctactattgatcatcgctatgatatgaattaggtctttatagtaaacgacatgttagataaagacaacttcattcatattggtccttattatatataatctctattatatacannnnnnnnnctttgatgtcatactacatctgtaatctgaaccaagattacttgcattgaagaacgagcattagtgaaccgtattagcaaccattgactagagattcccaaaatttaatatgttgatgacttttttattcatgactaagtgatcttagttttttgtacaactacaagtcaaaacctcatatatgaataagaaattttctaatacttatatataaattattcaataatgaatattaataatttaacttcatgcatatatcaaaatattcgactctttattgataattaaaaatacttttatagacttttgcataaaccctattattaatagaagatctaagataatctaaggtgtacaagttaaaaaaaaaaatgaaaaatcgtttattccttgcaaatgtattgtgcattgatgtaaaagaaactgagggatataggctacatgaacaaatagaggacatgttccacagaatagattgtccacatgaacatatagtatttttggcacgcctcctacattgtaaaacaaaatttaaccaattatataacattgttttcaaatgtttgacaaaaatatatatcataattattatgaagatttaagataatttaatgtgtacaagttaaaaaaaaaaattgagctcaagtgtacaagttaagataatttatcatattgtgggtgattttttgtttgatacctcaattatatatatatgtagttttttggtaatctaaataaagaaacagttagttaaaaatcaattccaactatcttggacagataatttttcagttatgttcacttattcttgagcttgggtataagttgttacaatttctattttttcctttcatgtagcatggatatataaaggcatgtaggctctcattttgttacaagaaaaagctgagagattagtttgattggggagagaagaaacagagtgaaagaaagtgaggtagtactgtctaaggtgtgttcttggagtgctcgagtaagagagtaaccgtgattatgaattgaatacaaggaatacctaagggggtagcaggaagtaggcctttgtttctttggctgaacctggataaaaactgtgttctttaatttttcaaccttttagtttttgaattctgttgatgattggtttaatgttttgtcgaattgtgtgttgttaatttataatagtggtatcagagctttggttttgcaagaacaagaagaagcttctaatttgacaaataaaggaacattaaaggttcaaaaaattaagaaacagacaacaatggcttcatcattaaccagattcgatcttgagatgtttgatggtactggagactttagtttatggaaagagaaaataataatggcaatattggtctaccagaaattggattcagctcttaaagatcaattagagaagggtgagaaaactgagaaaccagactgatggttcaaagaaggaagatgctaaactataatgaagcaagcaagatgagcaatcatcatgaacttggttgacaatgtattgagacaagtcattggagagaaaacagctcttggaatctggacgaagctaaatcatctttacatggccaagtccactgcaacaaagattttcttgaatgggaagttctatggctttaaaatgaatgcagttaattctttaaaacaaaatcttgatgaattatataaaattattttatctcttactaatatgggtgagtctatcaaggaggaagatcaatttgtgattctgttaaatggtcttcatgatcaatttaaagaaatgaggactgtaatcatgtacagtcgagatactataactcttgaagatgttatgagtaccctcaggttaagagatgcagaattgaattggcaaaaggctaccaaacaagaatcaagacaagatgaaggtctttttgctcgaggaagaaatccaagaaggagcaactcaagatttagaggacattcaagatcaaaatctaggcctaaagaaatcagaaaatgtcatcactgtggtaaagtgggacatctgatcaagaactgttgagagatcaaaaataaaaagaagaagcacaaagatgaagaagaaaaatctaatgacttaaatgcaatagtagatgacacatatagctcagatggtgatcttttcgctgtgatgaatgactggtgtgcaagtcagacagatggagatgtatgcacttagcctacaacacaaagattatgatgagtggatcttggacaatggttgcacttaccatatgaatcctaacagggaatggttcactaactatgaagagatcaattgaggaaatgtggtcatgggaaatgatcacaagtgtcaaatgacatgcataagatctattgtaattagaagttttgatggaactgtaaaaactctcaccaaggtcagacacataccaaatttaaaaagaaacttaatttctctaggcactcttgatgatgagggatgtgagtacaagacaagtaatggagttatgagaatcaccgagggatctatgctggtacttaaaggcaccaagaggcatggattgtactttctaaatggccaaacaatcatgcctgcttatgcagcatctgtggataaatgtgtgtttgaaactaagttgtgccatgctagaatggggcatattggtgaacaaggtttagttgaacaatcaaaatatggtttgataaacaattacacttatgcaaacttaccattatgtgaaatttgtgtgcagggaaagcaacacagaattaaattctctaacagcagttacagagccaagagtgtgcttgaatacatccactctgatctgtgggaagcaagacagatcaagacaacaggaggtaaccaatattttctgtccattgttgatgattatagcagaaaggtctgggtatttcttttgaaacacaaaaatgactatttagaagcttttaaaaattagaaaactcttgtggaaactaaaaaaaattcaaaaattaaagtgttgagaattgataattgtcttgaatttaatgatgatgaatttaatgagctttgtttgaagtatggaatagaaagacatagaactgttgtaaagacccctcaacaaaatggcattgctgagagaatgaacagacccttgttaaacaaggtgagatgcttgctgctagaagctggaatgagtaagaaatactggggagagacattgaacactgcttgctacctcataaatagaagtcctaagagaaagattgatgccaagactatgatagtcagcagacccgtgatctgtaaggggaaatgttgggtaagttgtgcaatcccaactcactaagacaaggaaggctactctgatgtgcttgcagatacgatttgagccaaggaagctttggaacaatgccaaaactcactaagactagatcctttgaacacaaaattgcacaaggaaaagcatgatgcaaggaagttgttgctgcgaaaacaaaaagactatcagtctatgctctaggaaaagtccaaggtcacttggatcgagcatggagatgataattctgtgatttttcatgccagtattaaagggagaagaagacagaatagggttttatctattgaccacgatgatggcacaagggtaaatgaccctagtaagatagctgatgcatttttggcatattacactgagcttttagggtccaatatgcataacagaaggcaagtcatggaaaatatcatggtcctagggcctacagtgactccacatcaagcaagtgctcttttaacaaaattcactagagaggaagtgaaacaggtaatatttgacatctttggccttaaagctccaggtgttgatgggtactccagtttcttctttcaggataactgggatgttgcagaaagtgtagtatgtgaagcagtgatttcatttctagaaactgggaacattttgaaagagataaattctacagtgctcactttggtccctaaggtaaaatgccctaatacaatgaaggatttcaaacccattgtctgctgcaatgtgatctacaaggtggtaacaaagctcatttactcaagacttaaacatatccttcctgattttgttgcacaaaatcaaggaggat

SEQ ID NO: 46406 - DNA, 2624 bp, Cannabis sativa
  modified_base (1174)..(1185): a, c, t, g, unknown or other
  modified_base (2536)..(2543): a, c, t, g, unknown or other
ctaatataaatttatttttaaaattaagaaatatttaaaatatattaattatatgtacacaaataaaaccttaaaatgaatcaatttgagcaattatcacaatgttgcttttatacaaaccatatatgatagtcaaaattttatgaaaatctctccaagaaaaatgtagtattttccttgagatttttaaaccccaaaactatttctaccataatgaaaaaacattactagaagacgaggataaagatttatctgtagtagtaagattatatgtactaccaactgaataattaccatgatttgtgtagagccaaaattacgcattctcatgattgaatgagcttactggtatgaaaaaaaaaatacattttacatcaggtagatttacaattcaatataccactatagtatttcatatcccagacaggccaataagatttgacactcttgccacatcatacaaaagaagcaagcttaggagaaaagaaggtggtcttggtagccaagggtctttgaacacccttgtattcttacaatttccaatactacgtcttagcccttttgacaataaatctctttcccgtaagatttatttctaagttaatgatgggtatgatcccttacctacctctaggatgttagatactctaaaatatcttgctttctagaagtgttcatcaaaccactcataccacacaaattgccacaccacactgcacaaaaaatatagtttgaaatcttttgcggtacgattgaggtttacatttttgccaaaccgtgcggtgcgatgcattttacagttttacatttaataattgtggttcaaatcgtaccacattatatattataaaaatactaatttttacattatgatttctcttttgatatatgggcaactcatatgcttacaaagtctaagccatacaattaaatttaagaaacattcataaaaaaatttcttattttttttattttcttaacttcttattgctaacatattattattgatatatataatatgtaatacatatatatgtatattatatacttttttagagacaattcaatacaatcacttgatttgtatgtatgttatgatgttaaaagtttgatacgatagttttttttcttatttaattgttgaaactttattagactaatcttttaatttttnnnnnnnnnnnngataatgatgatagtgtaaactgtctaaactgtaccttaccgcattatatttttacggtatgatttttgcagttttaaggttttgtgaagcagttgcggtttgagaaattgtaaagagtaaagactgcatatgcgatttggtttaaaaaatagcctaaacccgtaccacccgcactgcgaatatccctattgctttcattacttgtggtagtattgatgagggattcattaaaattttttatacttgtttggccaaaagagcttgattatactgaatacataaatagtctaaagcctaaacttctatcactctttggttgacacatcttatgtgaagctttcctctaaagttgtttttaattgattgatccccactaatttcttgctattaatctttctatctcttcactatctctccaccaatgccctctcgaattctctaaaacatgatatttggtaagttgatattacttggataacaacttttgctagaacttctttaccctgttttgcgaaaagttttgcttgttaatcatgtagttttgcccatattttatcctttattggcttgaaaatcacacctatcatcggtagacccaaatattattcaatagcccatgtcatctcaatattcaaagcttatgtaaatagctaccacatctccttagatgtagagtattgctattaagaattttatggtgtctaacactatattaatgtgtcgcgttatgagtatagttaacagtttcttatattatctattaaatcaaaatgtaagacctaatattgattcgtaccaatagtaatatattatctcttgtggtacttgacaccataaaatactacttatagcatttctattatgtatcaagtatataaagacataagtcacacttactagtgttgtttgacagcattttaaattattatgtgtttccatttacttttgatcaaaaggtggttgtaaaataagtatatttttcgtaatactatctacataatatataacacttacgttagcttaatggtaaaagatggataggataaaggaaggaggaaattagactatatcttttttatgtcctctttcattttaccctttttattaaagtctatttattttttactccctatcacttcaatatactctccatgtgactctcttgtgttagtgtattttgaatacagtacatataaaaaaaaggtattatattgcaattaaatctaaaaattattaagaggagatttagttaattgataaataaaaaatgcatttttcaatttactccaaaaagaagagggtatgagttcgaactcaagacccttaacttattagttttttttttttttnnnnnnnngcgtttatatattacaaccatgttttacttggaactcgaacccagaacctccaacacacacacacactcacttatggccac

SEQ ID NO: 46407 - DNA, 1423 bp, Cannabis sativa
  modified_base (1382)..(1393): a, c, t, g, unknown or other
aaaaaaattgtaactataaggatattaaaaacacaaaacaagtaaagtttgtatcgattaaaagcctttttgtggttatgttaagttgtaaatatggattgaagtaacacaatagttctgatttctcaaaaaaaaaaaaaaaatacaaaacaagtatttatcaaattcaaaaaaaaaaaaaaaattggtataaaattttacttttatattctaacccttattttattttactttaaaaaataattttacattttagttcttaaattaaattttattacaaaaataataatgatttttttaaataattgcataattatattaagaaccaaaaaaataaacaaaaaattacaacaaatcaaaaagttcaggagcgttttacattgaaatacatagttagtaatactcccaaacagaaaaagttccctttagagtattgatcaccgtctcatagtgtctctctatgatcacaaaagaatactttccacgtatcgctgattccagactaataaacaagttgcagcttctccaatgagagggttagagaagttgaggatattgctaaccacccacaaaattgactccttataaccccttgccaaggctatcacacacattgagtcgctaccaacattaacgtcacagttgattttgacctaatcatctggcgggggagaccaagcaggaggcgtgcaaatcatcggcgcaagaaacaaacaaaggctaaacaggcagcaacccacacagatgtattcaattagttttttgaagttgcatgttgctctgtgagggtaattagaaggcatattaagcttagtcttaaggttagagtccattattgtaacttttcgaagttacttctagagtgaaaaatataatgactattataaatagtctttgaattgttggtcgggttgttgctttgtagtgtgtatagttcaaaggttgttggaataaaattttcttccttagcgccaaaatataaatatataacactaagttacaaaagtaaaaagaacaactgaagataaacatcaactaaaataataatttaatagtcaaattgatcacttgaggatcttagccttgaagaatatcaataagtattttgagaatcttgatatattcttgagatgtttgatattgttggtgagctatttttacataatccttgtttgctcattttgaaagtaattgtgtatattaggatcaactatagaagttaaatcattcaataagtttttttttttaatgtgtattatttaattgatttaataaatattttattttactaaattattttaaaattataaattcttactagtagtcatggtataaccatatcataaaagggttttttcatttttatacttcaaaacagtttnnnnnnnnnnnntttttttttttttctttttttcggaatttt

SEQ ID NO: 46408 - DNA, 1679 bp, Cannabis sativa
ttttaacatccaatcaaattcaattgtaattggatatccaattttttgtaattaaattgaattggatcggtttggttcaattggattggattggatgatgcccacccttattctagatagtaatgagcaatagaatgatgtcattttatgctagtgtcaagacgcgtatattaactcattattaatattcacatatttcacatgcaacctataaatccttgtagaggaatgagactctaaggagacgctctccgcatatgagatgccaagttaccgtgaaggaaaagatacttctttgtttcttcctctccacaaattgggcaagaggagtctttgatgcaccttatgtcgttcaagtgttttgctattccaaagtttgtttcacaaagagggagcaacatgactgtattggtttctctcaagagcctgcaaaaggtaagcagattaggtggagaatttaccactcgttccttaattcaaacccaatgatttctcatttgtcttgatggctttcctccttctaaaatggcacgtacagtgtcttggttatacaacctatttagtttaaaaaattttcactctccattttctaaaaataaatctaccatagttataaagccggtagtagaaactccattcagaattaggcaaaattcaataccatgggccacctatggatctttccaaataatgatatctttcatattagctatcacatagcaagcatcattcctcaaaacactattcttccatagccacgaatcaaaattcttataattgcattgaaggaaaggggtattcttaagctatttggtagcaaacaccttgcaacataaaaagattgatcttcatttatgagcttccaacccatatcaatagaaaggctcgattcatctctatagtttttcagaagcctaaccctcccagagacttggggggataaattttatcccatattttgagaatccactatttcttttttcactttctcaccaaaaatcccgaaccatactatcaattttgactgccattcattgagaaagttgtgtagtttgcatagtataaatcagaagggaaagaccaatcgatttaataagcgtagcacgacccgctttggaaaggttttcactttccaaccttgtagcttagaagaaagattctccaagataaaattaaaatctacatccttttaacaagttctaaacataggaagtcccaagtatttgatgtttccgtttggactgtctatgcctaaaatatctttgatacccatttgcatttcttcaattgtgttcttactaaaaaaaatagacattttaagcttgttaactttctgtcccgaccaaaaacaaaacttttccaaacaatttcaaaaagttacgggtttcttcaaaatattagctctacatacaagaataaggtcattcgcaaggaaaagtgggatagtcttggcccacccctactcaactagattctgttgattctaccgtttggataagagtgttgttgagcaactattgtacaaggaatatttatggtaggcatctctcctttcctcgaactcagtggtggaaaaagaattttgggaaaccaaaatttttatcaaacataattctgtgaggattgtaactaaacattctagggtggatctttggaacactcattggctctgtgcaaaa

SEQ ID NO: 46409 - DNA, 828 bp, Cannabis sativa
taatgaatagggcctttcaatattttgtgctattttcttttgctaatagggttattaattaatctatataggtcttaattaaggttttttcaactttgtaggaaaaaacagtcaaattttattattaatttttaagcttttgcttggtaattacacttggcactttgcttaaattcaacttatattaattgtaacaattcttttgcttttgctttttgtatgaattttttatgcatttggaaatctttaactaaattcttgcttgtttaagaggaaaaactcactgaacacaactttctattatgatatatatatttctgtaattaaaagataaaacttatttttatttcttttgctgtattttcttcttcttcttcttcttcattttctcgatctcagctcttgtccacttggacatttttcgggctctctcactatgtaaatcacatctccagaaactttgtacatgtctctgtttcgatgccatgtccatagagcatgagtctcatttttcacctgcaacaatcgaaacatggcttaataaaaggttactcgattaacctcaacgcgaacataatcactttattcatttctttcctttgttcgacaacaaattacaatattagaatgtcatttcaatgaaattagaatttttttttcactcataatatgtctttgtccattctattctcgaatttttaataccaaacatactcttcaagtttgtttaataaacgcgattagattaatcatcttattagctaatatcattagaatgtcatttcaataaaattaatacatttcttgctcgtaatacacccttcaaat

SEQ ID NO: 46410 - DNA, 3914 bp, Cannabis sativa
agtggtaacatgtggtacatcatcatcaacattctcgtgaaacgtgggagaggatagaaaaggcagccaatgattgtaatgaattattggtgatgacatgggtgatgtagagtcgggttgtccaaagccagttgagaatgggaattcaagttcattgaaagacacactatgagcaatgtatatgcgtccacttgggtgtagacatttgtaacccttgtggttgggactatatccaaggaacacgcatttggaagaacgaaagtcgagtttgtggttgttgtaggcccggaggtgtggaaaacaagcgcttccaaaaactttgagaaatttcaggttcggtgtgactttgaagagtgtttcgattggtgatttgtgagctaaggttggtgtggagagatggtttatgaggaaagtggctgtgctgaaagcatcccaccaaaaccgcaatggcatagaggcttgtgagagaagagtgagcccatctcaatgatgtgttgatgttttcgctcggattttccattttgagcgtgagtgtgaggacaagggtgtttaaaatgaactcctattgactctagaaaaggtgcaagattcctatattctcctccccagtccgattggagagtcttaatttttgtgtcaaatttcctttcaacaaacttttgaaagttaaggaatgtatttttcacatcagattttagtttgagagggaatatccatgtgaagttgctgtaatcatctatgaagtgaacataatatcgatacccttctttggatacgattggagaaggaccccatacatccgtatgtatgagttcaattggagattgagacttggtgtgtgaactattgtaatgcttatatttggattttcctatatggcatgcattgcaaaaaggaggagaatttttgaatgaaactttttcattagtcaacatgtgttttaatacattaatgttgggatgaccaagacgcatatgccacacattgacatctgaattgaagttagattcagcaaataaggactgacaactatctattggactcgactggactggaagcttggcagtatgtctgctcttggaggaaacaagaaagtttagtctactggtggaaggttgagtaggtgatgatgatgcagcaagtttcaactgataaagcccattgttaagcactccccgaagcagctcctccctcgtgattagatccttcacaacacagaaatcagcataaaactcaacaaaaacattgttatctttggttagttgagatattgacataagatttttagatatttcagggacacaaagcatatcattaagaacaagatgaccagatttgttgtgtattttacttgtgccagatgtagtgacagtgagtggaaaaccattgcctacaaggagatgggttatacctttcagatctgccttgtgttgtatgtgagaagcatcggcagtggtgtggtttgtagctccactgtcgatataccaggtattttcattgtgagcatcggcagtggtaaagtaagcttgctggtcactggttgtttgattggtgttggtgttttgggtgttttgaggttggttggaacctggtgcttggaaggagatgtcaaacatgtggtagcatttggaggctatgtggcctggtttgctgcaaagttggcagatgggtctgttattgttagtgcgtcctctgcctcgaccacagccacggggattgaaggaacgactgctggagtgttggtttgggttatgggtatggctgttaaggttcaaagatctgcgcatttgagtggcgagatgagcagtaggcatagatgagtcgtttgaggctgaattgagttgttccaaacggatttcttgactttgcaacatatattgcacttcttgcaatgtgacttgatcatgcctagatgttaagttgaccaccactgcctcatattcatggccgagtccaccaagtatgtaaagaattaaatcatcatcagatagaagctgacctgcggcagacaaaccatcagcaatatttttcatttttagaatataatcatgtatagagagactcccttttttgagagactgcagctgaaatcgaagttgcagagttctagctttagagctggtggtgtataagttttccagagtgacccagaggtcatgagaagataaacagttgaccacatgtccaaacatggactcagaaatggagttaagaagccagatgagaactgattgatccgtgcgcctccacatcgcaaacccgagatttagttgtctcggttcatctggtatagggcctccgattgtattatcaacaaactgaggtggacagtgttttgttcctagagcatagccctcaagatcatgagcccgaagggctgggagagcttgggacctccaatagggatagtttgatctatcaagttttatggtgagtggggcaaggctttgaaagggaaaagattggactggtggagctggagttatggctggtgtgttgactgtgtcagctggtgaaggttcatttgcagggttggatgcagatgacatttcggctgatgtggggttttccataaatcaaggagcccaagatttatttagctctgataccaagctaaacagagtaaaaagaggagaaaaaggctctgtatattgatgttgtattaattctctcagctcatttacgaatgaattcaaaggggaaataaatacacacaggaatgtactagaacaagcattcctattggtcatagtaataacagaaaaatattctcttgggaccacataattgatttggtgaatattctttcattgtcctatgattgtggctgattacaataattaggcctcattaaattctgggctttcctcttcgggctgggctattgtagggcctttcatttcaacatgtctgaactccatcgtctttactagtacagaatatgatacattaaatggcacttttcaaattttgaaacttttctgtgtaaaaaataacataaggcagttcatactaatttgattagattgtgctcttaaattttgtatgctgtttttcaaaatatggagaacataattttgtagtggtaacagtaagggcatagctcaattattctaaatgatttgggagacacaatttgacaatatacttcgagtgtgaaataatgacgtatcaattttttacaatgaaagatataataaaatagttagaaagtaaatatcttaattattctttattttaaaatattttattaaaaaaaattacaataaaatactattatttacatgtgttttttcgtaattgaaaaagtcattcttaacttcgtaacataagaataattttgttgctatgtccatcgttttgattagttaagttacaatcttatttattttgaattttttttatcatttaagcgtttatatattacaatacatatatttgttttgaatactaattagtaatttgtaagtaagtatactcttttatatcttatgttagtgtcttttgtactattttttcttcttttcatttcactttactttctttcattttcttttcaattatacattagttccttttgctacatatatataattatttgacaatgatttttaatttactttgataagtattaaaggtttttttggtcatatcatacaaagaaattttaataatgtatctaaagtgacacttatgatcatatattaagatctataaatataattattggagggagttcaaaatatctcatgtcttatcttttattttacaagaaattgaatttatttagatatttgcaaatacttttactttaaatgttattttcgataatatttgaaaaatcccatattaattataatattatctattatctctttgatataatgttgaaattttgtttttttttttattta

SEQ ID NO: 46411 - DNA, 4437 bp, Cannabis sativa
ggagtagagatttcaattgcatttttttcaatagcattctccagaatagtatgcagttccatttcttcttgcagctgctgttccaatttccgtacctaatacaaaagcactaccatcggtgagctgtaaaatgaccatgccgctcttaagtaacctacgaggtttcaccaaaccataagatagataccaaatgaagaacctactatcaactacaactaaaaccaaacaaaagatattaagtctatccttacaaagctaaaatgtatccaagtatcacccgtaggaaatataactgtttccaaaagccgagcagaaaggggaaaaaacactagagaaatttaatagttgcttaattaatttgaatggacaattttcaggttgactatgctgatatcgaggttggggtgcttgctttatcaaacaaaaacagcttcatgatacttttttcatcgaactgtttgaaacaagcaacagttacattcacatcattaggtttgtttatgcaattaaatccactaaagcattcagctacactggtaaagacatagacttgaacgagacaggatctcctatcagaagtgactacaagaagaccttttttttttttgtaacgtagcttcacatgttgaataaagtattcatgacatatgaaaatttgaccatccttttggtgtcaagtcatcattggttatgtttgtctatgaacagtataatgctatcacaagcagtttatgcatactaaagccgacaccacagttacctcttaattaaataaattcaggcatataacttctaggcctttcacagcagaagaatattaggagaatcgaaggccatagtggcatactattgcttatagttttaggagaaagggggaaagcttacatcctgttcgagttggaatctatacgggaaattgtttcttttaaagtatgttccaagtcttgcagcaccttctccatcatttctcacctaaagatcaaataaatcaccacatgtaccttccattaaaaaaactaagtttacaaacaagaaataatgagcacttagtttataaatatcaactaagaataaatgttttgcagggtatttcttaggctaaatctctactatagttcatacaatagtcatacttagatcactatttcaaaggaagaaaactattttatttcaaattataagaaaagtttaagtttttttaaaagaaaagttataataatctcacaaagctgtaaaacataagatttgactcctccattggacaggatatccactaaccagagcagaagggaaggggaggagaagtttttcttttctcttccaacattagttgaaataaaagaaaaaaaaacaatttagaattgattctgcaataagatattgacaagtataaaattttgcttctgtgattatctattgatctgcacaaatagtacctacctctaactctaaggatgtgttatcaccggcagcatactgaagatgtgagttacaaagcacacccgaatgagggcacttacagaaggcatcacttctgtgaaaagggcaacaagaaagcaaatagaaacagtaagtgtaagaaaacaccagagcagagctccattaataaccgagagatgcttgagaaacaagtccttactgggtcaaggaagtttgcagaatcagtgagtcacacatcctttgtaatgggacttgagacttgggcttttatcacataaagcatagcctacaaatgtaaacccccactacaccctggattctggtactagaagatatgcccatgtacaaacaagcatcataaaacctgaacttgaagcgaaaagaaaaagagaactcttgctctcttttggctttaaagattgaaaatctcaaccaattttgtctccagctatctcagcctaaaaatgaaagacagcataatgagaagtagaacttaaaaaaaacactgtgacgcctgtgagttcatagtaaggacaaagacattcatgaatgcacagctaccagtcattttcaacataaccatccaaatgggcaacacaattttgtgagcccagttaaaaaataaaaaatccaattaagatccaatgcattaattctaaaaacattaattaagaaaaaaaaaataaaaagaattgacaggtgagttactgagtagtatatgcatgaacaagcatacatacaaaaagaaaaatagtagtgtaaatgcactacatttactcaaatgcattacacgccccatcaaattcagagcagagcaaaaggcagtgaattatgtcccttgaaatgatatgatgaaagatgaatcttcaaaaggaaaagagaaagaatattttatcaaaaggggggtttttcttcaccaatggttttataattattgtgaaaattagtaaagtgggaatgccaaaaacacagagaagaaagtgggggcacctccctaaccttcatgcaagtcaaaatcaaaagcaatttccactagtagttaataggacagcattcccacaaacctaccccaaagaaagtcttccacagttcacttgaagagagtaagtggttgctttttctcttattttcttcaattttcgcaactaaagaaaacaacatttattattttctaggaaagagagatgctacaacatttttaaaaaatccaataatatgatcagaaggtgtagagaaagtcctatttattcaaaaagccaagtcaaaaggagcatatataagcaaatgggttttgctttttttggaagagcaaaaacaaaacaaaaaaggtcacaataaatgcaatatgatgaggtaaatcactcaaacaaacaagaaactgtaaaacaatccaaagcatggagctttgtggtccctttaatctaaaagacccctcatgacctctctcaggtttacacagatcactacttgaccccatgaaaataatggatccctctttttattccccacctcaaaacaagaaccatataataaaacaaacccaaaaaaaggaagaaaaaaaaaaaagaaaaaagaccctaatcaaatttatttcacacaaatgagatgaaggaaaagggctcattttagaagaagaaaaagaagtatcttggaagtgaaaatgaaaaagaagtaaactttgcaaagaaaagggttacaacaatggaattacctgagaagatttcaaatggtgaaaaacacacagaagttattcaaatataaaaaagatacgtgtgtaactcccaaagttcaaactgagcaatgaaatgctgtcagtcagtgtgtgtcaaatcctctattctcttctgaaacattcaaagttcaaatcctcattcacatacatacatacatatgttatatatggatattataagagtaaataacagaagtaatgacaaagatacggctggagaatctgagagatgactgagtgagtaaggtaaggaggaagcaagagagattttgaaatgagaaaacaaacaaaaatttggggagaatctagagccacttccaagcaactaaacgactattaaaatttacctgtctttgtatttgagtctttgaccaactctctcactcacaaactaaatcaaaataaataataaataagtaaaaataataaatacgacagttttcttatgtctgtttatggagagagagagagagagagagagagagaggtattgttggtttgatacacacacaaacactaggctccattattttgtgtttgaaatttgaaattagttactcaaatagaaaaatagagaaaacccatatgccataatactaatataatcccattcccttgtatattatgttaagatatattatgactaatatgagttgggagacattacattacattgggaatcttgaaatgtgtgaaccataaacatagcctggaggaatataactatgaagggtacctatttggtaaaatgagtcagtgggatgggagtaagtacatagcacttggctggctctttactaaaatttaaatttgttgtgttgaatataatataggcataatttctattttattttcatttattgcaaagtacattggagttgggttttgcaggaaatttgtatgtataatatataataatagagctctcataataatattgtagttaagtcaaggttgagtttcctacaaaaaaaaaaaaagtcaaggttgaatttttacattttacacaggtagctgtgtgtgtgttacatggttggaaaggtgacattaatattatgagggctcacactttgttttcaattactttttttttctttttgtctttttttggattcactctaccaaatcaactcaggcatttgaccataatacacttttattcttttcctttttttttttcgctatcatgacaaagtgaatattgcaaaagaaattataaagagaaatttgcacataaatacttaatttatttgttgtaggggtgg

SEQ ID NO: 46412 - DNA, 1903 bp, Cannabis sativa
gaaaccataagtcttcagcagacactcaaatgtagcctgtcaaagttcacaaaaccaaattcaatttcatattttggttaacacccaattaacaaaatcactttcacttcatcaaaaacttaaacttgtcgaaatttgattgattatgccagacgtattcatcatttgtaatgaaaattcaaataactaatcaaattttgtttcataccccagttaagaaattcacattcacttcatcaaaaactttaacttgtccaaataatcattcattattcaaattacttaccaatttacatattcaaaacaaacaactcaataatagatagtaatgtttatgaataagaaaaggaagagttaaattacaaaccttgacgaagttgccaagagtctttgtggatcccctggatgaagtgaaaacatcatcaattccagcgaactgaagaaccttctttggaaccctagcagccacaatcccagcaccacggggagctggaaccattcggacagtcacggaaccacactttccggtaaccttgcaaggaacggtgtgaggctttccgatcttgttaccccaataaccccttctaacagggatcacagagagcttagccaaaataatggcaccccgaatggcggtggcgacttccttactgcatttaacaccgagacctacgtggccgttgctgtcaccgacgacaacgaaggccttgaacctggttcgctgaccggcacgtgtctgcttctgaacaggcatgattttcatgacctcatcctttagggttggtccgacgagggtatcaatgatctgatgctccttgattggtagagaatggagatagatctgctctagggatgcgatcttaccttccttaaccagacgacctagcttcgtcactggcacccacttctcctcttcctcacgtcgcccagcgcgtcggcgaccaccacggcctcggtctccaccgcgtccgcgaccaccgaagcctcggccgaatccacctctttcgcctactcctctttcacctcctcctctttcagccatggttggaaattagagagaaaccctagttcgtttgtgctctcagtgagggaatgagtgagagaagaaggcgctgaaaccagctttagaggtaatgtatagacaaaaaccctaatggggtttggaaggagactttattttgggcttataatttgggctcttcatatccaggcccatattggacttaagcctctacaattttctttaaagtatttcaaaaatatcatattttctaggagtatgcataaaaggatcaaatctaattacaaccaacgaattaatatcggatattcaattattatcagattgagttggttgttatttttaaatatctaattgaatcacatcagatcaatgttgaataagatgtccaaaaatccaatactatctaacatcaagttgttgttatacttaaaatatatgtaaaactaggattacaatttgtgttttttatggggattaaatggatccaactaatacttcatctaaaatatcggatggatttaatccgattcaaaaaataatgaattttaaatattagataaatccgaactaattcaatagatatacataaaatacatttaatatatggaaccgatccaatctaatattctattgaatttaattagttcgaataattgaaattaattagatcatatcagttagaagaattcaacatccaatcttgatagaccttaaaccattaaatgtggtctaataaacactcttaatcttagttattttaaataaatcttagttacttttatttcatgttgtaataattagttatttagtttgtaacttatatatgtaggattagtagttttgataactttatgagatgcttctctaaattgtgtttgc

SEQ ID NO: 46413 - DNA, 1184 bp, Cannabis sativa
taagtggattaactcgaatttatcttaaggggagtgatttctggtcctatagaatgagcatggatactagttggtattggagaaagcgttgtcggttacgaataacttttaacaaagctgaaatagtggcagcgggtggagagaagtttaaaaccagcagtatctattgcagcatgttgaagcagaatgagtttcctgcagcaggggctatttggtatggtttaaatatgcctaaacatgccttccaactttggcaagcaactcaaaacaaattgttaactagggatcatctttgccagctgaatattcctatctctgacctgaattgtgtggtctgtgatcttgaaccagagagtcacaaccacttatttttcaagtgcagcctctctttactggtgatgtacaaaatatttcagtggctgggcacggttggatggtccaaggactatgataggtggagagtttggcttggctgtccaaggccgactgcggtggacaggataagggttctaatgcttccaactgtgatctatcacttatggagcaaccaaaacacttggttattctcttcctattctaatactgtgaattgtattgtaaataaaattaaatgtgaagtgaagtatagactcttattgataaaagataggaattgatctaggaaggagaagaatttgattcataatttgatttgtaattagttggctttgcggtggttgcttctcttgtagaagtgttattggctgtatttggtgagtagattaatgaagtattcttcttcttgattaaaaaaaataattaaatcactccagatatttttacgtggtttcatagttaaaatctacatactccatgagtccttcttattagtgatacttattgagtacataatacaatattataatttaaataatagtattttctctctaaattttgtcgtctctttttctatagattctgcccctatttataggagtataggttgttagttattttatttgggattaatttaaatataatcgttaatgaaacgtggaaaatccccacgtttgatttagtcacatgtgggataatgtctaataactacccaactgctctttgtttttattctttagatggttattgctgacttggaaggttgtatctcgcttgatatgagttatcctccttgtccatcttaataa

SEQ ID NO: 46414 - DNA, 2934 bp, Cannabis sativa
tagccactttacaaccatgaatctatcccagccgttcgtactttctcaataaggcagagaggccttcagcacagagaataaacaaatatggagagagcggatcaccttgtcagattcccctagttggaacaataggatccatctcatgccacccatgtaaaatcttgtaatgagccgttggaacacattgcataataaggtgcacccaactttcaacaaagcccagtttcctcagaacaacttccaagaatctccattcaatgcgatcatatgccttgctcatgtcaagttttaaggccatacaaccggtctttccttgccgctttcggtttaaatagtgcagaacctcaaaggagaccattatgttgtctgagataaggcagccgggaataaaggcactttgagagtttgcaacaatagaatccatgaaaggcttcattcgatttgtcataaccttcgtaacaatcttgtaaagcacattacacagagctataggacgcaaatctttcatagtctcgggtcctttcttctttggaatcaaaaccgcattagcttcactacaatttccatcaaagacacccgtagtaaagaacctctgaaccaccatcaccacatcatgtttcacaatattccaacacctttgatagaaggccggagtcataccgtcaggtcctggactctaggataaatatcactttgatcattatattttataaaaattataaaagaatattttgtaaaaatagattttataaaattttttattaacaaaataactttataaaagaaatttattagcaaaatagtcttgtatggtcgcagaaacaattatgaattataatgtgtgaccataaacaactataaatttacactatgcgactatcatggtcgcataaaataaattaagtgagattattttacaaattttagtattttatattattaatttggcaaatttcactttcaaagaaaagtaagtttttcaaaaataaaagaacaatcgatagaataaattattttggtaaatacaaatattgaaaaatattcaattttttttataattgaattaaaaaaagatgagttatctcatattttttttttaactttttttttttaaatttaccgtttggatttctcaagtggttgcagtgctagttgcaataggggtttctatacaattttctgttgcgatttaggttgcagcgctagttgcaataggagtttctatatagaattctgtaaaaaattccaaaaaaaaaaaatttagaagtataaaaatgaaaaagtccttataaaaatcattaatatggttatatattataaaaatatacatggtaatttgatataacttatccggtcaaattattattattttggcaaagaatcaaaacatataatcattttgtttgtaaaaataatggaacttaaccaaaaaaaaaaatattgggtaattctatagtatactctttaaatgagtcgtctcggtacaatttttatttgttttcgcatatgagaaagccttttattcttttattctttttttttatgaacatgcatattgtttgttgtagttatcgtgtatgctgtagaattatttgtaaattttcaaaaaatgtttaatagtttagtgacaaaaataaaacttaaatattttattgcatttataatcgattattctcataaacgtagcaaaaaattgtttgaatttttatttcagtgctcttaactatttacaattttctaaaaatttacaagtagtcatataagactacaatgtactcgattatggaaactaaaaaatggattaaaaatctctgaatgttgaaaaaatagagtatttattgaaacaacttttaggagaggagggagggtgctatacgtttttcggtgagtatttatggttgagtaaagctataaattcattaattacacccaaatacagaaactagctagaaaaatagtaatttgtttattataaaagaacttattaatatatagagtatggagaaaacactattagagaaagttgcgaaggaagctttgtaaaagttacatgcttctcatcgagatcttttctttataatcaaagtaacaaagtacagaagagcttaacatgacagtataatagaaaagtagtagttgacgttcttaaatatttaaaagagtatgtagttcattttcagtaggtttgtgtggttattgtttacattggtattattttgcttttttttttttttgaaatggcaggatctggtttttttcatgagatctggattatttacattatattgatggtttgttgatatatgttaacctagattttcgttaacaataaatgaagccttttaaataaaaattaactatttataactaatatgtgtatatatgtacgaaaaagtaagagttttacgtggttttgtagtaaaatctacatactccacgagtattattatttatgagtatttcttagtaaagtactttgattacagatgaataaataagaatattcactcaatctcacagggtctcctcccaaaaatgattgatccctttccctttaggttttgtccctatttaagatttatatggtttttcctatgacagttattcttttcgatcttatctaggtaaccgttcatgaaacatggacaatccccacgtttcagttttacagcatgtggatataatgaaataactgctaataactgtcgtttcatcttatctaaaagtggtcttttattaccgaggtaacacgttccaagcatggctcgcatctctcaacaatgtttaaggatagctagtcgcattttatgagatactagttaagatgtttattctcgctatagcatttctaaggcaactcttagacttagtcttttgaaataagttatactttgcttatttcccttaatctttcaacatactcacgagtat

SEQ ID NO: 46415 - DNA, 1525 bp, Cannabis sativa
gtctaattttatttgaatctatgatatagacgcttttcctcatcaaaaaaaaaaaaaaactcagctcgtgttaatgtttgtactatttattgaacctagtatacaccttatacaaaattatgagaaatgtcaaaatgtaccagtgtgtttagcaccctcttacatgttaatattgctattggtctaattaagtatcgagtctcatataatttataataaaataattttaggaagtattgctaaccaattacgtctaaaaggtgatgaacaccactgatgcctataatagtaatactccaaaattaagtagtttagtttgttatcatcaataattttaaattagtttgttcatcaaataatttaacatctcacaaataaaaaataaaaaactttaatagaagtattttttattatttgtagttattttatcattctcaaaacaaataatagagcaaaaagaaattgaaaaaaaaaggaacaaagttcaactagatatatcaatcaaaagacaaataggtcaactagatataaatttcatattttattaaatatttgatatttattttttatttattttgtaggtgttttattagtgaatcagaagttataacttgattagtttaaattttttcttttttgatattaagattttattgtattgttctcttggggtatttctatatacttttattatagacaataaacttttaaattgataggtatttttattttgatttttgccatattagatttaataattaatactttttttactattattatcttttttttttttggaagttatttaaaatttattttttactaataaatattaatttattctattcttgaccattagattttaagaattttgtctattatattagattaattaatctaaaaattgtagtcggaaaactatgtataccttctatcctttttattattatttttgtataagaaaaaataattacaacaaaagctcgttttcagtactcatgagatacaaagatatattatttatatgaaaagaaatctcaataattttagtgacataattcatcgaattgagcatggaaaacatcaatttcaactttatttggagacatgacacttcatgaattttattcttgacaaaatggaaaggatggtgcttatacctatgactccttgtcatggatgattcattgtccatttcttttttgatatttttgttaaatttggttgtgaatgtgatcatattactcttataattattaattactttttggtggaaatttttagtaatatcacaacataatgacctaattaaactctgcatatatattaacaataacatatatgataatgatacttgtatcaaagtaacaatccaatttgtcttttatttggcaaaaaaaataaataaataaataaaaaaaattggaggattcccttctttttaaccaaaaaagaaagaaaagaataacatgagtggtttagttgatataaataatgtttatatgttcatttaacacaagagaaa

SEQ ID NO: 46416 - DNA, 1218 bp, Cannabis sativa
aaagaaaaagaaacaaagaataggaaatgagtgagtaatttccaatcttgcataacagttgttcttttgtatatgttttttcactaaacatgccaactatttgaataaaaaagactagagtactttaatagtgttaaaatattgtagtactatatttaagcatgtttctaaaatgtgttatattttaagtagtttaataatgcagtctgtgttattgaggattgtcaaaaattacttcattcgatgagcagtgtctctttggcttttgtttatcgtcttgctaacaagacagttcatagttttattagagcttcttgtttttctctagatcgttttttcaggagtaatgattctgctgagtgttgttatgttgttcttaataaagtcataagtttttccaaaaatttcaaaacaacttcttaggctgatgtgaatgtgcaatgtatgtactgcacacacatgaaaatgggtacctttaatttgtctcatctgtctcgcccttgtgttcttgtgcccttctcgcctcacgctcgctctttctcatcctttgctgtcgccgatttgccttctcatcttctctttgacgccttcactcttatctctccatcgcttcttctcgtactcctgctcttgctcgttcatttagtctcacccactcgtcctcgctttaattataactaaaattgaatattaaaaaaaagaaaaagaaaaatacattgtactctttaccatccattttgtctcttataatggtagttaatatatacgcatctttatgcaacagctgaataagaagtatagccctcttcaccctccatatctcaattttgctcaaaaaccacatacctactttaacgatttcaaaattcattcatgaaggaaattataacaatgtggatgttcgttaagtttgctggagttgtttttttttttttggctaattaagtcttttgttctctgaattttgacatgtactaaatcatgttttctgaacttttaaggtcgttaaaaatgccctctgaactattgagattgttggatttaaggacttttgtccaattttagtaaaaaagcctaacatggataaaagtttagggggtatgatttagtatttgtctaagttcgagagacatgatttggtagatatcaaagtccggggagcattgtttagtgcataaacaatcactgaaatagtaaaaatgaatgaaattagacaaa

SEQ ID NO: 46417 - DNA, 1680 bp, Cannabis sativa
agtctaaagagagccacacaaatcagatatcgatcccaagtggttcatacaggaaatatttcatgtccacatgtggactttagattgtaaggttctcaggaggccagcatgacaaaaatttaaaatctagtaatattagaattttaataatattattgtttttaatttgtatgtgtaggagttagattgtatgtatgtgcgtgtatttcaatttcaggtattctttttcttaaagaaaaaaatgtacatcactaatacagttatacaaatgcaatcttattcttatcaagtacagtgggataatgatataaaagattagtaaagatggttcatttactcacttcaactttttcccataaatatacttgaaattcaggccatatttcaaatgataccttctgcctaagctacaaaaatggaaagggataactacgtctatctgtcatggcaagacttaccaatatttctctcacttattactcttcttctttcttttatgttcctgattcgcaaaagctttttccgcacaaaaccggtcaacttaccaccatctccgccgagattgcccataattggtaaccttcaccagatcggagaacacgttgaccgttcccttagagacctctctcaaaagtacggcccacttatgctcttacactttggcagcgtcccgactgtggtcgtttcgtctccagacatggtaaaagaaatcgccaaaaaccatgacgttgttttctctgaccggttcaataccagagcttcagacgtccttttctacggtggaaaagacatcgtcttcgcttcttacggcaacaactggcgtcaagctaggaagctctgcgtccaggaaatgctaagctccaaaagggttctctccttccaatcaatacgagaagaagaagtgtcatcgttggtgagtaaaatacgccaagtttgtcttaacggcgacgatggtgtcgttaacatgtgcgagatgcttataaggacatcgaacaacataatgtcgaggtgtatactcggacgacgttacagttgtcacgaagaagaagaagaaggaaaaggtaataataagatgatcttttgtgagacactgatgaaaaaagttatagcgcaacttacagcgttcagcgttggagatttcttcccttgttttgaatgggtggaggaagtttgtgggtttatgagaaacttgaaatccagtttgggtgaattggataacttttacaatcaagtatttgaagagcggaaagctatgaaatcaagtgagaatggcgttaaagactttgtggatatacttctacaactccaaaaggataatatgtttaatatggatctcactgatgagcgcttgaaagctatcgtacaggtcctccctcctccccttaattatctcatctcatctctctctcaaaattatattacattttattttcaattattactacatatttattttaagcaaagttaaaagaaagatcgacatcgtgaaaatttagaaactattcaaatctcaataaaatagggtgttctaaaaaagattgacaatccctgtaaaataataataataataataaaatagattgacaaacgaattttgaaaaagaaaatgaaaaatcttggagcatgtttggtattgttttctgtttttttgtttttaaaaaaattgtttttagaaatgag

SEQ ID NO: 46418 - DNA, 1560 bp, Cannabis sativa
tttgagagaaaagttgtaaaaactccattattacaatgttcaatatcattgacttgtagattaagactcattaacactcaaccaacgttaagaattgttgtttattttcttataattcttcctttagctttaatcgtccattgttttgattaaatttcaaaaaatctcagaagaattataagttaaatataaaaaaattaacaattatataaaaaaaaattatcatatatatatatgcaagttttttgttatttgatgatttaatttgatttttttttgtagttaattaattcttaaaataaaaacatttaaagtttattataatatcaacaccgatggagccacatatcaatattttcaactcttccaaacattttgtctctttggtattcttattgtttttatttactatatggtcatgttcgtattaaatattgaactaataacaacaaatattaataaaaagtaaagaaaattaattgttaaataataaaaaaataatctaaaagtattttgcataaaccctttatcaaatatttaataattcaagaatgaaaaatagaatatattaataaatatacatattatataaaataatatataattaattataaatgttattagagttatatgttaattttaattagtaaatattataattatttattcgtacaatttttttttataacaatatttattggtacaattaagggtgaaaatatctatatatgctgttaaaaaattatggtaattaattaacataattgcatgtaaatataagcatatcacatatatagatgatcattataagtttttaaaaattccaatctatagtataacaaatattatattcttttacttaaaagggataaaaattattaatttaaataggaataatgataataaataaagaattaagaaaatgataataaaaaatgtaaatctagtttaattcaattatactttttaaaaaatatatataatttattttaaaattaaacttatatcatatttaaatttaaattcaatcatattttcttataaatttgaatttacattttactaacgaaaaaataataattttttttaaaagatataagatatcttaaataattataatatacacaaccataaaataattacagtacaaaattataaaataagttttatttaaagtagacctaaatattttttgtgataattaaacccccacatagcaaaactatttaattttcactgtgcacaactatggaagaaacattatattaaaaaattctcctaaataccaaaaacatggctaccatagaatttttcaatacaatttattattgggataattacataaggcactatttttgtaaaaaaattatatttttatatttaaataattttttttaatatatttttataatttttcataaaaacaacatgaaaataacaaaaaaattataaaaaactaacatgaaaatatcaaaacaataataaaaaatagcatacagataacaaaaaatcaacaacaaattaataagagtacaacataaaaataccgtattttctgta

SEQ ID NO: 46419 - DNA, 3326 bp, Cannabis sativa
atttgatgtcgattcatccacacttccattccttatagaggaaggctaactgcttggtggctaggagctgtatgagcggtaacgtccatgtacgactctgtgagaagggtggtggacataaatggccttgttgtacctcactctcgtcttcaatggggtatgctctttttttgggagagtatgctaatatgatcttaatgaggtgcggagctttgcatctgacattcgttgggcttccctctttgggagcttacgtcccggcatttttgcgtaataaacccccccgacagattttcaagagaattcttctcaagaatttaatctttctggggccagcttaaaatacgattgggctattttagccagggttgttggaaagactcgacatcacacatttctaaatacttgttagagatttatttggatctgaaagtattttatgtgtattaggggatcttctttccccatgtacatctttcaagttggcatcttgaacatgggcaagggtaaggcatcgatgtatgcggagaaaggtgagccccttaacttatccatctcaaggtctgatggtggacaaccaaacctttgatcatgtctcatatttgatccaactatgcttgcacagaaggatctgctacaccacgagcctagttgattggcccttcttgattgggttgcagccttggattggctagagcctggccgaccataccccgagagagggtatgttcaaggtcggccagccctaagcctggcagctggctatggccagccagccttgggtatgggaactggccatggctggccaaccctactctaggcagctgttcttggcgggccagccctatgttggatagggtctggcagctcgttctcccctaatatgctggcacaacctgtgtgttgataggggtaaatcacaccaattgttgcagtcaagtggacctaattatctgaagtggttgtattcacttctcaagttgttgttgtcttgggtgtttccacccgttcctagacctagctagttaaagattggcatttggggtgacttgctcccaaattctctagggaggacgttcaccttattggtcgaccattggtgcaccactaaggggctagccgaccaaaggttggccaagtgggggttgttgtgccaaaaatccctggcttgcctcccaggctgctggttgctagagtcttgctattctcgcaactgaatcttcgtggcagcaattgtccaccttcgggcaagagaaggtctgtcctggttcttaaagaacctggttggattgtttatttatagaccctgctcgatttatcgactagtctacattagagaggatctttggtgagatcttgacctctctcggtagttctttcattgatccgccttattaggtcttagcttctctgttacaacagtctagctctgcctggtaagatcgaaggatgtaatcctagtcatccacccatcttagaaatttgcatctctattgtgtgattgcatcgtagccaatagcgcatggttctttagtttggtcgacttggcagacgacctctctaagtttggtcaactcgagatcttctcccaggtccacatgaggcttgccgattacttgcccgggggttgctccacattagccaaacccttagtacgaggtgccaatggtggatttgccttcggtggcaaaggttggccattaagactaactgggttggaagtgttgacctaaccagttgtggtggtcaagtttgttgtacctaccgggttggataggttggacacatccatcagattcgtggagattctagttgtgtctggaacacaaacattaagatcaacagtcatagggtcttgaggaagacctgatgaggcagaagttgtagttgaagttctccttgtcttatccatggtgttagatcagataaatcgacaatgatctcaattaaagcaccaaactgttgatctcaatttcggccaaccgacaatagattcgtatttattactgatgctaccacgtgtacacaataagaatagaaaagtaaaagacacacaatacttttatagaggtttgatccctagttagcgggtaatgacattatggttgtattaataccagagataataccactcaaatcataaggattatggaatctaaagtggctctcttaaaattacaatatgaaaattagtaggaaaatctcaagtaagaagaatgaaagagacttagtctcttctacaaagcctagggcatgtagaagagagggatatagagaattaagattttagacatagaacttgagagcttgagacttagagaaattagggttaggttaatgctctttatatatgagagcttacaagagattaataaccaattatccctaaaaaaaatagaaaatataaaatatttgtgacataattaaataataaataacaaataggttaattattccccaagaataagagaatagctgatatttctcccttatttttgtggattgttgaagcctaaatcacatcttggcttattgtcccgaatgaaggctgcacactaagtgcctaccaggtgcaggctggggtctgactggccaagtgtatgccagggtctagctggccaagtgcctgctaaggtctggtcgatcaagtgcctactagggtctggcaggtcaagtgcttttcaaggcctagtaagtcaagtgcctgccttggcaagtgttagttagcctttgcatgtgttagccaaccttaataggtgttggccaacctttgtacaactttcttcgcaaaggctagcttcgttggtcgaacatgcccttttttagtctaactatcacccattggccgaccagcttgtgctcaaaccctggctggccatacaaacttctcctagccggcttatgtactctctttcgccggccaaacatggttgtgcaacttcttgacggcttgcttaactcctttcacttgttgcttgatggttttaccatgccttataaggagactttatcctgctattgacaaggctgtattccacgagtcctcagtcttggcttatgtggacatgccacgtcaggtggacaaaatttgggataacattacaatctgtcatattattaatagtgtaattaaatattatgtcttatatgtgtatttaatttaataattatcataaattatcactgtaaggtgttataagtagtgatgatcttattaggtgctggtaaattataaagtttactattagagcatctttaatggaatacaaaaatatagtatattattaaattgagaaaattatcttgggccactaagtttgaaaaat

SEQ ID NO: 46420 - DNA, 1544 bp, Cannabis sativa
taattaagtgttgctcacgtagtatcggtattagcatagaaggataacataattgtgtaatttggacaacaatgggatggtcggtttaactaatgctattgtgaggcacatggtagcaccctaatgagtatagattggcccttagaggattgaggcatataatgagagattcgggtatgttaagtgataaggtggtaagagttttgttaagggatgctttgcatagactctcttgcatcacttgttttgtatgcttggaagaatttatgatgcttcaagatgatatgaccaataataatttatatagtttgatttctttgctatttctcatatttctctattagaatgtaacatttcaatagagtggagagtaaatatagaaaagcatttataacaataggtatgaaaaatagtgacagagaccctgcaatatgtcgggggctaaaagaaaaaatacctgccatttcatagttctttgagtcataaaagcattgtacagcttgctcaaacatgccaatagatttaaatattacagcagccttatgaagatacttctttgctctatcaaaatcgtaactgcatatattttgagcagaagctcggagaaaaaaagcctcggcctgctgttctaagagtgtctctcctgctttacgaaaacactctttggcagccttatacttctttttaataaaatactgcatgaaaacaaaacaactcaaataacaatagtgacaagtaataagaagttgacattttggaaaatgacacataattgaagcaaacaaactgaaaatatgaactaattacctcctttccactagacatccactcttctttggtgctatgttcttggatcttctccacaaatgaatgatcaagtgtttgatattgaacaaggcataatttctcccaatagttgtatatgggattggagaacccgtcacagtcaccattctcgtaaaacaataaccttcgcttcgtacgagtaatagcaacatataattgttttagctcagaacacaatagtctatgtgtagctacatcaaaacttggagaagaactactcgattttcggtcaaggaaatgtttgtccttcatatacttttcgatgactctccaatcttctaaaggtgatgaagaaacaaagttgtacagcaagacatcctataataaggaaatatattcaaacaattgtaagatcaatgaaagaagtatagtgcagaaatgagataatgtctccaccttgataaaaatttcttctacaatttatgcaatagaaagttccaattgaaaaaactttgttatatcactaaattagcaaaactttgttcatgctaatttcttaatgcttataaatcattttaatcttaatcacctgaaattctaagcccttggactctgatattgtcataataatcgcctcggtcccagctgattccaaaatttccttgacactgtcatctcttactaacacaacttggtcatgtccaaaaccaacaagcttttttcccaaatctgcagcattactaaacatggaagagaat

SEQ ID NO: 46421 - DNA, 1722 bp, Cannabis sativa
  modified_base (647)..(651): a, c, t, g, unknown or other
aagaattagagtaatttagggtttgtatatataaaaatataataaagcaatatgagtcaataaattcatcatgcgtggaattggggagtgtctaaaaatgggtaacacaataaatagtaaacccccaaaaaattgtgcttgactcatgaccatttcaaattctatctctttatatataaatttatgcctataaatatatgtcattttctgaaagtttcaaataattatttacatgcttgccaactactacgagatatataatttaactttttttcatgagctttcaaaattgacttttggtgaagatgttggtttaccaaaaaaaaaaataaaccttgcttgacaagtttttatatggttttatacattatacttgtgtgtattaaaaataagccaattaggatttttatccctaaattttaatatgttaattttttttaccgttaaatattctccctaaactattgagattattacatttaaagacttttatctaatgtcattcaattttactaattctgtgtttgtttatgtattaaattatgctccccaaactttgatatctaccaaatcatgcccctcaaatttggcatgtaccaaatcatgtccgctcaactatcattcatgttagacttttcttactaaannnnnacaaaaatccttaaattcaacaatctcaatagttcaagggggatttttaaagaccttaaaagttcaggaagtataaataatctgtacatgataaagtttagggagcaaaatttctaattaattaattagataagttgacaattttagagcacttatattaggtgagttaaatttgagctattataatttattcactaaatataaagaaaaatgagtaaaagtaatcttttattaaatgagctaaacttaagctataatatatctttttttggcttaaataatttttttttacatggataaacactatttattgagctataaatattatattaatttttaatttttttttttaatatatgtgtatgtaatatcattatattaatttatttgatttttttaaaaaaaaataatataatatattaaaagtataatatttaaataataaagagaaaaaaaaatgaaaaattgatcatatggtgtattataaatggatgaggtgaaataaaaaagaagttaaaattttggtaaaacattttaaataattgagtagaaaacctaatacctatccactaaatatcatgtgatatcaactaacttcatattctctatacttataactatcaagccataaataatgatagaattttataaattaaatttatatttttatcaatcaaggtcaatgcatgcatgccaaggtgtgactaatttaagaatatatatcatcacttgtatttgattggttcaacaaaaataaagtcattatagactcatcacccatggcccaatactttactcacgcatcatcatttcaattacaattgttgaataatctttttctataataaatcacactaaccataatatttatctaattactaaactatctattatagaattataacttgatagttattaagtataatataaatactataaataaaaataaaaaagttaaaattaataataaacagtgattacaatttgaagagttatacattacaaaaaactgataattttagtgataattttttagtcacaacataattttttgggtaaatattattttgg

SEQ ID NO: 46422 - DNA, 2465 bp, Cannabis sativa
aatgagaatttctggctgatatgcttaagcacaatttggtttatgtttctttgtttatcttatccattttcaggaaactactttggggatcgtggtcaaattcatgaagcgcacaaattctacttccaagttttatttatccttgttaatcaaggctgtttccatataacaagctcatctatttctctcattcccatgcttgatattattgggaaggaaatctcaggggatatgttaagtgttgagcgtgcagaagtattatacaacataagttggctttctttgaaaggctaccattccaggcataccaggtactttaatagtaagttttactatttatgttttctttcatagtagcttttcttcaaattttgaaagcaaacaaaaggtggtggggaacttttttgttttatgtttttgaaaagaaataagatccatggaaccccttcacccataacttaaataaaaataaaataaaataaaaagaaaggagaataatatagaaacaactttgctatattggaatggatatactgacgctgagatgttaagcctcacagcgggaaaaatctggggagacaaagagcacttgccgtacaatttatggcttatataaaacgaaaataatcatgagcaaaaaagttaaaagatgcaataggatgaaaaaaaaatctgcgcagtaagattgccaagaaaatttaaagaagcaagtttggcaacctgattgccttatgtggaggctgaaggttaattgacttggaaaactcagtattggtataagagcagatgttcttgaattcagttattggaaatgtgcaattgcaactcccaaattttcacatgttggacttctttgaatttgcattccctagtttatttttctctcttaaatatttgggtacacacgtaaaggggaaatgaaaaaataagtactcttggtaatgttgtttcaccttatatcattctaaaatctagggataattagcaaacaaacacaagatcatctttcttttatatttgaagtggctgttatatttgccatctgcttagaacttcacagctaacttgttctgcggtattgcttactaggaataattgctgtgatctgtctcatattcagccacaacatataatctcctggttaatgcaagcttttgtactttgccaggaagttcctattctctttcagaaggtaaagctgtggtttttcttctatatatatatattgtagctcattataaatattaacttgaaagtatgaaacaagagtcaagtatgtccaatgttaaccttgtttttggaaaactgatttaaacagtgttagggccctaggataaacatggtgtgctagaatatagtaataataagggtatatgagtctttgtgagtctttgcttgggagggcagtactgagtgagaaattactatatatatgtgtgtaaggggaaatagggggtatggaatttatttactcatatattcaatatacaattcctactgtttggctactgttcttattgttctactattactgctgctgttgtttgtgtgtatttgctgctggtttgagtaaattggcagcaggttcccatctaagtaatactcaaatgctattaatcagcacacttattttctgtatatattcttgccgacctctcgtgtgctattgtagataactgacttggatttcgataggtctcaaggttgctttctgttgtgttcatacttgctgcttctggtgagctttgttctctttcttcatccaaagcaatctctgaaaatcattgggctgcatactttcatcaagcttcacttgggtctcatcttaattatcaaatcattactaatgactatgggagacatgaagtccatcatcttgcgaatgctgtggtatgtccctagtcacctcttccttacaaacttaggaaaagctactaacaatatttgaattcgatcttatttctgaggtattatctgtttgagctttattttattattgttattattattttatctatttaatcatctgtacaaaggttagattgatttcctactaccagggaaaatcttgttgctagattttattattccagattttaaatcatcaattatgttactttctttttcattaatttttttcttacaaggcttttttttcaagtcttattcgaaagtgctggtgtcttgcacctttaaggtgcactgcatatttttaccatcatacgagatgcccatggctatggcatattagaatttattgcttgaatgtgttttcaaaacaaagaatgcaatttgagctaaggtgcccattcaatcaatccaactgatcaaaatatttttttcgaagactttttgcctttaggggatttacgtaacctcaatgtattttgacagatagtgttttcttcctgaatttgcatttattgccgtcctcgttcatgaataacagaaaagtctttactttc

SEQ ID NO: 46423 - DNA, 1092 bp, Cannabis sativa
tataacttaagtattattaccgcaaaaaattaaacttaaatatttatttacaattaaaaattaaacttcatatttatacctaaaattattctttatttattatatatgtctgcagtgtacttcccttttcactgggagaaattagagagttcgatgtatagatatatgtgagaatctatatatataatattttttgtacttgctaaataaatttatttataaatataaattttaaaaatatttaattacaagattaaagttgaatttttatatttaatttaattatttagttaattttttctttttatactatatcaaaaatatgtttatatacaaaatatttacgtcaaatttaattattttttgtttgtccaattttttttttaattgatagattgacctcaattaatataatataaaatataaaaataaaaaataattcttattaaataaaaaaattaaatataaaaactcaccccataaatatattttgaacacgattaaaataattaaagtgttgtgttatagtgtatagctagttgataatgactacttgaaaatgggtgtggggtctttttgtcttttcacattatatattatttaaggttttgtatcaaattccatagacaactttttattacactcatatcatcacatggtgtttggtaaaaaaagtactttcatccgtatttggctaacttttttaatttaatttttttatttattattgaaatatatattatgccttttttttttattttttattttaggtaaaggagttgaaattatatgatttcatcttcatctcaaaaggggtagtttttaaactatttgactacttaatttattacacacccaccaaaatataaaaataaaaaatttactaaaaaataaaaaataatttataacataaatacttaaatttaactcgcaaatatatataaatatttgagtttaattttaacggtaataatacttaagttatatttttagaagtttcatatatacctaactgtcaaattaatatttatttcttattagtatatttgaataaatttttaaataaaaatacaaatttaataatttggacta

SEQ ID NO: 46424 - DNA, 745 bp, Cannabis sativa
gtagtgagaggagtaaggcaccagagtataagttttcttatttttcaaggctgtcatttccttgttcatggcttggttccagacttttgattttaatgcctcttcaatactcctcggttcttcttcagtagagttgaattttgcctccccaacatacacttttggcttgaaaattccagcctttgcacgtgttatcatagggtgagattgaactggctgtggtgcatgttcttgattggtatcctgagaggaatcagcagtagcttctgcaacattctcattatcaaaattagtgtgttcatcagttgaaataatatgttcactgacctcttccaaatgaggatcgggtgctgctccatgagatgctactggtgtagcagtaggcattgtatcagctgtgttgttatgcctgctttggacaatattttgaaaatgaaggttaggcagttgggaccattgtgatgtttgaacaacaacttgtttctcagggcagtaattgtttagaaaacctttcttaaatggaaattctttttcattaaaaatgacattccttgtgatatagactcttcccgttgaacttagacacttgtatcctttgtgatgatcactatatcctaggttgacacatttaagtgagtgatactggaacttgtgtgattggtaaggtcgaacacaaggaaaacaggctgacccgaacactttaagaaaggaataatctggtttctttctaaacaatgtttcatag

SEQ ID NO: 46425 - DNA, 1822 bp, Cannabis sativa
tcaatccctcagtcgaatgagcatcgttgacttcttccgtctcccctgcaattcctacaagtgcatattcgattggaattcgagtgactggtttccgtcccacttttttcttcctcgccatggaaggagaaagcagagaaatgaaaaacttttgtttgtttgttttactaaaatttacatagataaatttaaattataaatattattaaaataattaaatattaattataatagagaatataattgaagcaataataattaaaataactctttattttaattttgtaagttattttagttaaaagaaaataaagaatagcattaaaatgctcaaattagttgagccacagtttacatctcatagtgcctttgatttttttttcttcttttctctaaatcgtcacgatgatgcttggtaaccaatccatatattaaaaaaaatgaaaatgtaactcgaaagataagattgataaataaatgaaaatgtgtgccaaattgtttctcttttaagtcaaagtacgtacgtaaataaatattaatggtatacaaaagaatgtcaaagacaatttttataccatctccatctacatttttctttttctttttttttttattatataaattttatctttctttttgtgaagaaaaaaagtgttttcgacattgtatattatgaagatgataattatagatataatcaaatcttatcattttcactatgtgtggctcatgttactattcattccagctcaaaataaagaatttttttttttattattatttgaatgtactgaagatactatatatgtgcaatctcttacatattcatgaattattacaaagttaattaatttctatattcaaagctttcactttttatagtaatataacttttctaatttatataacgttttcttcgataagattgtcttacttggttttattgaagtgttctttaactttttaaagtataactaaaataataagaataaattaaatatcatacaaaagtatcatcactatccttacaaagaaaaaaaagcattagtatttgggttatcattagaaacttctataagaactataaatataatggcatatatctgcagtcatattatattatgagaataaataatgaaaataataaataaaaataagagtaagaatgataaaattaatatatatttatttaattttataaaaagaaggatgagattattgtggttggtgtgagctgagtgatgcttggcttctaccaccaacccctccactactcgtttttctttggtggtagatagatatgcagatcagagtatatgagcactcaaaaaacattataataaagttatatatatatttaagttgcaaccaatatccaatatcaccctccctcacccacccaagacgtatattaatttttctactttttaaattttgctgaagtatcttttttctgataataattagatagtaaattatagtgttagcttttagcatcttataagttacaataattacgctgatgatttaaaatttatatatatatggagggagccagtgagattacctttttgtcatgacataatttcactgtatttgcgattgattgatatttattttaataccaacaatttttttttttaactatttttctttataaaatttaaaatgtataaattgaatttgacaatagacatgtaccaattacaaaactgataggaaggaggaaactctttttattatatggctgctattagatcacggcagaaatgccaaaaaataatcttaagtttttgggaaattatagtaaatggctccaaat

SEQ ID NO: 46426 - DNA, 1688 bp, Cannabis sativa
ttttaaattttttttgaataatttccagtatcaaaaattaagtttaaaaattcagtatatttattttttattttgtacgcgcgcgttgaactgaatgtttgaacctttttttcgacaatatgaattgttctataaatttttcaaaagcaaatataatatctactataactataatgcacacactcatactcatgatataagaaaattctaattatattttctgtaagtgtaaataataataaaaaaaaaaatctcttccagtaagtacaaaagtgatgacccattagtagaatgtttcaatatgtatatacattttttgtctatcttttactttttacctacacaaaaaatctcacatttgttttatatatatacatatatatatatatatatagcggatttgccatgattggagtgatgaagagtgcttgaaattgttaaagaattgctatgatgcattggatgatgatggaaaagtgattgtagaagagttgattgttcctgctgcaccagattccagcccctccactaagaatagtttccattatgatatcctcatgatggttaatctcaatggcaaagagagaacacaaaaggagtatgaacaattggccatggaagctggctttaaagccttcaaaatccattccattgctttcaattcctatatcatggagtttctcaagaccactaactaataataataatattcatcttttatatataaatatttattgctttaaaataaataaacaaaaataaatgcaataataataagatattttctttttttattattattattagtagtagtactattgccattaatattgccacttgtgttgatgttgtgaataaaaaaaaaaaaagtttttatgctatcaaaataaaaagatggattagtagaaattaattagcaagaaaataacaaattttataggtttatatatgcttttgtgcaaaaatatagttttttcaaaatatataataaattttatgagaaaaagccaaaaacaaaattaaaagtatggaaaaaataggtaaggataacaagtttagggtaagtactactaactagttaccctcttagggtaaatattgctcaatcaaatatacaaagctgagatatagctcaagcttcaaagtatgaaaccaactcaaatgatcatgactcttacaacctttcaaacatgtacaagtgactctattataaacatcatattgaatcttctttacaagagcaccaataagccaaattttgctcttccaaaaagccaaattcctaacactccaaatgctatacacaaggggagcacaaacagcccaatgaacgcctttttggaacttatttaacatgttccttttaatccaattcataataccttcaacagttgaaatcttgatcaaatatccaaccaattcaagataattaggagaatgtattagaattcttttcactcataaaatatacaataataataagattcgatttcataaataaacatattacatattattataagcgcataaacataaatctaaagaatacatttgttgattcaaagagaataacataaatagtagaagcgtaccttaatccatagatattgatgatcttaatccatcttgtagagatgacctttattgtaggaaatcaagctagcaattaggtgtaaatttacatttaa

SEQ ID NO: 46427 - DNA, 1033 bp, Cannabis sativa
tggaaaactcctagacaacccaactcaatacaggagcttaattggcaaactaatctatctcacaataacacggtctgatattgctttttcagtcaataaactaagtcaatatctccaaagagaaccacatctccaagcagccactcgaatcttacaatacttaaaaggcacccatggtcaaggccttttcttttatcgttcaacacctaacccaatatagctacaagcatttgctgatgtagattagggggcatgtttggacactaggagatctatctcggggtactgtgtcttccttggacaatctctcatctcttggaaatccaagaaacaacaaacagtatcttgctcttttgctgaagcagaatatcgagcaatggccaatgtaacttgtgaactcacttggttccattctataattcatgattttggcatcaacctaggcttccatcaacactcttttgtgataacaatgcagcaatacacatctctgaaaaccctgtctaccatgagtgtactaaacatgtgtagatcgactgtcatctcatccgtgagaaggtcaacaaaggcaccatcaaactgaatcatgtcacttccaagtccaacatagtagacacctctccaagccactcttccctgctcacttccacatcattttatccaagatgaatgccaagaatctctacaatccatcttgagggggcctattagattagtggtcatgtttgttatgttagttattagttataggaagttagttattattgttggtagttagtcttaactgactttaccactctatatatatattgtatcattgcctttgtacacttttctcaccaatcaatgaaatcaattccgttttcaatttaattctcctaatagatggtcttgagttgcaggagtagtggttgttatgtatcctttggcggggttgtcctattaaccatgtttattttcttcttatttcagctcgagctgcttaaacttggattgctgtcctagcgagttgagtcggatggttggacaggag

SEQ ID NO: 46428 - DNA, 1735 bp, Cannabis sativa
ttgcaggcccatcttgacattgctctatcccttgtaagttaatttcctcatttttaatatttgtaactcatgaatatttaactatatatacatatttatttatttgggtgtatatatataggtatgcatctattgtagctatggagagcataacaaaacatgatgatgaacagtggcttgcttattggattatatactcattccttgctcttattgaaatcatcattcaaccagctctagagacgtaatatatttctttttttataatttataaataataataatttcatatcatatttattgagtgaagtaagtaattttgtgttgtatagggtgtctatttggtatgatgtgaagctagtttttgtgggttggttggttcttccccaatttaaaggtgcagcagttttgtataagagatttgtgagagaacaaatcaagaaatataatagccatggtcatcatcacatttttcagggaaggaacaagtttctagatttcttgcgttacaaaagtgtgagtttttatttattatatatattattatatctagatctataataataataataagaacagaacatgtttttgggtattgttattgtgatttttcttcttctaatttgggtgactattattaattaattattaattgttgtgtttggcaggatgagcatcatgaccatcattactaattaaagaaggcaaattaaaaaattgcatggctagtcttcttttaattattaggtttttatatggtatcaactatcaacatattgttgggttgttttaaatctcttcaaccttgtacaacttactccttattgcaaggcttttaaatttcagctggtttcttttgaatcatccatatatgtaaaatcatccgtacatacatattcatattagacttattttgtttaatcttgtgaaatgtatttgtgatgctttctcaggccccatctccaataattgtcctttattaaccttttgtataaaaaaaaaattatgtgaaaagtgcctttcaaaaataacttcttaagttcatgaatttgaagtactggattggatatgatgaaaggaaaaaaacaaagtaatatatatatatatatatatatatatgcgttacaagttggagttggcttattcagtggaaacttttaatttctaattttactatgatcttaatcgtgtctattaatttgacatgattgtccctgcaagaatatatattgagctatgtaaaataagaagctgagtttcttaccatttagttttgacaaagagctatttttcttgggggtagtcataataaagtggtataaaaatgtttaaaagtagtcttattttttttttttattttcttttgaaaaatctatgccagcagcaagtgttaaatttatttacagaaatggctgacaatatatttaaagtggttttataccgtttataacttcaaattttgagtaccacgtataccattttagctatatatatatatatgtatagcattttcactctaactctaagtcacgttcgatcatatcaactgattttttttctatttgttgatttctttctcataattcattgacagttcatttttgggcaactgattttttttctatttgttgatttctttctcataattcattgacagttcatttttgggtcagtggagaagtgagtttctctctctctctctctctctttatatatatatatcttgtgatatgaa

SEQ ID NO: 46429 - DNA, 1935 bp, Cannabis sativa
agtatgttggtggtgttttaaagttctgtggcataaatcaaatgcgaggatgttgtattaaatctgttgctccaaggaaattcagctgtttcccccaaaaagagtcatccacgaggagtgcgatggtactagtactagtggctcgtctgggataagcgcttggagcctcgaggacatcaaggctggagtagtcctccccttgaaagagtacttcaaagaattttgtaactatcttggaattgcccctttttcagttggttccaatttcttacagaatttggttgtcactttaaaactcccttagccctcggtaatagcttttgggaaaagaaaaattcaaataagagattcagaatgggagggaaagtgaagtgtgatcgattttgtatttgagagggttaaatacaaagcgttcctatctgtttggatatggacacgtggtagatgaataccaaaggttgcctaatccaatgcttacctaagagcatgcctacacacaccctgaagggtgtgatgacatggcatcttgggaagataaaaaataataaatgcaaccttctttttgaaacccttgacaagatagctaaatatcaccatctcgtgacaataactcaactgcctctcattaatagtttctctatatgacaaagttgtcaatcgcgaaactaggaacatgtgttatagtgcaaatttctcgcctagaaatacaagagcaatctcgtataaaattgacacgtgaacccagttcttgagaaaatgatgacatgttaattgatgactctcatagagttagcctcgcttgatctaaactcacgagatgatgcgaccatgacagggtctagtctcatactatgcctcgcatagtcaaaaaaataagtatgactaagaggatttgatactggtcgcgtatatattaattatatgcgatggccaagtagacctctcctgggactagtaaagattgattcattacatagggatggtccgagtaactattgtgttcgataactcgtcaggaactcacatgttccatattgtcaacacatgagatttccatctatgcaatcaaagatgaacacagacatccatacgataggcccataggccaccgtgtgaataccagacacacctaaagcatgtgagcttgtgtgagaatatgaataggcaactcgcactcaacaagttacatacgttgctgcacttaatacaataacaaattaaactgttcttcatttattctttaaacgtttattcaggtttaatactatcatttattgtaaaacggttttaaaaccggtcagttatgtaatcctaaaggacacttgctttttagataaaggagtgattcaaaccaaataaactaagtgaaatctttgtaacagtggactaagaagaccaagctctgacttaaccactataattttcttgtgttcttatttctttctgctttcattttgtttgtttagtagccaataggttgagtactcgctactctaagtgagtactcgcacgttttcaattaagtgttcttatttgtattgaatactcgcataaatttggtattgtctaaatttttccgacaacaatggtttcaatcacctcttttcctatttactagtttgtatggaatttactgattagttgacatcaaagtcttcttattttaaaattagtcgttacttttttatcatggaattatttaggtagtttcattctttaaaaattaaattttcttattaaaattaatttatatcatttaaattttttgtacatttatcttttttgttattttttagaatgtgtagtttaatttatttaagcttacctttttcataattattatatatttataaatatttatatacttacaattgttatgttcttgtttggttttatttttggtttggttttaaattctttgtgagtaatttgtag

SEQ ID NO: 46430 - DNA, 1514 bp, Cannabis sativa
ttaaaatttatatttaccaaatacccaacttagctttttttcacagttttgctacagctgctttttctcacagcatagctacagctgctttttctcgcagcagaactgtgccaaactgaccttaggtctctaccaatattttaaaaaaaaagattaaaaaaatctgataaagaaaatataaactaataattaaacataaatatataaagacaagacaaacaaatgtaacttgtctttcatccattttttgatcgatcgctaccacaattccccccacaaattcaacctaacactccaccaaatcattgaaaatgaacgtttcaacattttcattattaatttctctccaaacaaaaaaataaataaataaaccatattcatcattaattataatgtactatgtttctctacattgctcttcaaaaaaaaaaaggctaattagtaattttttctcctaaatttttacatatattaaatcctgcttcttgaacttttttggtcgttaaaaattcccctccaaaaaaaggtgatattttaattatgagaaatgctaaaagacaatccttctaaatatcactattaatgtaattaaatagtaagtctcgtataatattttcattaatttctctccaaaaaaaaaaaccatattcatccataacagaccaaaacactactcactacacatatcttattttatatatgataagaggcttcttcaccacctcgtgcttattatacaatagtaaccttctattttaatttttatgaggacattatagtacatttatttcatcaatattatttttcttttatttatcaaaatagtttttatgtatttcatttttttaaaatttatcttgtccaacttcaccctcattttcacagtcatcatctacacttttgctacgtgttgccatctctctcaacacctataatttattgacgatcaattaaattaggacattatttccaaaaaaaaaaaaaaattaaactaggacatttagaaattttacttatctatttgaacttttaatttatcaaggaggtttacaatctccatcttagatcactctaatcaaatgagctaaatttaagttattatatctcattctctaaaatacaagaaaagtgataaaagttatttttccatcaaatgagctaaatttgaactgttagagcatctctaatagagagttataaatgtagtatattgttattttttaatgtattttattaaaacttaatttcaatagtaatgtaaaatgtgtgtcaaatttagcccaaactaaaaatacatcatattttgcttttttattcaaaattctcccaattaatttagtggtttgatactttgatgtgttttgaatttgttaaattcatttgtatatgttttaatatgataacctaaactaagtatatttattcgattaaaagtataatatatatatatatatatataaaactaggtgaatgtacgaaccgagccacgtattgctagtttcatttaagatttt

SEQ ID NO: 46431 - DNA, 2145 bp, Cannabis sativa
acagaaattttatttatggcataaaacctaacataaaatatgctagacaccttccaatttggagtccctttccttgcatttaagtatcaaaatggtctttgactactaatttggttgtcaattggacttgtgattatttttggagcttccagaatggtcgacaatcacctgggaacaaaaatttattgggcacggcagttacctcttttcttgggtcgatgattagtaaatgggcattcccccgaaaaagttgtctgaaagttgacattgatgtagccatagatgcatctagatcttgttctggtcttggtatggttgttcgtgaccattgtggaactattcttgctttagctgtttggcgtctggaaggttattttgacccagaagtggcagaggctttagctcttcgacaagctatggttcaatgccatctttttgggtatgatcacatcatttttgagctggactgtttgagtgttgttcagaagcttcacaataagttgcttttaaattcttcattggggcttgtcttatctacattagtcatattaattatagtttaaatgatgtttgttttaagcactgtcctagattttttaatgttgttgcctacaccttagctaaatattatggtagatcgattcacataccttaagatccacaccacatataatccaataataaattgtgaaatcatgactaaatattttaaaaaaaaattaatagaaaaaagggtaatgtcttatagtaatatatatatatatatattatttttttccttcattatttaattaattaaactcatattatccaattaaaggtctaacttttcatagatacagtggcagagggaggaactagaaattgaaggggcaaattgtaagcaaattaacttaaggagttaaattgtaaataattttaatataattttatttttacatacttaatatataattttatttttacatacttaatatattttttttttttttgagagaatacatactcaatacttaattcatataaaaaatatataattttttgggaggggtaacaaacagccccctatgttaatgaatgactacatcaatacattgatacatgagaaatactaaaagatatattagtggtatctaataccactacgaaatgtcatactaatatcattatgattaagtatcaagtttttatatattttaatttaatatttattatataaccgctagccattcacaaagtaatatctcatggtagtgttgggaactaataatatctaataagaaccgtatgcataaattgcatttgagaccacaaattttaaaagatagaaaataaaagaataattggtaatataaatatttaaatttaattactggttgcaaataaatatctaaatttattttttagcagtaataatacttaaattatatttttgaaactctataagtacccggtcgttaaatgtcaagtgattatttacatattattttcttgttgtatatttaacctaatttttttaaaaaaataaaaacataaaaatttaatggcctaaactaatcagaaattggcacgtagcaatttacttaatactaaccgtcaaatacttataaaagttctagaattataactgtcaaaaattaaaatataactaaaaattaaatttaagtatttattccgtaaattatttaaaataaaaaaaaaagtaaataataaatatattctataatttatacattgaattagaccactatcacactttagttgacctcaatagactcgttttccatttctttgtccttttaaactttatcttaacttctaatgactgcaaaaagaaagtgttaagagaaaagaaaacaacccaaaagaaaatttaataaattattaacaaagaaagaaagtgaaccttttatgaacaataatgatgaaaggatcaaactttaaaataataaattaaaaagaaaattttggtacaattattaggttttcatcatttaacaagttgatttagtgtaaataaataaattaatttaatgtcaatttgaaacaaaaattggcatattaataaatgaagggtaaataccattttggatcctgtgttttgcaaaaattaccgattgcaccttgtgttttgttaaatgacaa

SEQ ID NO: 46432 - DNA, 1508 bp, Cannabis sativa
  modified_base (27)..(42): a, c, t, g, unknown or other
  modified_base (1453)..(1460): a, c, t, g, unknown or other
aggatgttaatgaaacatacatggtannnnnnnnnnnnnnnngtaaaatatttccaacagatcaatactccaagtggagtggagtaccgagctacgtgagtactttgataaactcacctatgttaatgtgggagtggggtcgcttcctataaaattttgggcaaaatttctagagcgttcatatactaggatagacgttcatggccattaatgcacatgcttttgattacacttttgaaaagtttattgcgtggtacaatgttagagatagagttcaagactacgagtcactctagtaaaatctaaatcgtattcattacgtagaggttcaaatcgaaagatacctttgtttctgctcaatcttattattgaatgatactagtagatggaaatatttttttaaaaaatgaagtgggggattgttggaacgttgatgaatattttaaaaaatatagaagtgttatagtgtgtgtgaagtggaaagagtcccacatgggatatgaacccttatttacaagggtatttagagtgcaactttggcatttgagtttgggccccaaggggtacccaattttgtgtgattgggtgaggactcacacacttaacccaccgcacatgcgcgcgtgctattcgtctgatttgggttggtgtggtgtgacactttattatttttacagaaaaattatttaataaaataattattttttattttttaagagaaatgtgtttaattgaaactgattacataggtgtatcagttaagggacacgttcaaccaactgcacaccacgatttagaaaacgttcttcttcccattatgatttttcaatccattcatctttataatgtgattgaactgatgggaatgattcatttttttcacataaaaaaacagtttttacaaaaaaattccatctgcgatatcataaatttttgggtgtatttgacagtgctctacaatgcaatggggttaacgctctaaaccctttctctattttaaagtttctttaaaatttactattcattctctacatttatagaacactattctgtgctttaaacttattttattaattgtttgagttgaggttttaattttatttttattttattttatgtgaggatatgtgtaaatattaatattaaataattaaaatgaataaaatatattaaatttgaaaaacgaagaattttggttatgtattttaaagaaggtgacgtatggtgtaaaagcttaaggtaaaatagaaaaagtagggttttgatgatatattttggctaaaaaaaagggaaactcttttacttgaagcaacctgatgagaataaaaaccctcttgtttttttctttagattttgattccaaaatcaataatgatacaatttggtaggggtgttcatcaaatcgcccaaacctcccaaaccgcccgcaccgtaccacaccgcataaaaaatnnnnnnnnaaattctttgcggtgcggtcgcagtttgaatttttcctaaaccgcgcg

SEQ ID NO: 46433 - DNA, 2072 bp, Cannabis sativa
aagacccacctttgttaagttttttggcccatcaccaacatgcacatcattctccatcataatacactcatcctctgccacctcattattttcaccattattcccatcttccatgcgcctccttttggaatctaagataattttggaaatatcttctccatcctcctcagcattaactttgtcaacttgttgcatgggactccctttccctattcgtggaccaggtacaacaccagtttgaatatccacattctttccttttacaccactcccaggattgatgctattgccatgaactatggaatcaatctccataattttagccactgaaccagccgtcccctctgtcaccactcgtccatctgcactcttctccaccgtcgactgctgctcagtaccagagcccagccactgtgtaccgatctggtagtgtcgccttctcagctgtgccttcattctaatgccataaggtttaacaattttattaatatcttgatcgaatcgtttagcacaaaacctttcagaatggcctatgatgccacaaataaaacagaatgttgggagatgttcatattgaaacatagcccaaatccattcaccattttccttatacaacttccctttggtttgcgagcgacggactttctgttgtttaacaataacttgaaggcatgtgcccttcatggcagggattaatgtataaacaactttaaaacccctaagtttccaaactagtagattgtccctgtgcctgaggaggaagaaaaccgagattatttggctcataaccattgtcttaaaaatgtgacccctggggaagcttaagatgaggcctctcgaggtaataatcttggtgtctatggatgtatgtatcaagcaaagtgcaagtttctcgagcagtgggtatcttgattctgcccttagtaatcttttacttatagagtaaacatgttactggttgctgccttcctctcgcattagttttgcagttatggaaccatctgagatagccaaataaatgaactatacctctcccgtgattggtttggccaaaactagtggtgtagaaaaatgtttctttatctcttggaacacctttttgcactcttcattccacttgaattttttattgcctcgtaagatgttgaaaaaggggaggcattgatcaattgacttcgagatgaatcagttgagtgtccccattcttccagtcaaagattgtacttcctttggttttattggggaaggcatctcgagtaatgcattaattttatcggggttagctttaattcctcttgcattcaaaatgaaactaaggaatttccttgaggataccctaaaagaacacttcttgggattcaatttcatatcataattttttttggtatggcaaagcattctacgagatcctttgtatggttcttgcttatgacaatctttaccaacatatcaacgacatagatctccatgtttcaccctatctggtttttgaacataccattcacgaggcattggtatgttgctccagcattcttcaattcaaatgacatgactttataacaatacaatcccatatttgtaacgaagcttgtatgctcttgatctgggacatatattttaatctggttataaccagaatatgcatccatgaaagtcattagttcatgtcctgctgttgcatctaccaattggtcaatcctcattattggaaagcaatcctttagggaagctttatttacgttggagaaatctatgcatgttctccatgtcccatttggcttcggtaccagtactgggttatatatccacaagggatgaaatgcttctcgtatgaagttattggtcaaaagtttgtcaacctcttcagttcattctgtcttttggggtctaaaggtcatcattttttacgttttgaaggataagctgaattaatgttgaggtgatggcatatcatattcgggttaatcccgaccatgtctgaatggctccaagcaaacttatctttttttgtcttcaaaaaggtgattagttgctattttagttcttcctccaaatctttcctaatatttaca

SEQ ID NO: 46434 - DNA, 3868 bp, Cannabis sativa
cacctatggccgacttgtgccatctttgtgacctaaaagatggcacaggtctctcccactaattagccaagaactaatgtgggaaagtgttttgctagcatcgatatgataaaactatgcaagaaacaccataaaggtattcccataagccctagcgtaccaatggcatcttttagcactaaaaagatggcacaggtttcccgttagggttttcaacgtccagatgagattttggaaccccaaaacccccaaaatatagctcaccataaaaaaaataagttaaaacataccctgaggtgtccgagaacatgtatgaccaacttgggccaaattgaggtggcacgaatcatgatgacatggcatatgtcagatttgttggtgaaatgtacttactacccttcaataaaatagatataagtttctcaatttttatctaaaagacttggttcaacttgaatttgaaagatttattcaagaatgttctaggcatttctcatggtcatagcatatttctaaagttatctagctcaaaattaggctaaaagacaagttagcacactttacttgggaattaattagttttattaagtgtggaccataaggggatgttaggagagttgtttcaaaacacttgtgactctctatttaggtgtgccatcccatatggtcaactttctccaatttaccattcccaaagcacaatgccacataagcaagttcaaaagaaaatggaaataaccatcttcaacgagaaacacaataattgtgaaatatttgcctatgactatgggatatttagatctttatttgtttgtattttttattcattattttagaaaaagatacgggattagaagtgagataccccgaattgtgggggatcacaaacaaatcataggcctatataaagacaacgatagactaaggtttgagacggctcaataaaagacctttgacccgacctttgatcatattctagatcttgaagctctttatagtgcctagaacacataatccctagagaccttctctcttcacgttttccttcagttatttatattggtacgacaccaagcttccatacaattacaattaacatacacacttaccaaaagttaaagaccattctctaatctcgcttccattggtgtattgttcccatgaacattaacaccaccattattattaagtttatggtattgggtctcccatgagccttttattcatgagcttcgatcgatatagattttgcctagaaatctctttttgtactattatccacacactcttgagaacataaatctggtgtgctagaactgaataataaaaaataaagtagacgtagccacattaccatcgcgacaagggggtgaactactacaaattcctagtatccttttttatttattgcgattttttttagcaaaattaatttagcgcagtcctattattttttttttttgatcttcttagatcagttgataaaaaactgcgtcaacatttttattgcttatataatggtaatgtagtaaataaagaagataaagttatgtaaaagttaatgaatcataataattaatgacactatagtatataaaaaaggtgaaatttattatgggccaaatttggcacaatgctaaatcttgtgcataatttggcataatttttagcatgtgacaaatttaccttgggattagccttccaaaacccataaagtacttccgcagcaatagactcgtgatgttttatgtctttagcgtgggcatctctcttagctgcaaacacctcattaacttattttttctcctcttcaagagttgacttctcattctagtgggattcctccttttccatgagagttctagtcagatccttaatatttgtctctttattttggaggagtttctggaggccttctctctcgttggtaagttcacggaacctttttttactcttgttccagatcttcttctaactttgtagcatacgacatgttgtataggtgctaccttaactccttgatcttgttatttgcgatagttagttgcttattcacctcatcaagttgggtgcttctctggtgaacttcatccttggtggctttcaaagctttttccagctcggtgaacgcaaaattggactggagagctgtagatttggcttgaaaataagcatatccgagcttcatgtaggtctaaaaaataaaaaaagaattaaaaaaattggcaagttaaaagattgaatagcatgtaccatgcaacaatttaaaggttacaaactcactctggtatgttccttcagtaggcctccaatcagaagttcgaggggtaggtgatcacatcctttcaattgcttatttacctcgaccattaaatagtcttaataaacacagatcacatcattggcctatcctgtctcaggctgcaccgccatggtagtcttgtttgattttccaaggtgaccctcaagagcaggcataagaaaattaagcctctcaatgttaacaatatcaacaccaaaagtgtctttggatgatttagcaagctttgatcgagcaactgtgggtgagaatttgaaaattttttgtacggggttcactctacagaaagagagtttggtacctccagatccataattcttccacctctagggttgaatctgatggaattttttatccaagcccgagacggggtaatttgagactcaagtctgaactggtcaaaggaggggcgtcttcctgtctatgttgcctagtaggagacgtctcttcggaagagtcacccaacttcctcttcagcatgcccttaagcgtgctcgtcataactgcatagaaaaaaaatagttaataaaaaggatagcctcgcaaaggcaaagtcatcaaagagcctagtagttaataccctgaacctccacgagagcattttccctaagagttatgctcagagcattgtggtcggaggagaaatctttcaacttctcttcaatagcatccttgcctttgccgtcaatggcaaaatcttaggtagatagggggctctacaatttgttccatgagtgtggtatgttactattttttaaccctaattacccctagatcaatctcagccctcaaatcaaataactctccgattcaacggctgccgtacatcacggaatacattccgtgaaagtacaatcacggaacaaaatcgtgtccctatattatttaatgattaaattaaaatgtatgatttcatgtaatatattttcaaaatgtataaatttttaaaataatttttttgtgcacgttttatgtatttatgttgtttttgtacatttaaagtctttctttttgttttaattttttatatgatagcaaaaaagtaaattattaccaaaataaagaaaaaatgccattttgttttgtattatagtggtcactttaagtgaccagatcaacgaaaatccttgttcgtacaatgtgataaagactctagcgggaaattaagatacagattggacgtctcaaccacatctgcagttcaggagtacacatcacttctacagtacccgttacttgcttcaaactatggctattaaataaggcatgcattatgcataagcaagtaaagtcggttgatgaacaataataatatggctgaaccaaagaattatacgaatcttgaaatgaggtggagtcttgagggaaaaacagctctcgttaccggtggatctcgaggaatagggtatgtaaataatttttatgctatgcaaagtacgcttatcatggtgggatatatatagaataaataaattaataaaaagaaggaataaaacttctttaagcttgttttttcacactgtctttttttttttttgggagaatatg

SEQ ID NO: 46435 - DNA, 1216 bp, Cannabis sativa
  modified_base (639)..(655): a, c, t, g, unknown or other
gtaagacactgttagagttgtcaataatcgggtgtaccgtaccccccaaatgagctgggaattttggtctcaaattctcggttaatttcttagagtctaacttgtgtccttttccagtcctcgtggaagaggtttgagcgtagttctgctttgctccaggaaatgtactatttttttgggccacgtctttcttctttgtaaccacttggagggaaattcttgaaagggtagcagttatctcacagctttcacaaaaaaagagtcgtggggttagtaagcggaaactcagttgtattgttgtccccaaatgatccctccacgacgtgaatctcgtagaggaaatcataggcttcttgcgacacaagaggcttttggtttcccagagggaaagtcgggcttgtgtccttgcactgacaattttcttcatgctgagatccgcttcgagagtcatgctgcaatttgtattggcaaactttggtctttctcttaggaaaaggctaaaagtgcacgagaaatttggactttgactttgcttgcaagagccgaaggaaaaatatctcagggtgagcaagagttatgttgaatttttaagaagcaagcatcgacttccgcgaagaaaggctgaagttgcataaaaannnnnnnnnnnnnnnnncttgaaaagatcaaaggaagaaagcatcacggggggtaagacagatttcaagcagtccttccattccgagaaggagggttgaagacgtgccatactcccagtaatctttcttccacgaaaaatatcgtgcatgcgagagacatgttgaatttttatgaggtaagcttcgacttccgcggaagaaggctgaagtttcataaaaattcaagtttagacttcgcttaaaaagatcaaaggaagaaatcatcacggagagtaagacagacttcaagtagtccttccattccgagaaggatggttgaagacatgtcatacccccaatgatctttcttgcacaaaaaatatcattcatgcaagagccatgttgaatttttatgaggcaagcttcggcttccgcgaaggaagactcaagttgcataaaaattcaagcttagaaaggatcacaaggagtaaagaagactttaagaagtccttccatgctgggaaggagggttgaagatgttccatacccccagtgatctttcctgcacgaaaaatatcgtgcatgcgagagtcatgttg

SEQ ID NO: 46436 - DNA, 1954 bp, Cannabis sativa
gcaatggtgtgccaggtactcattatatcagaacaaccttggctttgctgctattgttacacaaattagaagataattgttaaattcacttgtcacttttcagcctgctgaggtaattggacttgtcgaaattcctggccacgtacgattttggggaattgattcaggaataaaacacaggtagaaagaaaggcttcattgttctcattttgtcatatgtttgatccattgtagctttatttctgaacaatgtttatttttctcctttgtagcgttggaggtgctgactatggatcagtgaggataggcgcctttatgggtcgaaaaataattaagtccatcgcatcttctcttctgtctcgatcattgcctgatgcaaatggattcaatctggacgagttgggtgatgatggtattaaactgctaaaagcagaagcatccttggattatttatgcaacttgtcacctcacaggtaaactttttatagctatttctttttcttttgtgaagggaaaattaacaattatacaattaatttggtgtacagatatgaggctctttatgttaagatgcttcccgagttcatgcttggtgagacatttgaggaaaaatatgctaatcacaacgatccagtcacagtaatcgatccaaagcgtaattatggagtgatagcacctgctagacatcctatatatgaaaatttccgagtcaaggttagattttaaattcaagtctcaatgaatatcttttattatatagtctttctgtttattattatgcatttaacttgacatgtctttcccaattttgctcgatgttaggcattcaaagcattgttgacatcagcaacatcggacgagcaacttacagctcttggagaattattatatcaggtattttagcagacattttagatgtaagattaagaaacaaactaaacatttgttgaccattttgttttgttcatatttttgtgtagtgtcattatagctatagtgcttgtggacttggtacggatggaacagataggcttgtacaattagtgcaagaaatgcaacatagtaaagtctctaaatctgatgaagggacattgtttggagccaagataacaggaggaggctcaggaggaacagtttgtgtcattggaaggaactgcttacagagcagccaacaaattcttgaggtaacatttttttaccactaaataaagactcttattatatcttaaagactaataatatttttgtcttaactagatgattaatggggtgttaatttgatgtgatgaaaattggttttcaggttcagcagagatacaaagctgccacgggctatttgccctttatttttgagggttcatcaccaggtgctggcaagtttggttatctcaaattacgtcgtcgaagctctgctaagcaaaattaatcgaaacaggaacattactagtattttttttttaatttttttaccttgtgttttccaataaaaaatctgcaatttttttttattgattaataaaaatgatgtatggttttttttattataattaattctcttttgattgatttttgagaaattgctcactacatcttcattaatacaactaaaaggtatacaaagacattgttttatatcatcttgatacacttagtgccaccactagttgaacataggcaaaaagcctcaatgcccctgcctctgaaagatcgaatcaacacaatcttaggaggatcatgttggacaccacaacacgtgaaaacgtaattacttaattattgtaaaagtaattacaccaagacttgaacactttttattagaccacattacaccaaacatttactcttttattttatcactagacacctttactacacacttgtataactcacgcttttgggacactttgtatttagacacttattaagaacacacacacttgtgtatagataactt

SEQ ID NO: 46437 - DNA, 2462 bp, Cannabis sativa
agattcgaaaaaaaatcagggatgctgcactcacccacgcgcacggacaacacgaattcagacaagcaacgaccgagcttgctgtctgaatcacgccctgcgcacgcaaaaaccctgtctgaagccccttacgcgcgcggaaatcatgctggtgacccataatggtcagtcgtctaatccctggccacaggtccaacctgtgggccaagcggtagacagccagatcctacctgaccgctcttcgagtggagttatacctaataacttcatccagacttataattttggccaaccaaccgaccaaacaagtcagacaccgagaccacttggtacctcggtattcaacagattgcgtgcgacccacgacctcaaggttgacttgaacatgagaagcggtctggacgaacaatacgtccaaccaaccgtcttaccaggtatccgcatctaggaccctgctccaagagatcctgatgtgacacaggtcggtcaagaggctgaaccagttcatccatttgtgcaagcacaattggatcaactaaaaaatatggtacaaggcttgaccagcctaaaactcactgatcttgagctggaccgagcacgaagaccacccttctccccagagattgaagtcctttaattaccccttaaattcaagatgtcgacctggaagatctatacagggaaaaaagacccattatcacatcttaaatattttgagatgcagatggatctgcaaggggtacggggtgatgtgcggtgtagaatatttcctattacacttgcagaggccgaccaacaatggtactttaagctatctctaggaaggtttaattcgtgaaaggccttctcctcagaattctacgcacagttctcttcctctcgtcaactcccctcgcacctagaggacctggtcgcagtaaaacaagtaccagaagaacccctaagagcatatataagcaagttcctaacagaggcaatgaaggttaaggggttatttgaggagggaaggctggccgccatactggaggcattgagccgcttggggacttatggaaagacattaaaagatttggcctcgtggggtctatggcagaatttctagactgagcatatagatttattaagctcgagtaagttgttcggtgtgtagacacagtcggacataagaaaggccagcaatatatttcctcggcaggggcacctgcccaaagtccacaatatcttagcagctccacatggagtgggaaaaagtctaataacagtgacaggcaaggcaacagaaagaagggaaagttcactggcaatgccgaacacaaccctagagaaaatgcctcaaaatttactgccttctctgtcctgactgacaacctagagacaatctacccaacaactcaatctatggtcccgttcaaaaaacccgctcccatgaagaaggacgtaagtaaaagagacatgtccaagttctaccgttttcatgcagattacgaccatgtcacgtatgagtgtaacaacctgaagcgggagattgaattcttgattagaaaaaataactcgcatttgcaaaaatatgtcaaggccgatcagaaccaaagggcccctcaaacagacaataattaggatctattaatgcccccaccagtggacgggcatttacaagtcattattgggggcccacatccagctggagactcaggcaaagctcagaaaaagtatgcccgagccttacaacatgaataaaaggaaacagtttcggcagtagaagaaagaaagccaaaaataccatgggtatgggaacccactataaccttcactgaagtagatgttattcacgtcaacttcccacacaacgatctcttggtcgtggaagtaaagatagaagacaagacagtggctcgaaccatgatagacagtggagcctccttaaatattctgtttaagataacatatgagaagatggggctccaacttgaagatttaatcccctgtaaccaacttgtgtatggtttctttggtcagagtgttgtacctctggggcaaatccgtctacccctcactgcgggacaagctctgaggagcataactgtgatggcacaatttttgataattgatgttccatcagccttcaacgtcatgttaggccgaccggtcttatatgacttgaaagctgtcacattagtttttcatttgttcgtcaagttcccaacaaacaatggggtagggtgcctcaaagggaatcaaagaatagcacaagaatgctataaccttcccttaactaaggtaaaaaaggagaatacctctagcgagagtttaagcaaggggaaaagtattgcccaataggaagttgcccaaggcgggaacgaggacgcggatgcctgacttggggaacctgttgggttttctgccctaaataatactcatttcaatataatcagatttatttattaataaagattagaaataac

SEQ ID NO: 46438 - DNA, 1147 bp, Cannabis sativa
gccagagattttcaaagatccctcatgcaccgcccaatgatgtaatagatatgcaatgtccttcaccttttgccatatggcaaatagatttgattggaaaattgcccaagggcaagggcagagtagagtatgcaatggttgcagtggattattttacaaagtgaacagaagtcgagcctttagcaatgatcacatctaaaaaggtattggactttgtggtgaaaaaaaatatgtatgtttttacttccgcacaagatttttttggacaatgggaagtagatcgatagctagatgattacagatttttgtgtgacacatggaatcataaaaagtttctccgcagtagcacaccctcaataaaatgttcaggttgaggcagtcaagaagacactcaaagacaccatgaaaaaatgaatcgaagaagctaaagggaactggccagaggaacttctagaagtattgtggtcatagaaaacaacagagaaaatagaaactatgcaaacaccattttctatcgaatatgattatgaagccatgttgcccatggaattagaacttccgtcccacaggagattaacctacgatcacagagctaatcatggcctcctagtagaatcacttgacgaggttgaagaaaaacaaacctcagcaaacctaaagctagtggctcattagtaagaggtggctcggtacttcaacaaacaagtgagcacaaaaaggtccatagaagagtattcctgaacacaaaagacagcacacctggcatgctcaaacttaattgggaaggaccatattgggtggttgaagtcacaaattctagagcaaataagctgggacagtatgacgaaaatatggagctcgttttggtaccaaggtattggaatggggaacatttgagaaaatactaccagaaaagtgtagaaggtttgacaccatctcaagtacacaattttagaacatttactcttaagtagatggcgttttgggcaaatttcgatcaaaggtttggataaagtaactagtactcaagtcgaatgactgtctttaaagtacagttaaaaaatgcaattgttttgtgttttaattagctaaagatcagttagatcatgtcgtacctttcataattcaataaatgtaagttactacg

SEQ ID NO: 46439 - DNA, 1280 bp, Cannabis sativa
ttggtttagggaaattttttttttattttctaagtatagaaaatcaaatttccctattatatatgtatgactattcaattattaccctaaaaataaactatgataattatattttcttataatttgctataacagaatactaacatataaaaattttatctttaaactcaagttaattataattaattatatacttatattaattaatttttaattgaaatatttaataagaccttttttataattaatatttatgaatattttttattttttctttatcaggaaataaataaaattaaatcacaagtaattcattaattatttttatttaatttctaaattagtcatacccgtttaataataatccaacaactaaaagtaagatgatcacatatttaatatgattattgaaacttcctccatatatatataatgaaattataagaataaaattaaattaaatataaaatacataaaagaaatgatgaaaagaattataaataattttctcattttattttggaatggtctttttctcttttgcaaaatagaataatcatttcactaaaatgatagaaaaaacgttccattaaaatgacatttcaatactttaaaatataaccaaacaaagaatagaataaaaattattttatcttcattccattccattgtattacctctaaccaaatactacctaagattaaaattattaggatgtcgaaaacccgaagagtgcaccaccaagtttctctaagttcttctaggctacaacttagagaaatgctaagaggtgaattaaagtgtcaaacatcgcaaaaaaatactattatagtgcaatttaatatcagattctgaacaaattgatttaataaataatataacaagaaattttaaccactcgtaacgtatcacatcagtacaatattaaacaccttaaaatatcaaatagtaataattctacaagttaaccaaatgagacaacatttataataaaaataatcccacatcgattacaagtccagaggaaatgagacttataagtatggatacattttcattggctaaatcattcagtattttattttaattggttaatttaaattttttgtctcttgaattttgacatatattattttgtttaattttactaaaaatataaaaattttgagagcatatgttaaaattcaaaaaatataatttggtagatataaagtttaggggcacaatttaatatatgaataattgtcacattagcgaaattgaattaaattagacaaaaa

SEQ ID NO: 46440 - DNA, 1182 bp, Cannabis sativa
  modified_base (27)..(42): a, c, t, g, unknown or other
tgtgttataataataataataataatnnnnnnnnnnnnnnnnataataataataacaataaatttagaattaaaattttctttcctacatttctttttcaaaataaagttgaaaaaaataaattaaaaactattatacttgtagattcttttttattttaattatattgtgacattgtcgactgattttttagctaatgtacacgaaatcgtaattaatgggaatacaaaaacgagtaatcaatgtaaataatgataacaaaatttaaagaaatccccaaatgtctataataacctacttactctgtattttattgttctgagttacaagtcaaaagcagaatcttaaatgcaaaaagtaaaaatggtagaatttctatttgtgaatatgattttgactcccttctaaggtcaagtttgacctttaatatatgagaagggttggtgagtctcgcttcaagaggcacgacctagagcacggttgaatcccaaatgcatgagggaatatctcaaccatccccatgattctcgaaatgggttgagacccaattcttttgtaatattccactattcttgtggatttgtaaccacttttgagttttgagcaggattagaatgttatgtacatgcttgcttatcatgtataaggcagaacaatcctttgggtatgcgtccctatggatctcggcctgggctgacccttaggaggactctcggtctgatgacatatccacgagatggatacctttgcctcttacgttgatcccatgttgggacttcatggtttcggttgtttacaattcttcgttatgccttacttttatacttgtagttatatggagattgacccatgaacatggacgagtgttgagtacgtgggacatacctcgaaaccctgggcaaataaactatcacccatctccaagtggagacaaggtatggaactaaggttgtatgaggatgagggccaacacccccttgttgagggagaaattggcttgggcatacctgcactcagcttgagccgacccctagggggatattcggcataggccgacccctaaagggtgaataaggcctagttcatttttgaaggcctttcataccgaaggttcaccctttgtctatagcggttgttgttgggaatattttaccaagatctagatttactaacaagaatgtt

SEQ ID NO: 46441 - DNA, 1577 bp, Cannabis sativa
  modified_base (1505)..(1525): a, c, t, g, unknown or other
ttcttaaaaactattatattaaattatatgaggcccgatacttagttggactaataacgatactgacacataagaggatgctaggcaccactggtgccctttagcatttctctattttgttcatacaagatttatgcttttggtatttgaagtgctaaaaacagtattaatgtttatttagaacattgaaatttgaaacaacactaagatactttcaatatacattcagattctgacaataaaaatgaaaaataaatctgtaaatatactttcttttgtatcatgataaattgtttttcttgccttttcaattttgcattattttctttttagaattttttcttctttttttgattttttcattgttttttttttttgaaaaataagaattttaactgttcaaattttgttgcttttcatttaagaaaaacaaaaataaagaagaaattatgccatggcatattattcaatcttatttattttttgaacagaagtattatagcataaaatatttctaataggtagaactcttccagttccagagtatatttacaaggcaaaaatattgaagaaacagactaagtagtgaaagaagtcaataatttgaagaaaaaaacatttggccataatattattttggtatgactaaacacaataacataattaatgggaagaacatgcacattcttattagttgataaacaaagtgttaaaaagcagttgatacagattttaatatactagtttattgtattattattttaattttttgtattattattatttggtcaaataaaggataattggaaaggagctgtgctgagctgagcagaagacggcaagtaagactagttaattttgttgtgttgatataatataagtaaataaaaacaagagagtagtaggtgagggtttaattagtagttaggtggagataaacttcttttaaaaaaacatttttgaaaaaatagaccttatcaaattttttagactttttcttttttatttataccactgtaactgatttcttttttacaaatactataattaataatttaaagtatttataaggatacaaagtttattaactttaattaaaatcacaacaataaacagtttaaattataaaataattgaaaacaatattttattatgttgtttactaaattaatagaaaaatcagaatcatttcgtttaaataattaagaaaagtaatcgaaatgcttgaatttgattaaattgttatggttagaacacgtagttattttttattctttcatatttgtgtttttaataaataaaaataattaatgtatagtaggttaagaaaagagaaacttattctttatgaaaataggaggaaaaaaatttcttattattttctttttaatttgtgtgagtcttactagtttctctcttttcaaaatttaataaacaaatgaatgtgaatcaatctcatacaattgattctagttccctttggactcgtttggaacgtcgtattnnnnnnnnnnnnnnnnnnnnntattatattgaattgaattatatatcatatttttatataatactatgttaaa

SEQ ID NO: 46442 - DNA, 1573 bp, Cannabis sativa
ttcccaagcccttggacattccagaatagggccatcattgttctcggcgacccagactcgctgagttcgccgcttccaaattcagatcaaaggtcaaatcagtcatagaaatttcctttgcactttctgtcgtcgctgctgtagtagttttcctcccattagcatcattcgttccactacccttattaatcttacttcttttcgggatcacctttcgtctttttgaggggccttcattcttcttcaaagaatcacatctagtatcatatattataggaacatccattagagtgttggggtcaatcaccatgttatttatcaaattcaccttctctgtaagatctggtacattatccagtgagttagtcccatctcctgaataaattacaccttcatctctccaagaaccacttctttttgctttgttaaacccttcacctatcactttcttcatagatccttctccagaatttaaaatactctttgagagtacatgatctgaagcattcaaatcaaaagaatcacccaagaacacttccttgcccttattctttatgcctaagttggaggagcttgaaggggagaacgggtcagtatttctactttgaatctgtccaagacttgacaaatttggagggccattatctttgttaatcacagaattaggggaattgcaatttgtatactggtctcttatttcagggaagccagggggagcagaattatggccattcagagcagagaaaccattaatcgaagaggcaggatagactcttttgtcatcaactttcagccaacttccataactcggtttgacatttcccagaccatcttcatagtatttaattggttctgcacaaatccgagtatcatggcccacaaaaccacaattaaagcacataaagggaagacgatcatacctgaacgggagccaaatttttcgactttcgctcggaaaaaggaaaccggggcacagcggttttgatagctcacaccagactttgaaggtgaaaaatcctttggtagcaatcttggtggtatcaaccttttgaacttcaattacgtcccccacaaaactggccaggcgctccatattggcttgtgtgatcgatcgagttggcagctgtagaatacgcccacttatggaaaatcgattgagaaccttgttccaatcttgtggaattccatcgaatctttccactattagaaatccattatttaggaaccaagggtttttggctagaattcttttcaaatcttgagaggattcgaaagagaaaaccagaaagctggattctttagtggaaagcttgatttccactccccattctctgtccgaaactccccagactcttcccagaatggttttgagaaggggacgattcagaggacgatttgaacagagtctccccatcgcacagaaggaagccacttcagaccctccattcggattgatttcccacccatcttcgtcaagaactgtgaggttcgacgttctagcaaggagatcttccattgttgtatcaggcttgttcggcatttcgttaagaaggctcttctcgtgagagagcat

SEQ ID NO: 46443 - DNA, 1202 bp, Cannabis sativa
ttggattttgggacccattttttttgcttagatcatcatcctcattattcctcaaagaggaagaagaattaatttaaagggtgttcttgaaagtgattgatagggcatgaaattggtgaagttgcagcaattgattatagtggtcaaggcaagtaagttcttaacaactaacacttgcgtgaccactctgcttttgtttagtgggatatactcaaatttcaagcaactcatcaatgagagtgagtcaaacaaaagtaaaatattgttctttgtgtaacatatgcacatatctctttttccttaccaaacttctagcttttttttttcactctaattaaaaagaaaaagaaaaaacaaatctcgggtaacttagtgatacgatcgatatgattttcaagcattatagaaaagaatcttgcttttttgctttaactccccatataatgtgtgattagaaataggaaatatttttatatatttatattgatgtgctatttgaggccttaaattcaaattcttctcatattttgtcaaaataaataaaattatattagctaaattattcaaaagtaaatgttattttgattcttgtactttacaaaagttattaatttgatcttttgtttagtcaaataataattcagaccacgtgttttttaaaatagtaccatgaactcaagtttcgtcaaattaaaacattactagttatattttttttcttttttttttgtatatatttgtgttacaaactgatttcatgttggttatattaaaaacaaaagtagaattatacttgtacccaataaaattataagtacaccctaatattttaaaataatttacttaatttaatttttaaaaatcactcttaatatatattttaaaattttcttttttacactatttagtatttaatttaataattattttaattttaaattttcatatttttacaaaagttattataattattttttattttttaaaacatataatatcttttctcaatatttaaaatatattttatttttattttatatgtatattttttaagcatataagaaggaagaaaaaaactaataaaaaccagtataaatcaaagacatacttttttgaaatttttacatgaaaaatctattttacacaatttattacaaaattactcatacacgcttatacctacttttttacttacaaagttt

SEQ ID NO: 46444 - DNA, 1240 bp, Cannabis sativa
taggtctttcaataaattgttcatggttaattttttataacaatttttttttggtaaggatttttttttataacaattaataccaacaaaaaaaattctcaaaaaaaattaaaaaaataataatttattacctcaaattataatccctctacttgttaaaaaaagaaatttattatccctctatctccttttaaaaataaaagatttttggcaaaagaaagttgaaggagtggaagggattgtagtgttagcgaaaggttatcttgatcaatggataagtgcacaaaattcttttattgagctgtcatggtttggttttcagacggatgatggggttgagcaatggttcgctccaagtgaaaacagttcatgaccaatgttgatgatgctctcttcgaagggggaaacaactacggtattggactggtagcacgagaccatcacgactttttattggaaggccgaaagaacacttcatgggcgctgctacaccagaaaattgctgaggcgattggagtccgtgaagccttgagttggactaaaaaatataactggcagcgtgtgatcatcgaaatcgattgcctgacggtagttcaagccctccgaagctcaattcgaatgatttctctgcttggacaaatcattgctaaatgtaaacaactctttttagagttaaagaatgtctttatttttttttttattaaacgatcagttaatgtggtagctgataactttgcaagagcttttatgttattttctagttgtcattttagtatggaatctgttcttactaaattgttacattgtttggaactgatcatgttggttaataaaaatttattttctatttttacactttaaaatatttttttttgtatttttatagaaatttaaactcttattataacgtagcaacttaaatcgcaactaaaatttacataataacacaaaccgtaaattaaaaaaaaaataaaaaattaatggggagttctaattgcaccccataaacttataaatacaccccattattaaaaaataatatataaatttaaataatttttaaaaagtattcttaatatttttttaaatttttttcttcacattattttatattaatttcaatacttattttaattttattttcattatattttttacctcatgtattatttttttttaagaaaatttcatataattttttattttaatttttttgccataatatttaaaatataattta

SEQ ID NO: 46445 - DNA, 2076 bp, Cannabis sativa
  modified_base (970)..(971): a, c, t, g, unknown or other
actaatcagattgtaaagagttttatttaggaatggtcaccctaccttctaccagcgagtaggtttgacaaagatcttatagtgtcttgggccatgaggatctcttaacactttttttcttctcatccgtgttatttcacaaaaatttgtcatgatagagaagaaatgaaaaacaagcacacttggaaagcggaatacaactcagagatgtatgttgcgttcatgaaggatgaatagcttcttttttttttttttttgtcttcatgtgagtatttcgtatagagattagtgtatagcaatagtgactttatttataataaagaaagattttggttgtcccaaatcaacatgctcctttttttttaattagaaaattaaaagcatatattaaacacaaacaatctaccaaatttactaaattaattttattcaaatactacaaaataaaaattgtctttagtatctaaacttataataatactttaaggtgccaacgaaactattttagtgaaatttaattgtcttaattttcgagctattgtgccaaaaattcaagttccaattgaattctttcttgatcaatagcaaccgcaacaatatcatcatattgtataatcatatcgctgtcgtgtttgaattctttacaaagatgtacaattatagctctgattacttcgaatttttccatcgatatattttgtattacttctttgattacaataacaacaacgtcatcggtatgtggacttttgttgctttccacaacactttcacacaaatagatttcatgttacgtcaatttgaactttcttgatctgttcaattgcaaacttataacacaattgcattctccaatctaatcgttgtctttatttttgtattcctcatttatctaccacgtcagtttggttgattattattttcgcctagttttggtgtagtagctatatttcgattcatcctctttttnnaagggtttcataattggacattgaacccatttcatatgatgagagttgtaggggtcttgggcgctttgctatgtgctattcatggtgcatgatggatcgcagattagggaaccctaagagagtcgccgactccaactaccgtccatgtacgtacgatccataataaatctgaccaactgcccatcctacctcctctacgttctttacagcccatctttatctcagtagagttttcagtggcatttttcggtagtgagccaccaattcaagtacaagatgctatcattattgtctgaaaaattagacactcaacccgtaatcgcaacgactcaattgcaagagcggaactctaccaactaatgagctatatcctcccgagtcaagtggagcatgcataaaggagtcaaattaatgcttatactatttttttccttgactcagttggaccatcatgaacttgaactggagacctcgcccctgaactaaatcatcgcacctacggtccatattgagagggaatgttagagaatctcactcctctcattgctagtttattttggaatggaatctcatacaccttattaaattttaacactctccatcttgcacaaaccttcaagattttgggcaatgaataaatcttcgacctgggttggaaatggtccaagacatcctcatatgcaagtctcggttgtcgacaacgacatttcacaagttccattactaggttcgtcttcatcttcgtttatggagcttctcaatatatgttttcaaaaaaaaaaaaatcttttttttttaatgttttaattttgattttatattgtttttaatttaattttgattttcattcaacttaattttttttttttcatttaattgcttattgaatgatatattgatatggcatttatagtcccctggcaactaatgtctaggtccacgtggatgagaaaactaaattatttagtgtgtttgactgtaaaaaaattaaatttaaggttttttttttttgaagaattagatttaaggttaaacgctagaatataaagtaaaaaaattaagtttaaagttaaacgcgagaatataagtgcatgtttgacatcat

SEQ ID NO: 46446 - DNA, 1489 bp, Cannabis sativa
tgaatgaaaaaagtagtagaataaaggtcaattagaggctttatactcattagcttaaatttcaattgtcaaattcattatctaataattggccacacacattattttctccattagtttgttcaaacactgtttgaaaaaaaaacaataaatgagaacatttaattaaatctcatcaagaagataactaatttatatttggcattaagtaataattttaatctgtttaagaaaaaaaaaaaaagtaataattttaagaatttaatgtgttaattgtgttagttttaagtttagacgcaaataatgagtaagtagaacttaaatttgggccatgaccaaaatccaggcccaatccaaacgctccatctcgtccaatcatagcacgagatgccatacaataaaaagtccgatatcatccaacaaaaagtgagctcgcttttccaatcaatcgaattttgccacgtaatcaaatcagtaactgctctcttgtgtgggtcccactttactggacgtatgcacattagacagctgcatttttgtcgtatcaaatataattatttattatcatcactccctcccacccctttctttttcaattattattattatttaaaaaaatgtaattagtcttaaatttatttcatattttaatttttattcacttaacattctaattttttcaaaaagaaaattattatttttacaaatttaacacccaaattaaatatcaattaaataactatacataagtaaaactttaaaattactacaataatgtgcggttcatactttaaatttttttaaaaaaataaattttaccacaaaaacataaaagaattaagtttaaaaaattaaaatataagaaaatttagctgcaaataatctttttctaaaataacctaattacaatcataattgcaaatttatccttaaaatattattcttacaatctttaatctttttttaaagctttacaatcttttatctaattttaaaataaccataatcttttattggtttttaaatttcactcctagtcctacccaacataatattaatattgttcttttataaataataaatatataaaaaaaagataatattgttctatttatttaaatttaattatatatattgattttcattttatttatggtccaatattattagatctttctcttctacatcttcactctgcttcgtatctctttctcgctctttctctctcttcgcttcgctttcagatcgagaagaaggtatggtttatcagatcgattcagaattctaggtcattcaatccttattcactttgatttgattttgatattgatttctttgatcgcgcaagttaccgatcgaagtaggtcttacttgaacccggatttaagctttgttctccttttgataattgatctgaagctttttgcttttgacggtcaaagtcaatatcttttttgtcgatggaattagattagccatttgttctgtt

SEQ ID NO: 46447 - DNA, 962 bp, Cannabis sativa
gttgcgaaccagcaacacccgctgaaaaagatgacaaaagctcagatgaatccatagccgaggtagaaacaatctgagggagattgccatcagccgaagaaccagtggaagaagtacccctacatctctttaagagcttgcgataagtatccgggtcaacttatctcttgaacgttttatgtatctcaggaggaggaccatggtcaccttcaaaaatagctttacctttatccatcatagagacaataacagcctcagtataggtaatggggactgaagaaccagctgatgctgaagtggtctgagaatccaaatgaggcatcttgtgtgtatgagtcatagaaggattgatatgaggagcagaggggggataagtggctataatattcggcatactgaaagttgtggtcaatggggagaaagaggagtatggcacgacattaggagaggtggggtttgtattagaatggttagcataggatggtatattagtttgataataggaggggaatggtgaaggtaggactggcagggggcagtagaaggttgatcaatacagtgggctgacttatcttcttgggtagtgagaggtgatgtataagggatagtgttttggaagggtcgaatataagaggaggatggaggggtaatagaggcaatagattttctagcaattctagtcaaaaaaggataagcattagcttcagaaaagtccattcgataacggtcataccttgatttaggaagcttgtcaccattcatttcaaggccatgggaagatcggggtcaataccttcatccactaattcaaggaaggcagcacaacgctcaaaaggatggcccaatttaccacagcgaaaaacaaaatataggcagactttcatagcggaattccaaccgcatcccgaacatgagggagaagaaccagtttgcctctcataagcggctggttaatatcaagc

SEQ ID NO: 46448 - DNA, 1339 bp, Cannabis sativa
tgtgatagtatttttgtaaagattaacttaaattacagtatttttgtaaatttccctataacattgtgttaaatttaattggcccataataaataataatttttaatttatacagtgacaataattattatgatttattggcttttattaaattttatattttttatttaccatattattattatttaaacaataataataataatttttgtatattctgaataaaatatcaaatgactatcaatataattaattattttttttttatttatttaacattttgtgtattagagcacaattgtaaatagtggactaaatgtacaaactcaatttttttgtcaaatttagcacaattttttagatcttgcattaaagatagtcttatgtactattttgtcgaaaattaaactcaatgcattattttaaaaaatacaaaatcgaaattgtaatttaacaaaatcaagagtctaatttacaaaaatgattattattattattattataatctcataacatatgacttgttaaaactgttctatatttagagtagcaatgattattgttattattaattaatactagttaataatcttttttttttttgttttgacaccgtttttatagatgaaaattcatggttttcattcattcctaagaccaaaaaacaaagcatagccattagattgacgaaataaacgattactcatctttaattaattaaacacccttttctttctctcttcataaccttttttctttcttctctctattttcccagaaaaaataaaataaaattgaaaaaaaaaaggtgaattaatgcacacaaaatatttcagtgcatgagaattcagaagattctgaatttttcatgatcaaccaatactctaacaatttataaatttattattacaacatgagttatcactaagagagagattattttgattattattattattattgttgtttttttaattttccattacatcttttttatatacatatgtatataaaaatgtctaacaacaacaataagatgaagggcttgttgaaaggcttaagatacatctctcaaatatttggtaagtaaatttattttatataattaattgtattattattgttttgttatgaattttaatattgttatagataattattaatgaaatttcaaattaattcagataatgaaaaagaaccagaaatgcagataggttttccaactgatgtgaagcatgtggcccatataggctgggatggtccctctgtaaattctcccagctgggtaaatttattttaattaaattgaaaatagtatttcattattactattattatt

SEQ ID NO: 46449 - DNA, 807 bp, Cannabis sativa
tttgaaaattaagtacaagtaaaacaatagttaagagaatttagctgccaaaaactcatagcaatattatacctcatgtactaggcaccatatatgtaccctttaccatttcttttgtggtatggtatgtacaacatgaggtagttctcgaaaaatttgcgagcctccacctagaattaataattttatatattgtttagatttatattttgatgttttttttttcagattatttgtaaaaatgtcgtgtattttgttgtaacaaaaatgaatatatttgtgtaaatttaaagctatatttgtaatttataaagacaaaattaaaaatagtaatcaaaagtcttactaaaaatttgttaaaaattgctagttgaaaaagaattgttaataaagaccagtacgtctcttgctggtggtcattgctattaaataaaagagactttttgtaggccattaaataaatgattttagcaattaccatatatttactttggtcttttaataataatattggaaatatgtaacaaccatagttggtattatactattattattcaaataataatggtggccgataattaatgtgaatacacgatggttttggagaaaaaaaaatacgttttcattaggtgtttcacgagtgattaataatttttctataataattattaaaaatatatattaattaaatcgtaaaaggataataataataatatgatatttgaagttgaaaccacttgtatcatttttctctagcggacgagtgtgaaggtcaacggtgatatataacatacatccataatatat

SEQ ID NO: 46450 - DNA, 925 bp, Cannabis sativa
tcacttttatcaatgcaatagtataatgtgctggcaaaagtcacatctaacacttcactgttatacaaattcaatttgtctctatcactaattgttgtttcaattagaataattttattaatgctaaaatatgaagatgaagtgaagcttcttttcaactattagaaattttatatattagttatatacacatatttgaatatgataccaatgtgggtctctaaaattctaaaatccttatgcaaacaatttacatgattttcttttgttgggggttaattattaaactccattaatatatacaaaattcatcctaattaatcaaagtatttattaagttgtaattttttatttattttaagatattgtaattttgcggcttataatgtggttaagtggactttcgtcaggaatgtaattagtatggtcgttctttttgctatattagataacattttatgtaatgaccatgaagtctaactctatttgctattaatctataaatgccttttattaaaataaaaaattaaagtgtttacttattccatctttatttattattatagcagcaaatttagatactataagggagattttatttatatgtatacatttgttgtacattaaatttttgaacacaagcttactaaaattaaaaaataggcacactttatattcatacccattatacttttctctcttctcttttcttatcttctaacttcaccatccatactccatactcatatccatactgatggtgatccgataggggttcgatggtggcccgatgctacctattttattattatttatttttttatgtttttgtacataaaaaaagtagaatcatgtgcccatcggaccaatcggaccatatctacatttatagatgttaagatccattcattaagctcatcaggaa

SEQ ID NO: 46451 - DNA, 1022 bp, Cannabis sativa
caaagaattagcactatcttccattttctcagcaaccacagcttgtctttccaaccccatttgctgactactcttatcagtatcactctgtgttggagcatcagaagaagcaagttgggactccattattttcggttttttaagcttcactttaacaatcccaagtggcttcccaacccctttaccactaacaacaagattgttaggctgatcattaccagttgaggatggtgtattgggattatcatcaaactcatccaaacctgactcattttccacagttgaaacttctgcttctttaacactactcacagtcacagatcccttttttgacttccctttcttgtgcccacgtttgcgtttcatcttcttataatcaaattattatgctaaattacaataaaaaccagaatccaaaccaaagttcagtaatttaaattcaaacaagcaatcccaacattgaaacttgaatataatctccaaagcttgaatctttcgcatcagaaatcgaatcaacctaaatgggcaaaagaaattttgaattttacagaagttaaattacagaatgagcacaaacaagttaattaacttcgaatcacagattatgagtgttagaaccctaaaatttaccccaattgtaaaaatttagagcgatttgtctgttacgaatatgagaatgacagtccgtcaattaattacagaattaaaatgtaaaaacaattgatttatttaaaaagagaaaacaatgagagggaagaagatgaatatgtttattgtatgtacctttgtttacggtttcgaagggtacgtttcgtttagtcgtgtgtttctttttgtttttctttctcagtgacaagtcattataatggtccttttattgggcctgttgagcagcccaatatagtttagtttaattgggctcatactaagagttccatttagctaagttaaaaaatacctcttttttgtatccattaataaaaaatactgaaaaatacctctttttttgtatccattaatca

SEQ ID NO: 46452 - DNA, 1387 bp, Cannabis sativa
tctctcttgactgaggttatttcttcatgacaaagaggctgctcctactctccttggtttggccaaaaaaactctgtcaaaaaagggcaggttgaccccttattaatattgttgctgttgactctgatgttatgttattagctaagaaaaatataaaaagcagttattactttttcttgagttgctgaaagtttgttggagccttgaaatgttgttatttacttcttgagttgttattgtagagagcttataagatttaagcctatgaaatagaaccgactactccaagagttataatggtctgttgaggcttgtaaaaaatcttactttattttccttgtaaccttgtttaaggtattttccatgtaacaattagtatggagatttatccaacagttactttcgtgtttttttctttacctgaatgaaagaaactttaaaatttaaatttggcagtagtttaattttcacaatgttcaccaaaattaagagaatcaactgccatccctttaggggtgttcataaaatagccgatccaattcaatccgcacgatccaatccaatccaatccaatccgcaaagtgcggaaatccgcacttgtgccaattagattggattgaaaaattcaaaatctacacttgtgcagattagatgatgatcgacatgtaaaaataatcgatctaatcaaatccacacatctttataaaaaaaataaaaaactatatatacaaaaaatattctaatgtaaagaaaatagtaatttaaaagattaatacatataatacagttatatttcaaaacttaatagatgaaatgaatattctattcttatatataaaaattctacatacaatttaaaataaaagtaaacatttctttatacatacaatcttttttctttctttaaatatgttattttatttattttaatgtgtcgatagagcataaaatcattataatttattttattttgttgctagttatgtgaagaaaaaaaatatttttttataaatattaaataatttaatattaagaagtaatcaatccaaaataaccgatacaatccgcacttttgtggattggatttgaactattgtgcaaattggattgaatccaaaaaatgaaatccgcagattggatgcactatgagcaaaatagtgcaagaaaaaaaattattttaacgtgccaaacagtgttattacattaactttttatttatatatttatttaacgtgtggaacaaaatttcaattctgatttcttttataataaccaaatttgaattctgatttcaaccgtcttaaggcttaatctcttaatattttcaaattctataattttaacagatgccttaaaagtaataatgttttatatataaaaaaaaaaa

SEQ ID NO: 46453 - DNA, 974 bp, Cannabis sativa
aattattaatttctacttccccaaccatatactttcatattctaactaaaatactaaattatagagcacaaatttgagttcgtataaaaaatagattggtctatttaattagtaaaatggatcggtctgaataaaaacactattagaatttgagtacagaaattactaaaaccgtatcgggcctaccgtataaaattattatacgacccatatatttttatagtatacgacacgactcatattttcttataatacaatggtattttaaaaaacacaaaaaaaaaaaaaatatataggtcgtgcgagggcacgcatgcacgtatttacaactgatgaaactatatgatgcattggtgtggtgtggtgtggagtggagtaccgagtgtctggtgggttcatggttatcacttgatgagcaaacacaaatatatataaataaataatgcagtaattaagttagtgttcatgaatgaaacacaaatatatatatgttatatatgttgggcacacgtgtacctaattatgtttatgtatattagctagtcgacatttttggttaaacaacttgcatttttcataaataaatatgtcaagtgtcaaacgtgcagtatatttatatgtatatatatacacaaattgggtgttgtattgtattggggtttaatatatatacatatatagacatatataatataagagcactaacagtatacttaacgtgaccgactgtgcacattcatttaagctaatttgctgctttacttaatcaactatatatatttattattcattaattctcattaacacccaagccttttctttctttattctttctatttttttattttttggctggaaatattctttctatttttaagttacgtgttttaccaagaaatgtgtgttttttattaatttgttgtgtttccagatgattgtcgtttcttatgctaaaataaaaaccaacgttgtcg

SEQ ID NO: 46454 - DNA, 1073 bp, Cannabis sativa
aaaaaaaaaataagagaaacaaattcattcaatccgatcaccatttcatcttaatccatttgcgcattgaagaagatagatttttttttccccttttattccattcctcactcacaagcgttaataaagacaattagattctatgtatatcatctgaagaaacagacaaaaacttcaaattgcaaaataccattttctatttttgtattgagaaactgaatgttggcatggtgtaggagtagggcccaatattcttgcattttctttataagccactcaaagttggagatcgtactgcacctccccacatgaacgaatccatatcacatccacatataaatatatcataaaaatatcaaggaaatgtgggaatttatcaggtggtctagaaagaaaaccggcactatccggcaacaacatgaatgaacatatgacatgataaacaacactatagaagactctagcagtaagaagttagtttcagtaccaagttgcaacctcccacatttaaagcacagaccaatagaaataggacatggaattgtgtcatgatataggaaaccaaactgtttgtttttgttagaatcctcccttcaaattttggggtgggtgggctaggttgggggggactactttgtgagttgttaagacaggtcagaagagtagaagaaatctggtattcactgtcattaaaacattccaatgatcaatttagccattttaaatagctaacctttaaccgtaggtattctcttttcatttggaatagagaagattattacatcattggatttagtaacatgaaaaaaaataaataaataaataaaagttctatgctattaataagatgacaattcactttattaccatggaaagtttcgtcaaccacatgttctgcagcatgtcttaaaaaattatcaaacatacttaaattgtgcaaaaagatggaaatgtttctcaaatttttatttcatacacctatctcaaaatcagaaaatctgttgtcaccctataataaagttttagtaataaggtaaatactgtatttagtgaattaaatttcaaactgaaaa

SEQ ID NO: 46455 - DNA, 2674 bp, Cannabis sativa
ggagaggggaaacttgacactgctacaccagtctagggctagcctaagtgcccaagcctctgccaaaacaggttggatgttggctgtcataggcacggagaacccagcaataacctacccattccaatccttaactactgcaccaagcccaagcttaccatttctattttgaacagctgcatctgtatacagttggtaggatccttctcttacttggggggctggagctggaacattcggctgataggctggatccatgtcaattctgttgagctgtgcttccttgtactgagacaaaaaggcattggcccactgaacaacatcacctgcatttgggttagcattcctgaaaagttttttattcctgaactcccaaatagaccaaagtgtgcatataagtaaagagaaatcatcactggacagatcagtatatgcagatagtattaaatctttaacatcagagttcctatgcaaaagataaaaatgatataaaggagagagtttccaaacctgtctcgccctggaacagtctaacagtgcatgtgttacagtttctaaagagcaaccacagaaggagcaagaaggagagggaacaactttcctcctaaaaagattaaatgcattaggcaaaatgtggtagaaggttctccaaccaaagtttttaactttgggaggaatactttgatgccaaaaaaatttccaccagcgattgtaaaagcttgtattagaggaagatggtggtagggtggaagtgttagagagatgataggctgatttgacagtgagaagaccagaaggatctcctttccagatcaagcagtcatctttgtcatgacctccaatgggaacttttagaatgcaagaaacaaggtcatgatcaaagtactgagctaatcggtttaaatcccaggagccattagaattaatgaagaatctgactttatctgaaggaggagaggagttattcttaaacctaagagtcctaagatcagggatctaggaatcctgcagagttcgaatagtctgaccatttcccactttccaaataagccattccttgagaagttccctaccccaaagaagactagaccaggagaaggagggagagtgacctttactagcttgaaggaaagaggactgtcgaaagtacctagccttaaggatttgagaagcaatagaatcaggggtggttaggaccctccaagcttgcttggccagtaaagcttggttatgatgaattaaagatcgaaagccaagccccccaaagaactttgattgacaaagagaagaccaggacttccaatgagctttagagtgattcccaaaagaaccccaccaaaactgtgccatgagtttctcaattttgtgacagatagagactggaagtttatagcaggacatggcataagagggtatagcttggataacagactttaagaggacttcttttccacctttcgagaagaatttgtgactccaaaccctgagattggaactgacacggtcaagaatgaagctgaaactgttctttttagatctaccaaaacactgggggacttaaagatactttgacatgaacggcctattagaaatcccaagagtttgatagaaatgattcgagatttgggaggaggtatttggggagaaaagaatggaggatttaccaaagttaacacattgacctgtggcttgattataaaactgaaaggctgcttgaagagcattgcaagaagagaaggtagccttggcaaagataagtgtgtcatcagcaaagagtaagtgggaaacagcaggggcagatctggcaattgaaatgccatcaaaattcccaagctgcttttggatgcaaagggcagcagcaagaccctcagagcacaacaagaaaaggtagggagaaagaggatctccttgcctcaagccacgagtagggaagatttccttagaaatgtttccattaatactaaacttgatggatacagaggaaagacactgatgaatgagagtgacaattttgttagggaaattaagatggttaaggattgctgaaaggaaattccattccacatggtcaaaagctttctccatatcaagcttgattcccacccacccaattttccccgttttcctgtgattgatggcatgaatcatctcctgagcaatgaggatgttgtcaaaaataagacggtcagagaggaatgcactttgagtaggggaaattacatcctccattataagtttgagcctattagcaatagttttggaaacaattttatagagggttgtacagaggctaataggacgaaagtcttttaaagccgaagcattttgctttttggggataagtacgatgagagttttgttgatagaatccatgctagcattattattgagaacattcaggattgcatcacttaagtcatttcctaaaatgctccagttcttttgataaaaataagcattcagcccatcagagccaggagctttgtccccagagagttgaaataaagcagacttaacttcctccacagtgaaaggggcatcaagaaaggcaaactgttgaggagttagccttgaattgatagtggagaggagcagattaacagcatcagtactgctgccttgagactgaaagagattggagaaaaaacggcagacttcagcttcaatggcagaa

SEQ ID NO: 46456 - DNA, 2036 bp, Cannabis sativa
cacagtacgtttaaaatcacgtcaacacacctatgctagttacggtgttacagaaaccttttggttcgactcccaaaaccaagaatcacgagaatcaagtctagtgagaggaatattagcaactctaaatgcctcttgagtgtcaacacacaggttcatcgtatcatgattccaataaccattgtagatgaaaaggctaaccgaagagacgccttcagcgacaacacgtaaaggcttagaacatttctcccctcttggcacccaattatcaaactagatggacgtctcattatattctcatacataacccctttagaagaaaacgcctggtccaaagaatggatttccataagagggagcaagttcttttagccaaaaatacttgattagttaaagaggtttgttggaatccaagacctccaaccaactcaggccgcaataacttattccaagacatcagatgtaaagtagatttttccttcttgtcaccccactaaaagccactaaggagtttgtcaatttttttttgcagcaaaatatgggataaaagaggcagcatccatatatgaagcaattgaggtacccactgaatgaattagagtagccttccctacattcgataagatctttgacttccatccttgaacacgggctttcactcttttaatcacaaaagtaaaatcatttgaatgccttcttcgagtgaacaaagggattcctaaatgaacaacctcatttggaattcttttagccttaagaactttacaaatagcttgcgaagcagccctcagaactagggctgaacatttagacatgcaaacccaaaaaacccgactacccgccccgacccgctgccaaaaaaaccaaaaaattgaaaacccgtgcggtcgggtctagtccaacccaaaaatactccacgcgggtttcgagctcgggtgttaaaagtgagtgttttttattcgagttctaacccgtaacccgaacaaacaaggggtttaatagcagatttcaaaccaaaaatattgtgaaccaattcgtgtaatcctggttcagtctctccgttctatgataagcgcgaccactttgagaggaggctttctatgtaaacttttttctgggttcaaagatttgataacaatggggatagtacgttgtgaatggtgatacaaagaagcttgatatacataaactctagtaccagtactaccacaatcaagaataacatatttagacaaaccttaagaccaataagaagagataaaaactacaaagagataaacaataaaatctaagagaagaatataaaggaataggaagagaacacgaagacatttctttcgagcagagtaacgggatccatgtgataaaggcgaaggcttttcctttgagaaactttgttgatgagaagtgtataaagaattatgaaactaatttagcttttggtaagttgagagatcttgaagagaggaagagagacgtaagttattgttcatgttggggaaaccaagaccgagatcgtaatgtcgcggaggtaataatccagaatctcgagtgatgtgatgaggtgataattacataaaaaaggcctaaaaatgttaaaaataataaaaaaaaaatatggcatttttaaaaattaaatttcatttgagcccagaaatgaaacattcgggctcagtccaataaaactcgaacccggccacgttaaacccaccatacccaacctgaaacccaccatacctgaccacccaaaaactaggtttggttgtgcatttccaatacccaaaatctgaaaacccgaacccgaccatccaaaaactcaaaaactcaactcgtgtgtagccctactcagaacccttttacagaaaaagatggaagacttagcaaagttaaccttctaacctgaccattgctagtacaattcaagacagtgaagaaaccaagaggcttccttgattgtggcttggccaaagaggatgacgtcgtttgcaaagagaaggtgagtatgttggggtttatgccctcaataaaactcagtt

SEQ ID NO: 46457 - DNA, 1304 bp, Cannabis sativa
  modified_base (26)..(51): a, c, t, g, unknown or other
ctctttctctcttcatcttcttcttnnnnnnnnnnnnnnnnnnnnnnnnnntttatattattttataacaataaaatatatttatggcatatttcgttatattctaataaatagtaataaaattaatgtttttatcatcaaaaaattaatactcaagattagataaacttttgagttaattgagtttctcgtattaattaaggaagtaaagaggaagtaaagaaagtgcactataaaatatgagcttttagaagttaataaaaatgaagtcttatgccttctatttatagcgatcgaaccaagttctgtatagtaattaattccatgtcgggatttgatatccgattggaggtatatttttcacaaaactaatccgatcggtgatcatacccgatcgattgacctaattaaaactcgaaaagtctagaagtcactcatcgcattttttattttatataaatatataattatagaattaattaagtaatattattgtaaagcatatatactttttatgatgctttatttctttagcgccgtattaaatgtttggtgtgttgtgtgttcattggttgatctctatgaaaaagcattttttttgctttttcaaattaattattatatttcttatattcttataattaattaatattatattattaatttcttgtactaatcttaattatgatttgcattactcattaaactaatctagattagtggaaccaactttggcatgttcttctgcaccaccaattaatttatatatatatggatattcaaaatatatttatttatatataaatttatatttatttatgtaactttttttttcttgaaatatgtatatgcatgtgtaattttaatgacagtaatgatttagtgtcgcgtgtttacctatagtagtactatatattaaaaatatatataatttttattaagactaagaaaatgatataggggtttattagtaatttgaaattagtgtgtaaagtctatatattagatatagattggaaaaataaaattttagttcaatattgggagatttgtcctgtcctgaaaataacttattacttattatgaaaaaatctcttaatattaaaacgcactatattcttcgagacagcattaatgtttcaattgaactaaaattttattttcttgattcatatataataataattattcgttacatatttatagactttacatactaattttaaattactaatgagctcttctagcattttctagagatgcaattcaattgttatatttcttttttttaatatatattatat

SEQ ID NO: 46458 - DNA, 3730 bp, Cannabis sativa
cacattatctattagaaatgtctagtaataataggtgaaattttatatatgtgaatagtttgtcaaagtgttagcagtactaactttgggcgaagctaagtaattatggttagcaatattttattataattgtgagagcgttgatattggacactgcttagtacctctagatatattgttttataattaactaatgatactctctaaaaattattatattaaattatataaaatttgatatttatttgaaccaatacgatattgatacatagaaaggtataattaccactaatgattttcagtatttctctaattgttaaatttaattaagtgggactcaatatttaataactctaattaaaaagccacctcctctcataactgaccatatataaattaatcattaattacctgccttaatgtcacggtggagctggccttgatcatggagataggacaatgcgtttagtatctccttaagaacgacagctatactgggctccgacaagccattggggaaagaagaagcgataatggactgtagtgagccagcggacatgaagggcatgaccacccaaagacgacggtccaccatgaaagagcagtgagcgttgagtatgttgggatgagaaaggagtgacatcatcttcgtttcgcgtcggacattatcgaaatctgtacgagacttgatgtccagatctatggatttgatggccaccacggctgagttcttgggcaaacaaatggctttgtagaccactgcgctcactccggctccgatctcgtggaggattttgtatgagtttgagtctaatgggtattgtgatgatgatcttattccttggtttgttgttgatatttcatcattgttatgattttctggttcttctttagccatatgaagggccccttaattaaatgtatattattattattgaagtgaaagaagaagaaaagtaatgaatttatttgttggagagtatgtattgatcattatatatatatgttatatgtttatttatttatttatatttatctttttttgctggagatttatttatatttatcgtgagagaagagaagacaagagtaaaggtagggttgagcaatataaatcttgtgaaggtttttcttttttctttttattttttttatagcaaaatcttgtgaaggttgatgggagtgggcaattatttgggggttcgttggttaaagcttttgggagaatgcatgtgacttgctattaacaagttacaaccacaactgtcacttttcaatatgagcaattacttagaataagaacacaatcaaagtatactatatagagaaaaattgttaaaaagtaccaagtgttatatcactaataactatactaataatagatatctatatataagttcattttgaataggagattgaaaaattgtgctatgttttacagtaattttataattgtgtttgtattaatttttaacattgaacttcaatggacaattataaaacttaatacaaaatttaatatttaattaatatttttattaattaaaaatataaataataataattttatcattaattttattatataaaacaaaacaattgtaaaaggtttatatttaatacaataactaaatttaataataaaatattaaaaacaataaaaaaatagtgtatttatctaatgcaaattaatttagataaatttttaatatgataaatttcaatcaacttttgacaccatatttggagcagacttagatacatttttaacaataaattaccgatgtacatctctattagaaatgctttaatgtttagaagtttcattactaaacactgactttttatctctttattattattattattattattattattattattttcatcaagattttcattaaccaaccaacaaatacaaacaaaacaatacaattaaaggctgctaaccacgccccaccagaactcctaatcactacaaattttgtaggagaaatctctcatatgtattattcctataagagccactacacaatctacattttattataatttttatatctcttactatgtataaaactgaaaagaaatgacatgttcccgttgttctgtaggctactgcttcaatcgagaaccatttatctaattttgtcactgaaaaaggtttagaggccaagctttaaaacctagttaactaatcataagtttcaccactttgtcaaatgtgcaacattcaaaaaataaatgtacatggctttcattcaacaagctacaaacgggacaaataaaactattaataggaatgcagaatcaagagagggtcctgattagcaaatgagaaaagcacctaccaaagaataaattggtgctacggtaagcttaaccgacaccactctattttctaataataaacctgtgtctactgaagcatactattgtcgagaatggcagctttaaacttgtcattcttactagcagcctggatattgctcctgccaaaagtttgtcttaaatgacacaactttctctaataccaactggtataatgcctcaactcataatcccagaaattagtacctttaagataaatttcactaatccatttgacccaaagcaaatcatgtttctcaataaatagccaaacatgctttgtcgatatagatttattccacttaggaccttctttaaatccaagaccaccataacttttaggaggacaaattttttcccaacaggctatgtaaatcttacttctgttatctttttgcgcccacaaaaatcctcggcacaatttttttcacttctttgataacactttgaggcaatacaaagatgctcatccaatagttccttagccccaacaatcaattaaactcggttagcaaataataagtgccttgttccccatgtatgaagtttaagcttaatctttgcaagtattacaccgcaatcttccattctccacttagtaggtcttattggaacccctaagtatttaagagtattatccatgtttctgacagggtgacacatgtacttctaagattcgtttcattttgggaaggcacattctcgggcccaaatagtggatcagcccaaaagggagtcagtttgtgactccgtgttcatattaaactcatccattataagaccggaccgtccgagttcgggggccaaaagaaagaaggcccaatatgtcatagatggataccctaatggggtattctcaaaaggactgtctaaaagacggggagcaaaagcttctatagagatacctctgatataggatcccactaaattagggattcacctagcgtcatatcctctgacatttattgtataaatttggcagagtataacaattgtcatcattaaatggtccccgcaaatttggatgattgctatcttacaaattgggtctttcctaattggcctaaagttaatattaaatgtatttaccccatcggtgggtctagcttcataagaaaaccctaacagtctaaaccctagcctataaataggagattatatcttcatgcaaagtgttggaaaatcattattaagacactaagaatgaaattatggttcttgagctcggacaagaacattatccttctgtaatacaacaaagctttttaagctaataatattggctcgtagactaaggctcattagtgccctaaccacgtgaaaatcttgatattcttcttctttattttgtttattt

SEQ ID NO: 46459 - DNA, 6892 bp, Cannabis sativa
  modified_base (1817)..(1818): a, c, t, g, unknown or other
caacctgtatttaactatatctttaacattatcatttacaatttttattatagtataacaactactattatgcacacaaaagttcctattcttccacagcaaataaatagtgatagcaaaaagtaagatgatgacccctgattttttgctagataaccaacacaaccaactgttgtaatccgaaggcgaagctgcaaatccacactagtcaaaaatctgttgcaataccgcccttgatacacagcaattgaagaaaagatggtgatgactctcctcttcaatgctacacacaggacagtaactagagtctagaacaatatgaaatttatagaagttgtctctagtgagcaaatgatcatgaaccacctgccataagatgaacctatgcttaggcagcgatagattacaccagacagatttataaaaactatcaatgttcatatgtaaagtccccatatacagacgagcaccaatgaatttaccttttcttaatgctgcagccacatttaacttactgaatttcttcctcagatgatagattttcctccaataacaactaacatcccccttcaactcgtactcccaaaaattagcaccattcgtatcatgttttgacccaaccaagaatatcatgcttatccatgatttcccaaataaactttccaaggatagatcgattccaagtagaaccatttttgagtcagagacctccaaaaggtttgggaagacaaacctaatcctaagaggccaaatggattttgcttttctctcccttaactccccaaaggaagcctctacaaagcctctcaacctccttaaaaaactttcaggaaggatgaagatgttcatccaatagttacaaagaccaagcaacactgaatgaatgagttgaatgcgaccaacataagacagatgcctagttgcccaagtaactagccacattttaatcttctttatgatagcatcgtaatcttcacgtctccactttgttggtcttaaaggcactccaagatatctgagcgggaatgagccctctctgaattgcaagtcttccagaatcacctatttttcagttgaggaaacacccccaaaataaactaaagatttatctttgttaggaaataatctagttacctctgagaagctttctgaagaaatatttagatggtgaacaaccataggtgagcctttgctgaaaaggataagatcatacgcaaagcattggctaaccaacttaaggcttttgcacataggatgaaatctaaaagagttcttggtagtttccttcatcagtcgtcttgagagatactccattaaaaccacaaacaagaggggagacatcggatccccttggcgaagacctttcttcccctaaaagttaccatgaaaccttccattcagcatgatcgtataagaagtacctctcaaacacatcataatccaattaacaaacttggagggaaagtttaagccaacaagtaagtccttaaaaaagccttaatccacaatatcataggcttacttgaggtcaattttgattgcacaccttagagagacattcttcctcccataattctttattaggtcttggaaaatcaaaatattatgagcaatagatcgcttctttataaaagctcccttgttttggtgaaccaaccaaggaagagctttagcaagtctttaaggctttgtggactgaaattggagctaaagtatgctgtgcgattaaagagttctttaacacgggtaagatctccacccaatttaatgaaagacttacagaaatagtaattatttatatttgtaataaataaatnntttttcaaattaattaaataaagaaaagataaaaattattaagataaaatttttcaagacaagatttgttaagatcaatcatagatcaattatggatgcgtagcatagaaatttcatgtaatgtgaaccgaacatgcctatttctaagcggtcctccttaaaccaaagtgaggttagacataaacataacgaaagagagtgaataaactaaaaacttcatttatgatcagaaaataaccaaatacataaatgccttatacaaacataaagcaaacaaatacaaactcttactaaatcatgatatcctcaaacaagaaaacacccatatgatcagtgtgcccatgaaagaccttgtgtggtaatccttttgtgagcggatccgctatcatggagtttgccccaatgtgctcatggatatttgtccactttgtactctttctttcacaactaggaactttatgtcaatatactttcacttggatgagctcgaattgttattggaatatagcattgctgaattattgtcacgaaataacttgagtggtcttttacattctccaaaatacgcagcctagcatttctccatgcttcctcacaggatagggtttgacggaataaaaataaaaaatttccaggggtgttggacactcccacttcagaatatggtagagagatttcaaaaaggcaaggatcctataagaattgggtgcgagttgaaatggagcaataccaaggtagttgtagaattctttgaagtaaactgtaagggggagaacaactccaacccttatgtgatcaacgctccatgcaccaatactagtgggctcgctggtgctacaacctttatcttgaagcagacgtttaggtgggtaacaattgaattctctttgagccacttatcgaatacgacatcctttctcattcctaatgtcacacgatcttagaacatccccaacataaagcccaattaacctgaccctggactctatcaacttaacctcaaaggtaacagtagggttctatggggtcttaaatttgcgagcctttgtagccataattttaaatccaagtttcctggtgaaaaagtaatcgtggttgaaggtaacaacattaaactcactaaggggatattaactaaactagacaattcaagccaagctgcttctcacaaataacagtgtctacccttaatgacttcttgtaagaatcgcctataatggttaaaagcttcctcctagttagaccgaatgaggtgcttcctaattttctcatcattaatttcaagtatggtttgaggtttaaaagctatgcctaaaaattgaggatagtctaattttaaggattttggaagtgtaagttctgggttaaattgggacatgatcacagcgaataatgtcccatttcttgaaataacataggaccaataaaacccaagatctacgaatcacataacctcaaattttctagccctagggtacttaaacattcatataaagttcacctaaacaataaacaatgtaaactaaaaacacataccaataaattaagattgaaaacataaaataaagtcagcaaaaaggaatgtcacttacaaatttaggagagattttgtgtttcgaagaactttgcgatggaaagtccaattttagggaaactgagtcatgatgattctaaagttgagggatgtaatcagatgaaatttgaagaaaaaaggtgaaagacagtgatggcatgcaaattcagagaagaggttggttgagagatttttaaagattgaaggttttgtgggcagaaatggcaaaaatgaagggaaatttgaaatttatgcccaaacggcgataactgttcaatcaagagaaggataaatctaacggatgggaactaaacgagaaagaaacagttagagcataaaatattgaaatcctttgccgtgaaatcttgaaccgccaaaataaaagcatgcaaaatttaaatggaaaagtacaattgtacccttgaaggcatttaaaaagtcatttttttaaaaaagaattttttagggggcaattattctacctaaattttgaccaggaataagaagctaacacgtgtatcaaggctgaaaaatgaactagctcaaactgtgcattattaaatacacactaaatgactcgcctcaaaaaatacagttaatagagatattcgagctcaccgccatataggcaatagcgagacatgaattataactattgactaatgagaccaactagacaaacatgtccatctcgagataaacataatatacaatgaaagatgttcataatgagtaaacaataagcttgtaggtcattaatccacatactcgtgagtaatagcttacaactcattgatccacatactcgtgagtaagagcttgcagctcattaatccacatactcatgagtatgtttacggaatggaaacaacttcatcatttattcatctcacttttgacgtgttaaagtaaccacctctctaatacctttcccaacaggaaaggaagactgtgagatgcattgtaactcaacacttagtattttgtacaaagatggttaagaaagataagatgtacacgacgagaatcatccaacacagtcaccataaccatctatggacaaagacaaagaacagttgagcagtaatttaatattattccatgtgcacaaagatgaaatgtggggaatgtccatgtttcatgaacaattactaatgatatcccaagagaataactgtcaccctatgcatctataaatagagactgaacccagggagaaaaatggacaaccaatcttgagagaaaagagatactattgctaaattatatcattgtattctatattcaaatatatttatccttaataagatggacttgtgaactaggaagatttaacttcaaaactacgtcaaaactatcttgttatttatttattagataattaattactatataattaattctgtaatttatttattacaaaaaagataatattctaatccataaaaatatgcatcaacactaagtattgtcagtccaaccaatgcttaatctcagtgaaacaactactagcactcaaaaaataagtgttggctactttcaatagccgagccacacaacaaacacactgattcagtacaaacattgaatcttgtaagtctttctttattttaaaaatgatgtagaaatggtagccacaaaataaatgtgcctaggaataataaacctgcttgatatcaccaaagtagcaaatttcctcttgtaaaggcactagagcttgatgcccctagttaatggagcatttcatcatcagattctgttgagaagtcatcacctgcttcattactcttttactttaattatttacttctagtaccaaccgcattgattagtgggattataatccagccagtctgcatcttttatgtatacattatgcatccattggatccaaaggttatcttctttggtagcaactacccatacatacttgccaagagttgttttgtaacactctactagattaggcgtgttatcgtatttttattaagcgttgtgcacgcctttactaatcaaagggtttaatgaaaaatgtgaataattaaaattttcataaataatataacttttaaaataaacataattttttataagtttggaatcccgttaaaatacacataagtctacaaaatacttgtgttacaaaagttgtcttatatgactattaaaaaggtgagccaacactatctggaagaccctaaacgctctgggtctaaccgtcatgatatgtacaatattcacccttagctttagactcatcgcgattcaattttaactcttgcttgcacatacacgtaataactgtgagtcgacaaaatcagtcaaaaaagcacaatcataaacataaatatatatttagaccgtaactaagcacccatacacctattcacgatctgataactgcgtcaggaacgctttcaacaaagtatgactaactacaaatcaagcctatactcagtgctctaatcgtactgatgtggtagcagttaattcatatatctggtggcctagcatatatatgttggcatctctgtgcaactctatgtacactttattgataccctaatatgctaatctgatggccattgatttgcctaacatatatttattggtacctttgtgcaactctatgtacacctcactaataccctgatatgttaattctaatggcaactaaaaagcacactaaatatgaatacatatatgtaactattatactaatcttaccatgactccaaatacaagcgtgtcggtaactctgagtggaaactcctactcaacaatttaaggccctatgtcacaatttacgaaaactagtaagtggtctgctaaattacttttggggactctaaacttcaaactaaaagttttcttattgacaaatagcatgataaaatcctacacatgtagaaaatactgaaaaataagattttggaaaaagtaccccaaaaaatggcatgccgttttcgagcaaacgataggctatttttttttgggttttctgcatgaaaaaacggttagccatttttaccagaaacggcctgccgtttttacagcaaattttccacaaaatcccaaaactacaacaaatcgacaccaaaccttcccaaactttttagaacacttaatttaggtccaataatcataattttacaatcaattctaactataaaacccttaataaaaaaataccattgttgagctaagtttgagcttaaaattcaaacctagctcaaaccttgccaacaacaaacaatctacctaacactagttcaaacatacttaatttaatccccaaaactcaattcaaacactaccaaaacccaacaatggcaagaacctaaaattgcatgttaaaacttaactttactcaacaaaaaacaaagagaagcaatatctaggttttaccttagatttttcttcccaagttctccaaatcctgctggttttccctctgaaaaatgaagagagagcttcgttctgtggttctcttagggtcga

SEQ ID NO: 46460 - DNA, 1441 bp, Cannabis sativa
  modified_base (781)..(792): a, c, t, g, unknown or other
ttgaatccaaattggcacacatttaacatcttcctttttgaaattgacattaggatcccatggcttcattatgactggcctccggttgaagaagatatatcctccattaatgacctggtctctatattccatcgagtgaaaacgaatgagaaatatgccatgtgacagtaccttcactctatcaaccttatccttccaaatcctatttgcaaaaccctcaaggatatgaagaggaggattaactccaagaacataacatacaattgagggtttccaaaacaagatttcatcctcaatatcatccagagttatcttcaccctattactctgctcagtatctctaaaagaattctccaagttgcgcttgacagagttagaacgcaatatagggggaatcgaattcataccttgtcaaaggttactgttacattgatcattggctttaagaaagtggatgaagtcattccgaattccttcctgtctgtgtatcgattccaaggatgatttgggggataatgggggttgaaagacgtctttgagagcatcttcttcctgcagaacctccatatccaggacctccaaaggctcaatctccgtgatttgatcagagcatcagatcagatctcatccgaaattgcttttccagcttttttctttgaatttttagtagcagatttaggctttccatggtttttcgatcttgttttagccatagcaccaaccgagagagctgcaagagccagaaccagagaaagcttttttttaattgattaattaaaannnnnnnnnnnngtcttacaagtagtatggtctctatatgtaattttaaacaaaactaaacatttctttatacattcaatttttttttttcttcctttgaatttgttattttatttattttgatttgatgttggaggcataaaataacaataattcgtcttattttgttgctatgtgaaaaaaaaatatatttttttttcataaatattaaataattttatattaaaaactagccaatcttaagtaaccaatccaatccccacttttgcgaattggatttgagctattgtgtagattggattggatccaaaaaataagatccgcatttagtacggatcagatgcactatgaaaaaaatagtaccgattggattggatgaatacccctagttgagcgtgtttagatttgactggtgatgcgtattgtaagtcacaacaaatttactaattatttttatttttatattactttagcataagatatatacaagtcgatttcatgaggattattatcaatttattatttaaaaattagtaacaagaattagaaaatgggagttttgattatgagaataaaataacataaattataaaaaaaattaaaggagatactacgatatgaaataaataattaaagattattcttcaccctcaacaattat

SEQ ID NO: 46461 - DNA, 808 bp, Cannabis sativa
attacgatatgtagtcttacttacacatagtttacaaaaatacacaacaaacaaaaatgtgaaactttcttttttggtccttaatttggacgatccttaagcacaggcctatcattagcccaaggccaagcctgaaaagttgtgtcgtttgatttgagaatgctgccaattttgttcatagattgtcgttttttcaattatttaaatatagggattgtcgtttattgtaacttaatagtatgttatggtaagaacaatgtcgttttagtttaggttttgttttatcttattgttgtcgtttaagtttgtaaggctttaaggtttttttcttcttttatgaggtttgtttgttgtggttgggtggatagtacaagttgagagaatccaaagacaaacatcaatatgtggggctcaccattcccttaattatttttgaagaggattttcattatggcacgtttattaaatgattaatttgaatttttactttcgaaattttgatatgtatttaattatatttttgaattttttaagtcgataaatattcttttcttcttaagttattaaaattattgaatttaagaatttttgtcagattttactagagaatgtctaatgtggatgaaaatttaagggtataattcggtacatgttaaaatttaaggggtataattttataaatattaatgtttgggggtatgatttattatatagacattatcatattagtaaaattgaatgaaattagacaaaagtctttaaattcaacaatctcaatagtctaaagagaatttttaacgacttaaaa

SEQ ID NO: 46462 - DNA, 1256 bp, Cannabis sativa
tttagaattgattttgggtattttcgtcgtcaaaattatttttcctacagtgttttcaatcacagccaattcattgcagacaacaataataataataataatcactcagatacaaaacacgcatttattaaaagcaagcaatatcaatcacatattaacttaaaaatatatatagacaaatataatttttaatttttaagtagttgagtggctccctcttgtattaatttccatgcggcgatgatgtggcactcttctgtaagcatagttcccacacaaaatctcaacatatatatcccacccactatagtgtgagacacataaatctttccagatgagttaacaaaatcaagaagctttcggtttaacaactcattagcatcttcagaattattgttattagggtttatgagcctaaagcacacaagagcaaacaatcttggcaccacaatctcaaatcttgggtcagattttacaaacatttcgaaatcggctaccatttgaacatcggatcgaatatggttttgaagattctcaacaccgtggctacgtagcacaatccataatcggattgagttgaattttcgagatgcgcctagttgccagtctttgaagttcaccaccgggttagactcggtagtactactccattcgttttttaagtattcgggttcgactcgcatcgctttcacaatcaaatctgattaacccacaaacaacaacagcctaggccagtcagaagccacttgtgtgggttcatactaactgagtcagctcgctcaatcccgttgaaaaaatgttgaaactcaggacaaatgcaagcgcttccagcgtaggctgcgtccacgtggaaccacatcccatactctgtcgccacgtcagcaagttgctcaagtggatcgacagcgttggttgatgtggtccccacacttccacacaaataaagtgggaccaatcctttcgccacatcattctctatttcttttcttaacttcaaaggacacatggagaaaggtcgacctttctccatgactgtgggaattaatctgatattattcggatttattcccatagccttagaaactttttcaaatgtcgaatgggtctggtcagacccatagacaacgagtttcagcatgttctctgtcccgattttctttatcgctctgtcacgtgcggcatgtagggtcatgatgattgcatcgctagtcgtattctgaatgattccgccgccagtaccgctaccacccgagaaa

SEQ ID NO: 46463 - DNA, 4216 bp, Cannabis sativa
  modified_base (26)..(48): a, c, t, g, unknown or other
tgcatatctactaactatttctccannnnnnnnnnnnnnnnnnnnnnntaaccacttaccttaatggtttcaaccattgctagaaattgttttactctctaggagttagcttcatggaagcattatagaggcctgctctatctatttcggttccagacatatacaacgattttacgccattagttctttcttcagcaacaatattcaccaattcccaccggatcaggatggatgcagcaagtgtctgcaatctgtttgaagactcagtacaaatctcacacaatgacataacgtttgctctaaacccaggagaggtggatgagccacaggaagctaatcaagtacttttgggaaagatcatcagccgtcacagatttggcaaagcagcaatccaaggctccctgaaactttcatggaatgctattaagggctggaagtggaaggaattagaggaaggaattatacagttcacttttgctagaagagaggatgctctgaatgttttagcaaggaggccctggtttgtgtgtggtgcgttaattgtcataatgccatggccggcttggctatcccccatggaagttaggttcgataatatttgggtacatattgaccgcattcctcccttctactggaatctatccaacctaaaggagctggcctctaaagcctcaccagtttttgaacttcctcctggtatcgaggacgctgtgggaatgagctccctacgtttcaaggccaccattgacctgaacaagcccatcttttcaggattttatctccgaagacaaaggctacccgacctatggattcaatataaatacgaaaaactaagttgtgttttaaatgtggaatactcacccatgatcaaagcacttgttttaaatcgcccacggtaatcaaagactcggctggaaacttctttccaatgtttggggtctggttgaaaaatgaagcacctgagaaatccactttctcctctcctcttgcaaaatggttccaagattgggtcctacaaaaacagttgtgcaacgatcctacagcccgtaacttgctgaaggtacatcgagcgattgaaaacgggaactctgctgaagctagagaatgccgtcaacaactcccagggaaaaaacggatagtcacggaggaggattcagacgccggcgacacccaaccaggattggttattacccagatgccactggtctacctcccaggtattggggaaattgccccttttggcaacaatacaaaagttgtttcaatcgaagaactgcaagaggcggctgatctctatgctgctaaaaaagctgccagtcacgccactacacaacagattggacctgcaattaacaaacaaaatgcctcaagcacgatgggggctggggagaatgtttctgaaataggagagacacaagaagagatgaaagaaggtccctcaactcctaaactaaagaagaattcgacagggaccacaccatctgataacaatgtcgatgttaacaacgttcaaaaaggggaaagtaacattccatatagtaactccattcttggttctcaagcccaatacctgagttggccatctaaggagtgttgggcccaacctaaggcccgtgaactagtattaggagccctaaccattgacaaatatttcagagagcctacccttattaatcctatcctggacattgaagactttagggtgcaggaacacctcaatgggcctaggaaaagaaaggcctcggacagatttgtaattcgtcctagcccacggccctgctcccccctaagccgagtcgacattcaatactcaccagaaattaccaaaccagagacacactgcaaacacgttgaaccagactcaaaccagctatctacgaagaaaggagatccgattgaactgggtttacaagggactcggggggctgtcaatttctcccctgggtcaacggatgacccttcgccatcgagacgccgaggcaaaggaagaagcaacaaccgcaatcaactgggtgaagtgggcactccgaaaagaagaggaagaccttctaaaaaccaatctcccctggcagccactccaacatcctttaaaggaagtaaggcgaggaaatcacgattgggaggagcatcttcgatcaccacgcaatgggaaggaagagaatttgacctgaaggtaaatcttgataaccactttgtcatagttgagaaacaccagaaaccaagtaataggtgcaccatcacagagattaatgatgttattcaagataacaaaggaaagaagtgtatggattttcgatttggggctacggagacttgcccggaaaagtctccaatgtcgccatgagaattctagcttggaactgccgcggtctcgggaattccgcgacagttcgtcagttggcgcatctggtgcgccatcataaacccgaagttctaattctttctgaaattcggattccttttcataaattcaatacaatttgtttgagactccaattcgagggcattcactatgtccctcctgtgggtctctctggtggattgggtatgtgttggatgaagggtgtcaaatgtaatatacaacactccatgaaatacttgattactggtgaaataacctccgatcctcctgcaacatcatggctattattggggatgtatgggcctcccaacaagacggacaaggaacgattttggcttcatgtaggagatttcgttcttaatgctacatctcctatggtactcttcggtgatatgaatggtactctccaagacaatgaatgccacaactacaacggaaatatagctcggtatgcatttgattttaggcgaatggttcatagagcgggattaattgaccttggcttccaaggcccagtgtacacttgggctaaggggggtggatgctccaatggaatacaaaagatgaagcgggcgagacttgatcgcggcctagcctctactgaatggcggatccttttcccaaatgcaattgtcaaccacttatcggccacagattcagaccatcgacccttgcttctagacactttgggaggggtaaattgcaaacgtcgccagttcaaatatgaaaacatgtgggctcgggatccccgatccttctgggttgttaaagaagcatggaaggaaaggcgtcatcaaaacccaatgatcaacttccaccgtaaagtcaaagcaactagcaaaaagcttcaactatggaacaaaacacaattccatcatttatcccaacaaattcagcaagcaaaggatttagttcaggaggcagaaaagagaaacatggacaacttcaatgaagtcgatcaagcaaaactgaagcttacagaggccctgttgcgggaagagattcattggaaacaaaagagccgagttcagtggctgcaagaaggggacaagtgctctaagttcttcatggcctccaccatcatccgaagacgaagaaactacatccaatgcatcaaagaatcaccaggcagtgattggatcatggatcagaatttaattgcccaatgcttcctccataagttccaggatttattcaaaaaggataacaccaccctcattcctctaaaggaaggaacaatgctgaaactgatctctaacgagattaatgtcaatttaaatgctataccatcagccgacgaagtcaaggtggccatctgggacatggggagggacaaggctccgggtccggacggactcccaccaaacttctacatccaccactgggagacggtgcatgaggatcttattgacatggtgatccacttcttcacacgattggagttgccaaaatatatcaacgatacctccattgtgttgataccgaagaaggactctccatccttagtaacggactaccgccctaatgcactgtgcaatgtagcttataaggtaatctcgaagatcattgcctctcgactccgacctctgttacacaatataatatccccgaatcaggcagcgttcatcaaaggaagacatatagccgaaaatacaatgattgctagggagattgtacactccatgaggaaaagacgaggtaagcgaggagtcatgttaatcaagttggatctcgaaaaagcctatgataaacttgactgggatttcgtcaacacggctctccttcaatgtggattcactagcccgttaaccgaatggatcactgcttgtatcaaggtacaagaaattaaactac

SEQ ID NO: 46464 - DNA, 1908 bp, Cannabis sativa
aggcgatcttctattggtagtgtgtatactttacgattttgacgtaggggtaatccctgacactgttgggtgatatccgggatctatatgagtgactcttcgattaccttcttccaaattacctaaagaaggcatctaaattggtcttgacaaaccattcgattctgggccgaatggccattcctggacatgggtggtccgaccttattgggttagcaagttgggctcatatccagatctaaactatagtgtgacttggtcactgggctgaatgattaacctgattgggcacaggtttgggcctgccttagctaatattgggcttggaaattatacacgtcatcattttgaaaattggatatcatttattcccaagccgtcaaagctcaagagtcacggaggctcacaacctttctctagatttattgatgaattcagaaccttgaacagagaaagtaagccattatgaccatatacactacattgttgttaaccccgaaaattagggatgttgatttctaaagttagttgactagtctcagagcgattagagcaagtgcgttcaataggtttacccactcggtatgtacttcgcaacgccgttgtcaattcttgtaattccccggagacacctgtgtgattcgatgtttagtcccttagtaatccaatgatgagaacgcaagcaaaagaaagaggttgtgcatgtgtggatgggtgccatgtgcatgggtgtgctgggaaaatgttggagcatgtgcacgagggctcgcgtgcagcccacggggggcttgcatgcgagccgaggttgcgaggtgtggtgtgcgagtcgtggttatgggggaaggagggagcatgagtcttggagtgagccatgagtgtgtgcgtgacttggtttaaagggatagggactcgcatgaaagcccatagggggcttgcacgcgagctttgaaggggtgttgtggtgtgatttggcatggagcaaggggatgggtgccttccatgcgagccgtgtgtgtgttgtgtgtcgggggtttgagctcggatgcgagccttggtatgcatcgtgtgagtatgttttgggtgtgtgaggagaaggggataggtgaatgcatgttcacaagaatgacaatgggaaggaatcaaaggacaaggcatgcaagggaagaacatacaaccacaccttctaaaaactgagagcaacgaggtatgagcagcggtgacaacggacctacgagacctgaggacccgaccaagggtacgctacaaccactctcctgtagcctgcaattgggaaccatgtgccagcaaccaccctcctactattgaaatcacctgacactagtcaagggtatgaggtacaaggtcatcctcagtacctagaacatgtagcgtcaaagcgacattttatccccttagggaccactttgtagttcaggccacaagagcctataaataatggttagttattgcagatctttcataacatccaaacctccaaaaaagactggaggtgcttgcttacagaacctttcatataattgttacacttgtttggaaattgttattggccctatttgcataataggggtcgagccatctacacattgggagcaggcattacaggaacaccttgctgtcttagtcgccatatttttagatcttgttctttgacattggcttgcattttagaaaatatatgtttccaatcctaggcagcttgcagtgggttaacatcactagctcttaggcctttgcctcggtaacaaatattagggggaaactgaactccttcacccccacttgatccaattgaattacactagatcatgatcacgatcaagattaaattctatttaccgcttacttgagaagataaaacatgtgcctattaagttattaggctactaa

SEQ ID NO: 46465 - DNA, 1757 bp, Cannabis sativa
  modified_base (40)..(54): a, c, t, g, unknown or other
ttgtcatttaacaaaacacagggtccaattagtaactttnnnnnnnnnnnnnnnccaaaatggtatttacccaataaataataatatttaaaaaatcaaggggaatacatgtgtttagttgaaatcttggacctctctttaattatcaaagaagctatattttagtttattataaagtattgttatgaagtatatttcttaatggatgttcatgaatataataatttatggttagtataatattagccatggtctccaacattttgccaacttatcatttaattaagtctattctttaatagcgttttaattcacgaacttaagcatttgtcacaattaagttagtcatttcatacatatgagagtggcgtttatctaaataacattcctttggcatggggtggggaggttatttttgctagggaatgttaaaaatctcaataggcatattttcttcatcattaatgtaacactctaatagaatgttacacgttgccaatgtagcactctaatagattaggcacgtcgtcatactttataatttattgcgcactcttttactaatcaaaaatttataaaaaaacgtaaataattaaaacctttaaataaaattaaactttaaataaacaattactaaatactaaaagttatataattttgagatcttgattttgttttacaaacttaacaaaaatatttcatatacaaaagtatcgcccgacgactaataaaatatgagcccactgttccgaagatccaaacacttcagatctaattatcccaatatgtgcaattttcattcgagtctagacttaattcgtggtttggcttgttatccatatatgaatttgtacaccaaagtcctgacaggccaaaagctggcttgccatgcacctgccagatgcaagctggccgaccatgggatgtccagaacatggttggcctatgctggccacagggctggccaggggtggtcggccagcctccttgaggtggttgattgtcacttcgtcatcccgcttgagtattcagacttctcgtttattgaagtactaagtagatgacttggcattctttattggcgagttgtactgctacatgctactaatgttggccacgtagacatgccacgtgaggtgggcaaattgagataacattaatgttttacccttctaattactcgtttatcctttggtaccattaattcactaatgaaagtataattttgatacaatctaaatttgtgcacaactttttagttccagaattaacacttaaaagaaaccaatattcgatctgttaggaaagtcaggattccataattgtagatcatgttcccagctatctatattattagattcctaaagcagaagttataaaaattatcttctataagaaattttaacgagtaaattaaagaaactaataacatgaacatgagttcataattaattaagattcaggctgatctactatcgatcatctttatgatatgaattaggtctttataataaatatgtttgataaagaaagtttaatttcatatcggccattgccatatataatttctatttaatacaacacattcacttaaatgtcatactacatcagtaatttgaattgggattgcttgcactgaatagtaggtatcagtaaactctactagcaactattgattaaagattctataactttaatatactgctaactgttttattaatagctaagtggtcttaattattaatatttaatattaa

SEQ ID NO: 46466 - DNA, 1343 bp, Cannabis sativa
ttgtgggatagttgcagtcaatgtattccctttggagaaatccattctataccgatcataacgagaagtaggcaagggtgcacccttaaggctcggtctataagccaattgaaattcaattccattgtccgtattttcaagatggacaaaatatttgttgaaaacatgtcaaattcgtccacactccatacaataattcggaaggcgttcataacggaactccacccgaaattcatctttgattttgggaagagtgataatttttcctctaagtagtggcttagtgatatccatacgaactcgaaagcgaaggaaaggtccccaaccttcaaaacaagaatcttgaaaaacttcaagaaattcaccaataagatttcctaaggccttagcaagagattgagtcttactaaggaaagggagtcggtaagcctgaatccaaaaaggagaaaagattatttgttgtggagtaactgtatttaatgctgatggagcaaacagaacaatatggtggctttgaaagtgccacggttccttctctaaagcctttatcttgtctcctatgcaaccaaatgtgatcaagaagaaatcagagtgatgttccgaaattacagccttaaatcttccgtcctagtgttatgccatctgtttttgctaagttgtcagccagaccttcttggcagagaggattcgaacaaccagaacgaagtctagtctttcattcaaatcaggtgcaccttcatcagtaatggcaacaaccgatctttcatcatcagttaaagaaacagtggatttcattctgtcaatgaatggatccatgttgaagaaaacaagaggaaaaaacaaagaaaaatcgaacagaactggtaaaaacgggcaaaaaagcaaggagggaaagtatagaatcaaaattttaaaaaaaataactaccaaaacaaacaaactgccgcagagcacaaatgtgggcagacctctctatattcttcttcctctctatattcttctttcttattatatctatttaattttagttgttctttgttaaaactttatcaatgattctttccttttatcaaaacttaagacatatttttctttaaaaaaggaaaaactatcaacactctacactttttttggtttacaatttcataacttcattattaaatcttttcttttttttacgtaagactattaatacttttaatatatttcagagtttaaatttttatttcttaaaactgtacacaccataaataacttttcaaatcactgttatattttatactgttattatttatctaaattaaacattctatattataaaattatatatgatatttaaatat

SEQ ID NO: 46467 - DNA, 1854 bp, Cannabis sativa
ttatatagtatttagtaaatattttagacataattatctaaaagaaaaattaggcataataataacggacagataaattaagtcctgatattaattaagggtcagtaagttaagctacctaccctaaaaacaacccttcagctaagctgtagctaaactaattaaataagtagaaattttgggtcttataacttgcatttataattacaaatttacaacagcttattcttgagccataccactttcactttgtctaaatatggtaactttaacctcaggtttattcttcttgatcagctcaaagatgcatacatcacttgggttaagagagttgtctcttgcaaatgcagcccatccagcagaaaatctatactctaatccagaagatgatgatgccttattaatagttaaattcacatgccaatgttcctcatcaacccaaagggtgacaatttgtgactttttctcaaaccaagggtttgcaatagccattggaatatactgcacaaagaaaaattaatattcaaacattcattactagtgatctcctcatgatatggaattatctaaaaagaatacaattttgatacagagatgtcattataataatgtatatgtcactttattcagaatgatatgaataagcaacattttctacataccagtttttgtccatgtccacgcacatgggttgatctcaaattcacttggaagtaaggattgttcgagaagaatttgctggctgcttcagaagctatgctaagtcctgaagatgaaggcctcttataattagtgccttgacttccagtattttctttagataccagttttgtaaaattttctgcattaaatataaacaaactgtatataagccaacttttcttggggaatgtttttgacattattcttgtcttgaatcataatagactctttacctgaaggttcaattacttctttatttgcaattatgtcatgtggaatcatactggctatatcataattattgctagtagatgaaggttcaatttccacacaaggagttgaacttctcttatttgcagctgaaaaacaacaaatgcataagttaactctatagccttattcgcattcaaaaatattggctaggaactttattataattctcacctagattgttataatgatcgagacagtatattattacaggtcagtgttcttgtttacctggtattggtaatatagacacttcgaataagattactccaatgctctttctcaaaacaaaggcacaaacatcacctactttcaagtcattgtcttgaacaaatgccttccaaccaccctcgattgtggttttcgaagatactccacgcggtctgacatagtacttcacagaccaagtcctcccatccttaaccgtaaggatcacatcttgaggagtactactgatcccgaaaaggtacttttttgcaaagggagatggcataccctagacataagatgaaaacaaagtaaaatcaatatgagaaacatatttgaatatatagacttgtaattaagaaacttattaattaccatacaatacttagatttggatccaacaaatgatggttgcatgggaacaataaaaaaggggtcttcagatttaaaatctttagctctttggaaagcttcagccttttcttttctactcaactcctgatttcttataaactttttaggtacaggagattctccacacactttatcagactcgttcactgcaggttcagctattatattctttgcaattaggtcctctaaaatcatgctggctttatcataatcactagtaaaagatggttcaattttcgcacaaggggttatctttggctt

SEQ ID NO: 46468 - DNA, 1272 bp, Cannabis sativa
  modified_base (1215)..(1216): a, c, t, g, unknown or other
aatttagtatatattaaaattcgatcgacatgatttaataaatattaaaatttgaggaacatgatttaagacaaaaacggatcaattaataaaattaaatgaaattaaacaattttttttttaaatctaataatctcaataattcggaaaaaaaatttaacaattaaaaaaacaaaaaattttaacgactaagaaaattcaaaaacataatttagttcatgtaaaaatttaggacaaaatactaattatcgtattatatatgagaggataaataaacattaaatctgaattagtaatacatgcactcagcactcacgtgaacaataaactaaaatagatttcccatcctatattctttacattcttattttttttaataaaatttttgttcattgtttaaaaaaaaaacattaagggcatctccaatagaaaaacccaaatttgctgttaaatcaacactaaaaaattattatttcaacactaaattttttttcaattccaaccacaacatcaaaaaattacatcaaatattatattctttattattctattaatttattaatataataagaatattttaatattaaatatttgttaaatccaataaattatattagtaaatatttaattatttcattagcgtgtatatttttttagaagtgttaatcaattaatttttaatatgcagttcaaaccgcaccgtaccgcacattataaaaattatatatatatttttgaataaaataacaaattttattaaaaaaatcattattttagtagatgaatacatataaatttcagttatactttttagtagaaatttctaagacgttgaaattcatttcttcgaacttcacggccgtacgttgtgacagagtagtcaaattctaatagtcaaggctgcacaatttttaatttcttttcctctgatagtaagtaacgttgtttagagcccttgttatgttttttattctaattttttaacaattcttttttattattttacatcacacatttatatatgtatattattatagtggtatttttttatattatttaaatattatttttaatatttttattaatataatatttatttatatatacgagaaatatgtaactagatagagacagtaagaaaaaaaagtaaaaaatatattaaaataataaaaataaatagcggcataactacctaaagttttatgtttgtaagcnncataaacccaatgtttatttttaagtacccaatgtttgtaaaactgtatttttctt

SEQ ID NO: 46469 - DNA, 1772 bp, Cannabis sativa
tctctttttcaaaatgttctatttatttatcaattgatcatagggtatgttaagatcgaagaattatttcgtttggtttatattaattagttaataataacatttatattttctgtattcttatagtgcgattccattatatattcatatagtactaagtaataacaacaaaaatttatacacaattaatttattattgtttatatatatatataattaaagagtactagatcatcaagtagtttgttaaacgaagtaacaataagaagtaagagaccaagctcttttccagagacaaaggaatattctcgtgcagaatcgaagaagtcaaagtcaacatccatctcacgaaccacatcaaacccaccactcaaggtacatacttatatacctgtatataattaataacacttaagatatatcttagttttctttcttaatttacaaaactaagatatacacattaattaataattctaattctgacattataacaacaacaaaaaaaaagcttatatataaatattcatttgtaccattaatatggttatttttattaggttaggaaagagaaactaggagacagaattgcagctcttcacaggttggtggcaccttttggcaaggtatttataattaatatatatatacatacatatatacatgtgtttattattcattttcagaacgcactactataatatatattattaatatatttatttggccatgcttctctgattattttgttttaaccatatttaattaattaattttttttttcatatatatggaataataatttcagactgatactgcatctgtactaacagaagcaataggctacatccaattccttcatgaccaagtccaggtcagatatatttgtgtatataaatccatgcccacgtggacttccattagatatagaatattatttataacataattaacttgttgaataatctaatgttcaacataattaatttgtaattttattacattaattacagactctaagcatgccttatatgaagtcagtgcaacaaaccaagcctcccaggaaaattcaacaggtaattaataatattttactattgtaataatgaaatggaatgaaacataaaagaattaaatttttgttatatttctttgtttgattaaatttttaagtaataatattaatctcatattgttaatgttgaaaaaaataatatacatgaactctcggacggagctagtaagactccttagcccccgccaaaaaatttatacagtaatgttatatttaaaattttagttttctaaaaattatgtgtttagcctcccatttttttttttttttttttatgtttaggccctcttgatttaagcttctgtctctgtccctgtatagatacttttcttattatcaattatggttagtaattttaacagtgaagtaattatttcatttgaaaataagacagaaattaaagactgaaaaaaaatattaaattttatttcattccaaattttatttttgtgatttgatttatcgatttttatcaaacataattaatatattgatataaatatatatttggttaattgttattaaaacaggtacatggtttgggtaatgaagaagagacagaattgatgaagaaggtggatcttaggagtagagggctttgtcttgtacctctatcatgtgcctcttatttaaatggttttgattaatgaccatattatatatatagacaaaaaaaactaataaaaaagagatgaat

SEQ ID NO: 46470 - DNA, 1351 bp, Cannabis sativa
aatgttgttaaaaaaagtagtatgcaatgagtatacaaaccttgcgatgttttcccttatgtttaaggggcttttcacctgccaatttcttgtcaaattttcccccacttgctgttgaggttgcggccattcccgccacacttcccagctcctctttagtagccctcttgggcatagactggctacctgttatcggcaaagaagtcgcagaaagttgtatatggctgcacataatttttcttgttatctacttttcttcttttgatgtaaatgacaacaatgttgaatctcaattctcaaataatatatcaattaaaaatctgagattttattctatagatgcaaactgcaagaattgtcatttcaagattgaaaaagagaaggatataaagatataagagaaaaccaatcatattctctctgccaagatgaagtgtgaaataaatatacgagaggaaatcataacaggaaccaaatttaagatggatcatggaaaagtaaaaaagcttataagacaaactcttcaataagtaaccattacacatacaccaagccaagaagcaaaagaagaaccaaaccttggtaagtcaccaactttggctgcttgttttagattttgcattctatttttctcttgctttccaacgcggttctttttatcagcacgttttttggcaaatggatccagcccaggctctgcaaaaggtagaagcacagctcaaatatttctctgatggtactaatgtatcaacaaattgtagtattcttgatacagattctggacaagaattggaaaattgctctcgacaatctatgaatttttctagaccagtattttaatttttaaaagcaagacaagtgtaagccagaagaattaaatttaccatcagtcatctttgcatcaaggattggtatattattttcatcatttgcacgatcatatccgaaacgacgtttccaagtaccagtctgctcatcatattgaaccttatctttcttcctgttcttaatgcctgcaaacaaactctgagttaaaatagataaaagagtttgggatctaaaatcaaacacaatccagacataattgtggttcaaatttaacttgagcttgaagtctatatagaggaaaggagaaattacttcatcaaattacacacagacagtaaataaaagtaaacatcaccaacctctggctttcgcaaattcttcccatttcgttggaggtctaggctttggcatctggaaaaagaaaaaaaaatggaagaagcagttcagtgctaagaaaaggaatcacatagaagttatcacacctcattgcatgtactaaacaatatttagcagatagtctata

SEQ ID NO: 46471 - DNA, 1865 bp, Cannabis sativa
actttatttgttctttgcttaaacataaaaaaatattaagaaaatttgaagtgtcaaaatttaaacttgaaaatcctaaattaaaagataaagccatgttatagattatactgcaaaattacttttttttttgctcccttgatattggtagaaacttacctatttgagcatatattgttctttttttttttcaaaaaataaataaataaattaaataataataaattgaatccaagattgcacatgaaattaccatattacattgcacaataaatatcacattattatcatgttgactccaatgttgttggttggttttggagggattttctttcaaaaaaatatatttaaatttatatgttttagagatttaacatgaatgaattaaatattttgaaactttataatatgggcccatatattttaacttatatggaaatgcatgattctttgtaagaataatatcaatttcatacaaggtatataatagtccaaagacagtacttaatatatttaataagacagctcacaatatataatagtgaggagagagagtgtttgattttcaaatgagaaaacttgaagattacaccaatggtggttttggaatttggagggagatttaaatttatatatatagatataaatatttatatgattttctgatttgtcatattgcaactttaaaatagaaataaaaataaaaattgattatgtattatacttcccaaaataggatattacacttgaccttacatactatagtatttgtattgtggcttcatacaatttaatgtttttatatatatggaaaaagttttaactaagtcaaattaatttctatagttgaagaatatatttccacagatgaaaaaaaaaatccctttaaaatattaatttttatactcttgtgttagtatagtaagttttctcaagaaattactctcattatatataaaatctctttcctttttacgaaaacatctaatcatatgttttttcttgagaaatataaatcatatatatttgggtttaatggtcttcaatatagctaaagcccattcaaaaaacaataaagctaaatataaatataaatctaaatataagttatgtttttccaagatctaatttttaataggagtgatgattctattaaattataatcttatttgttgaattatttaacaaattataaagtttcataatataataaattgatatgatacaaaaaatataaatttaaacatgattaaacaaattctatacaacataatacataaatacaaatagtttagcccaagagcatgatatattagtaaccttataatttgataatactaatgataataattgaagtatttgatggaactttgtgaaattgtgtaaaaatatgaaaagtgaagtgtgtgggtgaataaagtccacataggatagaaacacaattttgagattttggtacgggccccaatgggtaatcaattttgtgtgcatgggtaatttttttttttacttacgatttttctcagagtgataatttagggtgtaatcgaacgatattgttcgatacaaaatgtatcgtatacagaggttgttttatcttgggaacgtcgtggttgctaaattttcgtgcacactttagccgtggaacatcttaaaaaaaaacgacattatccgtgactcaaccagaatcttctatcagttaaccgtatttattaataaatattttaattaaaaaaatttatatcaatttttataaaatattattaaaaatttatataaaataattaaaactataaaaaaatagatatagtaaaacactaaacaaatacaaacacagtagaatacaactcatattttgaaaaaca

SEQ ID NO: 46472 - DNA, 2175 bp, Cannabis sativa
attaataataatatcgtttcattattgtttttgtaggaataagatttatttatttattttgaaatggtaggaactaggaattagatatcaaatcaacatgttaagaaagaaaaaatatattaaatgaatatcttaacattttagtccaaacaaaatcttcacattttctatcaaagaaataatcttcacatatttttttccttaatgacaaaagaatcttcacatttattcctaacaaaacaatcttgacatttatgtaaaaactatactatctctccaaacaaaatcttttctgattttttatttatttaaacaaaaaaaaaacatgttttttttttctttaatttcataaaaagaaaaaaatttcacaaaataaaactcaatttctttgatttgaacacaagcaaagcaaactgatttcaactaccgaactcatattcagtctcaccttattctgtctccctctctctgaatcttccatctttctccatttcatattcaaattccgattggatctgtaccactaaacaaaacccatcttttattatctccaaattttggtttcagaatcacatcactggaatttcaccgttttgttggagaaaatgctgagtagggggtcgaatgcccggctttccggcatggcatttcgatcccgaatcccaacgctcttgctttccatgttcgctactttcgcttccatctatgttgctggccggttagttttatatatcacaccttttaacgactcttatgggttcttttttattcttttcataaattaaattatgtttatatgtatgtattggttgttttctgttatataggttatggcaggatgcccaaaatagagtttatttgattgaagagcttgataagattactggtcaggtgggtttttatttgttctctgtttagacccatcttgtgatgtgaaaatgtgttctggaaatcaaatttatgtctttttttcattttgtttaaattaaagtattgtgtaattgaatttcttttcttgtgtaaattttgattacccagatgtgcacatggttgacttgactatctatgttcaattaaattaaccatttctgatttgattctagggtcattctgcgatttcagtggatgatacattgaaaatcatagcctgcaggtagaagaaatagcatcatttggttttgtgatgtagtgttttggaaatggggtttgaagagtgtttttttttttcatgttagggaacaacaaaagaaattggcagcccttgagatggagttggctgcagctgtacaaaaaggttttacttcgacccgctcgacagaaactaatggaactcacacaaagaaaaggccactggtagtaattggaattcttacaaggtttggccgcaacaacaacagagatgcaattcggaaggcatggatgggtagtggtacagtctcattagtctttgtattcacctatgcatttctttgtgttgttaccttttcattatgtcttagcggtagggtgttgtctgttttacaaatatgctaatctgttaagtccttactaactgggactaattaatcaatgtttagatgactgatacaaattacaaaaacattaaatttggatcagggtttgctgtaaatatcaacatttactagtatggtggacatgaatttggggtagttaaaatctttgataaagaaaaaccacactagctatttggtagttcggatatgcttctacagaaggatcaaatacaaaggacatttttacaatcaagttgctagataacttaaattttaggttatgtctgaaatactaaatttttgccttgattgcatttatctggtagctggatatgaacaaatccagcaacataagctgtttcatttaactaatcgatttcattttactagctaaaggagtgtaatgtcaattagtcttttagaccaaagtcttagctgcatggagcttcattttatttttatcttcttgcttgtattttgtaagtgagcttagttgtgttacaagtgttaatcatttcttcctttgaaagtcttacaagggattaactgtcttcgcaggtggtgctttgaaaaatttggagaaccagaagggcataattgcacgatttgtcatcggacgaaggttttttcccttttcattctctgttatttggttggaggg

SEQ ID NO: 46473 - DNA, 3877 bp, Cannabis sativa
  modified_base (36)..(44): a, c, t, g, unknown or other
tattaggatgctaataaaacatacttggtagtaaannnnnnnnntggtaaaatatttccaacagtaggctcccatactagttatctctgtaacatgataggggcattcctagttgggtctaaacactcatgctactaaatctttggtatttaggaacactcttcatagcactaggtctcctatgaggaatttcctatccttgacttgcttgttgaagtgcgttgctaccttttgcaagtaagcctgtagctttaggtcagcttgatctcttctttcttctgctttatcaagggactctgccagtaggatgttctttgtatcgtgatcataggttgtccagttgtcttcttctccctagccctgtgcaaccatgggacctctaggagcaattcaggctagttgccttttgcttattaaaggtgcttcttcacggtgtcctttagggctttgttgacagcttctatctacccattttcttgaggatgggccacagtaaggaatcttttgataatgccatgtccgttgcaaaaatcagtgaacatgacactatcaaactgctttccattgcctaacacaatatattgccaaagtctaaattggcatacgtgttcttaataacaaagttaaggacttttttggaggtgattgttgccaagggttcaacttcttcccatttggtgaagtagtctactgtgactacagtaaactgtacccctccttatccctttgggagttaaccaattagttctatcccccatactacaaagggccaaggagactgcatctttgttagctcgttcggtggagctcttaggattttagagaatctctggcacttgtcacatattttgacccactccattgagtcctcgattaatgttggccaaaagtacccctattgcagtatcttttttgatatgttttgcccttcgacattgttgttgaagaagccttcattcacttctatcattagccgctcagcctcatccttggtgacacaccttaagagtggcattgagaagctccatctatacattactccatcgaggattagatacctagcagcttttcttcttatctcttttgcttcattcttgccttttggcaaggctctagtttggaggtaagctgcaataagtgtaatccatgttggactgtcatccaccatgtcgactgccttagggattgtaatgctgggttcctctaggaactttattggcaccatgtttgccttgctgacaatggtgctgcttgcgagacgagcaagtgcatctactgtagcattgtgttctctagggatcttcttgattgtgtagccgtttagctgacttagtaagtcttttatttttctcaagtaggccaccatttttccacctcaagatgtgtattcacctaggattttattcacgactaattgagagccattgaatatgttaaggtggtcagcccgtacttcatgtgccaacttaaggctggctattaagccttcgtattaagccttgttgttctaggctttgaggctaaatttgattgctctatgcagctacttccctataggtgttataagttctatgcctgcaccaaacaagtggtcagtggaactagtcagtacagattctgtcaacatggagtttccacgttggttcttctagtttttgctactcctcttactctcgctcccgcttcttctctggctcttgtttttctcctgaatcttaagagatttcaagagatgagtttgtgcactcaaccacaaagtctgcaagggcttgaccctttatggccattcttagttgatgtgtgatgtcaaaatcgccaagctcgatggcccacttgagtagtcagcctgatgcttcgggtatctataaagcttgtcgtaatggttgattggtgtacacctttataaggtgtgcttggaagtatggccttagcctttctagaggccgccaaaagagagcaaagttgtaggtcagcttctccatgagtggttaccaacattcagcggcgattagtctcttgttgatgtagtatacagggttttgtacaccattttcttctcttgtaaggatatcactcagatcatgttcaatgactgctaggtacacgcctagcttttcattgtttaggggtttttacaacacaggtggttgagccaattgtttcttcaactcctggattgcagttttgcattcttctatccagtcaaatcttttgttgcgtcagacaatgttgaagaagggtacacatttttctgtagacttggacataaatctgcttagtgcaacaatgagtcgtgttagactttgtacttccttcatggtttgtgggcgacttcatgtccaaaagggcttggatcttttttaggtttgcttctattcccttggcattgactatgaagccaaggaatttgcctgagcctacctaaaaagaacatttgacggggttaagcttcatgttgtagctgtggaggattttgaagcattcgtctaggtcctctagaagcccccaatcattttggacttcacaagcatatcgtccacatacacctccatgttgcggcaaatatgttctttgaacattttgttcacaagcctctgatatgtggcccatacatttctcaacccaaagagcatgatttgtagtagtacaggccaaagtctgtcatgatgcatgtatgctcatgatctgcaagatgcatctttatttggctataacctgaatatgtgcccatgaaacacaagatttcatggccaattgtggcatctacaagctagttaattatgggaggaaaaaagcagtcctttggacatgttttattgaggttggtgaagtccatgcacactctccactttttgctaggtttgcgtacaaacattgggttggatacccaaaggggataaaatgcctccattatgaagtcatgggctcgtagcctcttgacttcatctttgagcgcttgggcacattctttgtccagcaatctcctcttctattgaacatgttggatgtctagatcaatgttgagggcatgggtcatcacggaggggtcgatatcgaccatgtcttcatgtgaccacgtagaaaggtccaaactttcccttaaaaatcttattagtattgatttaatttatggtgctaaacctttcccaatcttcagtctcctagctggagaagtgggatcaacatccacttcatccaactcctttacaggttcaatgttgtctgcaagatcctcaaagcgaggatctatgtttgcgtccccgctttgggctggacttcattgccctttactaagctctttgtcaggtcacttggcaagcatcttctctttcttggctttaaacaaggcaaagttgtaagaatgatgggtagattgttggtctcctctcaaacatcataccccatgcctttttgggaattaaagggagaggtggtaaatggatgttactgccttcaagtcgtatagggtcggtcagcctatcatgtcattgaaagctgagggaacgtcaattacgacgaactgtgccatcagagttttggtggttggattttctccaatagtgaggggtgatctactatgcccaatcagttagttgtagccccatcttttcatatgttaatttgaaaagaatgttggaggaggctccattttagaccatacatctttccatagtcgtattcccattttgtgtaatgatgactagggggtcattggtcattgtgcgagaaactgacttgcaaagcatctccttctaagaaagagatcatgggatctccaagctttggtttcttaaagcaattttcttcaactgctaggatgtcccttttgggctcgagacggagtatccaagcatcacactgttgggaatattttacc

SEQ ID NO: 46474 - DNA, 1049 bp, Cannabis sativa
tttgcagttttttaatgggcggtttccatacgggcggattctaatgggttaggcggttcccacggtttagcggtttttatgttccggcctatatttttctttgggaggccccacttattaatattttcctcttcatttttcttctctcaaattttcatacactattcctttattttctctttcttcttttacttttcatttaatactttctttggctctcattttccatttttgtagttaagaattatagggttccatctcaaaactaattggtgatgagtggagtagcccatgttattatatatggctcaatacttttacatttaatccatgtgggacaatgttttccaatacgatagaacaatctcagtccatataatgtaaaaatgagagattttttttaattaaatagaaaaattaaacataaaaacttatttacatttattaatttcttaaacaaattaagagtgtttctccttattttcataaaaacatatttaaaaaaatatattgttttcaccaattttttattttgactagaaacttgttgtattatcaaatttgtaaatatgctaacaaaagatctcttaggacaaactctcaattgaatcgatgatctaaaaaaaaaaaaaccatgcaacacgagctaaataattattttcaccaatttaatgtaataaaaagatacaaaagaaaaaaaaactataagaaaacttgagctccccaaattaatatatcccacatgaccaacaccatgagatgttcactaacaattagccactttatataaaaagtatagaatggtcaaagttatattggtatttgaggtcaagatttaagatccttctctatagttaattataaaataacaattcttctctattggttttcatgttcaaagtccctacatgctcccaacaaaaattaaatatattcaagtacttgagatataaataagaaaaaaggtcataattcatgcacaaactggcaaggtatccaatgaaaaaaattaaaggtaataataatataaatgggaagtgatttatttt

SEQ ID NO: 46475 - DNA, 3008 bp, Cannabis sativa
acataaggtgtacttttctaggggctgtcataatcacaaacctcatccaacttagaagagtatccatcagctttaccaattttactttcagaagatttctcttctgactttccctctgaaattgaacaatgcttgtcaatatcaacaccagaagtcacaatggcctgtttcatacccaagaacatgggtgtacccaacccacgcacacatcaaatttataatcaaccaaccaaactggtaaatttacagtaaggaaaccagccaaaagaaacaaaattcaatattgtataaaaagaaattcatcctaagtattacctcaacaagggaattgttagctttggctgaagtgaactctatatcacttttctcttcagaacttgttttatccacaaactcattatattcttcagagtgttctgtatcccttgctatagcagtgtcatgaagttccaatgtacaagctgagagccgatctgtatcttttggggtatccatattacatgtccccaaaaaagaaacaccttcaacctatcaattgccaattataccaaatatgaaaccattacattgtgtttaagaatatatttacttaaagctatctcaaaaaatggaagaaaagaaaatcaaaataagttatcacagatttacaatatttagctttggtttcacaattctttagtactgaatcaaattgtttacttcaaacagaattacaaatggggtgcttggggaaagagttttacttggtgggttttagttgcgcgggcttgagattaagaaaatctcaaactcaagcgtttaagagtttgagttaccccaaaaataaacttaaaatgggatacacacaaacataaaccctccactaaaaccataccaaatataagtttggttttacattcccatccccaagaaacataaaacctccactaaaatcatgccaaacatatgtttggttttacactcccattcccaagaacccaaccctcataacacattagaacaagctacaaattccaaatcttgcatctgctagttggtttcactaaatactgaaacatttaatgagtaaaaaggattcattttctctattaagaaaaaacaataaaagacattgacaagccatgattaagaaaattaggtgaaagtgctcaaaggcctattaatagcatacaaaggaaattagtaagcaaataacctctattgcttgtattgagtcatattttccatcagttgtagatgaaacacggcgcaaactctggttcaaatatctccaatgtgattcatctagtgtatcctgcaaagtggtaatatacatcactttgcgtgttaaagaaaactatgcatgcacattactcgtattgaaataaacaatcaccttcgcacaaaaaatgtagatgttgactgcatttttttgccccctcctgtgagctctatcctcggcctttaccaaaaagtgaaaaagaaacaaatgcatcagaaaaacaagaatgtagcagggaaaagccaatgcattcacattgatgttctctgctctacaaggttatgtagcgctattttcttactctgatcttttggatatgcattgggcttatgtttttgaactgcatcacaccctactatagtgctagacttcagaattactttgttatatttttttttctttcgggattatgttttctaatattgcttaggggaatagcatatcctcttcttttcctttgtccaattaatggttctgaagaaatttacttctcacaggtgagtggaagagagagaaaggtcaatttccaacttgactcctttaacagatacaaaataaaatgaacagctctctctagttacaccacaattttaattcacaataatttccttgattcatcaaaaatgaaaatatcagttcaggaattatcacaagatttgtgagtcaatcatctactgtgctcgaaggtataaacatgattgaattggtttataacaccaacccactaagattgaacattgagatttagataacatataaaatgttaaaacatttctcactaaatttgacccagtcaagaacctcaaagggttgagaataagattgcatgggacaaatctcaaaattgtaagccattccctttgattctagtgataagagcttaatttggaatataaaatttcatttattggacctgaagcatcaatgatggggactgaggaagctccaagaagactacatgttgtgctgatgaaaaatccagtccaacacctccagcagtaataccaataattgcaattttaacctgatatcagaaagacatttcttattaatctaagacaaataattaaaccacaaagcacatgaaggaccaaaatcacagtggcagctggcagcaccacagcaacaataaaaataaaggtaccataaaatcttgatataagagcaatattgcattttctggttaaaatggatttaccgtatatatatcaactcatttagtttagaaaataaataaactaagaaaagtacttttagaagaggacctctagctaacatcacataaaacggccgaaattgagaattgtggtagagaagttgtaaattttagttgcaggtttatacaaattatagcaaccaatacgtcaaatttctggttgggaatattcatcagttaataaagtactgtaagaatataaaacagcaaacaaaatagaataagatttaagaatagatgactcatagacatgacaccagaaaccaactttttaaaataataattcgtaaataagcaaaaataaaaacttctacaattcactatcctcagagaagcagaaaacagggtagagataaatgacaccgtccagcaaaaaaagcaatagaattcggtaaataagattcatacctcagttgaagatcgaaaagacagcacagatgactgtctatctctagcaagtgtggttccatcaatgcggacaaaaccaatacctttttcgcacatgaattccttttaaaaaaatgcaaaagg

SEQ ID NO: 46476 - DNA, 2024 bp, Cannabis sativa
agacgaattgcattgacgaagatggagtgggttggggttttatatactctgatgatttagaattagggtttttctgtggttgaagcgatgggaacgaaagttattgtaagttattggttcggcccattgggctctataaaatctggcctatctgctttacttgacctaatgggtaggcgcaatccttggatgatgtcagagctcacatcgccggcccatttcttatttcttttcaaatatacgaaaattgcaatttatggtatttacaatttacaaaagggtaatacagtaagaactttttgtaattttgtaaaagttttttaaaacttttatttagtctctaattgttatttacaaacttttaaatatataaataattattataaaaataaactccataattactatttcactttttaatattttcgtatttttccaaaattctatttttaaaatatatttttttttaattataaagatttttttccataattatctttattttcttacttgagagaagaagctggagatttgaattgagcattttataggagtgataaaatgtgttattgtatcttatgtctaattttcttaaacttaacccgacccataaaaaattatatcctattcctgttgacctattttaactcatttttctattactgaaattggggttacaaaaaaaaaaaaagaaagacctagtctttattgaaaacttaatgtgtatatgtatatatatgatgagaacaatttagtatcaattttaacatgtgaaggtttagtgcgacctagtattgaaagaacaacgtgagatgaagcaaatcatgcaaccagtaagttggtcatctcagtacaataacatttatttatatgcaagttgcatgagactatgttttcacttaaacaaagtgatattggtctttattttcaattcaactaacttaattatccaaatacccttagtagttttgaatttgaaaacatacaaaaatttatttgagcactgctgttcataataatgatttatggctgcatggtattctttgttaactttgaaatattaaattagttataagcgaaattcctttattagatacccataaccacaaagagacttgtagccgaaatttcttgtccaactgcaggcatccgtgcgtgggatgctagcagtggccaaaaaaccttggttagcttctcttatagcgcctgcacgttcccctaatgtatttccccaacacgcgcatatggtgatcgaaccaattaaaacaagggtacaagaatatcactatctttgataaagtggggacaaagacacaactctttgtctaaaaaatttcattgaaaaatgaaaattacaaatatttagttacattatttttatgattataacatatacatctattatttttctactatatatttttttgtacaactctccaagacaaaaagaaaataataataataataatgctttgctttctttaaggggaggcattatttttctatttcttatcttgtttttttcctacttaatttatatcttttcgttcatttcaaatcctattaaaaccaaatgtgaaagtaaccctatttttatttatttattaatatcattattatgtctcaaactgaataatttggtatatattaataagagaaaagggaaaatgctttatatttctcatttcttaaaaaaatgcataaaccattcaatgattcgaaaaggtacacatattaattatcacacaatgtttagttggaagtaatggaaatgaaataattttttttttttatttttatttagttatgttttaaaatattacaatattattttaatagaatgattttttttattattattattttggttaggagcataaatatttttttttggtgagaggggggcaaaaagtaaagaaatttttacatgaaaaatctattttacacaatttattacacaattactcatacacgcctatgtctacatttttacttacaaagttagttttattacacaaatacca

SEQ ID NO: 46477 - DNA, 2416 bp, Cannabis sativa
  modified_base (1311)..(1325): a, c, t, g, unknown or other
aaatttaaaaaaaaaaaagttaaaaaaataatatatgaggtaattctcctaaactttataatagtgtatttgaaataagtcacttatttatatgtatagataacaaattattgtgtcttggttcttactattttgatgattgtattataataaattaacttttttatgaaatagggtgtttgtatataaattgttgcacttctattgtgaatgattacatcttttatgagaggatgcacctccattgaaaagatataaacaaaatatactaaaatataataaaattgttaccacataacaaaatgtgttgtatagatatttatataataggtaagaattatttactctataattttcacaccatggttatttaaagtgactttaagaaatattagaatttaattcacattcttattacatatatatatgggtctccatccacctaaaatcctaaagccatgtacaaaaaatcaggtatttatatataaacttatgagggttaggctttgcaaatagtgtctatcatgagtagatgtcttttttttattattatttttgaaaggatgtaactcttaaaatatatagtaatataaatcttttttaaaatttaacttttaatttggtatattccgtttaaaaacacaataaatctattaagacacaaaataagacacgataaaaatacttacatttctgttgttatggccacaccgagtataacagcctcagatagggatacaaaaatgagaccgagtgagttgaacatagagggataagtggctcctttaattgagattgcccacgtcagtaagcaaaatgtgacggctgtaccaagtgccccctataaaattagattatataataatgttattaggcagatttcacaccaaaaagtcaaaatcaaattaggacatgaattaataaataagcttactgagtaaactattgtaaggagttgtagattccagcctaatctccatgaacctacacttctatctatacacaaaccaattaccacagattgcacaactcagtaagacatgtcaatagagttgcccaatatttatatggaaatatttgcttcaacttaacctgtgttttgtaacacataaaaacataatttagagtcaattgtaagtaagtattcttcttattaatgaaaaaaacatatatatatatatcaatcaatatatataatggaaaacacacaatttgtcatgtgacaatttatatgtcatttttttttcaatctctcttctcttaatgggtgatattaggaaattttgaatttttatgattaatttttttatnnnnnnnnnnnnnnntctcatttttacattatatggactgagattggtccatcagctgaaaaaaaaaataataaaaaaaaggtttttgacaaaaaagtgataaaaaaaagttgaacttgacttaaatattttttcatataaatatatttttgatatagtgtaaaaagaaatattttttgatattttctttaattaagtagttaaattaagcataaaaattcaaatttctcttttattatttgctatcgggccaaaatctaatgatttaatatttttaaaattaatatttatagttaaaatttgttcacaagtagctaattaatagttttttttctttttctaaattttggttgaattgttatctttttcttctaattaattttaaattaatacacataatttctatgttaattctatttttttatttgttaaaaataaccatatctttctagtttctatatattttgtaaaatactaaattgtatttttaaaattgtaacatgttactttttttttaaattataatatcacaatatcatatttcctattgttataccacttaattaatattaataaaaatattaagcaacaagcgtggtttaattatttagtttatataggctgcatttagtaacacttttttaatcagtttttgtttttaaaattaaaaaaataaaaatatttttcaaaaacatgttctataaacctgttttcactttttaattttttgattaaaaatcaaaactttaaaaacaaaacaaaatcactttcaattttttttaaacagtttttttttcttaattaatattttagattctaaccaaactcggacctaaattcctccccacggccttggcgttgaacccgacctctgacctaaaatccgatcccgaacttagactcgcttgaaataaaatcaaaaaataaaaataaattttacagtacacatttttatttttatttttgtttttaaaattgaaaaataaaaatggttaccgaatgcatttttatttttcaaaaacaaaatttttacttttattttgtgttaaaaaattaaaaaacaaaagttttactaaacgacaccatatttaataatagagaaatac

SEQ ID NO: 46478 - DNA, 1405 bp, Cannabis sativa
tttaaaatgcaaccaaacaaataaatgaaatgaaaattgtttcctttccattccatttcatttcattacttccaaccaaacgccaattaagtgccttaatagcatcgttcttaagctcattcatacattttttcaaatttcataccctcttcacaactcttaatttccatcaccaccttcacaactctagcaatttcatcacgcccaaaatgttgttttcatcactcctcgatcatactgccatgtgtaagtgatccacaaacataactgcattcatcttctgttccacataaaatggccaaataatgagcaatacctcattcacaatgcccatgtgagttgagctccaatcacaatgagtaacaaattcgaactcaacttaaataaaatcaataaataaaaataaacataaaaattacaaaatatatctttattttctgttttcaaaattaaaaaacaaaaatagttataaaatgtatttttattttttaaaatcaaaatttaaaaataaaaatattaccaaatactataaatattaaaaaaaaaaattcgtgaaaaaagattaaattatatatatttcttcatatcatatcaatccatctaaagtgctttttctccacattaaaaaaaccaagaaacaatgttagtacttcatagtgtcactacatacgtcacacaaacatgattcaattcactttatacctttttatataatttcttttgtttttattaataactggtacattgaacttgaaattggactctataccccataatattttaatatacttttaattttatataaaaaattactttttaacaaagtacttattatacccttcctataataattaattcatatattctcactctaaaatttatacccttaacttaataaataataataacaatgcatgcacataatatactttttcagttttaacaaaaaaaaaataataataataacaatattaaggatatgattttgtcccgttatatatatttatcatatcctatataaaaataaatatatatatttatatatacaataaaaaatataaaaagacaggtggtattatatatatatgagttttcttctcaattttcaattccttattttattcattttcttatttatttagtttatattcattatgtttatttacttatatttatattaaatgttattaattaacactacaaatataatttataaaaaatctaatagtcatacaaattttcatgaatgataattaattaaaaaaaaagaaaaaaatatgaaaaagtttatagattataataattacaaaaaaaaaaactattatatgtatatgtattgttgacctcgcttttagccaacgacaacgagcctattttataagcgataagtgatctatagcaacaa

SEQ ID NO: 46479 - DNA, 957 bp, Cannabis sativa
tttttttctcttttctttttcttttcttcttctttttctttcttttttttgttttaaaaaggcaccactgcatcgtgcactgtggatgccaccaccgtcactgttaaacacaaccacctcacctcctgcatcgaccgagcgatcgaatctcactgtcgtcggaggtctctctcttcatggtggtcaccggggttggtcgacagagattggggagaggaggaggttagggttttgggtttcggggcttgggagttttgggtttcgggattttgggtctcctggtctgttggtggctccgacgcagcacaagggggtcgggggtggttgtcggcattagggtttgctagttttttagtgaagacataaacgagagagaagagacaagaaaagaaggaaaaaaaaaaagaaaaaaaagaaatttaaaaaaaaaattataatcttttttaaattaacataaatgagatgcaatattaaattaccaataataaaattacatctcataaaaatataaggcactacaagtattttttagtatttgtatgtatattcattgtaaacacattcatgatacattatttatgcctgatcttctgcccttgaataatgcccatgctctctatcttcattttcaatgcatatgattactggcaagtcatcacaggtttcaatataatgctaggaattgctcaacaatttatttaatgtgccagagatagagataacaattcccatgtgtagttttctttgtgtttctttatttttatttatttgttctcatttcttctcttcaattttttataaattatatatatttttacatataaatttttaggtatttttacaatgtactttttaaaaatgatgtgctgatatacattctcaaatatgaatatattgaactctatattttgtaaaagttactaatttgacctcaatattgttaaataacaaaataga

SEQ ID NO: 46480 - DNA, 1058 bp, Cannabis sativa
aagttgggacaaaattttaattaaggaagaatgaaaattatagtaaagtgatagggctaaattagtagaataattgaaaaaagaagtaaacataatagattttaaaagagagggtaaaaattaaagacatttagttaaaagaggtatttagtgtaattttttcaatttagagagtgctaattatttgagtgcttttagaaataatgttttaaaaaataatatagaagaaaaataaaataaaataatatgacgtgaagatttttagttgatttgaggagtgatattagatgtgcacccagaaattattattattattattgactgaaaaagcataaaggatcgattttgtggagctgagcctccgctggtatatatgtgtttatggttcattttatgaaacaaagctagtcagtcaaacagctcacacacactctctttaccagttgttttaccactttctctttctttctaattctgaacaagttcaccctttcagtaccactgttaaaaaagtagaatatttgtctcaagctggacagaaaacaatgtaaagcaataacacattttattttattttttgaaggagcaaagcaataacactttataataattaaagtaaactggcaatctcttttaaaaaataagaatatgttaaaaacagggtaattggatacataaatattctattgtggtagtaactagtatttcgttactactttttttaaatttaattatgcattttttttaaaaaaaaaaatattttaatataaatataatacatttcaaaatattaataaatataaattagttttgaaatctaaaataattaaaattataaaactagtataaaagtaaccgtatatttttttcttttatcccctcaattacaatttacataaaatatgagaaaaagagagtgagaaagtaatctaatctcccctcattttatgtgaatttttctatttggccaaatgaaaaagtaaaggggtgttggtattgaaagaaaattataatgagattaattaaagacaaagttaacccagttgaaatcatgtcaa

SEQ ID NO: 46481 - DNA, 1013 bp, Cannabis sativa
atccttatatatatttttccttcagagaagttacttgtctaaatctaaaatctctttctatataaaaaggtaacttccccatttaatttcttttttttaaaggttgcccattttagatttagatgagttcaattttttttaggaaacaaaatcataattatagatttttttataagataattgtagaatctttcaattttttaaaccgttaaattttttttcaattattaaaattgttagatttaaaaacttttatttaattttactaatgaaaatcttatctgaatgaaaattgaggggcatatatatgttaaagttcagtggtataattttatagatatcaaaattcgaatcggtacattaataaaattgaatgaaattaaacaaaaatccttaaattcaatactctcaataattttttttttagccacttatagtcttataccgttgaaagacataatttagtacattttaaaattcagacaaaaaatcttaattagtctaaaaacattgatttaatgctaaattaaatataaaacaaattactgatttcctttatttttttttttaaaaaaaacttaaacctaaatttaatcaaaattggaaagataatagtaagaaacatgtattaaatttaattcgtttcatacctttggaaattgtaacgggatggtcttaaaaaatctagtaaaatctttttgtaaaattagtttttcttttttttttttaaaaaaaaaaaatctcttttgtaaaaaaaaaaaatagtgacagtatgtatatatatgtgaatgtgaaataagggaagtactcggttttgttgaacaataagagaaagatcatagtaaatatttaaaaaagaaacatattaaatttaattaatttcatactagtaaaatctttttcgtaaaaaaaatgtcttttgtaaaaaaagtaagtagtgacagtatatatatatatatatatatatatatatgggtcttatgtaatttctcagttcaaaatgaaagatgtaa

SEQ ID NO: 46482 - DNA, 2359 bp, Cannabis sativa
aatagcgttaataacacgagaaaaggccttatagaaataccaagagagtataggggcagctaaaacccaactattggggtcgaaaacccctaattatggacaactaacgcagtgtcgaggccgtactgcagaataattttgttaatccattctcttaatcctagggtattacataaggtttcttgaactttatatgtgtttaaattctattgttttagaaattcatatttaagatgttaaataacatacatggtagtaaatctagatcttaataaaataatcctcaataacatacatgttagtaaatctagatcctaataaaataacttccaaaaatgaggtggtatcatattattgttttacctctcgtagtattttatccttaaatatactttttttaataaatccttaaatacacgtagttccttgtaaatgaaacttctgtaagcttaattactaaaatgatgtctctttcatttaactccttgaaccaagctaaaaggaaactaatatttcatttcttgaatagaagctacagttgtccatatttataattaatactctcatttaattatgctaccaagttcttcatatgtatgtatgagctagaccatatgtaagcttgtaatgaacaagaactctaataacataaccagctagaacattaattactcaagattaagattaatttgacctatcatcaacttttgcgatttgactataatagatatatagatgtttattttgaatcaagattctctattaaaaagtagtgttccatattgtattaaatcaatctaagtttgaaacgttgattaattttttatttattaaaaaattaaacctttaattgagtcaacaaaggtagttaacatatttaatataaattaagttaattgttgtgtcaaatttaaattagtttaatacaatatggaacattatttttttaacagaggatcttgattcgtttattcttatatctatattaagtcaatctcgatccagcgtcatgaatataaatacatttgcatgtgtaataagaacttatcgtagatttgttaatcagtataaatgtaatgcattaattaatcttaggactttaataaaattgaacatataattataattattttcccgtgatttacaccacaataattatatttatttttatgttcaagatttaataaaatttaatattaaacatataatcatgaaactaaatatgtaagcaatttgattaattaagtcataatataatttttattttctttattaataataaattaattacataaaattgaggttttatttacgatataaaacctaacataatttaggtacttttcctgtaaatatctcttttcaaatttatgaatgaaaatttcttttattttttggcaactagttacccatatcaaataatttgtcaccctaataataatcaagtttcaaatcataatagtaactagctacttaaccacgattacgatgaagaactccaacaatcttttttcttggtgatcatcttgtttattgttttgtttgaaggatgtgagatagagaaataaataattaagaaatgaaaaacattaggtaagtttgtttgtgtttgtgttttgtgttgtgttttttttttttaatgatttatggatattccatattttttttctaagaggggatatttcatattttaaactttttttttcattctcggtgaggaatggtcattaggaccctacaagcgagagtgtatggttcttgagccttgatccctttgtgttcgactctttagctggtgccaagggcaaattcaataaatctaaatgtggttgaagaactgataactaagacaaactcaatgaaagtagtttcaatggaagaaagtgaggaggatggagaggagatggaaggaagagaagtggaagagtcaagtgatgaatgtaaccaagagaggaagggagattcggatgaagaagaagaagatgaaaactgggtgattgatgataatatggttaccagctttgggaacctgtcattaattggaagaattttctcaaagaagaggtgtaatgcgaacttcatcaaaacggtgttcagcaggatgtggaaaacagaagaaagatgggaagttaaagtttataaacatgacaattacatcatgtatacggggttctccttcaactgtgagaatgattttgggaaagcaaagaccattcttccatggcgattcatacgtggattaatgatagtagaagagtggccaaagagcggacaatgggaggatgcttcgctaaattcggttcctatgtggataagagttgctagttttcctatgaaggcgttcaatgaaagtaatgtt

SEQ ID NO: 46483 - DNA, 2280 bp, Cannabis sativa
catttctaaaaacaattttttaaaacaaaaaacagaaaacaataccaaacatgctctaagcaaaccccccattgacactgtaaaccattcttaaactagtacctattcttaatattcaaatgttttgttgttaaaattttagtttcagaaatgttgattgttgattgaatatatttttcctttttcatttctcaacattcatttgtgatcgtaccgatcagatagtattttttaatatttaattggatcggatcggatgttggatggaatgttcaaaaattcaatttatccaacatctaatcgaactaattagtattttcatttagtttgaattagtaattaaattttatattgttatacgtaaaatatatacgtatatatagaaattaatattaaaattctacttttttttttagattggatcaatccaatccaatacatacttgacctaaattattagatggatccgatcttgaatgttgttacgattggccgactgaaattaatggaatcagatcgaatgataaaatctaatatctaatatataattgaatcggatgtgtataggcctaaaaacattagaaatgaacacccctttagcctttacacgagtgaaaaattaatggtacgatgttgttaactgcatctttctctatttcttctttcaattaaaacttaataaattaaattaaaacatcttattatagcattacatgagagaagaaaaaaagtttatcggactatggagcactaaagctaacaaagaaaagaagttttaatttcaaattaatttactaactattaattatatatccattacagttactaacatatattaatattaatattattattattacctgaacaataagaggaggaacatccaagaaagtgagatgagcatcaaccctgtacaagagtttcctccaagacctgtttggcttgagagaaagctggagaaagtcatctgcagtgatatccataaatgcttcagcaaagagggtaccttgggcattacaatcaacctcaagcttctgatcatcgtcggcgttcctcaatcttccggccaaagggtagtaatcgaccagaactctggagagagatcttttcaaagtgtcggagtttacggtggccgatttctggtaaaggtataggtatttgatggagaatctcagcatcttttggtcatctagatttgtaagatacagagtatggtttggagttggtgagtttggccgaactgtaatcggttggtttggatacaaattacaatccggaagttctgctgattctaacgtcatgatcttctctatgtaaaagattttttttttctaaatattgcccctggttaataatatagtagagagagagagagagatagtgagtgaaattgattgaagagaagaggtaataatagaggagcaagcaaagctaagtagacaggaaagaaagaaagaaagggaaaaaaacaaatatctacggttggatatggagatagtacggtgagattcctttgagaaaaactaccaagaggagatgtccatttggcttatcatgtttactcattttttttttcaaaaaaaaaaaagttagaaagaaagaagctttattcttaagcaaacaaaaatatatacacttcatcttcctaaatgcatatttattatagccaattagccaaatcatttgttaggtattttatctttaccaaatatatgtaacactttttaatagtattatccatgaatgattactaaataaatttaattataaatattaattttaaactatcgaattttgatctaataacgaataattaaatcacaaatttaaatttctacgcttaatttaactacttaattaaaaaaatatcaaaaaatatatttttttttacaatatatcaaaaatatgttcatacaaaaatatttaactcaatatatattagcatttatatatattattaactaaaatctactttcaaaagacaccaaactaacatcgaaatatatataaatatatacactcttaatgggtattacccatgaatgggtaaaattaaaaaattttaagtttttatgcttaatttttctatctaattaaaaaaaatctcccatttttatatcatatatgggctgagattgttccatcggtaaaaaaaaattaaaaaaatagttatttagcaagaaaaataagataagaaaaagttgagtttgagttaaatatttttgtatgaacatatttttgatatattgtaaaaatacatatttcttgatattttttttt

SEQ ID NO: 46484 - DNA, 1755 bp, Cannabis sativa
ttttttttaattttttaaataataaaatttagatgggattttacatgatgtggagaattttaatgatctagacttattgaatgatagaattagatgtaatttatttgatcttctctgttttgatggttacctcatcaatccgaaccttttattatgcagtggtgctgaagatgttgctttgattgagtatgcacatttaactggtcgaccctttagggttttcagtttggatactgggaggttgaacccagaaacttatcaatttttcgacacagttgagaagcactatggcatccgcattgagtacatgtttccagactctgttgaagttcaggcattagtgaggagcaaagggctcttctctttctatgaagatggccaccaagagtgctgccgtgtgaggaaggtgaggcccctgaggagggctcttaaggggctacgagcctggattacaggtcagaggaaagaccaatctccaggtactcgttctgaaatcccagttgtccaagtcgaccctgtttttgagggcttggatggtggagttggcagccttgtgaaatggaaccctgtagcaaatgttgatggtggagatgtttggaacttcctccgtgccatggaaatccctgtgaattcattgcattctcaaggctacgtctccattggctgcgaaccatgcacaaggccggttctacctggacaacacgaaagagaaggaaggtggtggtgggaggatgccaaagctaaggagtgtggtcttcacaagggaaacatcaaacaggaagatggtcaggccaatgatgcagctaatgcaagtggagctgctgcagaatcagacattttcgagtcatcaaatttggtgactttgagccgttcagggatagagaatttgacaaagttggagaacagaaaggaaccgtggcttgtagtgatgtatgcaccatggtgcccattttgccaggcaatggaaggatcttacttggaattggctgacaaattggctggaagcaatgtcaaagttggaaagttcagagcagatggtgagcacaaggagtttgcaaagagtgaattgcagctaggaagctttcccaccatacttttcttccctaaacactcagctcagccaataaagtacccttcagagaagagggatgtggattctttgatggcttttgtaaacgccctaaggtgatgccattgttgagcagttctatcatgaataagaaggaagggattaaattttgtagggaaaaatatagatgtgaatttggggggtcaacgtatattgagttgacaaaacaaaggggaacaacgtatattgtatatttctaagttcgttagccgtagttgtggttgtttgttttctctcttattagtttgttaaagttaccgtttaatgtgctgtttttgcaactctttcaagtttaataccaagattcttcacagcgtgagagttcaaatctggcttgctcctttctcattaatggaatctatacgattttattaggggatcattaacttgaaaaaaattccatcagtcaaatttttttttcttattaatttttttattggtgttttattacttaaaaagcaatttggtattgggtattgcccagtagtttttgtatttaatcgttttattcatgtaattgtagggaagtccctttaaaacaaaggaataattacataagacactattttttttgtaaaatatttatatttttacgtttaaagaatattttttacatttttacagtt

SEQ ID NO: 46485 - DNA, 1018 bp, Cannabis sativa
agctttgaccggatcattttcgtatttgtacataccaagagactcgaacctcagggatcttgtgagagcaaaccacatgttattaaacgagagcttaagcaccgctactcgagcaatggtaccttagagttcaagaaacacactatttattgtcttgagcaattccatttcttccaatgtagcaactccaggttcaacatagcacaactgaaaaaagaaaacaataatcacatcaacaatagtcctaacaaaatataataaaccattcagaagtagtgtctgatcaatcataaacctgatactgtggtttctttagtgtatgaacccctctttttataagtctctgccatccaacttttcgtttaagagatttttccaaggctgctgttctctgtaataatgtagcagaagaatcgaaacaaggttaaaaaccgcaatgtcaaacacaggtcgaaaaaacacctcttaaatccatctataaaatatttacaagttgacatttcaagttgcatgaataggtgacaatgacattacatgagctgggtccaagatcaagagattgtgctgcttgactccgttgcgttgatgtttgatttgaattccaacaatggttcttgaatgcccatcatgttgaaaatacaagggcctgttcataaaaatcgttctcaaaatgttagaacacaatcaaataatagcgcgaaattcagaagctgtggtttaagctgctcaaagagcttgacattcaatggtgtatgcctcgattttgtactcagttgttcgagtgtaaattgaaggaaggtaggaggacatcaacattgtggatagcagccattcttgctatcttttccggtgatatggcttgaaaggaacaacagtaagaaaggctatgagagaaggttaaatttcgggcgatatactttctagaccttagcaattccattactcggggagtttaccaaattttttgaataactctaataaactagctttcatagttctttcaaggactgaattgtgc

SEQ ID NO: 46486 - DNA, 1469 bp, Cannabis sativa
ttactgagaatattggttacaaactgtttcaattctttaacttttaggctgaccacttggagtataagcagattgttcttgaaagcttgagcaaacctttgagatgtcatgggttgaaagggatttatctcaagaccatgaggcttaaacataagctcaaggctttcaacagtcgctcaattggaaatattggagaagcttatgagaaagctgaagatcaatttaaagaagctcaactcctttgccaagctaatccccttgatagatctcttcttgacagagaacatagtgcggttgttcattttcacagtcaggaaaggatgtatttgaactttctaagtcaaagaagcaaaataaaatgaatacaaaagggggatagcaacacatcttttttccatgccatgttaaagaagaggaagaaagataacaaaattgtttcttttgttacggattaaggcaccttgaatgactactttcctgatgttgttcaacattttcttggtcacttccggagcattatgggcagagccagagcaacttccttagaaattcaacggactacattgctatgggccccaaacttaaccttgatcaacatgtatacttattaaaacctttcactcctaaagaagttaaggctgcgatgtttagtattcctagtactaattgtccaggtcctgatggatttggttctagtttttttataccaaaaatagattgcccttcaagagctatagattatcgacccattgcctattgtttgactacaagtgtgtatctaagctcttgtgttcttgattggctaaaatcctcctgaatttagtggattagaaccagggtgcattgtaaagggtcactatattgattcttcaggacattttgaagaactataaaaggaagaattgctctccgaggtgtactattaaaattgacatcagtaaagcttatgatacgatcaattgggattttcttaaaaagttactggtggcttattgtttccttacaaagtttattagttggataatgaaccgtgtgagaaatacatcttattccttgctaatgaatggaagatttcagggttctttcaaaggtgagcaaggtttaagacaaggcactactacaaataaccctttttatgtttatttttcttgtccaacaaaaatagtgttggacatgaaaaaaatttagagagatttctagtccaacatttatggactaaaaataaaaaattatcatgtccatcaatattggactaaaaaaataggtgggacgtgatatgttaagaatggagagattttttttagagtgattcaatgtcattgatggacgttgagcccatataacttcactacttccagctaagcgttgatcaaattaacaccccccctcttatccctctttgaaatccataagcgaccaaatcgcagcttcttctcctgccactataagaaaaattcccttgaattggc

SEQ ID NO: 46487 - DNA, 1692 bp, Cannabis sativa
  modified_base (1552)..(1552): a, c, t, g, unknown or other
gtaaaataaattccaacatgctctcctacaggtagcttgtcagccaaaggctggatgatggggttgttgttaagcttgagatccctggccgaatccccttgccgctggttgttgggatctggttgttctcaccattagaactttttggcatagtgttccttggagtggatctatcattagatccttgcctcttccatcagttttctagtagaactgcctaatcaggtcgctgacctctctgttgtggcgatctagctttgcttggtgagattgaaggatgtactcttggtcatccatccacctcaagaatttgcgtctttacttagcaaatacatcagaataaacagtcgtggctctttaactaggccgacttggtcgacgacttctctaagcttggctaactcgagatcttctcccaagtccacatgtggcttgtcaattccaactcctatctctccagcatagtactagagatgagatctggtttttgttccagggggatgttccccaaaagtcattcctttattggtaggcgccaatggaaggtcatgccttagaggcaagggcctactgtttagatccaccaggatgtttctatcaatttggctagctgtagtggccaaattcaaagtacttattgtggaagcaagattgatcacatctacagtgctcatgttaatctcaattacggatggaacatgaacattaggatctacagtgtgtgggtcttgagggagactcgaagacccagatagtgcaataatagttcttctcgtgttaaccatggcgtttgatcagatatgatattgacttgctctcaatgaaagcaccaaactgctgacctcaaaaggtgatcaatggatagcaggatcttataaatttgatgtttgccacgtgttacacaattagaacttgaaagtaaagaacacgcagaactttatagatgtttggccccctagttagtgggtaatgacctactccccttttagttgtattgataccgtatgataatactattcatatcactataggtaggatctgatataacttccttaagaatacagagtaggaatcaaagatggcaaatatcaagtgttgagaatgctatatgggcgtgtgagagagtgagaaagagaatgagatattacacttagagatttaggcatagaatgaggttctagaacttaatgatttggaggctagaattagacttaggtcctttttaggttagagttaaggcccttcatataggggagcttaaaccctcatttacaacttaaatccttagatatttgtatatcaaattgattaattacaaaagactaaaatgcccttaaacatagatatttttcagctactttagtgggctattagggctcaatttgcagttcaatccgcagtccacatgtaaaattgtacaaagaatccaaccaggtcctttcctggttggtcaaacacttgtagggagcaggctggccagccctgaggaaactggtctgtaacaccctaactagcataggcatgtttacgtgattttaaacgtactgtgcanctcgttgctaatcaacgaggtttgtgaaaatcatgattggttaaaattttacttatttgattaaatacttatagcatttcatacaaaatactttgggatccgatttacaaaatactttacaaaaagtttactgttcatta

SEQ ID NO: 46488 - DNA, 1497 bp, Cannabis sativa
cttattcccaaacaagagaatccaactagagtcgttgattacagaccaatagcatgttgtagcacaatttataagtgtatctcaaagctgttgtgttcaagacttgcaatggtgctgcctaatctgattgaccagaatcaaggagattttattcaaggcaagtccatagctcacaatgtgatgattctctaggaccttttgaagaattacaagaggaaaaatgtctctccaagatgcaccatcaaaattgatatcatcaaggcttatgatactgtaagttgggatttcatggaggatttgcttgttgcttttagcataccacagaagtttgttcaatggattatgggatgcctcagagcaacatcctactctttagttatgaatggtagagtgcaaggtaggttcaaagggggaaaaggtttgagatgaggagatctgatctcctctctcctctttgttctcatcatggagcatctgactagaagcctccatatggctactattcattctaattacaagtatcatccgatgtgcaagggcttaaagataataaatctttgttttgcagatgatttgatcctgtttagtaagggttccaagctttcagttatggctcttacataggtgctcggtgattttagcactacctcagacttacatgttaactcaagtaaattccaaatttattttggaggcctaaaaaacaaggagaaacaagctattattgacaattttcaactagtagagggtacttttcctctcaaatatttaggagtccctctaaggctgacaaagtgcaaagctgaggactgtgggatcattgtcaaaaagattaagcaaagattacacacttggtcaagcagacatctctcctttgctagtaaggttcaattaattcactctattttacttggccttcaaaattattggatgagcatctatgttcttcctcatagcattactaaggatgttgaaaactttgccgaggatttctttgggtatgaatggtaccaggagtaagattcacattgcatcttgagagaaagtttggcatccgaaggcttacacaggcattggctttaaaaatggagtcaagtggaaccaggctactcttgcaaaatatatttgggaaattttaacaaagcaagatctgctctaggttaaatggatagataacatctatctgaaatcggtgagcttctagacttatgatcttaaactagactctagttggtattggcacaaattatgtcatttgaggaagaaatttttgagaactgagattcttaaagcatgtacatttggtcggtttaagacttactggttatacaataacaatttggtctaaaactaggttaattaccacaaagctatttggagttctttattagtgcttaaacatagggtttatattacagcaagtgattaactcccaccttctcagtagggataaattgaatcgatttcacattgagctgagatcaagtctatgcccga

SEQ ID NO: 46489 - DNA, 4353 bp, Cannabis sativa
  modified_base (3443)..(3445): a, c, t, g, unknown or other
ccgcctctaaatggtataatgcaattttatacctacggtttttatcaaaaaatcacctctaaatgtcaatttcgaaaaaaacgggtattttcacaccctttagcttcgctttttataactggggtgaaaaaacaacctctaaaggccaacattgtaatagtgttattttataattaagtatataatttaaaatttcccttatttttaatccctacattgtagcctaaaataacatctatagtgaattttaccaaaactaatggaaaaaggccttaaaaaccggctgtaatgcccaattttatcatagtgaaagtgttcaataaaaatagaggtaagttaatgttgtattgattctgaacaggaagcttattacaaagtgtagttttgcagacccttttctcctggaagaagattttacttatatagtgacactattggtcgtttggtcttgataaatatgtggttctaaacgttaaaacatactctgattggtacctatgaaatcgatcagaactggtggtcgagtggcagttcgtattgatacctgcgtgcggatttggtatccgctagcccttgtacaacgaaaagctaagagtaataacaaaatgtaaaaagaaagatataaacttaggatatgcctcgtcattgtttactcatgcatatgtatctatagctttattattccacatctactcgtgtcactttctcttcattcatctatgcattaaagttcaaattgtggggaatcgtatttctgagagatcgttttcaagcccagtcatgtagacatgataattaaatcagaaaaaaaaaaacagagaaaaacaaaatcagcactaattatttgaatatggatattctcaagtgtgttcagcatatgcccccaatattgatattattggtactctttcttctttcttttagcaacgtacaatgtgtatgaaggcctataaaagggttggtgataagtcatggaaaatgccaagcaagcacaagttagttcactaagcaaatccagtcatagggcatcccctctgtggcaagcattactttgattctatttaatatgggaagttttccttgcataatagagtcgttaaatcaattataatatctgccttgccaagaggagttgccctgtagctgttttggctttttatatacccaactaatcaatgaacaatctagttatgttattgcaagtttcatttcatcaagtcatcatggtacgcatgtaagaaagatattaatgttaatggttcatatctatttatatgcatgctagcattagtaccatatgatgagcaaagaattcctttactactacatatatttattaataatgaatagttctcactatttatgattacagctcgaaaagttttgaaaagaaaaatatatagtaagtacatgataatgagttggatatattaactcttgttcagaggttgggattttccatgataggatgtgtttgatctgtgttgagtatgataaatctcatcacaatctcttttttctttgtaattttacttattgcgtgttttgatgagaggaaaaagaagttcggaaagtggatatcgaggagtaaaatgagcaaatcaaaaagacacacgtctgttggttatggctgctagcttccatttatataaactattagtattgtttttggttttctagtttagtaatgaagattaaacttattcaccaagaaaatattaattcttgataggttattactattcaatatgactatatatttgatgggtgttcagcatgtttagatatatagtttatttctcaaagcttttatttttgtggtccacttatggacgatcaagaacgacatttttattgtagggaattgggtgacataattatttgttaatgttgttcaattagttttgatccatttaatttttgtatgtaaccttgcaaatgattagaaatttatatttttgtagaaactgtgttcttgttgatctatcaattttcagtaaattaactaaaaaaaaaagtaatacaagctaattaattattgtgtggctggatgttaatattatatattaattattagagaatatgttttaaaaaattttgtaaaaatattttgattttaaatataatttgaataatttaatatataatgatgaattatttataaataatttatatataaatattagaaaattattttttcatacagaggttgtgactttgtatagtattgaaattatgatcatcaactaaaaataaaatagtcagcaatatatatgtttactgaaatttttaaaaactgaattaaataaatattaggctaattaaagaaagtttgatgaagaaaatttgacactaatttttacatgattggggcattaatgagtattagtacaccagtcactattattaaacacttaactatatggagattacaattatatttctagaatgttaacattagaattcctaactctttgcataaaaagttaatgccatgtttatacgcaaattgctgatgggctaggcgaacccaaaaccattcgagttctcttttgtataaaaaattcactaatgaggtaaaatataatataatctaggctattgggtcgggtaggtagagccccaatttaagatttttaatgttcgtacttggaggtattgttgatggtggtaggtgtgcataagccatcgtggggaataaggaatgtcaaaatagtgggcgtccaccctataaggtgatctcctttttttgtgagtctttccaatgtctgacacgggggacaagccacttgatttcctgggatcttgtcaaaagtgtaccatgcaatgctactttcggtacactaactgatctcggatatcctcttgtattctcttcccaagtggcccctgagggaatcctcgttcagttcatacctttctacctgctaagtgttgatggttgatccaatttttcatggttggattcactattgagaaatgatcgctggaaaattgatggacgagataaatgagttgtggaataatggagtacccaccaaagattattcgagcaaaacgatctttacaatgcatgcagcacttttgtagacaatgaatgatttttctgctcgtagtagcttgtctagatagagtggtgaaggttataaaacttgtcctacttgtaatgaaaacacaacttccattccaataattagggcaacctcttatgttggccatagaaggttctttcaaagtaatcatgcaatgagaagggactctaagtttgatagaaatattgaaagaacacctgctcagagagaatttacttaagaggatatattagattaagtcaatgctctcaaactgcaaattgtaggatatgatcaacattttaggatcgtgaaacgtagaagagttgtggaagatggtaacatggaggaagaaaagtattttctacgagnnngagtattggagcacaaatattttaaagcgcaacttagatgtcatgcatgttgagaagaatgtgagtgatagtctccttgacaccattttacataatgataaatctaaggacaccaccaatacaagacacactactacaaattgactatttagtgacactctttagtgatccgcataaaagtgcgggtcagtaaagagttaagggtgagttatagtgacacacataaaaagactaaaaattcagtgatagtgttatacaagttgggtcactaaaaatatgagcatcaataaatactcccataatttctaatatttttttaaaaaaacaaatattaacatatagtgacacgccaagtgtgattggataaatgtgtgctgacgcacttggcgcttcactatatcataatcgaaattaaaaaaaaaatacaactattagtaatattttaaaaatatatttattttgagaaattagtgaaagacacgatagctattaattaatacactttagcatttgtttttaacacatttattaattctcaaatgaaaaaaaaccctagaaactatctttcaagtcgcctcctccctttatcatcgttcattgttgtgatattttgcacacgcaagtgcacgtatcgttacaagtagtaaactcacaaggagtaaggtcgatcccacagggattatagttaagtacgttaacattaaacttctacttctatctcgttaaatgaaaattcagaaaagatatttaaaaataagaaaactagtcagaagcaaataattaaagaaaattgacagttgataaaaattaggacttcgatttcaattgtttctattgattatggcctaatatgattatcttcctattattaatttctatgcaataatatcaggtttactaaggtaatt

SEQ ID NO: 46490 - DNA, 2602 bp, Cannabis sativa
atgactccaatgaccgattatttgagacaaaaaaatgtggtccgatatgctagcccttgctggagatccataccattaagctcatttggtatctaatgtcacttcttgtcttggtatcgaatatctatctattgttgtgcaagtcgaggcaaaacctaacatctcttggcaggagcttcaagatatgttgttaagttttgaaagcaagcttgaacgattgcaggggataaataacaacaaatctggtaatccttcagctgagatctagcttgaatcctacagcaaatatggccactgccaacataggcacaaaaaccagtcataatcccagttcaaatcgtgatcgaggaagctataattcacaccgaggaggcacttctcattaaaataataggggaggtgcaagaggaggaggtcgtggtcgatccaacaacaatcccaaaccaacttgccaagtgtgtagcaagtatggtcattctgcagcatattgctacaacgggtatgatgaaccatacatggaacaggatcatccagctcaaacaacacaaaatttgagtggtaacaatggtggacactctacttatgttgctactcctgaagttgttgatattgatgtgtggtatgttgatagtggtgctagtaaccacatcacttcttctatgtctaatctgaaccaaaaatccgactacagtggtaaggaaaagctaattgttggtgatggaaatcaagtggctatttctcacattggttctagtaatttaccaaccaatactgaaaaagtcttttgtgcttaatgaactactacatgttcctaagattgctaagaatttaataagtgtatctaagctaactgctaataataatgttttttttttgatgaataaggttcttgtattgctcaacaacattcaaaacatttacaacttacttgattacatccaaaatcatctttttccccctcctatgtgttctatgaaagtaaatatactacagtattacatttttcagcacatgattacatattacaaatccattctctatctatatctttggtttttttcagcattgtttctataattctgagtttgctctcccattgtacctgtttcaccactgctgtgacaagtcttactttttggttccacaatacatcattcctagcctcccaaatatgatacaccaatccggctaagacaaccttcagcatgcttctacgagttgctgatatggctttgttgttcttaatgtttcaaagcaggttgtggattgaatctgcatttgttctccatgacagccaggctttaagttgttgcgagcacttcctactgtaatcacaagcaaaaaacagatgactggtcgattctttctcttttccacagaaaagacatgtctcatctatgtgtatgtcatatttggctatcctctctttggtgtttaaccttccccacatgactagccaaaatatgaatttgtgttttggaatactaagtcgatcccatacatctctatgccaagttactttatcattgttgttgaagagcagtttgtatccaccttgaatcgtgtactgctgcattaaaaaactagcagcaccaattttctccttcaaccgattcttcactccaacaacttttttccaataccagctgcagtcattgggagcatcatactcccaccattgctgatctttcaaataaactgagtgaatccacctcacaaatagacaatccttcttacttgcaatgtcccacacgtacctgccaagagctgctatattccactgttgaatattcctaaagccaagtccccccgagttttttgtattgcagattgcatcccatgcgattaaaccagggcctgctcctccttgtattcctttccataaaaaggacctgcatatgtcttctatatctttgagtaacttcttaggtaagatcattatctgtgcccagtatgtgtgaatagatatcaagacaacatttattaaagttactcttcccatgtatgaaatattcctcgtgctccaagcacggattctgctcgccattttctcaaggagttcttgacatttggctttactaatcttccttgaacatataggaatccccaaatatctaaatggaagagagcttctcttaaagtttgatgcctcaagtattctttgaacatctccatttgccattccagagcaataaatggcagttttttgctcgttagggaggagactagaggttgtagaaaacaacttcagccctttaagcatcagcattatggaaataaaatccccattgctgaaaattaaaaggtcgtcagcaaaacagagatggttcaacttcatacttgaacatttatcatggaatgtgaagcctggccattctcccactttcttaagtatttttgataagtattccatgtccaatacgaatagcaatggggacatggggtctccttgtcgtaatcctcttttagcattgaagaaaccacacatggatccattgagtagtaatgaaaactttggagttcttatgcatttagtgtacgtgtgggtgtgtagaataggatatatatatatatatacatagggatatgattttgtcctgtt

SEQ ID NO: 46491 - DNA, 1910 bp, Cannabis sativa
taaaaaagaaaataaaatgtaagatcagagaaaaaagcaggtcagttggtttaagctctttagggaatttagtattggaaatgaaattttgtaaattaatcccattttgtaagtatattaggaaaaattcactaaaaatttgatgcaagaatacattagaaatatttgaggcctaattagaaatgtaaatttgtatacaggaaaaccaattttgtgttagatgaggtaaaataagcttaagaattatataaatgataaagcaaaaaagttaagaacaattcacaccttcatgttttcacaaagaacaggatcagaaaaccaagtctcatcaactactacattagggtttagaggtttgccattgattagaactgcagccatggaagatgttataatcactttctttacagatggagctttaacacatgatctcagaacattcaatgttcccttcactgctggctctattatttcagcctgaaaataacccaagaatcattacaaactgagtataatatatatgtgtgtgtatgtatttatatataggaatatatatatatgactgtgtacctgtggatcattggataactgaaaaacaggagaagcaacatgaaaaacaccatgacatccattgatagcagaatcaaaagaggcttcttccattaaatctgctttaaacatatgaagtctttccttagctccatctagttcaaccaagtgtttagtctttttcaaatcatctgcatatcaaaacaagagttcttcagccagccagaattttttcatacataaattgaaaaatgttggtaataagtgaaagaacttatcaatacaaagcttattagtaagcatttgttccaatccaaggttcgaagcccaaaaatgaaaaaaagaaaaagtgaactaacttggattacgaacagaggctttgacagtgtaaccatgttgaagtaagagcttgacaagccatgaagctatgaagcctgaagctccagtcacacacaccacctttccttctccactactcatcttctcttttctctttactataacttttttcttttttcaactagagaaatggtatttgtagtgagatttggtagtgatgctggagttggtgaaactaaaaccatatatatattgtacatgaatttctttttcgcttggttttattattgttggttgtcaaaatatgctttatatattattagcaaaattagaaactttggaaaatgtgtacaaaaaagcaaaattggatactcatattgactccatgtatgaataagaacacaaaacacgtgttagctttacaaacaaaagaataaaattgtgatactttgtagtttgtagcgatgaggtaggtaggaaacaataattctagacaattgattcaaggtaccactattatagtttaatttatgatcagaatctcaattatatattatgacttgttatgttattgatgttggttatcaaaatttagttgacaaagaaggcataattgcacaataattgtattcatattgcaactaatatttgccttttaaatttaaacgtctaatatatgtattatttttgtcatctaacgtttcaaacaagaaaaagaaatcaacgaaatgagagtgactttttaaaacaaaaatatcctttaggtagacctactttttttaaaaaaaaataaaaaaagaaatcccattaatgctaaatttttcaaaatcattctccctttctatataaggaagagacatacatacacaataattttgatttgggaataatgaggcaaaaaagagttactcatgtaagtcaaaagtgtcaccataagtttaaaaagacaaaccgaaaagagttgcttatgatctgttatgaactaaaaggattacttatgatcaagccgtcaaatgttggtg

SEQ ID NO: 46492 - DNA, 1276 bp, Cannabis sativa
catacaagtacatgacttatttattttatttttattctcttgacattgattcattatcttaattgatttttcaaattttgccaagatagatgtctgaattttttatttattttttaaaatgtttacttcatctccaacacccatatttaattttacattatataatgctctatccttaaatactacaattaatgtataatatatgatattttatttatcttattaaaattatttagtcatggataatacactccaaactaagaaatgcattgtagataactctattagttataaagtctcctttatttttatctttataaatagcctttttagactttagtatttgtatctctcattggatatgaccttaaatctcaattagagacatttacctaaaatgatcattttcactaagatgtttacttaaaatgatacacatggattattaaattcctaatatactattttgcctctaatgaatctattttatatctttagttattacctattaggttaacctaacctaaaatctcaattttatattcctagtttaactgaacacagatgatgtttttaaggatttttattcttagtgatgtaagttaagtagaatagcctataaaaataatgactactactctcctaaataataatataattaaattgtaataataatgataatttttttgttaatattttattgccctattatgagcaatgtttctttcccttggaaattatgagcaaggttagtgacttttagtatttaaaaattatagtaatacacaaacaaacaaagaagtgtggagtaaagtacactacatgttataagtcactagagataatatactttgaagcatacacacttaattttaatttttagaaaataataataaaggaaataaactatcatttaatagctaaacaactacaaacaaaagaccattgttatggagtaccaaggtgtctagcacgaatatgaggtgtcactttataattggttagcaattttctataatcgctaataaagtaaaatgagtgagacccgatattaaattgcaccaataataatattacatatcacaaaagtgttaagtgtcataagtatcttttatgtttatacccgatattgtttctttttcctagaaattaattatttgtttgtaagatttttcctttggaaattatagatatagtttagtagtgttaactcagaatttcgttaacataaatgaggctcttggcaattaataatctaaaatcaataatgtaagga

SEQ ID NO: 46493 - DNA, 2071 bp, Cannabis sativa
aaaatcacaaagattatgtctttatacattcatgtaaagttaaaactcagcatacttgaaaatactcaggaagacatgttctcgaattcctttataaattaaaggtaagaaagaatttttctgcttttcagtcaagaactttttcaaagtgaatagatttttataaaatactcaaaagtgaatacttggaataatgaacaataagctacaacacatttcattcatcaaggaggaaagagaaagtagttatttcaatcaaacgatatgagtcattgaaataataccatacattaagaatagtaaaattatgcaaactaaagaacttttgaacaagatgaaaaaagcaattgacctattatctcatgtactcaccagcttgggcaatctaattaatgctaatatcatacattaagaatagtaaaagaatagtactactctcaagactttgcttcaacatcacaagttcaaggattgtaggagaggagagactaacaaaatacaataattaaaatatttttcaaaattatatataagttattaagaaaattagtgaaagattaaagcaattcaacatacaaaataaatttaatctaattttacatatcttaaaaattccaaacttttattttatagtagggtattcaataacaaaatcaaatatataaaccattaactaaatcaatacttaaagctttatcattaagtgattcaaacacatttttactccataactactatgtaatcattaatcaaggtctaaatatgttgttagattaaaaaatttataagacatattaccaaaattatttgaagttaattaatagctgacctacctaaattgtatcaaataaaatagtttaaaaaaaaattgtatcaaataaaatcaaaacaaagttaacttaactattcaactatttaaacaaaaaatgtgagctagcttaactatgtgtgcctttttattgccattaaaggcatgggtgattattttgtaattattagaaaatgggaagtgctatcatcaacttctttttacaacttcttgattaatttctgtgtccaaaaatatatgtgagaatatttttttcaattttcgaaaataagtttcaagttttttaatgtaagcatgaaaaatgccttcgctgtagaatggctgaccttatagtcattccaaggaaagatcttgagttgcatgctgtggtgtcttggcacaattgaaacattaagaataacttgaaacatggcaaggcaatttctaatgcattgtagcaataaaggttcgaaagcaaaggaaaacaagcctaaacagaggtggaaaccccaccactaaacaccattaaaaccaatgttgatactgctacaaatttcacatgtggtcagttttgttgggcctattcttctgccttgtcggaccactacctcaatctgattccaacattagtataatattgtttgttttgggtctaagttctcacgcttttgtttttaggcattttcttaaacgacctcatacaaatggaatagtgtccatccttatatactcacgatattttctatttttagtcaatgaagactttgattacacacccaacaagtttagtaccagtgcgattgctagagatgcttcggggaaggttaatgcagcacaagctgactttattgatcagcctctctcccaccattgcagcacattgacaaaatctatacatggagggaattatgaaacagattagaaacttgtgttgcaaccaattctcatttgattaatttctgttttactcctagtcctaaggctactaatgtagttgctcattgtctatcaaaagtggctcttaatgaaaaagcctctgctatttgggataggacattgccctttgttgcaagtgaggcctatttggctgatttgtctattccactgaaattgcctaattggtgtttgttgaatgaaaataacttcaatttcctacataaatactttaataaaagaaaggtaaatagtgttattatcttaaataggattattgagtctaaacaggtagtatcaaattatggttttacaaacattatgctaaaa

SEQ ID NO: 46494 - DNA, 885 bp, Cannabis sativa
aatttataataataatgtttttaatttgataacatataataatattgttttgaataagaaaaatatagtgatgtgcttagtttacatactttcatttcacatatattaataaagacaaactaattagaaacttgtatggaaaagaaaacgtaccgtatttaaatattatatagtttcatttttccaagagttttttttttctttgataagacatttctcgaagagttagcatatataagagaaactagaccaaaaaaaaaagttattattatcatatattaatcgttcattgaaattattaattaattaaggccgacaaatataggcctacttcagggacaatgaccaagatatatcattagacgcaacatatatcttcaagtttttttttttttttttaatatttttacatttgatatgtaaaataatattgtccaataatcacattaaagatacttatttaatttcaattactgctcaaaagacataatagtataaaaacggttaaacaagttcattcaacaatattgtagcttaaacactcaattattgtacaaggtacataattgcattgctaataaccccttccatcgaaaagaaattataattatcagctactacataataatgatttgatggcaagtcattgaaagaagaactaacaacaaaacaaaaaattaaaataaaatcatgtcacacacagacacgattaaaatactcaaaattatatcacagagacaagactaattaaaatacttaaaatcatgtcacaaagacaagactgatcatagtatagcaaaattgaatcggaatagcgcaaaacacaactccgaccaagtcgcaccatgcccaaaaggcctagccaagaaaaaaaaaaaaaaaaaa

SEQ ID NO: 46495 - DNA, 2080 bp, Cannabis sativa
  modified_base (715)..(719): a, c, t, g, unknown or other
tgttagagaagttggttagtctgttagagtcctaactgcctacttctctctttgcttttctgttgatgattcctgtgtatataagcttctatggtactctttgttcattgaataacagttcactctttccctctctttttctctgtttctacgcctttctcttctctttctttgttacaacaatgtctaggaaagttaatatccttttttgctagacccacaggccctccccaagcttgggagtgctttggtcaggtttgttaatcggtatctagggtgaggttgatggttcacattaattttcgtcctctctttattcctttgttttgtttccgattttctagtgagggatgagtgttttatggtctcatttggcatctttaggcggcgattggcttggatcttacagggccaccgggtggtaacttggtggtcgatatgggttgtgttgtttcttggctatctgcactacaaaaaattttacttttagactacagaatttgtgactaaaagtaaaaaagttgtgactaattataaaatatcaatcttatgttgtgactaaaggtattagtcacaaaaattacaatttatattgtgactaaatgtatttttagtcacaatagtgactaaaactaaattaatgacaacttgtaactaaatgttatatttagtcacaagtaatattttgtaatgactaaaagtcacatttagtcannnnnaatttatgttgtgactaaaaggttgtcactaaaagtagctattttttgtagtactggcagggctttaggcttattttgggtcgtggggtgtgggaggcaggtgaggtcgagagtggtttttggctgagactatgggttggtagtgggggatcaagttgtggaggagtctttggaatagtgatgttgtttgacaagttggaggctattttatctttaaattgcttttttggtgccttattttaattttattattattctttatgtttgttttatttttataataatgataattttacaccaccctgctagaatagtaaggatcgatattgtcctggtgagagatttaagatttttctcctattggtttgttggtgtttcattttatgaatctaaatcgcttcagcaaggacgttttggtttatctctttgggcctcaaatcgggatttttaaatcttcattatggtcctttgttatgtgctccaatcttctccgattatgcataaaaatattgttggtcgtgctagtttccttatttatgatttaaataatggagttgacatatccctatttttaatggaagatttttgactaatattcattgatagatgaactctgtcagatttcatttagtttgaaaacgtgtaatatacttcacacttctttgatgcttgaccatgatgatttattggaaccttagttgttgttaatagggtttccttcccgtttattgtaaacaatttagttcgcctattatatttaattttgctctttgaattatatctcataaatttgtgtgatttacctattaatttatatttttttttattttctttaaagaaaattcatttattttcctcaaaaaatatgatatatatttggaataatttgtaaagttcatctctcgttgatgtgtaagttgtaataagggaaatttatattgaaagtaagcatttataaacatatgtaaatgctcgttattataattataatatatataggcgtgcctactagttattctacatgcagtagtttactaatatttataagttaatatatagactaatgcatgattgattaccaatactaagatcaaattcaatgcatcacgcatcctttcataattaattaaaatgtattgcaaattcaataaatatacatataaaaacgtttgtactaatgcataattaataataataataatataaaaaaggaagaaaaaacatatgcatcatgtcttactaataattcaacacattatcaataattttctttcgttgactttttgtaagaatcgtactttaggtcaactatgaacatctcatattcttattagatgggtttaaattaattatatgatgca

SEQ ID NO: 46496 - DNA, 1975 bp, Cannabis sativa
atatttaatatatatattatattattataaataatataacagtattgtgccaagtgtgttgtgtagtatgcatgttgttattctaatttttgctcacggacgtggcatgtccacatacgcaagattgatgccacatggagtacagcctgtcagtaagatgaccaagtcaccatgcaaaacgtaccagttgacgaagagtccaaataatcaagcaagacaaagggacaacaaaatggccaaccaggagggtttggccggagcacccctggcccgctatagtgaagcatggaccggctagcctccagcaaatggtaggccgatcagcttccttcctagcagacacaattggtgtctttacagctttgatcctggacagacaatggtttactctcaactacacgaatttactctaacaactcacaaaagtagaggttcaacttcagatatttacctattctttaggaataattattaagtcattatttatatatttaatatgtaaaaaagaggtgatatcttctcattttaagggatatcaacctactttggcttagatatattatgtaagctctctcctacataaatagcactaggttgaacaaaaagttctaagttctcattcctgagctcttaagttctagctctcgaaaccctatctctccctctctctcatacacaccacttgtagtgtatgagagactcagtctttctcatctcactacttaaaatctgcactacattctcactattgtaattcaaagagagcgactctagaaaccacaaagcttatgatctgaatggtattatctctcatatcaatacaacttaaaggggagtaggtcattacctgttaactaagggggtcaaacctctataaaattatagtatcaattttatttacttgttctaattgtttacacatggtgatctcaatcttaaagaaggctccactgctagttgacaaaatagtcaacattttggtgctttcactaagagtgttgtctatcaattcgatcaatcaccatggttgtaacaaggagaactccagccttggccatgccggtcattgacataccctctcccagggaatgtccggccaggttctcgccaacctaggccattcaaccaggctcctacagcatcagatccttctgtgcaagcatagttaaaccaaataagagacatgataaaaggcttagccgaccaaaataataagaccttgaactagataggtcaaagggctctccattcttgccatacattaatgccttgtccttgcctaagtttaatatgccagtatggaaaatgtatagcggaagagaagatcctcccacacacacatcaagtacttcgagatgcaaaaagatcttccaaaattcactcgtagtgtgcggtgtcggatatgtccatcgactctatcagaaacagtccagcaatggtacttcaagctgggtccaagaagattcaattcttgaaatgaattttcacgagaattttacacataattctcgtcctcgagacatataccatctcatctagaagaacttgtcaaagttaaatagagaccaggtgaacctttgaaggattctatccaaaggtttatggctgaggcaactaaggttagaggcctagcagaagaaggtcgttatccagccatacttgggggcatccttctattatgtgagttctagaaagatatctggaggatctcaaccaacaacatgaaggagttcctcgaacaagcagatgacttcataaaactggaggaatccgttaacaagcccagacaagagggcaagttagcaacaggtggtctcagggtgctatgcaatcccaagacctaccaaacatgcaggctaatacaagtagtgctatccagccctccaccagcaagaatattatgggcaagtgcaaaaacaacaattctggccaaaacagtggcaaaaaagggaagtataacacttctcttatgcca

SEQ ID NO: 46497 - DNA, 2283 bp, Cannabis sativa
agtattgggataagtattcgctagccaatcgcaagacgatatgtctagaggtgctaggcacaactgatgttcaataataatgctaaagtaataattgatataatactagtactattacttgtagtgctagtattgggacaagtatgcgctagccacttgcaagacgatatatatctagaggtgctagataccactgatgttcaataataatgctgaagtaataattgatatagtactagtactattacttgtagtgctagtattggaacaaatattcgctagccagtcgcaaaacgatatgtcaagagtgctaaagaccagtaatattcaataataatgctgaagtaataattgatatagtactagtactactactagtgctagtattgggacaagtcttgctctttaatccaatcacaaaagctaactattgggagccacaaaattggagagccatgtttttttgccaggtcattatgaaactatcacctctagatttttttgcacttgcattattgggtcgacctaaatttatgtatatatatatatataaattaattatacataatattctttcaaacaaaataataataatacaaaattttggttttggttttgctattaaggaaacaaattccaacaaatgaaaattattttagtttgttgtgtgtttttagcacatatgcaatcactatattttctcagattctcgactgattttactaaataaaaaaataaaaaatgaagtatgaatgtaattaagttacatttaggttattttttttagtagttaaaactttgatatttcctttacatgtgagtttaataaaagctaaaaactacatgaaaatacattgtaaatttcaacccaaattatagaataataattatgtaatctctctagaagtaatgaaatatgtttagtgtgaacattgtcaagttttttttttttttttttgatatgtctcaacttattgtttaagttttctatttttatgttcttttcatattgggatgataatgtttttttttttctttagagaaaggaataataatatttttataaaagatatatatttataggtacccatgaatcatcatataaaagctgcatgttttcatatgtgaactggtttatattttgtcttgtcattattgataacttacacatgttattttcaattgttattttatttgtttatttgtttatatatataaatattgtggctaggtttgaaacatcccaaatgattaattatgatatataaatttgaaaatatgaatttaaatagttaagtgtaataagtcataaataataaagaaaaattgtacaaatgcatcctttgaaaggtcattatttatttgggtatctagaaaaaaaaaaaatattagtctaaattttttttatgactatatacgttgtagttatttaagacatgttgtaaaattttgaaaaattcggaaaaatttaacacgctaaaaatagagttcaagaagtctgttgcacgcgtgatttttttttttattttatacacgtgtaaaatagacggtttgaacattgaatttcgtattgtaaatcatttcgaatttcttaaaattttacaagatgtctcaaatagctataacgtacatgactataaaaaataataggctaagaaattcttttagatgttaaaacatttaggaattgcatcaatacacctattttaacggagtgcattgtaaaagcatctaatagtatataaatatttatataaagagggctagatagtcatataacagaaggtaagtctacagcgcatccttaaagtggtcttttggtagatcttctatctttttcgacattaatgagagctttctattatattttttctcttgcatatattgtaactatttaggtttacttgtaaattttcataaaattctaaatagtttataaatattaaaaataaaatttacatatttcgttacacacgcgattctattatttttcttatatacgtggtaactaactgtttaaatttcatttttaatactgtaaactattcaaaaaaaatttaaaaatttacaagtaattttaaataactacaacatatgcgatcttagaaaaataaactaaaaggttttcctaaataccaaaactaacaaaaaaaaaaaaaatctaccaacaccattctttaaaggtatctactactaaattttcaataacataatatacctcactattaataacataaattgaaatttaaaagatgaatttttttttgtgtaaatttctattga

SEQ ID NO: 46498 - DNA, 2041 bp, Cannabis sativa
tcgtccctcttagagagatttcttctatttacaagtagtaatcttgctttaagtgcgactctaatcaaattattcacatgataaaccaagaaatattttgctcaaagatacaagcatgtcgattctaccaaataaaataaaatattgtcgcacaaatagccgcaacaactctatgaagcagactgcgatcttgatttgcattcaaccacaaaagccaattcgggtaagactcaggccaaatggcattgtcaagccaagaatggatagcatgcatgagatgcttgagaaaagaacaattaaagaaaagatagttatgacagtcaacaccaacctcccaaactgggcagctagtagaaatcatggtaatacctcttgccaacaggtgatctctggttagtaagttattatgagaggcttgctaataataaatctatgttttggtatagataatctacactaaattattttataattatcaatttggcataaggagtaaaaaagaattgtaaagcttagtgacccaaaatcctctcccttttccaatatctagaattgtgtctcgagtaaaaacattcattagattaagaagtttgcgcacatatcaactcacatcacctttcttatcaaccactcaaaaatcttgattttttaaatagacagcattgatcaatttaacccacagaacatcttgctttgttgaaatagcccaaatgtatctagcaatcgaagctttgttctacttggttccttcccgaaaacccaaccctccataatttttaggtttgcaaacaagatcccaaaaagcaagatgcatcttactagagttacctttcacaccccacaaaaaatctctccagagtttattaaccttcttgactactttctatggaagcataaagatactcatgcaataacaacaaatgccccgtaacacttatgaatcaattacattctacctgcaaatgagaggtgcctacttgctagctaagaagtttcatttgaatcctttcaaaaaaataattacaatctactgcttttcactttattggtctcattgtcacaccaagatattgaaagggaaataatttaaggccagaacatttaacaaatacttcagagcaagaatatgatggttgatttttagaggttattgtaagactataagagtcaattattggtgttataatattgtaagattataacatcaaattagccttgtaacacaactaactcctcatacataaattatcttaattcattaaaacaaaattgtacttagaatagtattcaaactatgaaaactaccaagaatttgaaactctctcaagtatctagaaaacaaaaccagaaaccacagacaaaaacattgagaaaaaaaaattatatgaaagggtctaataaccgcctttaagatcgttgaccacatcatatggaatcggagtgacagtttccaactgagcaccttcgaccatgaaacccggtttggggccctctggctgtctcttggtgctgataacagtgccctttgcctttgcctcagccttcaacttgtcgttcctcaatttcctgtttctaaattcctcggtacatcttgagggctggacatgctccacacgaacatgaatcctcttcttgatgattcggttgccaacctacattcaagcacaactacagtcaatatcgagatcaaaatcacaacaataaattaacaactagagtcaaattctagaccattacaataagaaatgctattatatacaaaaccatacaacatccatttataattttgatgacaataaagaaaaacagagtcagtagatctaagagctagaacacattagttaaagtttaacagacaaagattgcaaatttccctgctcaaaattggatacctcttacacaacataagagtacacattatgatacaattacatataatatatatttctatatactctttgcttgagattttgctatgatatgattatcagaacaatcaaaatagttcagccaatgatatatgagctaaagataaacaaaa

SEQ ID NO: 46499 - DNA, 1858 bp, Cannabis sativa
  modified_base (1570)..(1575): a, c, t, g, unknown or other
ctattgcaatttaatttttttttgctactgcaattagtattgtttgtctatatgatatagttttgagtgttttagttttatctctgatacatgattttaagtgttttagccttatctatatgacgtggccggttttgttatgttttgttttattgtttgttcttcgatgactctctatcaaatcactgttagtggttagggaataacacgttctttgcgattgaaggggttgttagtagttgagtcacataccttgcacaatagttgaaggggttctttgcgaatgaatttgttgcaacattttctactattgtgtcttctgagaggtagatgaaactaaatatatgtgttcttaaggttaactgtgatgctgcaatctttttgattttattttatttttagtttttttgtcaaacgatttgggagttagatggttgattattttgctcatttttctaattctaattccggtcgtatctctaataaaagagatctctcgatttgattgcaatatgttattttaatattgttattattaaatttaatgatttattcccaaaaaaacaatatattaaatgttgttggtgttagcaatgataattttattgtaaaattcctataatgtcattggttcgtatcctatacatcttgaagaaaacaataaaataaatgttacctatatatccatttgaatagagaaatgttaatacttagcaattttgtaatgtgtaacattattattggtgcaatttaattattggtgcaatttaatatcatattggtgcaatttaatatcatgtctcactaatttaatatcatgtctcacttatttaatatcatgtctcacttattttaatttaataaaaattataaaaaaaactactaactaatcaaaggatggcactccaaagtgatgttaggcactttagtgccctatagcaatactaatttgaatggcatgtgcacatagtacaataagactatgtttggctggaaggaaggaaggagagtaagaatgatagtgaatctatagggtggagaggataatgactctctcttgtgttgtttagtattgggagtaaatgtgtgaagatggagaggaagttatttattgaaattactatattatcctaattagtatagatatttgtaactttttaaaggataattttggtatttggtgtgtatattttgtctttttctcaaaatctttctaaaatgaagggattgaatttttaaaatttggagggagaaagtttctctccacctttcctctcccttcctttctacttcttaccaaataagggatttgttctctccttttcaacccttctctccggccctcaccatccacctatccatccttccttccttccaaacatacatagtgtgaaagttgtaaagttggagctcagaattggacgaaaaaggattcgattagattagactggattggacaaaattggattatgcagaaattaatcatgtgtttagtttaagaatagactagactattttatttatttcatttttttttttaaaaaaaaaaacttaaattaaaattaaaatnnnnnntaataaataaataaaaataaataactcttagcaaaaataaaaataaaaataattaaattataaaataaaaaataatatatcacatataattaaatatatatcataaataatttatcatatttttatttaataaataattaaaatattaaaataaaaaatacttaaataatattatattatttatgtcaaaaaataatttaatcactaatttaatacaaatattagttttctaatatattgatataaattttctaataatttaaaaagaatatataattttatt

SEQ ID NO: 46500 - DNA, 1318 bp, Cannabis sativa
tgtattcatctctttcattatatatccatcaactatataatgaatattacgtttgcataatcttcaggatatatgcaaaattttattgagtacgtataatcttcaggatataaatagctcattctggattagtatgacaaaatacaaggttgatgtaaagtctttagttagatgataaaattaattatatttagtatttttgaaataaggtgtaaaaatgtttttaaaatggggaaatttcatatatatatttatgggaaaataccattaaatttaccttttttacggaaaaaaaaataattattcaaaaacgtatagtatttaaaagtgtgcaagtattcaaatatgtgaaaacaattcattcaaaaaaaaaaatatgtgaaaacaaaaattatataatgaaaaaagtactttaaaaatcttcatttttgttccaaaaaaaatgattatcttctccaattctctctcttctctgaatctatctcttcgtcgaatcacattcgcaatttttctctttgtaaattataatagctttaatttgagcttttcttttcttagttgcggcggtttataactgacgctagccagcatgttttaaattgacacaaatgtttaaaatgtcaattttaaatcaatggaagtactattggtcccaaattgacaaataaaattgtgtgctctttttgcgttaattttggcagttgatcgatgcaaaaagactattttataggtgtgtattcaaacagtttttgtatctatgtaaataattctacaattgtacaataattaattatttaatttgaataattaaattagtaattataaacacgaaattttaataaattttttcaaagtttgttaagcgatcatccaataatgttgtggattattgtgcatattttatgggagagcaatatttcttgggagtttatatgtatttgatgaatgatttaatttaatgaagttgtcattttatataagaaaaaaaaatgaagttttttattctttatccaattttcctaaaatagtggtatctcatataaaaaaaaaagttatttagaatttttgcccctgaactataacttatgcattattatgtcccttgaattttttattttgttaaagatagtctccaaactattcacaggataaaaaaagttgtaaaatttttgcccgagtggggttcctctgtaggggttaccttcttcttcttcttcttcctgcttgacttggtccctttcttcatcgtgttctattatgaaactgttgggttttatgtcctaaataaaactcatatcaatataatcagatttactta

SEQ ID NO: 46501 - DNA, 1069 bp, Cannabis sativa
  modified_base (49)..(71): a, c, t, g, unknown or other
  modified_base (518)..(519): a, c, t, g, unknown or other
  modified_base (1037)..(1044): a, c, t, g, unknown or other
aatataattgtattatatgtattcgacttttaaattactattttctttnnnnnnnnnnnnnnnnnnnnnnnataattttttaatttttttataaagatgtatggattggattggattggatagattacttttacatatcaatcaacattcaatctgcacaagtgcggattttgaattttctaatctaattcaatccgcaccgagtgcaaatatttgcacttagtaaattagatttgattaaatcgtacgaattaaattggatcgtacggattagattagattgtaacttagtaacctaaaattatcacttaaggagcaatttatggagtgagtaatagtctttacacaaacaaacttgatacacattgtagtccaccttttaggctaaacacactctgcctgaagggcccacataatgatccaagagatcttgaatctttccttagagcaattatgtaagtatcttgaatctctgtatcatcttaaaatattatagaagtatatatatatatatatanntatatatatataaatatttatctacattattttttattactttatttttaaaattactctaatgcagtaattttaaaagtatagactcacattattatttaatatattattaatttcaggacagattgcaatgcaatatttcagcaacaacaaaaagtttgaagagttcactatgcatgatagtgttaccatagaaggtattaattaattagtatggcatgaaaagctcactggttaatagcatatgaaaaatattggcaaaatagtcatagataacatcagatgtataacatcagatgtatcagttttggaaatgactttgataccagctacattaacaaggaattttatcttattatttgctttcctaccccaggccttaacataaaaaaacttagagcatgtttggtattattttctgttttttattttaaaaaatgagaacaaaaaatatttttgaagtttttaaaacacaagccacgtttggtcaatgttttttaaaaacaatattgaccaannnnnnnntggtttttaaaacagaaaacaacat

SEQ ID NO: 46502 - DNA, 1564 bp, Cannabis sativa
ttgaaaaaatgaaaagaaaaagagatgttgcttaaagttcaataattagcaggacagagctcaataaagatccaaaatttaagcatattgattcttcggtccatacaaattagttgtttaagcagttgcttaaaccacttatgtaaattatgatgtgggtggtggtttacaaatcagtagcattcttttcaaaattttaaaagagtattttatctttaattggtggtcttgtctgattatcccagcttaatatgtctatcaaacaaaaggcaagattatgataaggcatatttatatgtatggggtctacaagcatgggtataaataaatatgtatatctatattttgaaaatgacaataattattaatgagataggcggtggagtggagtaaggaaaaataactataatcagtcttgctgttcacatattatatatgagtattatgttatgtagtagctagccagtagccacgggggaaggaaaataactttatgacttgcgacaaagtaaagggaaataagccaacaagggagcagaacagagaaaggttttccaaagaaagatgatgtttttggggaccctatcttctctcactgtttatttactttttcatctatataaacggtatgatggtttccccttcaaatcaccatggcccatgtgtagacttttcttttttagtgaaagaattaaagttcattaactaaaaaccaaagatgggagtcacagggacactccttccacatgatacaaattagcatcgaggttagaaattttaactcttgtagatagatcatccgcaaatgaatttaacatctgacacaaaaaaaaaaaaaaaaaatacacatattgaactctttaattaactttaaaaaacctaaagacacatgaagaacactccttcggaggacaaactaacttagaaaagctattaaccaaaatcatagagtcagagaagatacgaaccacaccctgagagctatattgtaaagactgcttagctttaattttgaaattagcaaataattagggttaatgatgaaagttgattattagttttgaattactaatttacgatgatttatttgaattcagaatgcattttatgtgtcatatatggaatttcataattttgcatgttttgtgcccagcaatattggaacgcggtgtttggctattagaatcacatcctattgtttttttttagtatagcagggcaatatagttagacattaggaatgtcagaaatagttaagaatttagaattgaccaaaatacccctaaatgaccctttatgacttatagtgtgggaagggcaaaatgattattttgcctattagaaatttgtcttttttgtgggtttatattatgtttagaaaatttgatttttattaatgttttaagctgataattaataaaataatacccttttatcattatctcattttacaaaaatattaaattagaaacaaagatacctttctctccaaagctctctctttctcgagctccctagaacagctagggtttgtgattgttttttaataattgatggaggtttt

SEQ ID NO: 46503 - DNA, 2502 bp, Cannabis sativa
gtgcccgcttttgaaaacacgtagtggctccccctgcgcggcttaccgcttaacggccatcacttaagagtgatgggaggccatggttgaaaagcaatgggtaccagctcttttataggttcttttataatgaaacgttagaggaatgaattgataagttggcttttgagagtacatatcgagatgttccctatttaagtgtttagaagttttaactccaagttcttgttgtactcgccagacttgtatgtacctttattatcatcttgtaacatggtatgaaccttctagtttggtccgaacatacttgttgcatgatctttgctgtcaaggaagaatttctttctcgatctgtttgttgaagggcctggaaactctttgtggacagccatgctactttgagttggcttggtctcctcttctttcgcttttgtcaagggatgctactagcaagatattgtgtacctcttggtcactgcagaccaaaagtatgagagcaaactattggtggatcgggctggccaaggcaagactaggtggccaaccaagtcattgattctatggctgaccaagtcttgtggaggtagtggtcggccatattgatgattgtatggccaaccttccagctaaagtcatggttgcccagccttcttaaggccaggttgatgctgtcgtttgatctcttctgcaatcggttggccttgcccccagcgtaattgtcgtagagcctttgtgcacttctatcaatagctattcagatctttcttggtaacgctccctagaggtggtgttgagataccatgtctgtgtgttatgctattgtaggattggacaccttcttgtagtcgtcctcctaatccctactctgtggcaaagtctttgtttggaggtatgttgctgtaggtgtatccatgttgattgtctagcatgtctattccttttgaaacagagggacatagttctttgaggaaatgagcaagtaccaagtttaccttagttgttaaggcacaactgggtagttgagcgagtgtgttggttgttgtgtcgcctttgggggcttgccttttagtgtagcctttgagctttgttattaacagctccggtatgccatcatcttattgtattgagctgtacattaggacataacctacgactagctgagagtcgtggtgcatgtctaggtggtcagcctgtgttttgtgtgctagcctggggccagcatttggagcttcatattcaacctcattattagaagctttgtaactaaccttgttgcctcgtgcctcaattgcccccaggtgccttgggggccatgcctgcattgggtgttcaacgggtttcatgccatgaaaaatatcttgggttaccctgttttccaggtcgccgtaagtctcgccttttccaatctattattgacagagtgtggaataaattgtttggttggtaagccaagtcattttttgttagtggtcgtagatttttactaaaatatttggtttaagcgattcctacttatgttatgaatttgtttagtcttcttgtgaaacttgttaatgagtttcgtcatctttgtgccggattttggtggttactaggtggtgttgatgatgatagtaggtaaatgcactagtgtacttggaaaagactatgttggcataaaagtgatggtgggatgagattttgcgattttttgttttaaataaggctatgttggccaaaaaagcttggagatcgtattcttatcctaattctttggctgctcaagttgttaaaggggtgtattttccttagaagaattttttgtctactgaagaagcctctaagggttcgtatatttagaaaagtgttctctagggttgggagatttttgttgatggtacccgttggcttattggtgatggtagcagggtgcatattcggtctaatatttggcttcccaggtcgttacagctcaataatagactcatttggcactacaacacttctggtgcttatacagtaaaatggctattggaatgctatttgtttgttaggaagggggaatttgcttcttcaaatgggcccttgtattggtggaactatgcataatctcaccatcgtggtgttccaacgaattagaggtactcgctatttaatttgggtgaggaaactatttttcatgttctttggggctgttctagccttaaatctactactgctactattttgtttgtttcttagatgaataatcagtctgatatggatttctatgctttcattcatgaccatgaagccattttgcataaagacgagctttgcttgttgttgcttgtggtcgcattggctgttcttcaaggattattacttttttctcggttggggcttaccaatgttctagtagaatgagtctgtcaacgagtttgtgatgcttttgttggattaaaatctctaatgtgggttcatatgtatttgtgtgtattgctatataaagtttaacccaagtgatcattttagtaattgtgg

SEQ ID NO: 46504 - DNA, 1949 bp, Cannabis sativa
ggtaaaatatttccaacatatatcgcatcgcctaaccaggagagttcgttccacaactatatgtcactgctgctcgtccctaagcaggatcaccgataagaatgcattgcctaaacaagcaagcctatgccacaactcaggactaacatgtcattgtcgcctgtcccaaaataagcatcaccgacaggaagaaacctaacaatggtttcagtctgtgccatagcctatcactaacatcacctaatcaggtgcacttgtataagacattgcctaatcaggcaaaccgatgccatagtgtgagatccatatattacatcacctaatcaggtgtgcttgtatatcacattgcctaatcaggcaagtccataccataatctagaatccatctgtcacatcacctaattaggtgagattgtatatcacattcgcagtatcactacctaatcagaacgtcgataattatgaaacctgtcatgccatgtggtatattatacttttcttacctttgatctagtttcatgcatgtcagccaaactaagatgagaaacctccccaatgatctcatccctgtcacaataacaggtaaaccaataagtgtttatcctaaacactactgaatatttgcacagggtaatctatggtttcctacaaaaactcatggtacaaatacactacaataaaacttatatttggactctaagacatacaccatattgtagagcttgtcacaagcttcaaaatggtatatagaacgtccaaaacaaacacctgagttaaaagttatgacaaaaatacgattcttaatttcctcgaaattccaagaaacgataaactagttgggaaacggttaactgcttcccaataaaccggttaactagttgcaccaagtggtggatcggttcgcagatgcaggggtcaaaaatcccaaatttcccactcaccaaaacaccatcaaaaccaatccaaatcattctaaacttcacagtccacatatataccataaatacaacaatcctatgcaatagaaattaaaatcaagcccttaaagggaaaatatcgttaacgctcagactttagctttaaaaaattgcaaactaaatttctaactcaaaatcaactcaaattcaacaattaaacatcgaaactagtcccatacctaccctagaacagctctatgaagtcagaatctccataaccactctaaatcacaaagccactatataaaactaattattttaaaattaaaacaaaaccattccttaccttaagctttcccttttcaaaaatttactatcctttactacaagagattgaataactaggttttgagttgaaaattgaagaaaatcagttagtgggggtgacggtttcgttgcactgaaagaggaagagtttgctcataagtttttgtttttaaaaacatgatatatatatataatatatatattaaactggtaagaataacattattattaataatgtaataaaaataataatataatattaataaaattttattattaatagttatcttattatttcttactcattaagaaatttttaattttagggtatttggtaaacttcgagtaccccaaaatactctagtatttctaaaattaacttatctcaatgttgaccttgaagagtgatcaaccgacagtggagtcgtatagatctaatgcttgccttgtgtgtgcagaaataagaataagaaacaatagacaacaggatttattatagaggctcaacccccttgtgatagtgggtaatgacttactcctttttagttggtattataccaagagaattactatccagattgctataggtgggatctgctatagtaccctttaggattataatatatgaattagtgtctggcagaacttaagtgttggacaacctagggttctgtgcagcctaggcttgggcatgtgagagagtga

SEQ ID NO: 46505 - DNA, 1254 bp, Cannabis sativa
tatttatgttgggagttaagttcaaattttaagtataatatggtataaagacacatcaatcactttttatgtttcattcaaaaaaaattcaaattttatattaagtttgaagtacgtgttaggtgaacaaatagtgaatctacccaccaaaaattttgggaagtgttcttagttaaataacacaataataaaaatggtaaattgaaatcaaaataaattaatgaattgtggtactcaatgcaaatccaaagtgttataaaggatcacatgaataactccatcttccactgcaaccttataacaccttacccaagactgtacattaataaataaaacagattaattataatatattttttcaatcatctaactctaataaatttttcccttaaaaataaaaaataaaatctaataaatttttcaaaaatattataagtagctgccaatatattatgtcatgtaggttggcaaatttataatgttagagtgactgaaattgtcagatataaattatttggttttggtttgtttattaatatttgtttacctaattaaactttctctggtaagacattcaaaaataacataaataaaaaatacatgtttgaccattgctcgtgtaagtgtataacggtataaggtaatttatttaagactttcattaattgctaatatatacatataataagaataatattataataattactgttgttgatggagtaggatagttttattaagagcattgctattaggtactagtggtgcctagtacttttgtgacatgtcgcgttgcaattggctagcgatacttcctaaaagctattatgttaaattatatgggacccgatatttagatgttatatcgatattgacacataaaagggtactagacactactggtgccctttagcatttctcttttattaatactcgtgtgaagtgagaatcagttttgatgaacattattagagttaaaagattcacatatccaattcataattttattaagggtaagtaacggtataactatataaaattttaagtttgtaagaggtataaatttaatgtttatttttataaattgcataagtatcaaatgtttgtaaaattgtaattttttttagtttcgtcagtaccgactctattttaaattttaataaacatttggaagtaattgatattacatatttctatttagacctaataatataaaatctaagctttatatgtgtcatgtttaagataatataa

SEQ ID NO: 46506 - DNA, 2109 bp, Cannabis sativa
gtatttgtgtttcagtgtaatattcgtatcaattggattaaattttatattgacttcaaatgtttggtagaaattaaaaaaatgttatcaacgaaaaacaaaaataatacggtccttcctcgaattattggcaactaaactatctatcttgataaaggccaactaaactatatttaccatgtcttatctgtaatgaagaacaatgaaaatataattgttagaagcaccattcaatactctactatactcataaagtgtaacttcatgatctcttggtcaccttaagataccaaatagcaataatagtaaaacgtacccaactgaggtgttggagatggaagtccctttagtgatgagaaatctgccatgggtactcagccagggtcggtccagggatttcatctatagctctgcaccttgtcatgggcgcaagcaccaccctgcccaagtgccaaccacaccaaaaataaaagcaaaagcaaaatcagttcaaacccatatctaagtcctctgagtttttcaaactaacaaaaatctatcgaagtagatttgggtgactaacctgtgagataggttgaagttggccatcttgaaaggggaaaataggttggtccccactggtgaaatgttttctgccatttgagctggagcttaatttaaacactacataatgcactacatcatcattggtgaagaaggaatggcgacagattagagagtagagaaagagatgccatggtgcgactgtgcgactgtgtagagagagaaagcgagcgagaaagagagagacaagtgctgctgtgtgtgaatgtgatatttaggttaagcttatattttaagttagggttttttaattgggcccgaagcccattataaaatttaaattattttgcttcagtggataacaatcgcaaactttttaacttctgtttacaactgaagccaaagaaatttgcgtctcttttccaccgaagcaaaatgtaaaagataattttcaaattttttactttttgcctcggttcgtcttttcgcgttagtgtagtagctgacactaattatttttttttttgcttcgattatctacaaaagcataaaatatctgcctattttttacttcggtcaaccattttagggagacgcgttgaccgacgcaaattacacattttgtagtagtgaaggttctaataacatatatatatatatttgttgactgctagattgtagtagaggtcggtcgtctctcaaagatgttaattgatcacggatacactatgtctgagtttggtggtatggaggaggcgatgaagagtctccgggagttagaggagcagaagaaggtaatccatgatgaagcccaaaaaaggagtctcttatggagcagaaccaccgggaggcatcgaagaccagggatgaggtttttgttgcagcgaggagggatctttgagatttcagggaagaagttcaagaactagctgccaagctaaaatctttggaggagctgcaccggactgatttggaaacaacaactagcctgattattgaagtaaaggagctccgtaagtttaaggagcaggatcgcaaagaagcagctaaagcaaagagggatgccatgctggccccagtcacttgtcaacactgtctgaagcgctctgatgacgatgtgttcatgtgctggaaagctaacaacttcgaacctcgtctccctttctaccctaatcctgaggaagtattggcccatttctaggagaagaataagaaactttaggccattctggaggaacacaggggtccccgtcttcctcctcgggttaactaaatgatttgcttgtttttgtttctttattttacccttcccctttcttataaaacaattctatattctttttaaggggagacattttatggcccagccctaggcccttttcatttttttttttggatattcttgtcttctgaacaatttgtgcgtctttggatttatttagcatcttacttttcttatgttcattctgtctatatttatcctgtttatattaatcctattttttgcttgtatgatatgccttaatacccccctaagtgacgtgaaaagaaattttgaggtcactt

SEQ ID NO: 46507 - DNA, 1793 bp, Cannabis sativa
ctatatcaccaagacttttcttttctaaccacttaccacacctattatttccatccaaatcgagtttcaaaactctaaaatttttggtaatgcgttcatcataaccatcttcattccaaaatacctccctttcaacacacaataactctccagtaaacgatgaaaccacaagatatcttcgtataaataaatctcctctgagtcttcgaagatttggggcaataaccaactccatagaaattgttgttatttcagcatttggatttgggtactcaaaacatacaagtgttccattgaatgtaagagcatagaacttgcccttataataagctacatcttcaaattctctatcaaattgattatctttaatctttgtccatgttgtgtctttcccatatctaatgcaagccaattcacatatttctccatatatcacaacaacaatgcactcattattataattattgcttaataatggactagctgtaattaaggccttatttacataatattgctttcctgcataatagtagtcttcattatcatcaaaatattcatcttcttctaaataagcctccaaatgagaaagagttggaggaagtaaacatggaagacttacttgatgactagttagtgggtttgaagatgatgatgatgatgatatgaaataataaggtttatgaagtgttatagtgtagtcttcattcacaactactaaccaacctagtgaagatccattaaaacgtttgctatataataaagataacttcagttttaaattattattatgaatagcattgtatacactccaactatcttcttcttggttaggaactagaagcattggaagataatggtggtgcaacattttgttgtgtttggtatacttgtctttaatggccaaagaatgccatgaaacacacacacattactcaaacttgaaaaatctatgcttgtctccactttctccaaaattaattctacaacatgttttggaagtcctgcccaatctatagaaaaaaaaaaaaatatataagaaatgtactcttgttctgtttttattattatgaattaataatataaatatagtacaataataaatatatgtaaaatatagtacacacctcgaacttgatgatgattcatggttaactctcttctctctgggtttttttttttttaaaaaaaaattgaaatgatcaattaattaagatttttgtttgacaagcatcaaacacttgatgatatttatagtttcattatatccaactaataataataataataataaataaaaaaaagaaacagggctttgagcacaaataggagtgtacaacgaaaattttcattttaaaatttatgtattttaaaacgataaatatctctatattttgtttaataatacttaactcatgaaaatatatcaaagtttaaattttgaaattttttattttgataatgtgagtaattaatttattatttttaatcaatttatttattataaatatatatacattattcttagggttttgaatgtattttgtttgaataaattagattagagttcaaatttcagttaaatttcaatatacaattttattaattgttaaaatatgttttttaaaataatatctatcttccttatgtatattaattaaatatattaatatactaattaataatgaaaaaattaatagaattgaatcaaatttaaatttaaatgcttgataatttaaatttaaattattaacgtttaactttttttttaatagtaaaaatacatttataaattc

SEQ ID NO: 46508 - DNA, 1552 bp, Cannabis sativa
taaaaatacctaccgatgctagaacatcaagaacatgtgaatccttcatggcatcagttgcacttttcattaaggcctgacaaattttagaagttaaaaatatggataagaccaaaactcaagctctatataaaaagaggcattctgcagggaaccaaccactttaatattctccaagcttattgtgccatttttgtttggttccaataaagcgtattgctctttcataaagtggagctcatccacagtcaatgttttggacagggcctgcaaggaaaacaaaagctgttagagcatgacgaacacatgtaatgtgctagaacttcttatctgtgaatatatcatgtacacacccttaaagcagcttttcggagcgatgaagaacgcaagtaaatcttcatgagtttgaaaatgagtatatccaaaggaactttgacatcactctcatttttcagccatgggtgacctgcaaaaagaatttgtgagcaccggtgatcaaacaaacatgaaaatgaaatcacattattaactatggacaaggaactcacatagtgcttgagcggcactcattctttttcgtggatccttaatcagcaggcgcttgacaaagtcttttccctcagtagatagagagggccaaggctcttcatcaaaacctgggtcagcttttagaacagtacgaaatattccggattctgttcgggcccaaaatggcctgctaccacataagagaatgtatgcaatcacacctacactccaaacatcagcctctgtgctgtaggctctatgtagaacttcaggagctacatagtatgcactaccaacaatatcattgagcctttcatctgaaaaggaaaatgtgtcatgttaactgtaagtcactcactcataagataaaataagcacatgctacattaacatggtaatgaagtgttcacaaacctggtttgacaaaatctgataagccaaagtctatggccttcaattctgaatcttcatccttcgacgtaaataagaaattctgaagcagcaattaactacacttagaagagtatactacattgaaatatcatactacagtttcaaacatcccttgaacgatgcagcagttatgcagataatgcaggaaagatggtcatggtttaatgtttataataattttaaacagatatgaaaagggtgcatcttcgccaccctgctatccaaccccatgggtgatttcaaactagcttcagctccattaaaaacaaagaaaaacagagaatatatcacacctcaggtttaagatcccgatgaaccacaccctgaaggtggcaaaatgcaacaacgtttaatatttgtgtcatgactttctttgcgtcatcttctgagtacttccctcccctgcataacaatgtaaaaagaatataattcagaggatgcccatttgctacacgatcctttacttttgtaaaatctacttttattaactccaacaacatttaaaagaaggtaatattaccttgacaatatcctatctaaaagctctccaccttcacataacctgaaagac

SEQ ID NO: 46509 - DNA, 1687 bp, Cannabis sativa
atggttggtggactcagggattgaactatttaccaaaggccttggagacctttactatccaagtaatgaagttgatccatatttcaaggataaagatgtaagcttgactttttcaaaatgtgtctgcttacttatatagctttctctaatggagggctcttgtttattcttatatttatattttctctgaaggatgatgaggattctgaagatcttgaggatttgactatcaaaccaatggattccgttatagtttgtgcacgaaatggtgatgatggcaatcaactagaggcatgtagctactagttcagctctatatatatttgttttttgtcctgatctttctattgcattcgcattgaattactttttctgtttaaataggtttgggtatgtgaggaacctggtgatggtgaattcaacacttatgttcaccatgaaatcatgatctttgaatttcctctgtgcacagcatggatggattgtccgcttaaaggtggagatagaggtgtgtattatatgcatttgctttgatgttgtacatgtagtttgtcagaaccaaggaaagattatttgctttcttattatagttaggtggtcataatatctttcttaagttataattcttcttattattaagagaaagcttatattatcaatcagtttttagttgattattgcacccccatcttgtcctgtgggaagttgatagtttattgttttcgttatttttttaattagactatggcttgtctagttgtttgtttacctttaaatgttttctttgtgctggcagggaattttctagctgtcggatcaatggaaccttccattgaaatatgggacctagacattgtatgttcaatatttttcttcgtagagctaagagtgctggttgttagtacttgtggaaatgttattttatttccttagtaatgtttgctattttcttcagatcgatgaggtacaaccatgtatggtattgggtggcattgccgagaagaagaagaaaaaaaaaggaaagaaggtttgttatgatataccttcaagctattctcattgcagaacattagacttctcaaagtggcctgctatgcatgcaatgctttagggctgaacaactttggggtcactgtattttcttacttattatgatttttgcttggtaacagatatcagtaaaatataaagaaggtagtcacactgattccgttcttggtcttgcttggaacaagcactacaggtttgccatttctgcttttctggagtgatcggaaattctgaatttaactgccctaaaacctttctctaatatgtgcttatgctctgttaatacagaaatgtacttgccagtgctagtgccgataaaaaagtaaagatttgggatgtggctgctggaaaatgtgatattactatggagcatcatacagacaaggtaactgcggagatgaattagaatttgatgtactcaaggatggcttttcatatttttgaattgtatcgtgtgttggtgataataatgtaatactttagtttgagtctctctgaagtagcaactaacaagcttctagcatttttgcgacatgcataaataaatgctgtagattagagtttaccagctatatcactttttccgttttgagttttaatctaacattttgtctttaataattttcaacaggttcaa

SEQ ID NO: 46510 - DNA, 1011 bp, Cannabis sativa
  modified_base (625)..(627): a, c, t, g, unknown or other
acatgaatgagtatattttaagatgtttgtttgtttgtggcagagtatactcacacactgaaagtagatgaaaagagtgatgtgtatagttttggtgtagtgctattggagcttgtgacagggaagaaaccagttggagatgagttgtttgaggttgggatgaacattgttggttgggtaagggaaatcgtatcaaatcattctcaacaacactctgattatcatgaaagagtagtacttgcaataatggatcctcttcttcttaatggagattatccaatagcaagtgtcatacatatatttagagttgcaataatatgtgttagtgatgatgcttcaactaggcctacaatgagggaagtggtttatatgcttacaaatattgcttccttctctacctcccaaaataccacccattagtgtgttaattattggagaatcaatgtcaatttgtactacatttttcttttttataagatgatacatatataatagggataattatactatatatactaaaattttttatttttttacttttatactatggggcagaatttttttcaaaaatactgtgtattgtgttaagttttcactgttgttctacggttgttttttagttgtnnnactgttgtttttagttgttttgttttgtattctactgttgtttttaaaaaaacacagtatttttgaaaaaaaattctgtgtgtcagtatttttgtcaaaattaacctaaatttcaatattttgtaagtttccccatataataagtgttgggctagtaggcccactaagcccattaatcctccttaatgtgataaaaatggctattggataatcaatgtcaagtgtttaagtatatatatttgagttttttttggcgaaatttgtttcacttgtatttaatcatgggctattttcaaaaatacgggaaaaattattaaggttatgataaatatgacataaaaagtaaatgatactaattatgacattatctaaccaatcaaacta

SEQ ID NO: 46511 - DNA, 1862 bp, Cannabis sativa
ctacatctccagggaggagtgaagccataactggttggcaaaataacttgagtgttctaaaaaataaatgaataaatcaaaaaatcatccactcgcaagtattttcctatatcaaatgtcaagaagatgtcctaattgttcaagttgagagagtgagctgtccatctaaaccttggagggctcacatgaggacaattacacacacatatgacatctgttctgttcagatcatcagtaggaattgtcttttaaattagtactcacacttccttgtttatcaattgagggtctggtgtgatattattttaacattcgtgttcgagtttgcatctatagtttttatttttgtttttctctctccttagttgagcttatgtggaatacatgtttctgttctttttcaataagttttgtctcaattaggtgtttcatttttttctgtatgctttggtttgggttgaatgttgtgtgggcctgttttgttgggctagtgggccttgtaccaatcagaaatatacgactactatttgttcagctgggcccagcagctatttggtataagtttgcatctcttcctccccagtcatcactgaacacttcaccttcgactcttcatcatttgctgtttggggaagcgtgcacactggttctgaagaagtgtttgggtctccattcacggttcgtctcacctctctgcccttccaatttgtcaggtatgtcgtctaaacgtttcactcgttcatcactatctttcccgtccatctccccagttccacctgtgtcgactgtccctcctgggtcctcttcacccaattcgtcctctgagtccccacctgttccccttaagaacttaggtccccatcgtcgagtgaaagaaaagttgttcagggggctaaagagtctgagtccaaaaaacgtaagggtactgtctctgagtctgacccctctcctggtttgcccttctactcccatgacaaacttcttcgttttcaagagaatgtttgttctcgtcctctgtggcctgagtatagggttaagttgaagcattttgctagggttcgtgagattgttcagtctcgaaagtgggagtgcacagtcactcaccttcaatcgcccaatgtcaaccttctccgtgagttttatgctaacctagatgaaagtattgtcaatgaaaaaagtcaacacaaatatcaggcatacattcgtgggtcttggtttaggtgtgctccgtctaccattagccttatactgaaaattcctaggctagctcaccccacttacacagatgagtataaaccattgtttaaggatgttggtgctgaactaactggcaaacctgattttgtgtggaatggaaaggagtttcctgttactattctctctgagttctatcgggttcttcataaaattgccctatccaattggtgggccaactcccacacatctaccatcaactataacactgcacggtttctgtatgcccttgggactggtgtctctatcgatctaccatcactgatctacacccgaattttggattctgctaaggctaaaggtgttaaacacactcttccataccctagtctgattcagagactggtcttacgaggtaatccagcaatacttgagcaagatgtcacagtgcctgtgccctacattggcaagacctttcaaccagtgtttggcaagcccattcctccatcggtcattgccttttccacctctgatcctgctgctcctgctgtctcagaaattcctccagtgagcacatcaccagtctctcgcttgccctctgctcattggcaagtcaagttactgtccaaagttcggaatttggctcatgcttacaacttagatcaaca

SEQ ID NO: 46512 - DNA, 3591 bp, Cannabis sativa
aaaatattttgaactaacttgcctaacttgccattgccaaaaaagaactttacaatatgtataatatgtatattatgtatatatatattcatatatatatatatactatatttatttccatacatctaatatgtgtgtaaataaacacacataataaatacttttatcgtatatacagtagaacatgtatttaaaaatacactattcaagaatgatctcgaatttattataaaaagaaaaattaagtcttaatttaagctagttatataaataagaataatatttaaattgtaattagttatacaatttctaaatgtcatattaagaaagtatacctaaattattctagtttttctttataatagagtacatttaaagatatttttttgtgtacttttctttttatatataagaattgtatgatatttattttaatttttttttttttacagttgtctatatagatttatgactttttaattaatatttttgtaaaaaaagtttaaaattatttgatacgattttattgtttaatttataatatttataaatatttaaaaaaaaaattataaataaacccgcgcaaaatacgacctatgattaactagttatacaatattattgttatgtcccagaaagaaaatcagttggttgtccttattaaaacacatgatttagaaaaaaaaaattaaacaaaacgatatacaagattcattgataaggtgagaataatttttggaacaaatacatgctattagagtaccactttctctattttctttaatataagagtttgttcaaacaaaaataaagtagaaaaattataataatcataatattaatgtttgaacaatgtataaaaactattttgtggtgttcttgtcgtagtactgcagaagagtactagctagagagaaacgaaagatttcacccatgtgaacataataataaattttattatacaatacaaaggatgttaaaataaaaatataagctataatcgataaaaatttgtaacaattatcatgtaacaacaagaatggtagaaaaaattgtaactatgctgggatatcaggatcctattggtaacaaaagaaacaattcataaagaaacatcacaaacagatcaaagcaatacttcaatcttccactgccaatgctcgtttcataaatgctctaaggcttactagtgtgaggtggagtaatgagggaaggaatagatttatccttagaaaggtcaggaatagttggcaaagtgggcttaggaagctcatgtgggagttcaggtaattttggaatttcaagcttaggaaattcatggggaatttcaggtaatttagggacttcaaattttggtagctcaggcatttttggagcttcaatttttggcaattcaggcaccttagaggcatcatcatgattcagttcatgcaacttaggaatattaggctttggtagtagaggtttcggtacctttggcaattttggcgcttcaggttttgacacttcaggaaccttaggcagttcaggctttggtacctcaggcaactttggagcttcaaattttggcacttcgtgaactttagggagttcagttttcggtacctcaggcaactttggggcttcaggttttgaaatttcgggaaccttaggcagttcaggctttggtacctcaggcaactttggggcttcaggttttggcacttcaggaaccttaatattaggttttggtacctcaggaaactttggagcttcgggtttcagcacttcaggaaccttaagttcaggctttggtacctcaggcaactttggggcttcaggttttggcacttcaggaaccttagggagttcagactttggtatctcaggcaacttcggggcttcaagtttcggcacttcaggaaccttaagttcaggctttagtacctgaggcaactttggggcttcagattttggcacttcaggattctcggggagtttagacttttgtaccatagggtacttaggaatttcaagttttggtagctcaggaaccttaggaatttcaagttttggtagctcaggcaactttgagacatcaggttttggtactttgggaaagttaggaatttctagctttggtagctcgggcatttttgggagttcaggctttggaatctcaggtatctttggaaagctaggcgtagtctctagcaagtggcgtgcctccaaaaccattatgttgcttatgcatactgaaattataagaaccataaatggaaatataaagttcgggatgcgttgataagccatgttgttatcaatcaaatttgaaagatgaaataaactattttgtgatgggaagataagagatttctgattgagaagaagaggaaactttgttgtttgtgtatgtagaaatctatttgctacaacgcttttataggtaatgggacttggaagaatggactttaaagtcattgaaggtagaagtaggtgtgttgttgatcagcttcttagtggcatgaaaataaactaacctaattaattgacagcaatgcgacatttccacattaatcaattatattttattgagtgtagtagtcttcaattcatcccttaattggatataaaatgaaaaaggctttctatgaattactattatgattattattattatattctgtgtactactgggttttgtttgttttccttttacttcttttagaaatattgtaatctaggcaatctagaattttgtttttaattaatttgtgtattttgttagttttggaaggttggaatttgatttatatagtcatttctgttgggcttgttggctacctaagaagttgaaataaatggttcactttcttattgccttagaaagagtttacctgaaatttgaaaatgaatctgaaaacgaatacagattgtataaaatttaatattgtaatgtgaaggagtccactctcagagatttttataggttagcaattagatgataaattgattcgttcgcttaatttattaggtgtgaatgttatagcataccattcctgagccaatgcttcatatttatttagaagttatataataaataaataacttatatttatataataaatagttttatactttgtgttctatagcacttatttaaatattttttaaagaaagtaataatgtttttgaaaatatactttttatatagaatattaatcaccaaatatagattttatcccattactaaaactacatgtggttatcaattctctcaacggtttagagtttcggtaggagattgagaactacgctaatttttataatagactctcccatgctttaatttttcttttattagcagaacatataattttgtcgctcataatgtggctaagtgggcttttacccacaattggtatggttgttgggaaatttacaccctatactatttttttcaattttattgttacccgctttttataacatttttactggtttgattttatactaatatactgttttttttttaaaaaaaaaaaaataattgtttcatttttaactcaaacgtggcagcttgcatgttttttttattatattttaagttat

SEQ ID NO: 46513 - DNA, 1906 bp, Cannabis sativa
tagttagggtgttacagatactattggccaacaataaataaagacacacatgaatttatcaagaggtgcgataaatgctagagattttcacatatacgtcgcataccaccaatgaaactgagaatgatgacctcgtcgtacccatttccaatatggggcattaacctgattgtggcattagccacagggcgaggaggaacaaagtacgcagtagtagctgttgatttctttacaaaatggacagaggacgagcctctctagtttcaataacacatatgcaaaaaaattcttgattttgtcgtcaagaagataatttgcagatttgaaatacccattaaaatagcataagacaatggaactcagtttgatggtgaattattcactgagttctgtgaaaggaataaaatcattaagagcttcttgtcagtttcaagaccccaagcaaatggacaagtagaaactgttaataaaaccttaaaagatattatcaagaagaagttggatgctgcaaaagggagatgggtagatgaactaccacaagtactttgggctgacagaacgatagagaaaacaacaacagggcacactccattctctcgttggcatttagctcgaaagcgatgctgccagtagaagttaatattgcgacccatagacgtgaattctacaatcaagaagaaaactaagaagtcctcaaattgtccttcgacctacttaaagaaagacgtattgagtcgtaaataactaatgctgcatatcaacatcaaatgacgaggtacttcaataaacgagttaagaaaagactcttccatgtcagggattcggtgttgagatgagtgtttgcaaatacacgagatgcatctgctggagtgtttaacccaaactgggaaggtccttatgttatcgaggcaatagttggaaccagggtttataaattggctcagctttacgactcgctaatagaaaaccactggaatgttgaacatttgcaaacatattacgagtagacttataatgtaaatgatgtatttcttttcagtaatgtaaactcttgctattaataaaagttaaagtttgatcaagtaattacaaagtatactttaaaattactgaggggcatatatgtgtgtatgatcaactgaaatttatctagatatacatgatataatgcaaacccacccatttaaaaaaaaaatcacgaaaggataattgattagaattgtctatggataatataaagtcaaaaatttaatccttttttagaatgaaaaactgaagtagtagttgtaaatgagattaactcataaaaataacattaagctacatgcgaagctgaatacttaacggctcgcatttgttaggcatgtattataaacgagatattaaaatgccttgaaaaataatgcaacctaaaatattaatagaagatcaactattcatataggcaatcgaaaaatatacgaagtaattcataaagtgaattattcaaagtatgtttaagtttgcttttaagttataaatggcagattataactgcccgcgaatagaaagcatagcagaaaataaatgcccgcgcacgtacatagtagattaataactacttagagaaaaataaaagaaaagcgagatcaatggaaatgctctcttaaagtaccttaagattgatcagaatataattgtctaagttgtgattgaaaatgcaaatgaacaaacatatcaagttcaaacataaagatacgagacaataaatgaaaagataaataaatttaaagcaaagttggccatccaacgatgcgaatttatctttacagaaaatattgccataaggggcaaactattgtctcagtcaaaaggccatttttctaaatataaaaaaaaaaacaaattaaaaaccaagcctacatag

SEQ ID NO: 46514 - DNA, 4777 bp, Cannabis sativa
  modified_base (783)..(783): a, c, t, g, unknown or other
tatataagcacactttatatagaatagaaatagatatatatatataaattattttgaaaaacataacaatatgtatttcaaaattttctccagtagctattcttatctattctttttttttttcttttcaataattatagttatggagtgctatattggattttaagatttaatcaattgagaagataacgattttaaacgcctcttaattattggtggcttatcattaagcaattcaacacaaaataatattgtgagttatcatgtttttttttaaaaaaaaaatattgtgaattaccattaataaattatgcaagactatgtacaattttattatgtgtaacatgtgtatatccattataaagtaatttatgagaaatttattgtataaatacgtgtagatttatatataaattatttacaaattttgtttataaaggatattaatatatgctcggtcataactctcaactctaaaatataattagaaataccactcaaactttataactttgcatgaaataaaagttgcctaatatcattacttcctaatggcatcaattggcatcctaattctcaaaaattttatttaatacataatttttttcattctattattatgattataaatatatataatatatgtccatgaataaatttaccatttgttcaaataattattaattctaataatattatacatgatgtgtatattatgattaagaatgtaagaattatagtacaaaaagaaaaatgtgcataactaatatatatatatatatntatatatatatatactttgtatatagacggcttccccttaattatattcaccctatcaatcaaaaatacatatatttttttgataatttgaacctatactatctcaatgtaattatttttttttatatatattttacatgttacattggtataactttattttatagtactattgttttaccaacaaatactatcagtattggaatgatcaaaataaataactccaaatcaaaaaataaaaatatcagtagctttttatttttcctaatatgaattcctaactaataattaaattttaactaaaaaaaataactatcaaatatatatatatataaataattatcaaatttaaatatttttctttaatataatatttcaaattttaaataatatatgtgatttttaatattttgtttatattttagagatttattttttttcttaaaattgttacaaaatttttaagtaaaaatatattataataacttctcatattaaaaaggaaaaatatattaaagattagtaaggttaaatttgatatgatattattacttagttagcattaattaaattaaagacatcattattttataagtataattaatttttttttttaaatatccgtcgcaaagcgtgaattgtttactaatttactaataaaagtttaaatttaaaaaaaatgaacttagatagtattgccaaaaaaaaaatatttagaaagttaattaagtggataaagattaaaacataaggatttcataattactatcttttttattctttcatttaccaaaaaaaaatacttttctctaaaaaaaattaataacacacttttcgtattcgctgagcccataaataacagtaacaaataattaatgaagtgaaacccaataaaaaccaaaattgtttcgatcattcatgattaatttttctttctttttatatttttgataacttatcttaatttttacaatataaataatttgcacagcttgggataatgtttttacaaataattaaactaagaaatctaataatcaatcaattaattaaaatagaaaagcataatataaaatcaaattcgtcgtctcgttaacggccagaacaggtatcatcacatccaatatgggcggaaacgtcgtcgttctcgtcgttaacataagccgccaaattcaagtacttgtctgcattaatggcggcggcagccctgtcccgccacctcgcccgacatatcacacagctagcccacctcctcccagtgctccgcttccacgtcagcaaacactcctcgtgaatcggattccggcacctctcgcaagccaccaccctctcctctctccccatctcctccaagcaaactggacacgacgtcccttcatcgaattctgtcaccggagcattattattattatttacattactactactacttccacggcggtcgtagaacagctggtggaatctccggcggagggatattccggcgagacattctggcaagatcggggcagagaggaggcgggtgaggtgacaaggacggagggttctacgacgaagacatgggtcgtggagggagaggccgaggccgcggatgaggacgaagaggatgtgcttacaaggagtggcgcggtcggggcaggtgcagtaaggagtggcggataaggtgacggcgtagacatttgcggtggctccgaggacgaagaaggtggagtagtcatcggatcggtggaggaggcggaggtcgtggtgtaaggcacggactacacggtccgagaagggttggtagttgtggttgtggcttcggcggcggcgatagtggtggttagtagttggttgtggtggggatgatggtgaggagttggaggctacagactccattggcggttattaagagagttgaaattgataattataagaaagaaggccgtatttgatgtttatgttattatgagatattctatggatatgaatatgatcagactgcatggaaaagttatacggtaagtaattacgtggggaatacataatttatgagtattaattccttgagtgtaattgtggcatacgtgaggaatagcgggagtactaacaatatcatatatatattttagggttttggcaatttgtaacactacgcatactttttaaaatgagaaatgttaaaaggtgactaatactttcttacgtgtcaatattattattggtccaactaagtattggtcccatataatttaatataatagtttttaaagagtatcgctacctaactgcaacgcaacatgtcgctcttttgaaatactacatttttaaatttttcaaacgaaatatatagtttttgtaatttttaaattacaatgtaccacaatatttaaaaacttgcaaaaatgcagtttggtgcaatgcattttacactattttcataatcaaatattataaaaaaaaatcaacaatcaatgttataaaattttcacattataaaaagaaaaatatagaaaaatttaaacctcattacatatatattaaatttcaaatgcagttgatgatggcagagtgatcatatttgcagttcttgttaacgacactcttcgatcctatagaagaagctggtattggtcatggctaaagtaaaagggtgaaagattgaaatagattaatttagaagggcttggccctatatatgtcggaattcgccagtaaatattctttctattgctagactatagttctccaacaagagaaatcaggaacaatacctttaagttattatattgaattgtttctaaaaaattatataatatatattagattatatatatttaaaaaacaaaacaaaaaaatatattgtaaaacttagtaattttataatatataatgcgatgcgattttaattgaaactattaaattcaaaaccacaaatcataccgcacagtttaaaaaaaaattaaactaaaattgcaccacaaaagattttaaatcacattttttgtatgatgtggtgcaatctgaggagtttgtgtagtgtggacaatttgatgaatacccttaaattttttttgataaatcaaaaaattgtattgctccaaccaaatctttacaagctattaacaccctatcaaaagggcctaactaaatcgattatacaatttgtacaattctttttctcatttgtttttctacagtgacattacaatgcatgaaatcatgcttgtcatcttcattgacctttttagaccaaattaaatttagccttctccaaatcaaaaataaattgagccttctgaaccaaatttgctttagcatcactgataaacttgggatgttcttttagttcctccttccatacctaggaatttttagttttgacacttgggatagataaattggtcaaatctcacaaaaagatgatctaaaaaatagagaaaattgtgcaagaataacgcaaaaacttcaaacctgaattagactacgttctgattagattttggaaaaagtcaaaacataaaaatttctagatttcttatttatctttccaaaacatcttgaatcgtccaatttctagcaatattgagagagttatggtcaaaatactatcagtcaacgcattagaaaactcactgcccaaataaagaggggtcatgtctaggcatggaaatcccatgtcgcgacttgccccttctattcctgagaaaaataggttttcagcgtcttttatcttttttttttttttatcattttttagctataaaagaagtggacttaaatagttttcaacaagcaatcaaggagtacgaattttggagagcaaaattaatattgaaggctttctcagcagggttttcaacattcttttcttctctattttcttcttctattctgtattaatgtgttaaattgctacgatgaacatgagtagctaaacagttcattagggtttagatgaatattgtttgacattgatttttggttttaataatatgatttaattttctctcaa

SEQ ID NO: 46515 - DNA, 708 bp, Cannabis sativa
gcagatttaaaatagaagaatatttgaaaaatatcaacaaaaaaagataaaagatcgtagaaaaatatcaatgtgaaaaatcggaatcctaaccagaagaaaaagatattacgcacgtgggtactggagcacacgagttgcgacccagcgatgtgggcgccgctgcccgcctattgaaaaaccaacataccacctttcaaagccacatggacagcgacccagcaatgtgggcaccgtggcccgccgcctcttcagcagcaaaaatatatattatttttttctcgcgtgggctcgagtgtggtttcccaattcaatattgaatagatgccaacttacctgaaattcatgaaagacattctatccaagaaaaggaagttggaagaatttggatggtggcacttactgagtgcagtgcagttctgcaaaagaaactaccacccaagctaaaagatccaagtagtttcaatattccatgctcaatagggggtttgatacaaacgaaagctttatgtgatctaggaaccagtgtcaacttaatgcccctatctgtgtttaaaagtaaatgaaaaaccacaacagtgactttacaaatgacagatcgttctttgactcatcctcggggtataatttaagatattttagtgaaggttggtaagttcatcttccctgctgatttcttaatacttgacatggaggaagatgagaata

SEQ ID NO: 46516 - DNA, 908 bp, Cannabis sativa
ttcaaatcgaaatccacgtgactgctcgatgccatgatgaccaaaagacaagatcttgaagacaaccttaaaaaactttagagaactttaccaacatgtcaatacacaagactttctagacctgaatgcaatatatttattaaatacttaaaaaaaatgcaaaataaaaatgtttgacacaattagactcattgtataattatgttaacaaagtaaaaaagatgactaataatttttgtaaaatacaaaatttaaaattatctattttataggttaaatataatacaactaatctaaaatttcaaattatgtcacattctaaatagttgtttttatttttttagtatttaggatatgcacaagtgcgtgctttttctatcttgtacttattttttttatcaagacaaataatttgtcattaaaagtttgtttaatggcttgtattaagtcgtattatattaagttaggttatatattatatttttatataatactatattatattttaatttatactaaaatattataagaaaattaccttatgtattatttttaactttttttttttcaaatttacagtttgggtttctaagttagtttttctggtagtttctatgtgggttgctatacagattttggttacaatttaggttgctccatcagttgcaatgggagtttctatataaaattccgtaaaaatacaaaataaaactattttgaagtgtaaaaataaaaaagtctcaatattatatatatttatgtatactcataaaaattaataccacatatagtttatataaaaatattatataaaatatactttaatataatactatatgggctcgtttggtacgtcgtattgtattgtgttgaattgtgttatatcgtattgtattgtattagtatta

SEQ ID NO: 46517 - DNA, 2177 bp, Cannabis sativa
ttgtattattattatttaatacaataatatgtttagtattgacttgtatttatagtttgtgcaaaattatattatctttactataaactcgaccccaacttcgactctcgttcaggtctagggtttggggcccaaggtcgagtccaggtcctagtcggtgttcagagttctgggtcgggactgtggttaagtctggcgtccgacgctgagtctgggatctgggtctggagttgaagtccgaggttcaggtccagggttcgggaccggggctagggtctctaactttggaccctttgtaaatattataatataagctactacaaagtattttttatgtattaaataataacataatttatattgtattaaatttatagtcataataattaatataatacattgttttatccaaacataatgttacttattatttaatataatacgatatttatacggtctatcaaattaactttaaatttgttaaatattcaaaagtaaaaaagcttcttaaataaattaatatataatattaagatgactcattttgattttgattttgaagtactcaagttcttaattataataatagtaattaatcacaacaacagagaatataattctccgttctgtatgcatgagcttaataatattatatattttacgtgtgtgctcattgttttagtcttatcctaaaatttacttacaaagccaatctctcatattatatgtttatatgaatgtttttttattctaaataaatttaattagatacataaattcacttatttgaatttaatgagagactagtaccatttaaaacaatttgaataaatatacacatgcactatatatatatgtataattttatgaaagaaatttattatataataaatatcaaagttttgattcaaattaatatacaatacaatataccgattggtccagaaaactgcatatattatatagggatagttttaaaaaagttacaaaactacattgtataatattttaaatatttttatattttttaagactttatttacaaaaaatatattttttgatgtatttttaccttatactactcttgttattttattgttaagtttttattatttatatattattttatatgttattttaatattgtttcattgttgtttttgtgttactttcacataatttttttgtgtttttataaaatactgtaacaatgtaaaaaaaaaaaaaaacttagacgtaaaagtataaatattttatcaaaaataaataatttttcctactatatatacttttaaataaatatatttttttagaaaataaatgaatttatatattataaactaaaatattattacaataatttagcatattccttttcactttaattataatgagctatatataattatatatagttgttcaaatgttgagcccatcaagttattccttttgatttaaaaaataaaataataatattaaaaaattattatcacttttttctaattgatatattattattaattttttaagagtagtgttgtaaaaatgaaagtgtggaactctaggagtaggacactgaatcatgtggatactatactattagtaatatatattattataaaggcaatttaattagggtaaaaaaaattattattttgcagtgtttggcatcatagcttaaactttggtttaggtttttgaggccatcttgtaatgtaacttactttttacattattattattattcttttttcaatatatacattggatgaatttcaaaagatttttctttgttgggaagagttaatatatataaataattttgaaaaaattaacactcaaagaagtgttttcggtagatatttttatttattttaatatttaaaagagtatttttaatctatttttcttaataattatgtacgttgtaattatttagagttatttatatttttttaaataatttatagtactaaaaataaaatttaaacgttacttactatatatatataaaaaataatcacacatgcaataaaataattaaattttattttaacactgtaatttattaaaaaaatttaaaaatttatatactttaaataattacaacttacctatattataaaaataaaaaaataataataaagatgattaaattataaaataatatatcatat

SEQ ID NO: 46518 - DNA, 3375 bp, Cannabis sativa
acttgtcatataaacatgtattaagtttgtgtataattaaagtgtgcatatatccatatctcattatcctaaagagtaatataacaattaaagagtctagtgacaaacatcttctacacagatttattcgttgtacgcaccacctattaacatggtttatgttttcttttttaaaatttattagatgttaaaatttgttccttgtactctctgctttatctatatcaatattttaagccttaagctattatacatcattccaagttcctaaaaagctttctcttacatatatatttaatttttaatagagctattttaattttttttttttttttttttttggctctatttatcatcgtagtagagtttaatcaccgaattcgggacagcttatatttcttggtttcaatagcctcccaagagtagccttaatcttaatctgcctttagagagtgaagtgaaccgagggcgatataattctttcttcctttctctcttgagcaacgaggagcgggctagtccccgaatccctctattggtcacatttgagactttcaatattccaggggaacaactattacgcttgtaagattcccatgacttattgatacaccaatattcagtcggtgatcaggtagcataaaatgctagtacttaatgttcatttatgcatataagaaatattttagttgtgaagtgagacacaacttttaataactttacaatatcaccactatacagagtaatacctgattttggaagatgccaaagctattatttacagtaattatcaacaccaaaactttaaagttgataaatagcagcagctactctctgttttcaagttcgatcgcaatctcattacggcgttgaaaggggagtgtaaatggcggattatactgcaaatggtatttaaaatatgtctaaattgtaaaaatgaaaaacgaaaaaaagcatgaagaacttttctgtgcatatttcattcatagttcttacctgagaaacttctactgaagcgtcctccttcacttgaaattgtctgtcattctttagagcttcacgtaatttggattcacgtcgtttaacttcttcatcagtaacaaaacctgatttgacacgaagaagagcgtaaactgtttaagtgcctaagcattacataatacatgaagaaaatactattggatttataaggaagcagaacaacagattccaaacatcacaccaaaaattccatgaagtaagagagttcacagattaagacagggacaaacctgaaaaagcaacaactgcaacgattttcctcggaacctccttgatcttcacagatgggttgtttggcaatggcacgtctgcaccatactttgaaggcaagacaaaagacatttgccacttatcttcatctcccccctataaaaaaatgtaggcaaacaagatcatgacagaagcataataaaaaaatatgaaattgaaaacaaccactgtcaaaggtaagtgttcttttcaatgctcaaagaaggataaccaagactcacctttagaacaaacaatgaagtgtgactaatccattaatgagaaaaatggaaacgttacatcacttccaaagcatatctttgttaataaggtttgatctcaaagactcgtaatgatatacaacaaagtgcatttgtgagtatcttcaatcatctaatttatactattatcactgaaataaacaacaaaccaatgcagaaaccttaccctctttgttataacaggagttgtcatttccattttctccccattaggctgagctttacttgtaataactggtgtggtcatctccatctgctccctttttgtattctatagaagagcaacagcaacaagttgactattaaaaacctaaatgttgaaattaaacaccctatgctacttgaggcaatcgcgggtggatcttcaagtggttgggtgtgtgagattataaggtttcggtttaaacctaactcgatattttggaacattggaaacatgtctaactcaattgataattcacaaggaaagtaaaaagagtaaaaattaccttaccaaacaggtactcggctaagacattgaaggattgagatgctccattgagatcaaaaccagtttttccaggcatcgtcgtctctgctacaaaataaggctgttttcatttgaaagaacaaaaaaagaaaaatcatttagaaatagggaaaggaaaaataacagagacatcacaaggtatttcaagccaaattcaatacctcaacttcccttatctcatactggtctgttctactcaaaaccctaaaattcaatgtctcaatatccggaactgcaccaaaaacacaaagtaatcgagcatgaaataccgataacatagctcaataaatcgtaccacaaccaaatttttgcagaaatacctgtcatcagagcttcctcaagagtgcgcgactcgaatcttttcgggaacacgtattttgctgtttcagtagccaactccgccaaaactgtccaaaaaaaaaaaaaaatagagaatcgaaggaaattagagtgagaacggttatggtttcgataagattaagcaaagttttgattggtgtagctattgaacatttacgtcgctgagaagtggcagaggtttgagaagcgagagccagtacgagagacactcgagcttccaaagctgacatggaccttcttcttggctggatttgcgtggctctgttggcagccatggagattgtggtgcgtgggttaaagaagcttagagatgaggaaatggttgggaatatggatgagattccataggcggccatggcaaatatttcctttttcctcttggctttggctttttgaaattctgttatgaagataaatacttccttttcttttattcaatttttaccgggaactaactcagctgattttaatttataactaacaaatgagatgtcgtttgcaagggaaacgacacctagtttaacatttcaaagctcaacctgaggatgctattggtatcaaagaagcattgagttggatgtaatcgagactcattgtctcatagtggtacaagcgattaagagctctattcaactggttgttttgttggtttttgttaaacgatcttctaacaaaactgttcatgattcttgttatagttcaggtcgtgtttatagaacattttgctcctttgagttttattctatctattcaaaataatcaaggctcacctaaacattttgaagtccttgtacaaaagtttaaaattaggcattttataaataatttaaaaaagattgttattaatttattaaaagatacatctaaactttcagttataaattttttagaccttttcttcaaaaaaaaaaaaaa

SEQ ID NO: 46519 - DNA, 2349 bp, Cannabis sativa
atagtcaaacataattaactgctaatttccaaatcaaactaagcggtctttacatgaccacttattgaccagagatcttattgagagatttatttctattgattctcctttttgccctgtttctgagattgatgtggaaccctatgaacatcttttcttcaattgtatccttaccatgaaggtgataaaagaagtcatgagttggtttgggtggttatactggctgaatcatttggctgactggttgggtaggtgcgtgcaccctttgaaagggttggttgatgaactttcaacaattttagttgttgtcgtggtctactttctgtggtgcaaccagaataggtgcgtatttgaagccttttgtggttcaactcttgttcttagtcatcaagtgaagatgattgtcaaagctagatctcatcttattagtttatctagacttagtaaaagagagattgatgtaatagagttgataaacaagtattaagttgtttggttgctactttgcagtgtggattgttcagtggttgttggaataaaattatcttcatttacttaataaaaaagaacataaacagaaataataaaatagattgatttgaaataaaatgcaacagaaacacaccaggttttactagaatctaacagcaaagatgttgtatcattgctacttgatctaagctcagaaaatagtcttcaatggctgagattctttattgaataactgatgatgataaaagcttgattacaaaataactcaacatgggagactcaagatcaaacacacttgatctctgctacaaccttccatctcactctactatttctctttccaacaagatcgatacacaaaaataacataggccttaccttttatagagttaggtagttccttttttggacaataactcaaagactaacttaacagaattctctaaggcctatgttcatctcagaaactaacaacttaagtggctgaactaacataacaattccaccttagaacaatcactagagcttaatgaaaagaaataaaaaattatcctcttagtcttagagcaagtgaggctcatcgaaatttgtcaatgttgagtaaatttaggcaatgcctaagtttttgaagactaacactcttggtgagcatgtctactgggttttctttagtttcaatcttcttggcttgaacttcatctttagacataatttccattgataaaatgaaactttatgtccatgtgtttcaatctctcatgcatcattgggttcttaattaagtgcaaagcactttgattatcataatagacaaaaatatcttctgatttcagagcaagttcatgttgagattttatgccttaaataaaatctatttcaatgtaatcctatttagcatcaatagaagatttgaaatcatttaggtttacgtgaaatttttatgattataattttaatatacaaattatattaaattccgaacatgtagttattcacaattacaatgatgtcatcactgtgaaaagtaattgtgattatgtgcttcaaattatttagtctcatgatttattagtacactagatttacactaacgtgataatcaacgataaagtttacttacacactaatatgtctaatgtcttttctagggcattgacaaagtatactagtatcagatgtattagttatacatcagactagaccgatattgatagtggaaaagatatcataaacttaccataatatcttttctacgtcaatgccacttagttgatattagatcaaaagatcttaatcctaaaataattgagttatggcttaaatgtattatatgtgttctttcacttgttcgttacatctaactatttggaccagcctaatacttacatcttgagaacatggtagtgcaattgagtgagagcgttaattgaagatatggaatctatagcttctattagaagtgaaatgatggtttccttatagcttagcttaacgacataaatggaagagcacttatttcaatatttatattagtttactaaaataccttttataagaagctaggtgttttaaggatagaatatattgaaggataaaatagtaaatttgtccctaatagatgtagatcttctataaaggatctttgattgtttagaatgaaacaatatataatttatgacgtatctattcttggtgaatagagcgttctatgtaatcaagagtacaattctaaatctatagtggagttaggaggaatcaataagatagagaattaactcggcaaattctaaaactactttttgggagcttgattatataggcacatggtcacacactacttgagataatattgtcttg

SEQ ID NO: 46520 - DNA, 2694 bp, Cannabis sativa
  modified_base (901)..(914): a, c, t, g, unknown or other
ttttttataaatttacggtttgagttactctgatggcttcgatgtaggttgctatgtgaatttccattacagttagaattactttgttggttaggggtgttcatcaaaccgctcacaccgcacaaaccacccgcaccgcaccgcataaaaatgcgatttgaaattttttgcagtgcgttttggagttttaaatttaatttacggttcaaaccgcaccgcactataatattacaaaagttaccaatttttacaatattatttttatttttttttcatataataagaaatatatgtatatattatattatttttttagagacaaattaatataatgatttaataattagcatgtatgttattaggtgaaaactttaataagatttttttgtattgttaaaactttatcgatcgattgatctttaaatttttagtataatgtttgataataataatataatataaactgctcaaatcgtaccgtgccacactgcagttttacggtgtagtttttatgattttaagatctcgaggtgcgataacagtttgagaaattaaaaaaatctcatatgcagtttgatttaccacccggatttttatgtataattttataaaaatgtaaaaataaaaaattattttaaagggtaaatataaaaaaaaaacatttaaatatgtaagagtggttacaagagttattagacttgagtaacgacgtgtacttccaaaaaaaaaaaaaatgtttgattatgttgattttattctcgaatcatagatttttcggttacagaaaatattgaagtttaacattatgtgttgctttgttagttgttgtgttgtttgaagtatatatataatttgagagtaagacattcattcaccccccaaaataataataataataatnnnnnnnnnnnnnntaataataataataataaggacaaaatccattataattattaattaatgctaatggataagttaaaatagcaaattattcccaaaaaaatagagcaaatcacaaagaacaacaaattgatatatcaagagttttggacaacaatgtcccaatattgattaaatataaaaattatgagtcacttataagaatatatgttacttctactactataaaaaacataatatctcgatttaaaaatagcaattttttaaaaaccattacaattaaaaatatgtgactcttttaaaccataaaagatactcaataaaaaattccacccaattttttataagccccctaaattagatatctatctcgttaattttttatttcaaattatctttctctctctctcgctcgttcgctctctctcatccctctcctccgacggagcacagcaacaactcccagatagacggagccaccatcactcacactagctggtccatctcggcatcatctctaatcgcaccacctcggcagtcaacaacgccttccagttgcaccacttcagtagttggtacaactactagtcgcaccatcatctcggtgctgcctctaactattagcgcaatcatcattcgtaaatatcattctcgaataatctctcttgtctttcatttgtatttatctattgtgttgttctttgatttgaaatgtgtatgattttattattgtgactatttttgatttgagatgtgtaggatttctagttttgcatctggttcgcaaaagtgtcgagtatagttttcactattgatgataattttaaatcgtcgacaggcctggccctgagctaagacgaaggaggtggctgccttaggccccccaccgctcaggggcccatttcgaaaaaaaaatttaaaatatagatagtaataaaataaataataatactttaaatgctaaatatgtgttgtagcctagtggtaatttgattaatttaacaactaagaggttgagagttcaaattccaatagcctcactttttcactgggcccaatttttatttttgtctaaggcccaaatcaacatagggccggccctgatcgtcgataaagttttttgtccactgtaaaaactcgtcacctattctacccaattttacgatgatcgaatatgcaacgattatagagaccgacgataatacattagctgactacttaaaacgatcaggaaatccacttttttttagtagcgtccattcattattgattggttttgaaataaaaccctacgatttttatcatggtatatatcagagtagtatccctagtggactctcaatctacacctattcagataatagagcgtacgagatctgcatagtacaaagacacttgagattcgaacaaaataagcgagcaaatgacacaacttgtgataaggtaacttgtatagtgatttacaagtctacaattaaaaattctaagaacgaaattcggtacactaacttgtgcgacaagttatttcacaaaactaatatctaaattttatagactaatatttaaaatcacatatcatttaactaagagaatgcaattagaatatttgaaattggatacacaagctaggagctataagccggttcacgcttttcatttccaaccaaatgattgaatatgcacaaagtttcataggttttcgtgcccaacggccaaaaacagctagttttctcccaaacactatataaactcgattttctcaaaattaatagttggttaagcatttattgttag

SEQ ID NO: 46521 - DNA, 2299 bp, Cannabis sativa
  modified_base (2035)..(2035): a, c, t, g, unknown or other
gagactgctagaagaatgtttcatacattgaatggtttgttgtggagtgagagaatccttcctctatgagagatgtagagaatttttcaaaccattgtcaaaaagcctagtttaaccaatacaatgacttttcaagcttgcaaactgtatttggtggtagcgaattctcctctttaggattgtaccctagatgaaaaaaggcattgctaacatcgagttgatgtaagaacaacctatgaactgtagctaaggccaaaacaagctttacaaagactaatttagtgataggagcaaaagtgtatgatagtctatgccttcaagtttattatagcctttagcaacaaatctggctttagatctttctactgatccatttgcattgtacttaatcttataaatctattgttgacctcgattttagttaacaacagtaagtcaaattaaagcgatcaagaataattaagcaataaatatgaattaatattaagtaaggaaaatactagaattatagagattcagccccttgataatggtaatagtctagtctcctttagtttgtattaacttaagagtacataagcaataaggccttgatctctctcgaaagctcttacaatgatctctgaaaattttactcttgaatctttgatttctctcgtgtgtttaatctgaatgaatttcgtgtccctgaatagtgagatgaccactatttatagggattaattacatcaattaatttcccaaattaataagaagtaaactgtgaaaactatttggtttctataattacaatgagcgtatagaaaactaggccggttgccttttcttctttgatactgcatatttatcccatgaaaatagggatattaccgtgtctagcaagtacgacgaagatatgtggggaaagatacttaattggttccttgtgttgtttttttgttaaaatacacacttggtaccctctattttatataatgatcaattagtaccctctgtttgaaaaaatacacatgatgaggacactaaggctaaagatacaagtcaagttctagttagtccggtgacaagggcgcgagccaaaagattcaaagaggaagttaacatcctagtccaaataattctaaaacaagaggagattgtggtcaacacggaaagagaacataaatttgtgcttctcttcaaagtagactcaagttagactcaatttagaagtatttttgtggttgatcactttttcaaggctattggcagctttcttttttaattttgtgttctttattctatctttgttttatttgaaaaattgtctttcttttagttttcttttttcttggttgtaagttggctatataaagccttgtgaacactttgaaaaatcagattattttcaataaaattttgagagattttcttcttcagttcttgaaaaaactattcgaacttatcaaggagtatttcttgtggcgttcaacctcacttattaaacggttttccatctccatttgttgcgtcctcctttataccaaggttcatgcttaactaagcattgggttgtggttccacatcccaaattcgtgaattcttggaggctaccatatttggtgtcgggtttcatcacaattgttggtgtggttcgtatcatttggtatcagagcataggatcattgggtttggcctaatcttcttttgtgtttttctattcaattcatgttctataatcttgtttaactttgtgttctatattcctgtcaattcgtgttcaaattctctgtttctctttgtgaaatccgaaattgttagaaccaccaattgattttgataattctcttgtgtcaaaatcgtctctttggtgtgtcagtttcccttaattttttcttccttttttttcttcttaaaaatccaaaatttaaacaaaaaaaactaattctgaaattaaaattctagagccataatttgatttttgctgatttcttgtatttgaattttactttgtcattagtttcgcttttgtttattaaaattcaatttttttttnaaaaaaaaaactctaatttgttattgctgaattctttgtttccctatttgtgtcacaaatttgtttccttttttttttgtttcttttttgtttcccaaattgtttcacaaagcttgtttaattgggtttccttttgctttccttgtgcattaaggagctagaatttcgaacttgctaatttgttgtcttgaaaaaaatgaaagaaaaggaaaggaaaccgataggaaaaaaaaaagaaaggaaaaggaaactgagagcatacca

SEQ ID NO: 46522 - DNA, 874 bp, Cannabis sativa
ccaaattaagaaacttgaacgacagtattcagcttgctgctcttcaagcaaggattacgactaacctctcgaaagctggaggtgagctgggggatgacttacagggtcgcccagttaaaaaatttaaaatgataaataaagattttataataaataattaaaaattgatattaacaagtttataacttaactaaaaaattgaattaaaaataattttcaaactttaacaaatttttaactttaaaattgaaaataagttttaattttaataaattaaaaattgacaaattgacgaattaaattattaattcaaactaattgtaaaatttaaaattaataataaaagtttataggtggtacataaaatagcataagacattataacataacgtaaaataaaattcttatctttatttgatatcttttgttataggatagaacatttatatttgtattatcacctagtgataattttctttcacgcgcactattttccttagacccatttggagaggttaagtcagtaaggactcttaaatacgcttctccaaattatccaagactttttatgtctccatagatagtgtgggcttgttgtatacatttagtgtgatctattgctcatttgattgttttttttgttaaagattttggtacgtcgtctccttgcgcgttcatgtaagttggcagacttgttaataatttgcttacttatgagaactgaaggaaagtgctgccgaaattttgacaaaaagaagcaatcttaagagaatagattgcactatatgtatattacatacttgaatgggataggatctttacccttttagtaatggagtgagaatgtgcactaggacacttgcacattttcaac

SEQ ID NO: 46523 - DNA, 1209 bp, Cannabis sativa
agaaaattaaaagtttagatttataatctttacaatatgaaaaacttaaatatagatttatctaccattgttgttgtcgttgcttagttactgaacttttaaacagaaactactaaaacttatataaaactaatatttagccacgtaattttcatctagcaataaaatacatttcatttttgacaacgacaaaatgaattgaccataatataataataatatattagttatataatatatatttttttaaagaatataaaacaattaatagtgtccacgtattgaaatagaaaataatataatatatctcaataatgcattggcaataatatttttttaaacgtgactctgtatctgttttatactatataataataaaatgcttttctaagtaaaagagaaatatgatagtgccgaattagttgaggttttactactttcactaaactaattagtaatattaagcactagctaccattttctgaagcgacaatagattttactatatgtatcatgaacatttattaaaactttcacatatagaaatttatggacatatttttcttttaaaaatatttaataatattttaacaaaatataaatatatattgctaaaatagaggaatgaggtttgaaaatgaaatgataaaataaaataatttttgtatgtatttttataaatttgtctaaattaaaactaatatcgtatatattttctagttttttttttttgacctctttaaatagaaaaattgaaatattacacaaatttttacaacactcaaacaataataatttaaaatttaattattttactaattccttttaaatatctagcttataattataacgcgttatactttgctaataaaaacaatgccataataaaatagttaaagaaatagaagaaaatgcacgtttttttcttaaaaaaaaaaataatgcaaataaaatcaaagtattctagtttcattttgcattaagtaatggttgagcattgtccaagaaaaaaaaaaagtatgattgcatttttcaaaattattatattaaattatatatttatttatcaatttgtacatgtttttttgcagcatctatttatcaatatttacacaaaagagtgtacagtaaaaaaaaactactaaccaaattaagaaatgatatatttattaggtgtgcgttgtttaacttttatcattcattggcttt

SEQ ID NO: 46524 - DNA, 1460 bp, Cannabis sativa
aaaaagcctcacctggtaatttaaaggcgtaaaccgaaatgaaacgttggaggggctactggctagcagacgaaaatagaagtgggacccatgacagctctcttctgacaaatcacgtttcccatttcatctttttcttgtttaaaaatatcaaatataaatatcgaccaatgcatcgtagcacgacacgtcagctacgtcagtggggtcccaccgagtacgctcagtttctgtttggcttctaaatcgtatatctatcaattatcatctatgtttgtttgtgtgggacatatctaaggaaacccagaactactggccccacaactcgattgacaaacacgctccgctatgcgacaacaaactaactaattattattattatttatttttttttgcaatgaacaaactaagtaattgtttacacatgttacggtgcgcttcttaaattacgcatttaccctcgtcctttccactcgcgcagaccggaccccgccgccgtgtgacccttctagagggatttatccgtaatttagttaaatagtttcttgaaattatcatgttatccttccgggacagatccaaatcagcaaggtttatgaaaagatggataattgagatggattgactttgtttagctatatgtctttggacacatcccttccaacaaaaaccagacaatggtttaaatataaagtctacaaatatatcattcattttaaactcatacatattataatacaattgaaattattattaacttaagattggtattttgtcaattgtcagtagtgaattttgggggcctattccatatcgtttacattacattcccatgcaagaaactgtatgctcatttttaatattaatttgattctatgctaaactacatgtactacatgtacatgtaactacatgatatgtaagttatcagctaagttactcttccaattccaaatgagactatgatgctatcattgatatatcatatggtattaatcaaatcaaacagaaagtacaaaaaaaaaaaactcgtgtatatataacattatatgcatgtataattaatttttttttaatcaaattaaattaagtgatattaaatgcaatacatatatattcaattttttttaattacgtaatgtatttttattttttaatttttaaaataggatttaagattttgtagcttggaactgtaaaaggttaggagagacctctaaagttcatgaactgaaatccctggcgagatcgcgtgcgttggattttgtttttttgtctgagctcaaagtggatgccactcctctggtacatactcttaaatccctccacttttatttttacatttatgtgccagggatagctgctactggttgtattattttggcttggaagaatgactttatatttgagtgtgtttcttgtactcgtaaccatatctcgggtctcgtctactcggaccc

SEQ ID NO: 46525 - DNA, 1506 bp, Cannabis sativa
aacgaaaaggtttgtttatatcaataacaccagaattctcatccgtagtcatggtagaaactcaatgtcttaaaattgttataaaaatagttgctgcagaaaataaaaggaacgaagttaccgaattagaatctcggttgagtcgcggactaggtcgctctctttaagacgttcgcggtactgcccagatatggagaattttctactttgatccaacaacttattaggtcttgaagagccttcagacccttttcgaacatcaagcaatagggatcggtgttcaaggttaggaataaacccaaaatggtacactttttctataggcaaggggtcaattctatcaaaagccaacctaccaacagttagggtttgacgtaaaaagagggcctaatcccattcgagactttttaagaataccgagtcgggttcttctcttaatcatatcgaatacaacatgttgagccaaatattcttcatataaaacctgctatatttagatcggaaaaattgtacgattttatgaaaccatgtgctatggctcgaatccgtagtcgatcctatttcagaggaacaaatgacaattgaatctaattttttctattatttttgtatttgtaatattgcgaaaagaaggtgtgactcaatgttgttcaagagtagtggcattgagtttcttaatcttttgccttagggttagtcaatttatttcttgatggggacaatgaaatggatataactcagtggtagagtgtcaccttgacgtggtggaaatcatcagttcgagcttgatgattatccctaaacccaaagtgagtatttctatttttacttgctcccccatcgagatagaatgagaatggataagaggctcatgagattgaggtgaggaggtaggtatggctatgtttctgggagcaaactccaagtaaatatgaagcgcataaatataagttatgccttagaatgaaagacaattttgaatttgctttgtttacgaacaaggaagctatgcgtaatgcaactatgaatctcatatagagtttgatcctggctcaggatgaatgctgatagcatactttacacatgcaagtcagacgaaaagttgtgtttctaatggcagacgagtgagtagcgcataagaacttgcccttgggaggggaacaatagctggaaatggctgcttataccccttaagttgaggagcaaaaggaggaattgctttttttttcatttttttattattatgaatactttgcttaaatttataaattttatttatcttaatacttttttatggagcttaattttatttattcaaattctcttattatggtccaatcttaatatttgttaagttatttttatctacaaaattaatagtgaggcttaaaaaattaattagaattaaactatctttataaatttgtatactagagatagcttaaaaaatacattaaaattaaaaataccactatgtttttctagtaacacttttgacactacaaa

SEQ ID NO: 46526 - DNA, 4154 bp, Cannabis sativa
  modified_base (113)..(123): a, c, t, g, unknown or other
aatagagcgagagagaaaaatgagtggagaggatgaagtttggggaggcgactagaatggaagagatgtgctagggttttttattcatttaagaagaagacgaagaagaagannnnnnnnnnnaagaagaagaagaaaataaaaaaaaaaaaaagagaaaaaaaaaataaaagaaaagaaaataatttttttataatttatttatttttataatctttttaatgttacacggactattaaaaatttaccacatgtatatttgtgtacacgtgaattatgatacttaaatgaaatttttagatggaagtgtaatgagcaacaccaaacttaggttaaatattaaaaaatgtaaaattcaactaatttggctaccaatatcttatgaaatatctaaaattataaaggcccaaatatatataaaaataaaatagggatttctaaagtggttgcagcgctaattgcaataaggatttttatatgatttttagtttcgtaaaaatgtaaaaaaaaaaaaaaactattttaaagtgcaaaaataaaaaagtccctaaaaaaacccataaaaatggaccaaaatatttaaaagagttttaaaaaccgtaaattctactataaatatttatttttaagaatttttccaaattaatttaaaataaattatccaaggagagagcttgagtcgagcagagcaaaggttgagcatcaatggctgttcaactctccggcaactggctacctaactttcccacagtccctggcaatttttctcagacccgaaccaaaccaaagcactcattctctacacttatagctcgctcagcaacagcttcactttcgtctacacctcctactatccaggcaaacttctttttatttttttaattatttatctctggtgtgctgggcaagctttttcttaatggggtttctaaaccaatatgggcacagttttttatcctcaaaagacaattttttttttttcatttacatgaagaaaaaatggtgggtttttattttctagccccattcctgggctgtattccaaaaccttttatgcttcatttggcgtggattctgtaaaatttctgttgtaattgaaagctatgtattctccgtaatgttcttatatgaaaaaaaaattgcagattgttggtgggaaaagtcctagtttttatatacatgaaagttccaattcacatggctcccgagttgaagatgactgggttgatcttgagacagatctttatcactggactaagactcttcgacctgttcaggtacgagttagctatggttaagagtcaagacagttatgaaaatggacatataaggagtgtgttttttattattgcaactgggaactgatattttatacttcaaaatgctttgttgggggattaattttttgcagtggtatcctggtcatattgcaaaaacggaaaaagaacttaaagaacaactcaagttgatggatgttgtgattgaggtgagagatggcagaattcccatgtccacaagtcatccacaggtgggagctccttactccagagttgctaaagttagatgatcagttgaatcaagtaccattctaattgataaaattgttagtagattatattataggctctgtaaatgcaacattattttctaatgggaaaccaaatgaagaataaggaagtgtgggttcgattggtacacagtgtgaccaatacaagctttggaaattgatatgccagtaaatattcttgctttcttaacttttcttagaaatttcctcaacagatggatgcatggcttggtaataaaaaaagaatcctggtgttgaatagagaagatatgatatctacagcagaccggaatgcttgggcagattattatgcaaggcagggaactaaagttgtctttgcgaatggccaacatggaatggtatcttttccttaagttttcttataataagaagagtgatacctaaggatattcttttgtatgttttcgataatttgaacaagaacataacagcaaaatttaagtgcagggagccatgaagctaggccggttggccaaggcattagctgcaggtgtaaatgtcaaacgtagagccaaaggactgcttcctcgtccagtaagttcctaaatattgagatattatgctaaagttgaacattacagtaattattgattttctttgttcttaatttagctgaaaaagttgtacatttttatacacacgtataagtaaaatgtaatttgtttgtgtttgttatgcttcagtaattgtctttttcatttttttattgctgctactctttcaattttcaacatttttctaaaacattattggggggtctgtgtgtttttccttacaataggtttgtactttgttgatatatgtcagctttttaaattattaaaaattgatgcctggcaagaattttttattacacataggttcgagctggaatagttgggtatccaaatgtggggaagtcttctttgatcaaccgattgttgaagcgacggatgtgtccggcagctccaagacctggtgttacaagagtattgaagtaagccatttttcttttgtattgtagcatatacaaataagggttagtgacatattagaggctcttctcacatatttttgttgttcctatcaaaggtgggttcgttttgggaatgatcttgaattgttagactctcctggtataattccaatgaggattagtgatcagtcttctgcaataaagcttgccatatgtgatgacattggagaaagatcctataattttcctgatgttgctgcaattcttgtacagatgctgacaaagcttccatccgtaggtatatatatgacgcccgtgctttaatatttcttcatagcactatgatggcattggcattggcaatgacttaagattaaatcatttcagagtctgctatggtttcttattaacagtttagtttgttagtttgattttatggaactgagtgatttttcaagtactttgccatgtgattttcttatatcatctatttcacttcagcatatgtctcactcaaatattttaccccgatcaggtatagaagttcttcagaaccgatacaagatcgatgcggatggccactgtggtagaaggtaagtgccactaaagtaatttctttgcacctggaaaatacaatgtggtaactgctataaatttttgttgtgaactggcaccttttgcatcaaagtaagaaaattttaagattggatttgggaaataagaaaaagtgaagaaatgagttaagattgtgttcttttttctattttgttcttattgttttctaacatgcagatttgttcacaagcttgcgaatcacttgtttaatggcgacgataaccaagcagcatttcgtatcttgtcagattttcggaaaggcaggttcggttggattgcattagaaagacccccaaagtaataccaccatttaaattagtggtagattaaaggacttgtcaggcttcaaaagagaatatgttcttagggaactgaagggatgctatgctgactactgagagaggtataatttcaagtccatttggattctgaagtttctaattcatttcagcattgatgaaaggaaacaaggctgtttgatggaagaaagggttcactcaattcatcaggctggttggaaatggaaactgactttggagatgtatacagcttgtatatagctaagatagtctttttcaagttcttagcgggtccagtgatgatacaatacaaccaactacaataaaaaacataaagagggcttgctcagtttgtattttaattagaaaattttacatgaaaaaaaaaaaaaacaatttttattacccttttacctctacaagggtcggacaacttttgtaccactttttttttttgttttatattaaaaatatcacttacacacctaaaaacatctccaatggttaaatattagaagatgtttacttatttggcaaaacatgaggatgctatactattagagttgaataggtgctattagagttgacattgatgttatctcttttcaaaaaaaataaaaaataaaaggtaaataaatagtgtgataatatttaagggtgtttataaaatagtcgatccaatctaatccgcaaagtg

SEQ ID NO: 46527 - DNA, 5876 bp, Cannabis sativa
  modified_base (4406)..(4436): a, c, t, g, unknown or other
atgtgggatgaaattcaagaaatttgcccaagaattccttgtacttgtgctgcttctgtcgataatcttgcgttcttgaatcaaaaacaagtccttcaatttctaaaaggtttgaatgaatcatttttccctgttagagcacaaattctgctcattgagccttttccctcccggtcgaaagttttttccatggtaatccatgaagaaagacagaggaaactcaaaaacccccaaattcctacattcattgctactgtccaggatccttctgcttcagctgttgcacaaaatccttctgcatcagctgctgctgcaaaccaagggcacaacaaacgcatgagaccctattgtaccaattgtcacaaaccagggcatctcaaagaaaaatgctttttcttgattggattgccaccaggttatggtgacaagaagaagaatgacaatacccaaccctcggctaacaaagcatccacatcaacagactctctttttctcttggctaacatcaccaaacaagaagatattcagacactcatttctctactaagtcagaaattacagcctacctcttcgattgcagatgcatctcaaccatttgcttccaacataactggtaaactcaaacctttttctcaaaatttatcgattgtagacagtggtgctactcaccacatttgttgtaatattgatctcttttaccatttacataacaaacctattgctacttccgtcaaacttcctactggtttatgcattaccatacaaaaatctggtagcatcaaattttctgacaacttaattctccacaatgttctttatgtccctgaatttcagtacttcaacttatttagtgttcctactttcccagacacaccatctcaaaatgttttctttactaaatcttgttgtgttattcagggttctctgtacaagaggattgtgattgctaaaagggttggtcatttatactttccgctgcaacaacccaatttgtttcctactgtttttcatccatctacttgtaataattcttgtaataatgtccattcctggcatgccaggcttggacatccctctatttccaccacaaactttgtaaacaaaatgcttcatttcaaggattcaaataaaattttaccatgttctatatgtcatctagctaaacaaaagaggctgccattttcttcaaataataattttgatgcctctagttttgatcttatacacatggatatatggggcccctttcacatacatagcatagaagactttcattattttctaactatagtagatgatcacaatcgtttttgctgggtttatatgttaaaatcaaaagttgatgttcaacaacttatccctcaattctatagccttgttcacacacaattctcaacaaacatcaaagcaattcgatgtgacaatgccaaagaattgaatatgtcttctttctatgtacaaaagggtatccaaacaaacaattcttatgtggaaacacctcaacaaaactcagtttttgagcgaaaacaccaacacatactaaatgtagcaagagctttagcttttcaatcttctcttgtccttgtctactggccatactttatacaaactgcaatgtacctaataaatcgaactcctacacctcacctacagcataaaacaccacatgagttgctatataacaaacctcttgcttatgatcatctcagaacttttgggtgcttggcttatgcatcttcactaacaagtaagagacataagttctctcatagagcacatgctcccattttcattggctatcccaatggcatgaaagcctacaccttacttgatattactaccaaaacaatttttcattcttgagatgtaatcttctatgggaatgtatttcctctcaaaggttctactaaccataatcttgaccattttttctctcaacacactgcagaaaataaccccagaccctgctctgttgcaacccccacaaatgttgcaacacctatgcacaggcctcctactgtagcagcagaaaaaacacccagacctaccacttccaagcattgcaactctacatccataaacgtcatggccaagccaatccctacaggcattcaatctggtattcaacaccagcaacctatagaaccaaaccctgtagcatcagtttctgcagataataacaaacaccagatccctgctgctacaaaaactaaagcggaaagaatcatcaataaaccaggccacttcaaggattttatgtgtcaaaattccactgcacacccccttgacaaatacctatcttatggtagactccataaaattttttgaaatgctatacttcaagcatatattgaactcgaacctacttcttatagccaagccaaacaatattctcaatggctcaaagttatggataatgagttctttgctcttaagaaaaataatacatggaaagttgtctcccttccccctggattccatgtcattggaaacaaatgggtgtacaaaatcaaatacaattctaaaggagaggttgaaagacataaggcccgtttagttgcaaaaggttacaaccaacaacatggcatggactatgtggaaatttttgcaccaattccaaagtttaacactctcaaacttctcttttgcactcactgccataaataattgggaattacatcaaattgatatcaacaatgccttcttacatggtaatctcactgaagatgtctatatgtccattccaaaaggctatgttcatgatggtcctcttcccccaaatgctgtctgcaaactcaacaaaagcctatatggcttaaaatagtcatccaggcaatggtttgctaaactcagttccactctcctattggtttcaaacaatcacccaatgaccattctctattcattagaactacctctaccaacttgctagctctcttagtttatgtcgatgacataatcattgctagcaacaatcatgatgatgcctctgcctttaaactattcctacactcgaaattccacctcaaagaccttggctcccctcgattctttctcaggttggaaatagctcggtcaaaagcaggaatagccatttcccaaaggcccttcatacttcaactattatcagattcaggctcccttggcacaaaagttgtctctacaccaatggatgctacacttctcttagcaaagataatggaccaccagttgctgatcccacttcctataggagtttaattggcaaactcctttatctaaccattagaaggcctgacatcacttatgctgtcaaccgcctaagcaaattcctccaagatccaagacaaccacacatgaaagcttccattagaattctccaataccttaaaggcacacctggtcaaggcttacgttttagctccagcaataaccaaaataccaacaactttcaacttcatgctttcaccgatgctgattggggcacttgccctgacacaaggccctctatcacagggtattgtatctttccttggcaactctctaatatcttggaaatcgaagaagcaagcaacaatatccaaatcctttgcagaggttgaataccgctccctagctaacaccacatgtgaaatcctatggctcttcaaaatcctcaaggactttggcatctcacatcccacaccttgaacaatatattgtgacagccaagctgccctccacatatccgagaatgcagtcttccatgagcgcaccaaacacatcgacatcgactgtcatattgttcgagatcaggtcactaacaaccggctcaagctcattcatgttccttctcggcataatgttgtagacataatgaccaaagcattgttccctactcaacacaaattccttttgagcaagatgagcatcatcaatatctactgctcaccttgagggggcatattaggatgtccacatcacattctgttaaagttagttaagattactgttagttagttaggactaactctttgtcagcttgtaacaaccctctgtataaatactttgtttctattattatcaatcataataaagatttgattacactaatagtcttctagccatgaagctattatggaagagtttggagttttcatctccatctttgggacaagctaacatttcaccattgttgctctataaacaagcttatgtttttctagtttttcatcttctttcttcatcaataatgtattatacaaaatttctggccaataactttgttgacgatcttacccttaaaagtattaattttaatacgatacaataatacgaattatcagctgtaataaaaataataaactatatgacaccatatttgaaagcaaggatatgcctgtttttacaaaagtagtagaagaaaaaccattattattattattatnnnnnnnnnnnnnnnnnnnnnnnnnnnnnnnattattattattattattctaaatgtataattagtcttacaattgacaaattgatcctcaatattttttttttcttttttgttcgtgtaaattggtcctttgactttgattttttgcataaataatctctatggttagtgatcaatagtcctttgctaaaataaaaaaaaataaaaattcgaagttaattagtgaccaataatttgtctaataaaaaaataatagagaacaacttaggaagctatatatgtatttttagagacttcacaaataaaccattgtcaatttctccaatatttgtcggtaggcaagctatttcgggagcacatatagtgctataccgaaccctttgtaattttcttttcatttcattgaaatatgtccactttccctttcaaacttactattatttcaaaatgtactttggctcattttcataaatatatataaacacacaccaaatataatatgacttgtacttttctaattaaagggctgcatgaaagcgaaatgctaaggcacatgttacaaaccgtgttatacttccaacatattttaatttaataaatttgaaaattcctaactaataattataagaggatgtgatgttgagtatacttcaaagcaccaaataacaatattattaatgcttgcatgaaaatataaatgtgggcaacatagtggatttgtaacagcagggtgatcatcaattgatcataataatatatattcagctttgttgtagtcagaattgaattatatatatataataattattatgtcagagagtatgagtatttctgtaaacggccaatctcaaattcctcctggcttcagattcaacccaactgaagaagagcttttgcagtactacctgaagaagaaggtctccaaccagagtatcgatctcgatgtcatccgcgatgttgatctaaataagcttgagccatgggatatcaaaggtacgtacgtataatatttatataggccgtataatattaaattgaatataattatatcaatgcccaaaaaattggtgtaatatacaatacacgttactgattagtatattatatatgatattaattaattaactgttttgcaattcatgttatatatatatatatatatatatatttttttttatggtaaaactaagtacgtacgttcttataatagatttttgttattttgatctaattaatatttttgaccgaaatttattcatccagacaaatattaagttttaacacaattttttttttttttaatgaaagtatatatttccaccaaaataatacttgcatcttaacgaaaatttttattatatcattagtttattgtataattatataattttatttttatacatgcaaatatgtgtggttgtacattaaatcttattatattattcatgcaaaattttttaagcaaaaatta

SEQ ID NO: 46528 - DNA, 4181 bp, Cannabis sativa
tgctcccttcaatccaaaaatttgtggtttttccacctgaaacatgaatcctctgactgataaaatgaaaggaacaatgactcttgctgaagaagatgaatcaacacttatccttgatgatgttgatgtgcaaaatagtaatttggatattgtgctggttgctagagttctcaccaccaaatttgtctttctctctacattacaaaggcaaataaaagattattggaatggggaaggtaccacacaacaatatttgaaaaaccacctgatctgtttgttcttaccttgggatgtgaaagagacaagccaagggttctactgaaggagccctatcacttccaaaatcaccatatagtgttatacataccaagtgttctgaagaaagtctctgaagatcttattttctctcttttttgggtctgatgttatagacttccttttcttagtaagtcgaaaatattagctagagctttgggaaacatcattggtgaattcctggaagtccatgatgattggttggaagaaagttgggtccttttctttggtttcgggttaaattggatgtcaccaaaccgttgttaagaggtcccaacatacaacttaaacaaactagagacaaattttgggtggatttccgttatgaaaggttaccagaatggtgtatggagcgtggaaggcttggacatcctttcccgaattgcttggtatggatgaaaagtataatggtattgaacctgaaatactatatgttcctgaattaaaaggggttgcactgctcacatctggatatgataggtatagaacggatttttctaaagagaatgcatggcctttgtgtttggctagaaattcacttgtttcagcggtactaggcctctctagcagaacaccaccacagccaaggccacttttgtcaggagaatcttttgagaagcaacataatgaaggaactgaagccttatctgtcaaatccactattctcgtaagtgtaatctcttctttgataaacactgatgcttctagtacttctgctcaaagtgtagcagtcatggacactaacttatgtgcaaatgctatcacaccaccaccgactattgtgaaatttacactagcactcttaactaatatcactaacaagaatattggtgcaaaagatgaaacctcatggccatccgcttctataattgctcaacataaaacatcatttgagcatgttgatgttaatgatctctctgatatctacatgccagatgttggcaccattgccacttatcctctaagtccatccataactaacactccacgtgatgagcgtggtttcaagacgttgtaaatgtccataattgcagcaacagatgttgtcttatgttcatctgtcaagcagtctagagataagggaaaacacgtctccaaaccgaatcatcaagagacaatctgatagtctctctctgcggaaaactctgaagcaatgcaggggtcctacaacagccttgtccaatccaactttgtcacttggagttgagccaaacgagagtgtttctggtctagaagtggatcactcaggtttctttgacaattcagcggcggctggctcacagccccacaaccagccatgaaaatcattagttggaatgcgcgaggcctggggaatccgagcgcattccgtcattttcatttggttgtcaaagagcaatcccctcatgtattatttattatggaaactaaactaatttttaatgtaatttctcgttttcataatgctttacattttaataatggactcgaagtcccactggtaggtcgaggagggggtttacttttactttggaaagatgatgttaatgtaacactactgaattttagttcaagtctatttgaatgtttttggcttttggggatagtcctactatgcatttcgctgctttttatggttctccggagcaaaataatcgatgtcaatcatggacaacattcaagaggttacgtgatgttgctccgcttttaccgtggcaagtgattggggattttaatgagatactgccaacaaacaaggaaaagctttgagaaatgagtctcaaatggaggactttaggcaagctttagaccattcttatttgtctgaattgcctgttcaaggtgacccattcacttgaattaaaagtccgcataaagttgataagatcaaagagagacttgattggtgttttattaatgatatatggaaaacaaagtttgagcccttgatcactaatcacttagactactacagatcagatcattgtgctattgctgtcaatgtccacactatcaaccaaaggaccgcacaagtcaaacataaatctcgattcaggttcaaaaaaatgtggcttaatgatgttgaagttgctgttattataaagcaaacttggaactcctcaacttcaacaaatgccttggagcttttcgtgaataatttgcaaggttgttcttcatcgctacagcagtggcatacccgaaagtatggcaacatgaagctagatattaaaaaaaatgcattagaaaatttctgcattaaacaatgacagcaacatgtcacatgattcaattgtggagctcaaaaattctaagacaatactcgacgatttattagcacaaaaagagacttattggcagcaaagatcaagagtggattggatgaagaatggagaccaaaatacaaagttttttcatgctcatgctacatctagacgaaacaataatacaatcaaatcaataaaaatgcagctggtgttacagaatcatcacagcagggaatgactgcaatcatttcatcttattttgagaaacttttcactgcatctcccatagactcctcggcaattcagcacacattaaacaccattcctacaacagtcactgctgcaatgaatggaaatctaacaaagcaatttacacctgatgaaatacttgcagctttgaaatctatgagtcttgataagagtttcggtagtgattgatgtcagctatgttttatcagaactattgggatattgtaggaccctcagtaactgatttggttttgggagttcttaacgatggacagaatatggatatgctaaataaatcgattatcactcttatcccaaaaattaataatccaattggcatgagtgactacaggccgattagtttgtgcaaagttatctacaaattgatttcaaaagtgttagtccttagataagatgttcttccatttgtcatcttagagactcaaagtgcttttttatcgaaccgtcttattacagacaacatcttggtagcttttgagttagtccatcatctaaagcataaaatccaaggaaggaaaggctattgtgcactcaagttagatatgagtaagggtttagatcgtgtcgaatgggcctatcttgttgttgtgatggaaaaaattgggtttgatgacagatgcatatacctcatcatgaaatgcctttctttaacaagcttttccttttccttaaacggagaaattgttggaaatgtcattccaaggagagggctaaggcagggtgatccgttatcaccctacctatttttgatattttctgaaggattatttcgattgttgattcatgaggaggttgttggtaatcttgatggtcttcgtctcacacgacatgctccatcgatatcacaccttctatttgcagatgacagcctcttgttttgtcatgctacaaaaaaaaatctagctttaactattcaaagagttcttcaaacttatcacaaagcatccagtcaacttctcaacacacataaatctgtcatgtccttctcgcagaatattgaaataactatgaaaatgtttttccatcaaacattgaacatgcccataagtgattgtcatgaacgatatcttggacttcctgcatactctggcagagacaacaaagaaatgttcagtaacatcaaggaacgaatatggaaatttctcaatgcttggaaggaaaaactattttctataggagggaaagaagtgctcttgaaagttgttgtccagtcaataccaacatatgctatgagttgtttcaaacttccaaaaaaaattgtaaccaacttgagtctatgatggctaacttctggtggggctctaacaaaaatggcaataaaattcattggaagaattggaatttattgtgcaa

SEQ ID NO: 46529 - DNA, 1938 bp, Cannabis sativa
ggacgcttatgcgttctctgatgactcaatcggtgcaatcttggtgtatgatcggagacatgaataatctcctgaacttcagcgatcagggtggtggacgcagctaccccggtggttactggaaggtttccaacaggcagttcggagctgcaatttggttgatgtcgagctccaaggccaccgttacacctgggagagaggcaggggaacccaacattgggtggaaagccgactggatagggctttggtctctaataattggtatgatttctttccccaaactagattaattaatctagaaacatccacatccgatcattgcccaatttttcttgagactgaatgcaattctattcctagttctaataaaaggtttagatttgagaatgtgtggttgaaggaaccagtttgctatgaaattgttaagagttgctggaatgagagtggccatatggatgttttttcaaagattaattcttgtgcttcggctttaacaatatggggaaaagatgttactggcaatttcaaggctagaataaataaatgcaagaaggagttgaagctgttgaagaacaagagagactccctgtctgtcaatcggtatatagaagtgaaaaagcaactttttgcaatcttagatcagaaagaggctttttggaaataaagagctaaacaattttggctcaaggatggggatcagaacagtaagtacttccatagagcggcaagtaacagacgaagtcacaaccgcattgtgaaactgaaaaatgacaatggcgattgggtagaatgggatcatggattggaaaatgtgattgttgactacttttcgaatttgtttgctactgatggtagtgcttgtactgaggtgattgactgcattcagtcacgtgttactagccagatgaatgaggaattgactaggaatgtctctgtagaggaagtgaagcgagcagtttttgatatgcatcctgataagagccctggtccagatgggatgacccccgcgttttatcaaaaatgttggggaattgtttgcaatgatgtggtcagccttgttcaacaatatttcagtacaggagttcttccaccgggttgttgtgacgctaatatagttcttattccaaagaagaaaaggcccgaaagaatggttgatttaaggcctattgcgatatgtaatgttctgtataaagtgatcaccaaagttatggcaaaccgaatgaaaccttttatggatgaaattgtggcggatactcaaagtgcgtttatttcgggtcgtcttatttctgacaacataatggtctccttcgaagtgcttcattatttaaagcagaaaagaaaaggaaaagaagggtacatggctcttaaattggacatgagtaaggcttatgacagaattgagtggggctttttgagagcgatgcttgctaaacttggcttcggtcagtcttgggtgaacttagtcttaaattgtgtcacttcagcttgctataaggttactcatggaggacgtgacaatattggccctattgtaccaagtaggggaattcgttagggggatccgttatcgccatatatttttatcctttgtgctgaaggactttctgcgcttattcggaagtatgaagatcggggctgggtacatgggtgtaaggtggctaatggcgctccaaggatctctcatatgctctttgcagatgatagctacctctactgtaaagctactgttgcggaggcgttgaaaattcaagagttgcttcacaaatttgagatggcttcgggacagaaagtgaatttgaacaaatcctcaatattttacagtgtcacagacatcaggcagagatatgacattaatcagttattgcatatgacacaagcggatgaaaatagtctctatttgggcctgcctagtaaactggggagaaataagtctgcagt

SEQ ID NO: 46530 - DNA, 1598 bp, Cannabis sativa
  modified_base (1536)..(1560): a, c, t, g, unknown or other
taaaataatttccaacacgaaccagaccatttgttcacatgggtgctcgggccttgaaatcgagctcccgagattctgttttacatacttccaatgtttccaaggcttttgaacttgaggatgaggtctctcccctgtttttgaccatttagattcaatggttacattggatttgacatttgagcaattgaaggtagcgtcccaggtttattatcaacttgggtgctgggcccaacaccacgttaacatgggcactgggccctatttctagggactcgggtttgtagttttctcgctaagtgtacctaaatcttagttatttttaatgacggtgaagatgcccgaaacattttttgctgaactggattggaaatagcctaggttgacaaaatgccaacctgggcgcagggcctagtccaagtgtcaacctaggcgctgggtccttcttctagccctttggaagttccgtttggtccccaaaatagttagtcctcaatattttctgaagacgaagatgatgctcaaaagaattctggaaaaactccatttttatggcctaggttggcaaattgtccacctaggtgcaaggccaactccaagtgtcaacctgagcgctgggccctttttttatgcccaagaactatttttgttcctccgaaaggatttatttcacggttttgatgaaaatggatttaatgcaaaactaggatcttcgattggatgcttggaaggcgcccaaattgacagattgtcaaccagggtgttgggtgctcaggggccctggggccctgggtgctcacaaataaaatttctccgaaattgattctgatgcctcaaacatgcccgcggtatgtcaagtcaatgtcccaatgcatgttttggccactttgcactaaaacggtctccaaaagaaaaacacttgttgaggatgtcaacttgggcgccaggtggaaacccttagtgcccatgttggttttcgggttgtaggttcgtgtaattttagcttccggacattgtattaggttgctccatgccttgatggtacatgataatgaaagacaataggtttgattcaagttattaaagtttgaacttccaccctggagattccaaagtcaacctaggcgtagggctaaggtcccctccaaagttgactactatgactcgggtctactcaactccgtgatgtcatccttcatgcgacgtgtcaaataatgatgtccacgtcaccagaaaaaaaattcgggttaacatttatttttagaagaagaagaagaagaaaggaaaaagaaaaagaaaaagaaagaaaataaaataaaaaataaaaattatatatatattttttattttttattttccattattttttaattttgaaattgattcaaaatatttttagtattaggtagacgcttaaatatttgtcacgtgtatatttgtaaacactgtggcatgttcaatatgatacttaacatagttttttaaacagaaaacgtaaatagcaaacaaaagaaaaattaagtgcatgtttggcannnnnnnnnnnnnnnnnnnnnnnnnttttaaaaacagaaaattgtttttaaaaacaatttggc

SEQ ID NO: 46531 - DNA, 1195 bp, Cannabis sativa
ccctaagattaaagaatcggattagcaaaccctaactagttaaatgtgtattaatgtggaattatattattatataatttaatatatatgaattatactgataaatgacatgtagagaccccattgttcagctaggagatttttataattttgacccaagaagggtaaaactgtaattttaatgatatatcgtgcttatagactatattattatatagtatatgtattctgtctttctacgggtgttctctgacaagttggtgcggtatggtcacaatcgagtattttgggtcacaccgagttcggggcccgaaatatatttttgggattttattttagtattttatgaataattgagaaatctaaaatttgtatgttatttgtgtgtgtggtgaaatggcaattttacccttgatgagtgtgtatgcttcttttggccttggagggtattttggttatttgaccaactaattatattttcaataaaatataattttgagagaaatgaaaatcaattttctggatttattcaaccccttaaccgaactcttcctctctcctttcttatcttcttcaagttgataatttttgagaatctaaggcttgattggaagtgaattttgtgtagttcttggagttagaagcttggaattggtggtaagcttctaagatctcttttattgagttttattctgacaattaaagtttgaaaatcaagttttgttgttgtttaagttgttgaatgcatgtgtttgaaaataggattatttgtgttgttttatgcatgattttgtgagttatgctcctagatcattttgtgtgtttttaagattagaattgtagtttaaaattctggtattgaagcttaatttgtgtgattttttattctaaaatgttgggttcacaatttgtctctttcctagggcacatagtggataaatatgggatcatggttgatccggccaagatcgaagctgttcgggattggccaataccaaaattggctactgaagttagaagcttttcgggtttagctggttattatcgtcagtttgttgagggtttctctaaaattgtaacacccctaacgaaactgacccaaaagaatttgaagtttgtttggactgatcagtgtgagaaaagttttcaagagttaaagcagcgcttgatcaccgctccagtattaactcttcct

SEQ ID NO: 46532 - DNA, 2283 bp, Cannabis sativa
  modified_base (542)..(543): a, c, t, g, unknown or other
gagagagagagagagagaacatggggcgactgtgtattgtggtagggttagaatgtttacgtttgatatatatggtagggcttttgtggtgtaaatgtgcttcgtcctttctaattttaattaaatctttattgcgtcagtttgtaattgacgctgcattacgtttgctataaatcgacgcaaatactctaaacgtcagttttaagctgacacaaaagtagtgttggttctaaaccaacataaaatttttatgtgatatttttatgtcagttttaggtattaactgacgtgttgaccgatgtaaatagcccaatttgtcgtgttccaattgattataatgacaaattttttgggtatggtgaatagagaagtcgataggatttgggaagagagaaaaagaagagaataggattatgaggggatattttggagtttagacaaaattgtgatcatttttaagaggaggagttctatttgcactgcacaaaatgattagtacgctcccaatatttaaaaaaaattaagtttaaaataatttttannaattacttttaatattttttttttaaaaaaattctcattattttgtgttaatttcaatatttattttaattttatttttatatttttttagggatttttttatacttacactttaaatatagttttttttttttgtatttttacggaattctatacagaaacccctatagcaattaacagaccaatttaaatcgcaactaaaatctacatagcaacccacatagaaatcacaagagcaacctaaaccataaatttgaaatgaaaaaagttaagaaatagtatatgggataattctcctctttttttttaatcatgtctatttttttttctaataaaatttcgtataatttactattttaaatttttgttataatatttaaaatataatttatttttgtttgataggtagttttttaagaatatggataggaacttaaattataaatttgaaaaaaaaaattaataaatagtatatgggataattctccttttattaatcatgtctatttttttttaattttttttaataaaattttgtatatttattattttaattttttgatataatatttaaagtatatatttttgtttgataggtagttttttaagaatatgaataagaaagaaaataattttttattttatgtaaaataaaaattatgtaaatagaatgtatttatagatttttaaggcgtaaataatttttttttacaagagtgtcaaactgttgagtcattttttaattttagcattaatttatacattaataatcaaattagtcaatgtaagagtattagtatagcatattccacatatgcatatggatatttaatatttagtcaatatatgttcatatatgcatatggatattaatatacatacattactgtaagaataaaacacaaaaatcattatatatgttttatctattatatatattttttgtattattcatttgtacggtatggaagaagaggaccctacatcacatgggttttcgtttgtgtggggtcttggttaaattgtgttcaaataatcttaccataattagaaatgtaataaattgacaattcctctcaaaaaaattaatacattgacaaaaacatctctgatatgacacaataaattggcccttgtgatattaattacatatggacaaaaaattgcttaagaaaaactacaaaatcatgaagaaatttctaattattgtaaattatatttattaatttacaaattcaacattatcactctaacagtgctttttcttcttcttttcctttcctttgatttgaattaaagattttggctttcttctcttcagttctgacaatatatatatatatatataaaaattatctaaatgagaaaatattaagagtttacttttttatggcataaataaataaagttaagtagttatgggtttttttatttttttttatacttatatgggtttttctttatggcatatttttgtaaaataagtataaatctcatatttgtaaaacaataataagttttgccggaaaagtcaccgacaccgaaaaagtcaccgaaaaaatcacggtcgccaaaaaagtcatcgaaaaagtcaccggaaaagtcaacgtggccggaaagtcaatggaaaagtcaacgtcgcccgaaaaatcaacgtcgctggaaaaatcacctaagtaattgtctcatatataactaaaattataaccggctatatgaataaaaactaataactcaaac

SEQ ID NO: 46533 - DNA, 1513 bp, Cannabis sativa
tagatttcattgtcaaaaaacatcgattttctttatggcatgtctcaaaacattgtctcacataataagaagcaatttggtaatgtttagctcattgaattctgtgaacaagagtgatcaaaactctttttgttgtcactaggccccaggccaacagacaagtggaggcagttaacaagatctcaaggtaacccttagaaagaagccccatgcttgcaaaaacaattggtctgaaaagttactacaaatactttgtgcttacaaaataatattccaatccacgaccgagcattcacctttttctatgacatatgggtgtgaattcataatcttggttgagaccctagtctcttcgcatcagcataacacttatgatccaactacaaattatacatttctctaggaatctcttgatctaatcgaagggctccaggactcatctcaagtgcagtcggaagtatatcaacagaatgtcgcttgatactttaattccaaagtgaaagatcacaaatttggtcttggagacttagtcttgagatgggtctttccagccaaacaagatcctagagtgagagtgataggtccaaactgaaaagatttttatgagattgacggaacagtattccttaggacctacaatttaaaatacctcgatggcacaaaagtttcatgtgcatggaacattaaacaccttcacaagtactatcaatagtctggggagaatgtacataaaattgcctttaaattctcaatgtaagccttaaaggcgattatcaatgaaaatggcatacttaaaatgtcataggaattttcggagcataaggtcttataaatttttattcgcaaataattgtagcacagcaagtgaccaaatcatcttaatgctccaatcacttgggggtagctgagcccaagtgcctattttaaaagttaccctagtcttaggtgcaaacaaaataggccagcatgggcactgaaatcataaggatccaaatgaattgtccttatcaatcaaaaattattttcatgctcaaaattttttaaaatttaacacttagcaaatcaaagtgatcaccaggattagttttaacttgtgctgaaaagaaattggaaaagtgaaagtagttaatcgttggaactatattttcataaaggcaataaaatctcccaagctaagcataaaaagagcaaagaaaaaaaaataaacaattgaaaaagtaaataagcatattataagcaattaaatatattattcaagcgaggtttagagttacaaaccatagacatggggcaagtttatataaaaaaattctctctttaaataaaagtgacgtctgatcacacttgaacttatgaaatattaaaaaaaaaaaaaagttcagatagaagagttattctttgacttggtcacgagccaccttgagaacttgtccctagacttgctcttggacctaatcttgtgtcacttcttcaacggtatggccttggcactttgcccaagattgggaaacta

SEQ ID NO: 46534 - DNA, 1711 bp, Cannabis sativa
atcttatgtgtaagcttttattcggttttttttttttgaaaaaaaaaaaataaaagaaaaacatttgtctatattaccttttaacattacgcttactgaacttgtttcaggtaccaaagaagcacaactgcaatatcaataggtaggttgtttgggaatttttttttcctcctaatacatgcgcaatacatatatttttaaatatcttacatacactgctcaaacgttcattttcattttccagttgctccaatatgttatgcccatcttgctgcatatcagatgggccagttcatcaagttggacgatttctccgatacttcttcaggacagagatcagttagttcttcgggtagtattcctgttccagatctccctaagttgcatgacaatgttaagacctctatgtttttttgttgaggtgctgtggactggatagcttttggctgacatagtttgaatttcttttttacactgaagaaaaggtctttgacaacgtacatacatagattaacaaaaggacagatggattttagccttttaggtgggtaatgtagtgacatagaaaatactggaaaagaatagtttagttcagttatggaatctttgtgatgcacagtacttttaggtcaacaatagttaacttcattgtttaggaattgagttatctggaaaaccaattgctcgggaaaagctgtaaccatttatatatatatatatatatttctaaatatatatatattggaattttgcgattgcttaaatcttgagagtatgtatgtctatggcattgtgacaatggaattctgctcttttatctcattattattatttttatttcaatgctttgtatttatagtttctattgtcgtgtattgttccacaatacaactccaaaaaaacaattctcactctttgaatattagaaggcactgtcttttagttatctgaaattgttagatcgtccactctgttgaaaaaattgggtaattaaaaggtttgaatctctcagaaatgtttactttctcggcgatgtcttcactgccggaccggaggaatgagcgatttattctcccaacgtaagtacaaaattttgtgatcttatcatttttttttcttccgttactgtgggtcctgcgtctcttgtgaagtaataattattaatcaaatgctaaataatgaaatttgggtatttgccttgcactaaattctctaaaaatatacaaaaatggtggttagaactaatttaagcttgttggcgatcgctttcgagataattttgtagattatgttgcacaagcttatgggtctaaaatccttaactgaagagggttgcttggtcttagggatgagagttataagagtggtgttaaggggtgcaatgtccccatctccattaaggaagctaagcaccacagataacacatctttcctaacaagcggccagtttgctgtgtaaaaattggagttgaaaccgtcaaggccaggagctttatccgaagagagctgagagaacgctttctcaacttcctcaattgaaaaagttccatccagaaaggatttgtcgatatctgacaaggaacagtcaatgccatccaaagaaatttgcatgtcataaaatgatgaatttgtggaagagaagagcgaatggaagtaggtttcgatttcatgagtgatgtcttcctctgtggtgacgattcctccattctct

SEQ ID NO: 46535 - DNA, 1255 bp, Cannabis sativa
cctttctctctcctcgccgcacttagcttcattctctctctcttccgcaccatcgtcatcgccgatcgtcgttccaccacgcgctggccgtcgttctcgcttgattttcagatttgcggtgattctataaacttctaacatattttgtttgttgatgagattttagctaattgggttttttaaatgttcgaatgattttcccttaagaaagaaaaaaaattccgatttctggtttggattatctatttctatataacactaaagaaaattgaattttgatttttggcatgaatgaacagcataatctttgtacatatatcactagagattcttctttgatgtttttttttcttcataaaatgagttaatcaaagttgatatgggttttgatttaacaaaagttgatatgttgtatttatagctgtgaaagttggtcttacattttctattgtatatgatgtaacaactagtatcagcattattcagtaagttagaatgtgtacattgtgttcaaaagttgtgttatcttatttatttattttcataaagttgtgttcaaaggtaatactatggacaaaggacactaaagaaagtgtattttcattattcatgctattatattgtgttactgcttgtttttctttgggtttgtaacaaattgaacctgaacaggacacaattctgtgaaatatgaggggaaggagctacactccatcgccaccaaggggttacagtcgaagaggacgaagtccaagcccaaggggtcgctatgggggtcgtagcagagatcttcctactagtcttctagtccgtaatcttcgccatgactgtaggtaggcacacgtctaattccaattttgtaacactaaatagcagaaatatttggttaacattctgttctgttgttttatttaacagaatgctgtgtatgtaccaatgcatgagtgttatagtatccctttcttactattattaacatgtgctattttgcaggcaagatgatcttcgcaggccatttggacagtttggtcctcttaaggatatctatttgccaaaagattatcatactgggtgagcaatagcatgttatcagtgattatgtgtgttgaatatttttgatgatcaaattttcgttgatgtactaattttatgaagaattaatagttagattcatgtatttttgtgtagtcgtgccatattggtttgaatttcatctttgtcgaggggaaggacatttaaatttgtatttgtgttt

SEQ ID NO: 46536 - DNA, 1374 bp, Cannabis sativa
cgatgaggacttgtctccaactcttgttggcttagaaaccgaagaaaccaatgctaagacagactcaactgcacttgagccacagaggactaaccggttcctcaacctcaacaccaaattgactaatctcgaaattccaaaacaacaagatataattgagagtttcaagtgtgatgaacaagaatgcttgattcaagaaaacatgtttgatgaacaagagcatgatgaagaaaatgaagtggaaaatgtccccgaagaatcgattctcaagaggataaactcgcgcaaaggaatgaattcataccaattgggaaaacaattgtcttgcaaatggacaacaggtgcagggcctcgaattggttgtgttagagactatccatccgagcttcaatttcgagctctcgagaaagtgaacttgtccccgagaggtgttgctcggtctagatcatatttttctcctaagatcattagtggtttgagtccaaatgtctcaacaccaacagattgcagtagtgaagaaatggcagagaattcattaagaagttctgttcaccattcaagagtacattcatctccattgattaggaaagtatgaacaaatccatactcactaatataatatattgtcataatttttacaagtagtttttttttctttattgattcattcttttgtgtgaatagaaaagatggtataggaattctttatcattcttttcaattacaatcatgtatacacaccactctttttttgttaattcatctttgtagaaattcacatgaaaattttagatatttatggggagttttaagtcccatttaatacaatagaatattcatttttttcaataatattaagaaagattcattctttatttatttattttgtattttacttaaattaattttacttgccaagtgtggcttgtctctttttaatcagtatgaaaaggaaaagacattaataaatagtaaaaaaatgatcatgagaataataaccaagaattagtgagaagatattccaagaaattagcatactaataactaacagaagtgattaagaaaagattttattctttttccttacctgcaactaaatatgatcttaggttcccaaaatggaaacaatcaataatccccttttcatttgtataggaaaaatttaagaataattacataaggtatcatttttttttaaaatatttatatttttaagttcaaagaatattttttttcttacattttcatggttttctaaaaaataacacgaaaacaacataaaatcaacttggaaactacataaaaataacatcaaaataacaaaaaatcaacaaaattacaacataagaagaccatattttctgtaaataaaat

SEQ ID NO: 46537 - DNA, 2344 bp, Cannabis sativa
tgggaggcttttcaaacagccacctttctcatcaaccaccttgccacaccagtcctaagttataaatgtccaattcaaaaattatttggtcttgttccaaattataagtttctaaaggtctttgggtgcgcgtgttacccatatcttaggccttacaacacaaacaagttgcaatttcggtcagccaaatgtgttttcattggctatagtccaagacacaaaggatatatgtgtcttcatacttcgggtcgagtctacattgctagtagtgtaacttttgatgaatccgactttccttttgccaatggcttcacatatcccactgcacacaccgattcctctctctcacctagtcaatatccccaatggttgccatatttgtctacagtgacttcagaacatgctcctggtgtagttgttgttgataacactcatttgcaggcttctcaacaagatgaacactcctcgggttcacctgttactcatccacgcaactctattagctcttcatcaactccatcacaacaaaccagccccctctctgtcaaatcatatccaaccattcctcttcatattgacctgccactttcacctatttctcacaccagacatccacttcagcagtccccaattcagcaccaaaccagtccaattacttgccctccacctcgtccaatccagccctcccaccccatgatcactagagccaaggcaggtgttcgcaaacctcgtatttttactgccttttcaccctcacctttggccttaatgactgaattggaacctaaaaatgtgcaccaggctttaaaaaatccgaagtggaagtcggccatggacaccgaattttatgctctcttaaaaaataaaacttggatccttgtgcctcgctgtccaggtatgagtgtcattgataatagatgggtatatcgtgtcaagctcaacaaagatgggacagttcaacgtctcaaagctcgccttgttgccaaaggctttcagcaacaacctggcattgatttttatgagacttttagtccggttgtcaagagttccaccattcgagttattcttcatcttgctgcctttaatcaatgggatattcagcaggttgatattgataatgcctttctaaatggcacactctccgaaactgtctacatggagcaacctgccggttacattagcacttcacatcccaatcatgtctgcaagttgcagaaagctttgtatggccttcgtcaagcaccacgggcctggtttgatcgtttgcagcaagttctctcctccattggcttttgcagctttgtttcagatccttccctcttcttttacaaacaaggcgatgctgaattatatctcctagtttatgttgacgatattctgctcacaggtaacaacactcttactgttcgcggtatcattgcaaaacttcagcacttcttctctcttaaaacacttggctcagtaaattacttccttggtttcgaaatcactcgaggggcctatggtattcatctttcacaaagcaagtacacgattgatttgctcaacaaaactcacatgctgcactctaagccaagtcccactcctatttctcaaagtgacaaactcagcataaatgacagcaaggctttcgatcaaccaagtttctttcgaagtgtcatgggaggccttcaatacttaactctaagtcgtcccgacattgcctttacagttaataagttaagtcaatttatgcatagtccaacccaacatcattggaatgtttgcaaacgtctccttagatatttaaaaggcacaaccggataaagtattattttcaagccatcaaaggagtggaatgtcgaatgcttcagtgatgctgattgggctgggtctattgatgatcgaaagtcgactactggttactgcgtttacattggaggaaatctaataacttggtgttcgaagaagcaaaaagttgtggcaaaatcctcaacagaggcagggtacagggccctttcacaaactgccacagaagtcgcttggcttcattcactcttcacagaactcgggattaagcataagatacctgctgtcatttggtgtgataatgctggtgctaatcaactctcctcaaatcccatatttcacagccgcacaaaacacatagaggtggatgtgcattatgttagagaactcatcaaacaaggcattgttgaagttaggcatattcctacctcagagcagaccgcagacatctttaccaagtcgttgtcaacgagtcagttctcatacttgaaaaacaagcttgccattgttgatcaaccaagctaagcttgaaggagcgtgttaaattgatcagata

SEQ ID NO: 46538 - DNA, 952 bp, Cannabis sativa
atgtttggaacttgaattttggtggggaaagaaaatgtgagaaaaatggggaaagaaattcatgtttggtgtggaaagaaaaatgtatggaagaaaacttaattcaataaaactttcaataacaaaaaggtgatttttttcttttaattctgtagacttttttttttttttttcatttctttttattttttcacctaaattcaattttcaaaccttggaaatagaaggttttagggctaggaagaagaatttttagagttccaataaaaaaaattagtcaattaaaatcaagcttagtgcatattatgtggcaaaatataagtttgtaccaatttataatttttatacaacacggaatttaaaataatatttatccttaataaatattatattattattgtgtgtgtaactatacttataaatggtctttggaaagtagatgttgattgacaagtaaccatttcacaaaaacacaagcagttggtgtatattcattattactatggcataaatctcgaatcagaaagtaaccatatgtggtttggtgagaccaatgcacaagaaccatcctctgctaagacgaaagagaaagatgaagtattggaaaaatcacaatattttgatgcatcatcatcatcagcaatcttttatcagttcgatcttattttctttatcttgtacatttgtccagtttctttttttctttttttaacaaaagaaaatttcattgaaaaacacaaaattagaaagatcaatacaaaatcaaagattataggcaaagcagtaaatctgaccaccaaactcgagaaaattcaaaagataaaaccaaacgtgtcagagaatgagctataataagggcaaacatgtaaaatataatgaataataacaccaacttctagcttcattgatacttattcttcctattaaaaacttggacaagacaaaggcaatt

SEQ ID NO: 46539 - DNA, 1729 bp, Cannabis sativa
gcgatttaggaaaaattcaaaccgtgaccgcaccacaaagaatttcaaaccgcatttttttttacggtgtggtgtggttcgggcggtttgagcggtttgggcggtttgatgaacgcccgtagttgacataggtgacacaccttgtgaaacttgattgcaatcaattgtagttgacacaggtgacacaccttgtaaagcttgagagtctactgaatttcgattgtcagaaaaaaaattctcataagctgtaggtaagccttctgagttaacaaagggaaagatttgttcataaaaatagacatctctagagttgacaatttttttggtatttaaatcaagaagcttgtatgccttcataccaatagggtatccaagaaatatataagggctagatcttggaatgaacttggttctagattgactaaaggtaaaagcataaactaaacacccaaaggcctttaaatgctcatatgtaggtgacttagagtgtaggatataaaaaggtgttttgttctttaggttaggtgtaggtgtcatattgataagataggttgtagttgacaaacactctccctaataatctaatgggacaaaagattaaaataagatagctctaaccacattaagcaagtgttgatgttttctcttaacaattgaatgttgttgagccctttgaacacaagaatgatgatgtgtaattctatgctcaccaaacaaagtattaaattttagttcctttgcattatcagacttaactctcttaatggttttagtaaactagttttaaacaagttctataaattggggaatgataacttgagcatcagatttatgtctagtgagattgatccaagtatatcttgaacaatcatcaacaatagtgatgaaaaacttatatccctcaactgtcatggtgtaaaaggttcccatatgttagtatgtatgagatcaaaaagtttttaacaatattatggttggagatgaaaggaaattttctttattttgcataatgacaaattaagcaatgaaacaaagaattagaatctgaatgaacctttaaagctttattcaagggatgaattcttacacaatatggattgcccaatttatagtgccaaacaatttcattaaagattttagaatctaaaatagaagatgaaacaaaaacaaaatgtgcattatttgacagattacaattcaagtaatagagatcaccacactttctacccatcccaatcaccttattcttcaaagtatcctgaatcacacatttttcatgagaaaacaaaaatgtgcaatcaattgtggctgttaaagaattactagattacagattgcatttaaaggtaggaacatataatacattttcaagaatcaaatcaagggtcaatctaattgtccccatgcaatcaattttaatgtggataccattaggtaagagaactgttttaaggttaggatcattatgggtatattgaaataaagaaagatcaggacacacatgatgtgtggctcctgtattgatgatataattagaactatgaacaaaagagttcttaccagaaaaatgtgacactataggttgatcatttgaagaatatggtgaagagtggtcaacaactttttgagcaagcaaggccatcagtttttgacattgagaactagacaaacttgacaccaggtccttctgtccagacacatcttcagatatctgttcttcaccacctgt

SEQ ID NO: 46540 - DNA, 938 bp, Cannabis sativa
gggggtttacccgcagaaatttgggttgtgggggtttaatgaaactaaaacgaaagtattgggggttttgccgccatttacccaaaaaaaatatgaaatgatgaattgtcaaatatggggtaacatgtgattacaaaataaatgtaatattaattttttttttattttatttgttacttttttaaaaaaaaaaatgtgagctgccaatcatgaccatgaacatcacatcaaattatttttaaaataattaatcaataaaaaaatagagagggcatgcaaaaataacacgtggcgttataggcagtacaaaagacaatataaattgtatagtatttttgtaatttcttctatgtggcagtataaaagtaataaaataccaaaatactgtatactattaaaaagccccctctaattgaaggcccatagaacttcttagcaaaaaaagaaggcctgtagaactagcagtggcccgttaatgaaatttctactaagggcccacttcagttttggaatctcaatatgtagatgtagatactagtagtggcccgtttgatatgaaattgaagctaagggccgactttagtttttgggctaacatgaatgttgtaatctaaatatgttgatttagatctctctctcaccactgtttttacaagtcttttgacttgtgagtggctaatcttttgatccacatgtcagaagaaacagatgggcttatcctatatgattcgacaaaacagagccattcattacaatatgaaaatttacaaatgggattttatattatttgcatggaaatataacttattttaaaatgttattttatgaaaaaaattatgggagttttttatttttacacttcaaaataattttttatgcatttttacgaaattttacatagaaattcttattgtaactggcgctgcaacctaaattgc

SEQ ID NO: 46541 - DNA, 639 bp, Cannabis sativa
ccataataaataatacgattaattattattctaaaaacccaaaacaaaactcaaacccattattattcccaaaccagcacacacaaccagcccaaatcgtctggctttaccaccaaaacggagtctgatcctatatcgtttattcaatgtaattaaaatgtaattttgattgagtattctgatgattaatttattataattgttgggtataaatgtaggatttttttaggggagaagagaataaagttggcttgtttaaacacttttgtcatgttgatcaagaaagttgacaattaaaatcaaagttaatattaaataaattaatcagaatcacaaaacttttattttttttcttaatataattttatcaacatacactaaagtgaaaaaaaaaattctaatatctccctttccaattgacagttacgcaaccaaaaaagagaagaaaaaaaaaacgtctaaatttgattaagtaaaacagaaacaattgaactgttcttgtttgtttgtttgagtgtcctggcaccttcacaaaactaaccacaaaaacgttttttatgggtaattttataacgttagttttataaaaacttattaagcatctattaatatttaatatataaatataatataaaaaaa

SEQ ID NO: 46542 - DNA, 986 bp, Cannabis sativa
ctcaacatatacagcatagtattgcattcataatcacttaaattctagagtaataatcctagatcacataactactatgtttaaagcaataaccctaatatcaattttctgcatagcatatacaaaatatcatatatgggcgccacaacgctaatttttatgtgctagtttattatcttatctggtaatctaagtatgtgaagattccaaatctccgagtgttcttgagaaattaccggtaatcctagtcacacaatcccaggatttcacaaataaggttaatcccaaattcattctcacacatagtcataatctgaatcccaattatagatcaacatatagagcctgaaactagctttctaacgatataaagaacgtccaaaatagagttccgagtcaaaagttatggtaaaaatgagaaaacaaaaaaccaggaaaatagggtccccgctgcggcgaccggggccctcgtcgcagcggccacaacctggtggagctcgctgcggtgagccaaattgtggccacagcaacagcccctgctcccacacaaaaaccccaattttccaatttctcatgctttcaaaaatcaaccaaattcatatcaaaactcatccaaaaccatacacaaatcaatctttcaaccaaaaccaaaccaatcaaacattggtacataattgagcaccacataaagcttaatatcaacaccaaaattataaattaagcatgctacacacaaacaacacacttgcacaataatacacaagcttgaaactcaagcattcaaacattcaaagtgaaatcccaaaaattcaagtgtttacctagaaattaaacaccaaaattcaactcaaaagtctcccaattcaatctagatgcataatacaaaaccctaataacacaatcacacataaaacatcataacttcccttaatctcaacaacatgcatcaccataatcaaaatcattaagaacactatgaacactca

SEQ ID NO: 46543 - DNA, 836 bp, Cannabis sativa
taaactaccttttgaaaaccttactaatagtggcaggggaaagatgcgcgaaagcacaggacctacgggccaagggacagtcttaggtagacagcttctatgggacgtaggcctcccaaaaggtaacggaggcgtgcaaaggtttcctcaggccagatggagattggccctcaagagcaaaggcagaagggagcttgacaacaagaccgacctgtcgagcaaggatgaaagtcggccttagtcaatacacttaacgggaaggagtctcattaggcgcttgagaactatgcctcttttttgtaatagaatctctctcttgtttgttagttgtattttctctagttttagtaaatcttataattttgtaactcataatgtaataaagtgggcatttacccactagtggtatggttgtttaccgacttcttctatttctctaaacttttttttatttatgcatgcttttttttttttacaaaaaaaacaacttattatttttattaccattttttttcttctgccatgggatccgagacacgtccatttacacattttaattattttttttttgatgaaattaaagataaaattgttgtttaaattttagaaaatactacttttgtgtttcccttaaattttcatgaaaaacttaacatttgcgtggaaaagtacgtagatgatgatggaggccattaatgagtagtcgtagtagtgtccttagagttagactgagtacaattgtttaagtaactgagcctaagagcatctccaaggagctcatcaaatttggtgttgtactatcactaaatttagtgtcaaaaattatttctactcca

SEQ ID NO: 46544 - DNA, 2723 bp, Cannabis sativa
attgatcttaaccactcaatgtcctgccaatattatcacgtattttcagctgattgaaaaaaaaggtacaaagcataggaactttgaatatatcatgtatttcttttttttttgtaataagggtaattagtcacagaacataggagtaaaagttagttagctgataccttccaacaaagagaagcatccattgttttactggcataagcttccaggtttgaaccatcattctgtacaagtacagaaaaagtaatttacagaaaatttattatgagtagtaaatagtaatagcacaaaacatattactttatgaaattacttgtcctgttttcatattagaaaaatgatttgtttcggtctaaccccacaaaataatgagcaaaaatctgaaaacaaagcataaattcgactcacagagtcaacttcagtggccataaggccttcgagattccttaatttaggtgctatcattctgttaaaaaagtgagaaagaatcaagtttaaataataaatagcttattcatcaaaacatatttaaacaaagagcaaatctcatatttacttgttctttatgtctgcctctcttcgaccaagtttaggagtatcagctgttaacacaatagccttgaatccatttctttcagctctcttcaccagctcagccgatacttctcgttgcttataaacctattaagattaatttatgtgacaacaacagcaacaaactgataaaacaaggagaggtttaggagggtgattgagttgagtacatataactgaaagaaccgaacagcattgcagcttgaagcaacctcctctatggtgcagtttgatgaaaaagacacaacctaaaatgagaacaacaaaacaaatcaagtgttgaaagtttccacaaatttcagaaactaaacatgatgaactcatcattatctgttaacttctacataccatgattgtgttgcatgaagccgcggctctagctgtggctttctctcctgtatgtttagtacaaaaggattttactcattatgtatgtaagaagctaagagtttggttgatcaaatatgtgatgagagtagatttagaccttctgggtgagctaactggtgcatagcagtgggagcaatcaatataggtgctgcgattttgtaacccaacaaagttgtggacatgtctattctgctaacatctacaagaactcttggccatagcctagaaagccatgcaaaaactaaattagttcattagagaaacatacacaacatagcacaacacttattgttataataatcaagaatatagcatggccttcgagtaaatcttacctgattctttgaaaagcctccatattctgtttaagtgtatactcgtcctctgctcctccattatagaaatcaaagtacatttttggaaggactttccttgccagttcttggaactcattcacatttactggttcagatgccattttagcctaataacacagatatgtattggaattgttagttgtatgataaaggtaaatgagactaataacactagtcttatatggaaaaccaatatagtttcaaggcactttacaaaagatgtgttatttttatttcaaattaactttttaaatgaatgagctttgacaccaacatatctttgtgtacaaacaaaaaaagttctctattgctataacaaatgaaaacagaagatttcatcgattcctggaaacgatttcgagtcatcttccaagatttttcagcaagatcctgatcaactacaacttattagtatcaatccaaactagtattaatttgagtgttttgctcatatatttcttcagtaaaagcactataacacatcaaaatgacttagaacaactagaagagaacatgttctggatatcagatcttacccaaaaaaaaaaaaagttgaaatatttaatcagaaattaagttagacaagccaaatatagattggagctttttcttcagtggattttggtcaatgggatgaatacacctatgaaagaaaacgaatctctaacaattggaaaaccagtgctgacgcctctggtactggtacacgtggcttttgtttggttttaaagccaaaacattgttaacttggaaaatgaatataaaaaactggaataataataataataataataataataataataagacaagggttgtatcatattacaataaaagataccgacaacaaatctttttctgaagatcatagtttaataaagttaacaagtataaagccttgattagtggtagaattataagaatgcatgagttttcattttaaaattaattgattattagagtgttgctctgaatgcatttctcaaagatgttttaaagtttttccactaaattgtagtacggaattatctccaaaaatagagaccttaattttggagttctatataccacttgatactactattttattgattgatgcatttaaattgataattctataagatagtttacagttcaaaattttcttctcactactcactagagaccgtgggagatctcttttgagccttcatgattgttattcaaaaggttaaataatatatggatgttggacctatttagacaattatagaccctgggagcaatttttttttttttttttgacgcggtgatccagatcacacatgattaacaaagcagcaatccacaatcggcggcggcacctcctcgaaccag

SEQ ID NO: 46545 - DNA, 540 bp, Cannabis sativa
tgagtagtaattgtaaagggttagtagtgtgagaagagatctttttatttagagttagagagagaatgatagggttactcggggtaggagacaaggagggaagagtttaggacacgtggcgtgatgtaattggattttgggaacctgtgagtggtggtgggaccctcgccgcatttattgggtgagtttggaggagagagaaagaaagaagggataagagaaaagagagtgatgtgttttgacttggtatggtatggaagaactatttgatgactagttaatctttttaattaattttttgaaaaattgaacgaagttgattttaaatgaataatttaaatatacttaattctagttaattatatttataccggttataatgtggttaaatgggtatttgcgtcgtgttatattttgatataatattttaattgattaaataaatattacaagagtgtcaatacacattttaatctagtggggattgttatattatttttaggctaattagtaatttttctcctcgaactttgacatgta

SEQ ID NO: 46546 - DNA, 1932 bp, Cannabis sativa
tcttattgtctcaaatcatgtgttctacgaacaaactaggcacattgagattgattgtcattttgttcatgaataaattcaacaaggcctgatctccacatgatatgtaaagactggagaacaattagaagatatttctacaaaggctttgaatggaatgcgggttgattatatttgtaacaagttgggcatgattaacatttatgctccaacttgagagggagtgttagaatatacatatatatatcaagtatatttcattagtttcatatttactcactttaatttagttagtttcctatttattctctctaattttgtatatagatacatattattctattgaataaaatatacaattcattcaccattttgtacactccctaatgtacagacacactttgacgttccctgccatcctggggtctaggctttctctgagggagcctattcccttgttggaggtcaaaacgtacctttctagaatcaatgttcattatgtctcccctagatactaccatagggttagccttctagtgagtaggttcctctgtgagatactttataggacttggcacccgctctttttgcttttggttctcttgcagcctggaaaagccttcccccgcgtcattaggtgggtgtggtatagcagcaaagtctacattcaggccagcaatggccatggcttgtttaatagtgaccagggcctcttgcattcttttgttggcctctcgttgttttgccaactcatcatcgtcttttgcgacccatcatcgtaaagaaacgagttttacatactcatcctcctcacaatcctctggatagctctctttcccataatctggatcgtagtgtcatcttcttccccttcaactcgggagtctatgtcttctttagggcgtccctaaaggtttggtggttgaggatttctttggtttttttgggtcatcaccatggtgatgaggaaattaactagtgaaagctctatacaattcttagtgaaagcactaaaatgttgaccgaaatttttgacaactacttaattttagagaatgattttaacgtggttggggcattaatgaaccttttgtccacgagtcacttgtattgatgtttagaatttaattgttacaatggtgtttatagggattatcttagtatcaaaatcctccattttcctcgtcctttttacagttatttttccctctatttataggtgcaatggaggagcacaaagagggtctcagtgcattccgcttgccaggtgtagcctaggcgactacatttctaaataggataattatgcctgtagtgagcttgttggtgatacaagacgggacatgtctccgactaatgggacctcagagaaataagttattactaggtgtcataggagaatgcatgtcaaaaaaacatagtagaaatccccaaagatatctccttttttgatactaactcatttttttgctcatatggaaggagttaacaatagtatttttccttgagaaatgtaacgagtgttaaaaataggtatgcactgggaggtccgggaggtcttgaccccccagaggttcatatttcataatattaattctttgaggttattgagtggcacatcaccctaccagatacctttactcctcccgaagccatgcataattaagatttagagtcaattgtaatttttgttagattgggtcccacatgacatgtggctctatgctgggaagccacatgtattggtaaaaattggtggcaacagaaatattagagaatgagcttgaaacagtaacaactctccacattagcttttaagaaaaataagctatcatcaacaaatctccacaagtcaaatttgaaatatgttgtaaattaatttcccatttgatgattgacgacatccccttagcaaagataagaaacatgaaa

SEQ ID NO: 46547 - DNA, 3009 bp, Cannabis sativa
acttcatagctggattccaaactggcgaactcagtgcttcctcaagtgttcttggctcttcattaattggattccactgagcttttcccaaatagactttgggtttgaatattccagctttagaccgagttatcatgtggtgagatcgcataggcgcttcaacaggtacatttaattgctcttgttctagtgattgttggtctgcaacattggaactatcactgatgtcattaacagtatcaacagcaatattatcatgatcactaacctcttgctgctgatttgtggcagatggagctccaggggacagttgagagacggtttttcgagcagtatcagcaggattaaatggactttgttggctgtatttagtaaaaaatgtatgtcaggtagttgagaccactgtgtgttgtgaataatcacctctttttctgcagcaaagttgttaagaaaaccagatttgaaagggaactcactctcattaaatgtaacatttctagagatatagactcttccagttgaacttaaacatttgtaacctttatgacaatcctatatcctaggttaacacatttcaaagagtgaaattggaacttatgagtttggtaaggtctaagacatggaaaacatgatgaaccaaacactttaagaaatgaataatctggttttttattgaaaagtgtctcaaaaggtgatttgtgatgcaagataggtgtaggtagacgatttatgagatatacagctgtttgaaatgcatctacccaatattttagtggcatactagcttgagccaaaagggttaaacccatttcgactatgtgcctgtgctttctctcagctctaccattctgagctgaggtgtgaggacatgagtgaacaaattgaattccatgttcaataacaatgtcagagaaagcttggtactctccaccccagtctgttctaagagttttaattgtttcttcaaactgattctcaacaagaactttaaattgtaggaatgcttctaaggcttcagatttggctctaagagggtataaccaagtgtacctactgaaatcatctacaaaatgtatgtaatacttgtagtttgtgttagataacactggtgatggaccccaaagatccgtgtgaattaattctagaaccttagaggcacggctagaggacattttgaatggtaaagcatgagatttaccaaattggcacgcatcacaaaactgaacattttaatttcttgacagtggtacattttgagaggctagaacatgttttaacactctaagagagggatgtccaagcctcctatgccatacatcattttttgaaataaaagactcaacactacatgacttagacacattatttttgtccataaaagaaacaccagtaaacagtttctggtttgaccatttcggctgagacttggctgcagtgacaagctgatataacccgtctctaagtgtcccttggagcagcaccttccttgttgttttgtccttcacaaagcaaaatgaagagtcaaattcaacaacaacattgttatcagcggttagtttagaaacacttattagatttttagcaatcttaggaacatgcaacatctcatttagcaccaaggtcttttcagtatttgttggtaaattacttgaaccaacatgagagatggtgatctgatttccatctcccacagtcaatttttccttaccattatagtcggatttttggttcaggtttgacacagttgaagtgatgtggttgctggcaccactatcagcataccaaacatcactatcaacaacctctggagtggcaacataagctgaatgtccaccactgttaccacttggattttgagtggtttgagctcgaggatcttgtcccatgtatgattcatcataccggttatagcagtaagctgctgaatggccatacttgccgcaaacttggcaagttggcttgggattgttgttggatcgaccacgacctccacctctggaactacccctgctgttgtaatgagaggaaccacctctgttacctccacgaccacggtttggattggggttatgactgggtttggtgcccatgcttgtagctgccatgttagctgtaggatttactcctaaaccagtcgaaataccaccagacttgatgttgtttattccctgcaacctctcaagcttactatcaaaactcaacaacatgtcttgaagttcctgccaagagatgttaggttttgcctcaacttgaacaacaatagacagatattcaataccaaggccagatgtaacattcgaaaccaaatgcgcctccggatacggatctccggcaagagcaagcatgtcggaccacattttcttttgccttagataatcagtcatgggagtagtaccttttcgtgtagtctgaataagtgtacgatactcatccatttttgccctggagtgagctccaaacaggttttcgagcgcgcgccaaagtgcagcagaggtagcacaacccatgacttctgttgcaatagtttcagtcatcgaactgtagatccagcccatgagcaactggtcactgataatccagtgttcatactctggattgagcataacttcggtctcttgatctccttctgcagtgacttcagctggtatgaactcgggaggacacggcctggttccattcacgaaaccattaagtctgtgaccacggattatagtggacaccattgttttccatagggtaaagttgtttctgtcaagtttgagggagaatggttggtttagggtattgaagggctgtgtgtagttgctggttagattttgggaggagctggcatttgttgtaccagtcgaggcttgagcggtaggattccgattggtaggaggtggagtggggggagtctgagaatgtccagtcgacattgatggaggtctggttcagccgctctgataccaagataaaaaatagagaagaatgaaattctcagctcaattgagactgagtgcagcagct

SEQ ID NO: 46548 - DNA, 7301 bp, Cannabis sativa
actacttatagaaagtattgagtacactaatacccaataacaatactccaataaaaaatagatgtttttatctctatgttgatgattaaaatagatgggttcccttttagcatatcaccatgttgtgtgctaaatctttagttggtgggtaattttgtcttaattcacatattaaattaattaattaataattatcaaggagtattatttttttaacaagatcatagaatactatttaaattttttaacacatatttataagaaaaatttacatcaaaaatacaaaaactcaaaaatattacaccaatacctttttacggttactactacttttttacttgaatattttacatgggatactatttttttttattattattttttttatttttttattgtagcaccgaattattacatttatactgtatatgttttatattgtagtttcccatttatgccatttataggatgcgttttgttttattatttttttaaaaaaaaattaataaaagctaatttgaaaagaaattgtcacatctaatatatatatttttttataacaatccaaattaaaaaaaaaaattgtaaaaattaagatttgattgaccacttttatgaaacttttttttaataaaaaatgataataaaaagttgagacaaccttctcctatacgtttcctttataaacttttacttatattagattttttttttcattctaattctcattctttctctcatgttcatctttatttatttttgtgtttaaaaaatcacacatgtttctaattttttttttctttgtatcttccatttttatttcaatttcttcttcttcttcttcttttttttcctctttttttattattgatttttttttttccgagtatagcataatagcattttataattaaataatagctaatagcttaaaggtgctgggttcgaatccatgaactttcctttttgcccatccctccctcaccactaagctaactttagtggctttactattattaagattaataataatacaattttaaccaaacagcaaaagattacaaaaatttaagcaatacgggcgaagcacaatttagttccgtaattattcatgtgacaaaagttatctctcctcctcttctccatcaaaaataaaataaaaaaaaattatatacatagatttgtttattccatcactctctaaatttatatacacataatttatacatataaattttgtgtatgtaaaaataattggttaaagttagttaaagtcacatacctaagtgaattttgtgtgtgaattatggggtaggataaattgcaatataaatacttaatgttttagattttatacacttaaataatttatttttatttttagaggcaataatacctaatattacaatttttttacatccgttactaccacttctgttaactcataaatatggacacatagagtaggagtgttcgctgtgcaggtgatgcagtttttgactattttttcaaaccaacccgcacatgcagttttttcaatttctcaaactgcacccgcaccgtggaactagaaaactgcaaaaccgcatcgcaaaaaatggtgcagtgcggtttatgcgatttttgcggtttggactatcactaaataattaaactatcacaattacaataaagctttaacaacacttgtcaaaaataccataaggcttaaaaataaatatgaaaaaaaaaaatttaaagtttcaacaatacaataattagtgggcttaggttgggcattcacatattggacctaaataaataaaaattagtatttttataatatgcagtgcggtgcggtttgaactgcctattaataattcaaaaatgcaaaccgcaccacaccgtgcagtttaggaaaaattcaaactgcgaccgcaccacaaagaattttaaatcgcatttatttcgcaatgtggtgcggtgcggacagtttgagcggttcgagcagtttgatgaagacccttaacgtggagggccaagatgcattatattcatttattttattttaaaaatttaatatttttaatataaaaaactaaatgttgagtgaattagtgcagtatatggaacatagtaatcgagttgaagtgctaataccatacgaatattgttataagaactgagtttttttttttgttgaagcatgtaacatttagtttttgatataaaatattaagttttaaaataaaaaattaaatatattgcatctgaactttctttgtatccatatttatgaattaacgaaagtcatactaacatatctaaaaaaaaaaaattataacattaggtattttatggcccaatttatccattaattatgtgttaacatatcactactcctaaactatatataaatttcctaccaaatatactttcctgatttccttctccaaacttgtcctctttctctcataacctactctcaccccaaaatcggtaccggcgcacgttagcgcaaacaaatcgcagatacgcaaatggcttcttctcgcccacctccggccaaacccctcgatcttgagctcacaatcgtctccgccaagcatctcaaaaatgtcaattggaaaaacggcggcgatctcaaaccctacgccgttttctgggtcgatcctgatcgtcgcctcgccaccaaatccgacgattctggttcaacccaacctgtctggaacgaacgcttcactctcccactcaccgcctcactccacgattccttcctcacccttgaaatcttccattccaaaccctccgagacccccaaacccttggttggcaccctccgggtcccgatcaaggacctacccgacccgaacgattcgacccagattcgtaccttcgtccttacccgtccttcgggtcgtcctcaaggtaagatccgtataaagctcgccgtacgggaacgccctttgccgccagattaccatattacccatcaaccaaactatttctactccagtgctcctttgcctccacctccgaaccctacacgcgattacagaggatactcgccctcaccatactcatctccggctccggctcaagctccatctccgaccccttctccgcctccgccgccctaccactacacctcgtatcccgatgcttattctggttattatccagggtactactcaagcgccccgcctccgccgatgccaccaagaccgttctttgatcggcccatgagctacggtggtcccagtggaccttctgctccggtggattactcgccgtacgatcagaagcccaagactgggaagatggggttgggaacgggattggctgtgggagctgttgctggagctttgggtggaatcgcactagaagagggtttgaaatacgaagaggataaaattgcagatagggttgagactgacttggctgctcgtgacgattacagtgattaccgtgaacattattgaaataatggtttgtattagttaaggtatgaatattatgatgaccactaatttgcagcattagcttgcgaatttaccgtatgtatatgtgtatgtatatatttgtgttgaatttggaggtaatttgtgtgattttgattatctgattatggttatgtatgaagtaagacaatgcttcaatggttggaaacatttttaatgcttttgggctttgtttgaacgaaataattgccactcttaatcgaaattgctaaactttgtttaactttgattgtgttcattactatggctcacaatgcatattggttgttacactgaatgtagctaactagggaatctcttactgtttctaatgttttaggattgaaccaaatcaaatggcaagaagataagctcttagccaatgtaatatgttttgctaagctaaaactaataaataaagcaacccaaatagctataggcctggaataatctaagagaaataagaaagcaagttcctctaaaggtttgtttgttcctttttgatcaagatatagtttctgctgatcattacctttttgtattgttgggtagtgaagcagatgggaattgttggtttatgagtctgaattctgatcaccaagtctctttgtgtggcagggaaagtgacattgaactaattggtactctcattaatgtgtgtgcatttggtgtgaatcaataatagctagctaagctttctagtggttgagctccgtcttctccatgtttagaattttggattgtttcagttgctcttttgtccactgctgctatgccttctagttcctatttttattttaactagatggttcttgaaggtggtcttttagacttgtgtgttcttgtcagaaaggggagggttttatgctgttttattttagctatggagtccattacaatattttcattttaatgaggctgcaaggaaattgtgatttctactttgtatccattttttttgacagactattggaataaattggcagtatgtatgtgctttatagctggtatattagtaataaataggatgctgagctttctgctgcttaaatattgcggttaggcggaagagctcagtattttctttttagaagcttagcattgctttcctttatttttagaatgttttggtagaatcgtttgatattttggttcttggttcacctattccatgttatcagagagttgccattgagaaatgacttttgccacttacctctgactcttgtatcaatcgatttgatctctttaagcaatataacaccatttagatatgtgtattatgttgggggtacattgctttgttatagatgagtaatattttattaggaactgttgaatttggcactgtgtctttgttagggaccctaagtatgaacccaaaaaataaaacagaagcccatttttgaggttaagctttgtgttggctgtgtcttagatattcttgaacctcttggttatcagaccttacctcacttcctcacatgcatatacacaaaccccgaaggcaatatctgtttctgttccatcatgtttgttttaactttaaggaagccccttaagttaactcaaagtgaaaacaaatgactgcatgacaaatgtggctaagtctgttagcagatgggaacaatgagatgataaaatgcagaggatatgacaaatatgtaggggtggcaaaatgtgtcatcgtgtcgtattcatgtcatatttatgtgactcgtttctatatttcgtgtcagacgtgttgatttgtttttttaactagtgtctaattttttcaactctaactcgtttcaggcgtgtcgtgaaaaatgataaatttaagttccattagaaaatttatatacattttatgtatatatacattgaatcactaaatatatatttttgtataattatattattattattaattttttattttattttatattaaaaaaatcctgtcaaattcgtgttaagtgggtcgtgttgtgtttggcccgtctttatttcgtgttaagttgtgtcgactcgtgtctaatttttctgaccctaaattcataaaattcgtgtcgtgttcgtgtgtcgtgttaatacccgtttcgccacccttacaaaattagttgtttggtaggagagcaaaggggaatgacatctatcttaacttgtcatgattaagcctatgttcggtgatgtcaaacccaaccaaaagcaactctgcttgagctacccactcagtcaactgttcaattgtgccacccactcatggttgtgaaagagtccttcccatttcttttgattgcactggcttggtagattgttcctataaatttggcagcattggcttggtggattgttgctatatatttggcataagtgaggttttgttttgtatttatttttaatattctaaatgtaaaatttttgcttaacataatttttggcacaccagtgggactcattctcctttttatatccaactatgatgactattcttaaactttaatattttggtgttgattttgtttatcgctttcaggaaaaatgacaccacaagtgacaatttacttccataagttaccaatgatctcttttagctaaggagaaaaaaaaaatcacttccacccaaattcatagaggatatgaagaaagttatactgactagaaaagcttgaagaggaaaatttgtgaaggatgtctctagaactcagcaagccttaagaggtaaagttgtgacaggcttcaaaaagaagtaaacctggtcaacgaagaggtctatttcaaaggctattaaggcggaagggaagccaacatcgaatggctgtcccataactatatagagggaatggagccagaaatttatcatgattggttctatcccaattttcttgctcactattgcttcaatgatggttatttctgcaaaggaaattgaagcagcactgccttctcgaactctgagaagcaggaaggaaatagcaacatcaccctcacgctcaccaaatccttctaaaacacgagaattggtaaggaatgggttggtcaagcttacaagcgtgatgcctgttaaccaccaaagccaataggcgacatttgttgagaacaacgaacaccctttattacgtctaagactagatgagtgatgtatgacaccttccaaagaaggctagaagtgataatgtatgagttcccaaagcaaaccgtaatccgttcgtaaaatcacatggtgaatggatgttcctttagcaatatcgaccaacaagtgtcacttcaaatatcgaccctacaccttatacgagactcgtaactcaatcaagagcccatgccatgtattcaattcccgttcaggaatctacaaacccttttgtttaggaagttcgggaagaggggagtggcacgcctaaatactctctataagacactctttgtcaaacagagtaaggaggcatctgatgacctcattgctcaatttgaaacaataactattggcaatgataaaaatatgacaatgttagtaactggggcaatcagtagtgaagcgaagatcctggaacttcaaagactactggtcgagagagatgaagtagctcgactcttaacacaattaattcatcaagttaacatgagacaaaaagagagtgagatcggaaaaaattcatcgtctttagcactgcatgtaggcaatacacaattgtcactatctggtgtgcaaccacaactagtcgatgtttagcaacaacaagacctgaaagctcttatcatggagagtatttgagaataccaagttgcaacaagcatgcctactgtgggatatcataagacgtacccgacttactacga

SEQ ID NO: 46549 - DNA, 1816 bp, Cannabis sativa
ctatatattgcatcccttagacatactctatttcttctttaaaaaatttctcattaaattttggttttgctattttctcacatatagtatcgcccttagggttggaaactcatgggtatagggccccattggtatcagtctctattggggagaggattcttcaattaaacggggatggagatgataataattttctatcattaaaattcaaatgatgcaaggtgggatgacactcccatcccgataaaattatgtttatttatttatttattttatgataacaagtactttagttattatatgtgtcttattataaattttaacaatatattagaaactttttagacttttttgaataatctttcttactttaaattattaccatagtatattatttttattttttatgtaatctaatttattattattattattattaatgaatctccatggggattacctcgtcgtgatgcgaattctgtacttcatctctataaaccactaaactaattagttagtggttagaagttaattcattttttttattattgttctattatgaaacttgtataccttttgtttttcaatataaatatgaagatactgtgctaattaattggttaacctccattttaaaaaatcactattctctcttcttctcttttcttgtctttctggttttgtatatctggtccgtaccttgaacattgcaattgtgaagctttacatggtatcaatcaccactgacttctgtctctaatggcttctactcataaaacgttttcatttggtgcttaaatcaatcgtccaattgccacttctcgcgctactcccccaactatgaatccaatggctactccagctacttggaatctgtttgctcattctctctctacctctcttatagtgaagcttgattgcaccgattttcttgcctggaaatttaaagtcattctaatagttataggccatgatcttgataagattcccttcactggtatgccggtgcttcaagtttttgttacagttgaaccaaatcctcaatatctacaatggaacaaatgcgatcaattacttctctcgtggcttcgatcctcgatgtatgaagaagttcttgctatcgtgactaatttcttcacctcctatcaagtttgaaagactttggaatagtttttgtcctgtcaatcacgagcaagattactctatctcaagggtcaattctcgcatgttcgtaagggagctttatccattttcgattatgtagataaagttcagtccctatctgatgccattattattgcagtttctacaatgggcgaacaagatgtgattctgaaattgttaaatagacttcatcctgaatataactctgtggttttaggcatcaccttccgtagtgatgcgttgagtcttgatgaagttcagacactcctcatggctcataagagtcatcttgaacaacataatgccatcattgatcttactataaagatgcaagccaatctcacttatggagcaccaagaactaggaaatcctggccatatcagtctactgcacgaggctctacacttgagaatcaaaatttcttatatggtcgttgatttggtcgaggatttatctcaaattatcatttgatttgtcaagtctatctcaagagtggtcacacgactattgtatgtcactaaaaatttgataagaatttgattactctgaaacgtggtgccaccatcccccctgattttcgtactgaacttcagctagattaagaatcatcaaattatcgtcaataagttttgcttgattttggtgatgact

SEQ ID NO: 46550 - DNA, 1065 bp, Cannabis sativa
ttttttttttgtaaggtaattatttgatcatacaatatgatgttttttattttacaaaataaataaataatttaatgaagttgagtacatatgatagaataatatttggctcatgtgtgtgtgtcataatcaaagacacattatattataataattaaaaaacaaaacaccaattagtattgataatcccttgtgactgcatcatattcaaagacatattatgcttttaaaaaaaacaattaataataataatgcacttaactagctaaagagataaaagtattgaatgagactcaattgagtatggagaaaaataaataaataaaaaaactaaagaaagagataggtgggagactttatagagtaaagtttaataaaaaataatgcaaaaataattttcagaaagattttataatgatattcataacaataaagtttaatcgtaataaaaacaattcatattatggcaacaccttttaaagacatgaagatgatggaataacttaatgttaattagagtgcctttgttcaagtgtgttatatccgaaataattaagcttctcaaacaataattgtttaatattttaattattagttttgaatctttatagtaactaataactattaccaaattattgtatttaaatgtgaataagtatacacaatctagtttgaatataaattcatttccaattacatttgtttcaaatttggaaactatatttagtatataaaataaggttataaagaagtgaaatgtaagggggcaacttcaataggagttgcccatgaattgtttcgaataatagttagggttagtgtggccccacaaatatgtgttgtgaacctattaatgaagcaatttcaataaagcaacaactggtaccgtagagaagcggctataaattggagagtcttgaccaatttgaaaggtcgcttaatgtagttgaaatgattgaatttcgggttgttcgatcaactaagggaaactcaataatggaattcataaatgtctcaatcttatttttttattgtcatatgaatattcaagagctaagaccattc

SEQ ID NO: 46551 - DNA, 801 bp, Cannabis sativa
taatgctgctttaaagattaacaactcatcaacagtcaaaatggcactattaaacacctaaaatcctcatatgatctcaacatactgaattcaatactgtactgtttcaaatgtaatagtgctattactaggtggtagattagttgtaagactcttacattagtacactctataacacatgccactgaactcgagtctcagaatgtcttggaacaaaagaaagatactttgttacttatgtgaaggaaagtaagatttgcaatacttcagacttatatacaacaatgtctgcacaattacatttaaacaaacattagacacaatataataaccccaaagagttaactagctgtaatacaaagaagctttattctcaaccaataaattcgggggcaatggactaaaaaataccccaaaaggcatttgcttggtatcattcatttcacatgtaaactacagcagtgtcgattacaaggaatcataaaaagatgctacttaagattaaaacatagatatcactattgaaaacagcaacttagcaatgtgaaaacctaattgaactatgaagtcatgaccaatgcactagagtcacaatgaacttttaagtaccacagaaaagggtctgttaagaattgatacatcacctagcgtcgtatgtacgaggttgtggctccaactgaaccagcaccaggttgagactttgctatgggagctgcaaacgcagaaggttgagccaactgagcattctgataagcgccaaatccttgtaaagcagcttgggagccgtaaccactaaccata

SEQ ID NO: 46552 - DNA, 669 bp, Cannabis sativa
actaaaagtaaaatcttttatagtgataaatagtacaagaaaaaaataagtcatacttcaacatatgctgtaaagtatatgacacttacttgctatcaaggtttaaccttataataaaatttttactactaataaaaagagatttctcggctgctaaaaataatcgggtatggtattatcgtcagtctctatgaacgatacttattcaaccatcacaaaactttttagaatatttatggataaaaatcgtcgtgggtatgtccaacagttttaaaccatcacattaaaaaaatccaaatctaagctacataatgcaaaagctaagagaaaaaaattaaggatgatttcgattaaaataaaaatttaacgatgtcgcgtttaagcgacagtaaaaattatttttattttataaatttcttcattgtttcatattgtaaatactattctaagttttcttttttggggatgagtcaactagatgtcacatttacaaatactatctgtcgagatttaacactattatgttatttaacggatgacaatcttatggggattaataaacaacaaaccaagttagataaacaatgaagactcaaaatttatacttacatgattaataataaacgtcattaagtttcaatataaattcatacacaattcaaaaattat

SEQ ID NO: 46553 - DNA, 653 bp, Cannabis sativa
atatatatatatatttcacatgcaagaatattacaaataaaattttcctcaataaacaaaaacacatcaagaaaattttcaaacaaaaactcatcaacctacaataaaaattattttaagtgtgaatttcaattacgtaattatttgttcagttaagttaaaaccaagatgaatcatacttgtattttgtcataaatcttgtactttaaatggtagctttttttttctctctttttaagtgctagtttaattattttattgttgatttagttaaaaacgacctccatgtaagatttactttccctgatcatgaattgttagagaatattaaaaatatataacatcaatatcaaaatttaaataacatcatttgtcattaagaaaaaatagaatatttaaattagaaaccgtctcttcttgccaagaaagcaatccatttaaattgaaattactgtttctttattagtagaaatcaaaagcgcgtggtttcacttacaatattgccagacagttaacattaaagaaattgaaatcttgttgctcaaaataaataaatgtagaattatcatccatatctttggggagtagacttggtgcattgaatcagagagatggcctcaatggctgggcctacagaaaaaaaaaaaaaaaaa

SEQ ID NO: 46554 - DNA, 2601 bp, Cannabis sativa
tttgcattattatactatttaattttgtacattgaattgaaataaatagttgtcattccacatgagtatccttattatgtaatgattgaatatttaatgaattaaccctgtttcataaaaacaaaaaaagaaaaagaactacttacacaaatgaattattattctaatgggggaagaaatacattataacaatgaggaatgaggacttactgtaataaaagttaaattaacttcattacccatatgttaacaagagtatctataatggtagataaatgcaaaaatattcataaaaaaagtatcggaaaggttttcatttatctcaatcttagggagtacaacttttttgttgatccccaaggaaaaatatatacatagcatttggcatagtttgccacattgcaaaattgtaacaatcattattgttaaaaatagtcaacaataatatataatcagtgtgtaataatgccaatcattaggcatttaatcttgaaatgagatcaatgaatgtatcttctgggcatggaatggtaagagctcccattggatgatcgaatccgaattcttcttcagcttgacttagcaactcttggaatgatggctggttcaaaatcgataaagggattacaaatctcttcattttgttttctccaacataaacagccaaatacccttttggaacatcttttgaacttgaaaagggtctttgaatagcatgaactatgcttggaaatctaaatcccattcttgtatttgtgtctctaaagaaataggaagaaatgagataattaatgtcaaaggttttgcaaggaaattaagttgaatagttgagagaatgtgaaaagttgagatgataatgaacccaatctcatgtgtatatatatgtagatgtggggtgtattgaaaggaatagtcttttacaaatcacatggtgttgccatcctactcatcaatgcttgtgttttatgttctcatagctgtgtggtcaaaggccttcatatctatccagcttgttgaaaagaaagcagagcaataccaagtccattagtctttttctgattggccaaattaaatactaaaaaagagtacagatgttagttgcaggatgtactatagcttagcttcactagaatcacagaacatgcagatgagtgttgaggtacatttttattcattatttctgctgttatgattgaagaactctctatctaataatgcattcatatttcatctattttttgacacaaaatttgggctatgaaatctccaagatgtgtattctatatttggaatacagtaatttgtggcataaatagttaaatttaattctcagttgcaaataaatattaagtttaatttttaaagataataataactaagttataatcttttgtagtacttaactgttcagtgttaagtaaattgtcacgtgacaattcttttttagtcaaagttattaaaatttttattttcttaaaaaaattaatttaaatatactgataagaaaatgataggtgaataataatttaatatttaacggtcatgtacttataaagtttcaaaaatataacttagatattattgacatcaaaaattaaacttaaattttatttacaactaaaaattaaacttaagtatttattccgcaaattattttttaaaatattggtgcacttataagcaataaaaccacataaaataaaaatccatgtaaactgtttgaataagattttccactgagtaggaatttttggattcccacatgacaaaattaattagaagttgtgtagctattatataaaattaatttgaatttgattgaaacaacatttgtgatggttaaattgattaagagagaattttcatcaaatttaagattttgttatgaatgctaataaaataatttaaccacatttaaagggagagtcatgtgacatatcataatctgaacataatttgccataaacaaatttaatgaaattgattgactaataaaagttgtatataaaatttgcacatttgactttacatgttcacctattattagaaaattaaactgggatctcttaccaagtttcatgccctaatatcatacttaattcaaaattacaaatgttctttttcattccttgattttttttttattttttttttttcattcccattggttggcatattttgatactctatgatctggttcctttttcttttataaattaattaataaacacattttgatttggacggttagttttggagtagccagggtgccaacttagtaggatttatattcctttttctttgcccctattcttttttaattattattattccaaatgaaaatacagatcattttcattgagtgtctttacagttacagatataaatatattaataagtgaataattgttgctagaaagatactcgttttaataaatgcttccttactaatagtcaacttagcattgcattcattccttcaactaagcattacttgaaatagtgtaccatttccatttagggactagaaattaatatggcaaatgaaaacaagtagaggaaaatacacacaaaatgaagggttaataataatctattcaa

SEQ ID NO: 46555 - DNA, 1288 bp, Cannabis sativa
aagttcatatttagggtgtttaaggtaaaataaattccaacagctatgcacactaaagaagtggtcgggagatgcttacggttagaagtatccagcgaaacggtcaaaggtggatgatgctctgcccaagaacctagtcccaagcaccaaaacttctcagccgaccgttgagaagagctcggtcatgcctccaactaaggttcctatggaggcagtgttagatgtaatccaccggccaagaataacccaaagtctcaggcaacggtcgcttcatccaaaggcgccaagtggggaagcaaagataggtctgggctgcccaaacccttagcaactactgccgtgctgaactctgagaatgcataggtccaggtaataagtttagcccagtcactagagtaaagtcgacttggctgaatctacatctcttctttgtgatataaaaatgcactttgtgtcccagtttcaatttgatgatgtgcatgagcaactgatagataagtctactcgaaaactataattgcactctctcaaattccttacattttgattttatctttaggtaataccaaccaccgccccaccaaatgacatgcctggtgtaatggtctgacactagaagtaaattgcttggaggtttttaaggatgtagaaatagaacacagaaaaatggaagttagaacttctatgtatttataatacgaacatcggccctatcaagcatagcaaaaaatataaaattgaccttgttatagtgagatttttctcacctagaaactcgagaccggactcctgtttaaaggacacgtgtactcaatttccccaaggaaagctgaggtgtcaatgagagactcctcgagtttaaacctcatctaagctaaactcagcgagatgatgcgaatatgaccaaagtctaatcgcatttacgaggctggcattatgtgggatcaaggaagggacttaactcccgtataccatgatatatgcgagtatcctctcaatcctcctgcggaaacatagaggatgattctctattaagcgagctagtcccaatgacccaacaacctcgataaaccaatacagactcgtgtgtctaggttctatcagctcgttatacgatgtccgtaagtgcgactatacaagaacgcagacatcctagacttaagtaaatgttaggtgtatcctaagcttgcgagcttacaccagaatatgaatagccaactcgcacattagaagtcgcatacgttgttgtatttagttaatagaaactgttcttcatttattaatgttt

SEQ ID NO: 46556 - DNA, 1239 bp, Cannabis sativa
tttactctcacaataatttcagtttaaaagcacagtctataccatagagttatcacccaagctctaaaagacaaagttgaaaggcagagagccaatgacttcatactaaagcattctatctgctttgggtatccaaccccgtgttggtacccaagccgaacaacaagtggagggtaagcatagatttcacaaacctgaataaggtatgtctaaaggactgcttcttgcttttgaaaatcaaccagctagtagatcatacaaccggtcataagatcctaagcttcatgggtgccaattcaggttacaaccaaatcagtatgcaccaaccagaccaagaacatacaatttttatgacagacttaggcatgtattgttatataataatgacctttgggctaaaacatgcagggtccacttatcagagactagtgaataaaatgtttaaagatctcattggctgtaacatggaagtgtatgtaagacatgcttgacaagtccaaaaaggttggggcatgtggcgaatctaaatgaatgcttcaagatcctcctagagtacagcatgaagctcaaccccctcaagtgttcattcaaagtaggcttaggcaaattccttggcttcataatcaatgttaggggaatagaagcaaactcgaacaagatccaagcccttgtcacccacaaaaatcaaagacgtacaaagcctaacgagatgtattgcagatttaagcaaattcgtgtccaaatccacagacaagtgtgttcctttcttcaacatacttagaggaaaataattagtgaacagaagattgtgaaagagcactccaagagctaaagaaacaattggctcaacctcctgtcctataaaaacctctagacaatgagaaactagcatatacctagctgtcgtagaatatgatgtgagtgtagtcctaataagagaggaagacagtatcaagcatccaatatactacattagtaaaagactaatcaatgctgaaggtcgataccaactcatggagaagctgacatactacttactcttagcatcaagaaagctaaggtcgtacttccaagctcacccaataagggtgtacattcaccagccattgcgacaggttttacagaaatctaatgcacctggctgattactcaagtcggccattgagctcgaccgatttgagatcacatacctgttgggttttacgccctaaataaaactctatttcaatgtaatccaga

SEQ ID NO: 46557 - DNA, 1363 bp, Cannabis sativa
agttggacgattgggtactttgtcgtatctacaaaaaaacaaatgtagtacaacaacaacatcatcaaacgacaacaactatggcaagtgattatcttaatcatcatcatcaagatgaagaagaagaacaacaacaatttatccaagaagcccttttgtcatcttcttcaccatcatgcttaaaaggggaccaagaaaagtactactccattatcaagcctcaaaaatcttcttcattctcaaacttgttggattactcaatactaagtagtttattatcagattgtccaaataataacaactcatcatcaattgggtttgttgttaatgatgattatgataataatcactacaacaactcaatgattagtaatattcaagaccaaaatcaacaccaacaacaacaactacaaagtttcttcaataatagtgttactaacactactactgattcagttaccggtaattacatggttcagcgaaattgtcataataataataataacaataataataagcttcctcagcttgagcagctaccactaccgccgccaccaataagtgtcgaaaatcatcgatttaagcgccaaagatcgagctcggatgaattgatgcaatgcccaccacaaccaccatcaaaaaaatgcatggtgaacaataattgttgcaataatgttcaatcatcagctgagtacaattatgtgaaccagtacttgttgttgaataatcagcaattgtttttgagccctgagcttcaatttcaaggataagacaataattaggaataagaacacacacaagattaagaaaaatattgatgagaagaagggtaagtagggatatgtttgttgttgttgtgagatttttatgttgttagaaagaggaatgtttggataggaaatattttggtaaaaaagggtgttaatttaatatattagattaaaatatgaaagatcattactcatcaagtagaattgtactatatatagtttcaaatgattttattagagattgattttacacttttgctcatatattatatattgctaccatttattattaaaaagaattagtttagttattttttaattaaataaaaagtcattttttctttggttattaaacatttttctaattaatttgttgggatattaaccaagtatacatctcgcattgagaaaatgagtaatagtagttatcttgaatataaaatttcactactttattagtattaaattttgtggaaaagtttctaaagacaaaatggtaagactaatccaaaacagatataatatcatacttgtgtggaactcaaaatgaagtggaagaagggcccaacataatcaaatagtgaaaaatccaa

SEQ ID NO: 46558 - DNA, 2716 bp, Cannabis sativa
ccatcctcttcctcttcaaataatgcatgatctcaaaagaaaccataatattatccgatatcaaccgaccaggcaaaaagcactttgagtattagaaataacatctggtaaagcctctttcaatctattggcaagaactttagagataatcttatataggacatcacacaatgaaatcggtctaagatcactcatatgttcgggtagttttttcttaaggattaaaacaatatttttatcatttaaatcactaggaagaaatccagtagagaaaaaattccataccatggtaataatatcatcactaacaatgtgccagaatttttgataaaaccccggggtcattccatcaggtctaggagatttttcaagatgcatttggaataatgctttttttatctcctcagctgtaacatcaccaagcattgagcattttgttcctcagttatttttggttgtatacaatcaattacaactctatggtccacgacttcagtagtaaaaaggtgattgaaatattcagtaaacacattttgaagctcatcctcccaaccaacccaattccccacatcatttttcagcttctgaattgcattgttgcaccttcttgaagtagctttggcatggaaaaattttgagttttgatcaccctccctaagccacaatttcttactcctttgtttccagaaaatttcacgctgtagcaaaacattgttgagctttacctgggctgctttgtaattactaacagccacggtatctctcccctttttccagtttcggatttcagctttgcactccttaattctttctttaaaattacctgaataatctttgccccattcaagtaaaacctcccccacagtatttgatcttctccataatcgggctgcccacagattgagtccaagtatcctcaaccatctaacaaagaggctctttcaaccaacaattctcaaacctgaacactttcctagtaacagccgttgtactcaaattaacaggcatcaaatgtaaaggacaatgatcagaaattgagaaagttaatcaatttaaccgaagggaacatctccaaccatctttgactaacaagagctctgtcaattcttacttctatccaagcatcggtactacgcccacgttcccatgtatacgggtagccactcaaatccaaatcatggagtccacactcatccaacaccccacaaaacccatctataagccaattcggatatagattaccaccacacttatcttgttgagacgtaacattattgaggtcaccaactatacaccaaggcaaatcatacgtatgttttaatcctctgattaagtcccatgttctctttcgaaaagctctatttggctccccatataaaccagttagtctccatttttcaatctctctactaacaatagagacatcaatgtaattcgtaccatatccaagcaactgaaattcttcatcatatctccataacatagccactcctccacttcttccttgaacatcaacagaaaacgccccatcaaacccgagagacaaacgaagcttctccactacatcctttcttgataaagtctcacacagaaaaacaaagttgggtctcttttggaccacaaggtccttaatgaattagtatgttagtagacaacacaattagacatcgtgcactcagtttaaaaattaaataaatgtgtggtaatgtttatttatttatttatttattttatagttttttttttaaatggaattcattcatcaactcaaagagcttcttgataaatacaatgaagtgtaattccaatttcgtagcattagctttagttaacaaaatttgattggttaaaatataagccacaatattataagcttctctaaaaataaaaaacaaacctaacacaatagaatattgtaacagtaaaagaatttgatggagtaatccgtcaatatcccgacaactagcttctttttctttaatcagctaaactgcgcccttaaactgtcagtttctacactgaattttccagcacctcgttaatcccagccagaagtccttctcgaatgctcattcatttagcttccagcatctgtttttggttgctgcaaacacaatttcttcatgctcccctcctcccacataactcgtggcaatacatctttctttgctgttcaaaccagcatctacattgattttgagataactttctgttgggctggttccagtgcaccttacttctagtagcactaattaatagtgaaaaatatatatttaatgagcttaaagtttaatataaattaaaaataaattgatatttttatgagattaatgagatatattttttatgttgaaaatatttaatttaaatttaatttattatatttttcttgtaggaattaaaattagttggtgttttgaaaagaaatgaagaattggagaaacgaaaatatatatatttaaaaaagaaatcagattttttgagctgatggaagcccactcgcgtgtcatcagcctctcccaatcacagccgtccatgcggctgatcaaggccctggcgcgcgcgtgttttccaccccagacaagggcgcgtgaggcgcatgccttccacctgccagcaccagcgaacgggtcccacctggacccgcctgtcccccagcgccagctcttccgtgcgtgacatgtgtccacctgctatgcaacctttctctccacca

SEQ ID NO: 46559 - DNA, 1168 bp, Cannabis sativa
gactttcccgatgtcaggcggctcgggtcagagtaaaagatttcgtgggaaccaaagcaggggtggtcgttagccctattcctatcctaagtgtccacgttgtaagaagcatcatcctagggaatgtaactagaatacatgcttttagtgtggcttggttggacatttcaagaaagatttccctctactaaaaaaggaagaatcaaaacgcaaaatcatatttgagcttgggtatgtgccattgcacaagcagatgttgtagccagtccttctatggtaacaggttagtttgactctagagctacacattcatatatgtggcggcttaggtcctctgtactggttgactctggagctacacattcatatgtggcatcaagagtaattaataaattgggtaggcccaatgatctcattaaaatagggtttcgaaccctattacctagcggagaattggttatctccaaaaagtgggttaggtctatgctaatgagatttgagaatagggagttgagtgttgatctagtggaattggaattaaccgagttgatattatacttggggtggactttctgtccaagtattcaactagtattgattgtaagtgaaagatggtaactttttagccaaatggtgaagaacacttaatttaagtctggtttaatcagggttctcgaattccaattattttagctttgaaggctaaggatttattgtacattggttatgtaggatttttagcggttgttattgactccagtagacccaacacatttgggcatgaggatgtcagagttgtaagagaatttctggatgtatttcttgaggagttaccgggattaccaacacactgggagatagatttcatcattgacttggcacctggggcagagcctatttcaaaggcaccttatccaatggcttcgacagaactcaaggagctaaaaataaaacttcaggggatgctagatctagggtttacccaacctagtgtgtcgtcctggggagctccaattttgtttgtaaaaaaaaaagatggatcccttcggatgagtattgattatcaagaactgaataagttgatgatcaatatctatccaatgcccatgattgatgacttgttcaatcaacttcacggtaagactgttttcaatatcatgtaaaacat

SEQ ID NO: 46560 - DNA, 744 bp, Cannabis sativa
ttttttttttttttttaactatattgttaattaatactttatgaattatatatatttagaacaaagtttgatatataatccatatttaaggacactaaggcgtgcaatacgagaatcacagtgacatgtttggacttaattaaattaattaattgggaccaacttataataatattacttgttaaaaaaattataataattaattttaaaaattgaataatttttttaaaatgtgtccgtacgacgaatatacctattgccaccaaccaaagctttggcatatgcaaatcctgccattataaagactcaacttgccattaattactgatttaattttaatatatatatatatatatcgatacactttttatttattttgggattaaaaaaaaattagtgtaatttttttaataattatctatgttatataattatttaagatatattataaaattttaagaattaaattcaaaataatttataatatagaatatagaaagtagtgttcaaaatcaaatagttatttcgcacgtataaaataaaaaaatcacgcgtgcaacagactgtttgaaccatatttttagcgtgtaaatttcttcgaaggtctcaaaattttgtaaaatattttaaatagctacaacgtacatgactataaaaatactgaactaaaaagtttttttatgcggaaatagataggagtatatcgttgcatcccttttagagtggcggacccagaatttaaag

SEQ ID NO: 46561 - DNA, 2126 bp, Cannabis sativa
cagcaaccacaggagcaaccataccaaagaaaggcttaactaattctgcaacaacctgatttgatttgaatcattctgcaccactacacttaggctgtaaacctttttcttaacatctagagctgcatctgtaaaaacttgataacatcctggagaacaactcattttaatctgttgcattgtagaaacaccctataatttttaacccaaagtattaccattattaaattgtatcctttaattttttttgtccattcaaaattttccgagactacttacaataattattactaagactcaaggtaatataataagttagaatactaactactcaaaattaagattgaattaatttatagtcaaaaatatgataaggctagattagataataacaattcatttacttatctatctaaagttaatatttggttacagtgttacaaatacatttgatcttatatatctactttatcaatattctaaaaagaacataacatattctacttagtgtgagtagatgatatcgcaaattttccagtcagcacataaaccttgtgcactgacaatcttaggactaagttttatttgaacatccaatcatagttatattctactgtgaccacatcactatacgtcatttgtgttttcagatagctaagtaatataggtcggctggggtgtccactgacagcaaacccagagacctgaagttggatgatccagcgaagtttctcaagaataaacgaccattctaagggcaaacctagatgacctccggatgcagaatactgaaagatgcccaacaatggtatgggtcacaaacaccaacctatgtggcaaatatctaatagaatccccaaaaaataggggagatgtctatgtgccagaccacaaagaggctcacgacaaaaagtaaagcatctttttctctaacaccaaatttcttctaatattcttttttacgaggccttcgacagtcgtacgaataccactgtagtggtgcagatggtggttatttgttttatgggcctcaaataactaacccaaagttactattttgatgtattttaacccatcattgtgaatattttgagataaaaaccttaacaaatccaagtttacccaaaaacttgaccctagcctataaataggggttaaaccctccatgcaaaagcttatgatttttggcaagaataatcttgtgtaaaatactacatagctaaatagctcaataatattgacttgtggactaaggctctttaacactcccaatcacgtaaaaatccttgtcttccttacctgttttcttcaagcttaatatattctttatagattttgaaaaacaaacacggtaaatatttttattctttcattgagagcttgaaggaagtgttcgccattgttgtcatcttaattgtggttacagctagaattgcgaccagaaagccattcagtcgtaacaataatgataacgattacattgatgccaatgatttaaaatgatcccctctagcggacgttaggcaagcgttgtaggagacgatgagacgtccaaagtggtcaggcatcctcctaaaaaaggctagcaacaagagaagtatgtcgatgaaactcccatctacaaagatgaacaagaaggctaggatgaggatgagtgagatgactacaataacgattatgacaataactaccgagaggagtactatgaggaagactcagagatgatacaattgagacaattatcttagacatagaaagatggttggaagagcaagaagaagctacagactaattgcaaagatccctcttacagctgcagaacttggcagtgaaaagaaacctccacactgagccccaaataagaaaccatccatcaagacccacgcataatgcaccccggacaataggaatgcgaccgatccactatgctggagagagagggttgaccgagctgttgggatattatgccctataaataaattctatttcaatataatcttattaactaattttttaaaagatcgtaaataatttatgttgcatagttcacatgattactttgatgattatatgtttaatatataaattttattaaatctcaaacatatagttgctcataattatag

SEQ ID NO: 46562 - DNA, 2150 bp, Cannabis sativa
tttgtcacatgtttatttagattaaagatttaacatttttttacgtttctttgatccttcaatattagttgtttattggtattttaattaaaggtattattagagtttttattgctatttttataaacaacataatttgtctattttactgctcctttgaataataaacgattctcttatttgcctattaactctaaaaaaaaagtgttaaaacttgcggctagttcatgacatttgacaaaatataagagtagagttgagtagagtggacttatatggatttcaataaataattagatattgcataaatattgttaagatatcatgccacttacaatagtttggaatagttggcttttttctaggaactaaattagcaaataggatttttcatacaatcagcacatctatattcaaattttaactaatttggaccacactatttaaaattgtaccaaatgaatttgatgtcaatagtttggtcaatccaaatcatttatattttttttttaaataagtgatgaaataatcttgaatttaaaaaattatgaatggtttctaataagtcttgggcttatatatagtatcaacattaattctcatatttgttttggcacatatattataagaaacttacaaaaatattagaatttgagtcaacttttataaaaatgctgtcacacaaattttttttcaaaaatactgtatttttataaaacaacagtgaaacacgaaacagtataactaaaaacaacagtagaacaactaaaaaaacaaccgtagaactacagtgaaaacttaacacagtatttttggaagaaaaaaaattctgccccacggtataaactataaaagtaaaaaagttaaaagttttaatatgtggtgtaattatctctatattatatagtcttttaattaaataaattagtttcatgttattttttgttaaaataagacttgaagaatacaaatggagccatcactaataaataaccatcaaaagttgtggaaagcttcttctttaaagagaagtgaatattttaggataatttttaaatagaattaaagaaatgaagaattgaaatctactcttctctcttctatcattactaacttttatttgcaacaattctttgtttttgttttcaaaatttattttcgggcatgaaaatagaaaaatgataaatatatttagaaggattcttggatcttctttgtctttgtgcttttttttgataaaatattcttttctcaaaaaacataaatatatttagaaggattaaacattgtgaaagtgtgtttaaaaaaaaaacattatgaaagtaaataaatattttgtgaaagtaataatgtgtgagaaaaaaatggataggaggagaaagtaatgaatgtaatttaatagcatgtttggtttgttgtaatgggaatcgtaatggaatcaaattatccattacaatgtttgctttgcttttaaaaatgatgtaatgggattcagtaccggaacttggcaccgctttaaggaggggccaaatataaagattttttttttacaaacaaaaaagaataattgggtatgtatagtacacttatatttttgttggttctctatttgttcgatattttagagtatttttcaatttatttttttaatgatcgtgtacgttgtaattatttaggctcaccggtaaatttttagagaactttgaatagtttataatgccaaaaataagttttaagaatattattgcagtcatgactattttttcttatatacttagtaaacaacggtttgaactttattttcgacaatacaaataatttaatatattttaaaaatatacaagtgatcctaaatatctacaatgtacactatcataaaaaaaaaaaatagttaaaagcgaggaaattgcattgtatacctattttactttatttattttaaatttttacctttatttctatattctttaatatatactcacttttatagatgatgtttacattataccccttaagttagtgtaaatcatgtactacagtacttaagtggagggcaaggttatattaggccactcacccataaaagtggacaaattttaataaaatataatataagggtatttttgattaatgaatgcaaaaaaaaaaaa

SEQ ID NO: 46563 - DNA, 1649 bp, Cannabis sativa
  modified_base (1495)..(1499): a, c, t, g, unknown or other
gtattgggtatattgaggggtatatcccctccgttttcgtttatcctccatccggttactacctttcgacgacctcttgctccgggagctttaaggaggtcctgttaggcttgcggcgggggcagactgggacagagcttgagcactcatcccgaagggttgctcatgggtgtcccaaagtgtgatgatgcaagagccaaggctaggctttggttatatccttgtgtagcgaagaattgtatgtcgctcatttgaggagtggtcggaggcatggctcccgagagctgaactccggatgcatatcttgacactccggtcggatagtatcccccgtaggccactatatgggcttcttccaaattgatgtacttttggaccctacttcttgaagtcttggagattggctgctccctcctgttgtaattcgttccagaatggggtccccgtacgtatcccagctttgagaagggcaagttgttgttcgtcatccaccttcttggtctttgaagcttcttctttgaatctttttatgaagttcttcaaaagtttctgcgggcaattattttatgttagtcagggcgctgacttcgagattaatctttctcgctgcaacaaactttctccagaagctgacttgtagtttgttccagcagtccactgatcctggttctaactttttgaaccattcctcagcggaaccactcagtgttagtgaaaagcataaacactttgcatcattgctgaccctcatgacagtcatcacccggttgaaacgggacaagtggtcacttgggtccgagtctccggtatatgccaccatctcggccatcttaaaattttttgggagctctatgtgcaatatgtgtcgggcgtacggtttccggtcctcgcaatcagaatctgagtcgtcccctttctgcctccgggagaccctggcaatgtccttgggtagtgttgctaactcagccagaatttcttcatttagtgttctcgcagaaaccaccggtgcgtgtttctttttgtctaggtggtctcgtagatcaccatgtttttcattaattttttgtcttagatcgactggagggtacctctggtttttcctccctctctcttcgggctcctggtgcacggatacgctttttcgctcctctaggtcctgagggccaagactcgctttagggagcttgcccccctgcggacctttccctttttgaaaatctgagcaaacttttcttaaaataattaattgaatatttaacaagacttcttttaacaattaataattataaacaattttcttatataaatctcttctataattatttgaacagttaagccatctaattataaaatttacaaggaaactttatttttttctttttacaaaaattagacttctttttacacaaattagactggtataataaatttttaaacaattaattaattttaaacgatattaaattatttttttataactagaagaactaagtannnnnttttctatttgagtttgaggttgcttcgttttttgggagagcttgactttatttttcgcctctggccgtttgattttttgagtaaatgattccttatcgaaagaaaaggaggaatttagccattttttttttttggaaaacacattcaac

SEQ ID NO: 46564 - DNA, 1910 bp, Cannabis sativa
  modified_base (1144)..(1148): a, c, t, g, unknown or other
aaaatatttaaaattcagtaaaaccgtatttttgttgtttttgtgcatttgtaaaattaaccctaatatatatgtatattgtattattttttaaagataacttaatatattgatttaatgattagtatatgttaaaatcttattaaattgatttttaaatttttattataatattttataataataataatataaatcattcaaactgcactgctgtgtgatatttgtaatttgaagatctcgcagtgtatttgcgttttaaaaaattacaaaaaccaaatatgtaccggtttggttttgaaaaaaattaccgtaaacacttctaatatatatgcgtacctataaaatcaacaatgatgcggccatcgcagaatcgtccggttggggatttgaaaaatccgttttgaccgtatggctcgtaatttgcttggttctcagcgatggttttgatataattattgttgccgggatcgactgtggagtctccgaaaatgaataatggactacaaaacacaccgtttcctgacacacaaagtaaaagaagaacactgatgattaatttatctaagctaaaccaataactaagtataaactttgccatttcggatgaatgctactagatagataatactaaccaaattattattatatatacatataaatagagataatttcaaataaaaaaaaacacatacaacaaatctgaactttgaaccaacggtttatacaatgtgacggcactctattttactatattatattgagaactactattaatagaacatggaagaatctatattatattgatgagaaaaaggtcatttcggatcaaaaccgctctctaatattgatgggaagaatctatattgatatgaaaaatgccatttctagtaaagttatataataagagagtctttgacaagagttgttcaaaataatttgattataaataatattatgaaagagaatatgattgtaggaaaatatgtaaactgtgtttgactgtgtagagtaagttaatatgtaatcatattcttcttaattaaattacaccgtttggttaagtacatgaatcttatatattatttttaaaaattaaaataatatttctttattatatctatttaatgttaattatacatannnnnaaaataattatttattaaaaaaatatatttattaattagtaaatattaaattttattatatttttattaattaaaataaatatttctatatattttatcattatgttatttatttttgtttgctatatcatttatgtacactattcgcataaaaaattatatagaatgaatatatatattattgttaatgatataaaattaattcagtaaaagaaaaactgatttcacaaactatatatatatcataatattttgtttataaaaaatataatattactagtaattaaatttatttattaattcaaaaattctattcaaattaatataacaaaaggtaataattcaatgctatctttttttaatgtgtcaacattaccatagttatattactaataagagaataacatttcaaggctaaactctcaagacaaacaaggtaatgtttcacattaccattcacttactagtattaactcattccaaacagcctctatgtataaagtgttcgataaataatttaaaattagtttattgtataatttatgagataattcaaatatatatagagagagagatatagctaaaaattaaatttggtacaaccaaatttttaaaatacatattataattaaaaaaaaaattacgacataaatattaaaatttatgaatttgttactaattaataagtacctaaatttaaaaaataacagcaagaatacttaaatctttaaaataaagaatttcattagtgcatagggctct

SEQ ID NO: 46565 - DNA, 2861 bp, Cannabis sativa
attatataatcaatcaactaattaatagctaccaccacattgctttatttactctttcaatattaattaaataatcaatattaactgttttattatgataaaacactcactacaaataaaaaattatattcagtaataatttttaattttaatcacacaaaaaattatttttaattaataaaatataatatttatatacaagttgttactaatttaattttaatcgtattgtgattaaaaatatatttagttataataaattgtaattgttgtaactaatacatttaaacacgagctttaattttagtcataacacataaaaataataatgtataattagtcacaacttctttatatttaatggcaagtaatattttttatgataaaccttaactaatatatatccataatccccacaaatataaaaatgtttacaaattaatatatccattgattaattaatgaaattatatacaaaggctagcttccctatgtatatatgtaagtgtagaaattaaaataaataatatgagaaaaatagcaagctagctaactagagagagagagagatcacttgtaaccaaaaacaacaaatgtatatatatttgactttttttttttttaaaaaaaaaaaagaaaaatatgttatataatattgttgttaaattagctggatgaggtgagagaggaattatttgatgataatttttaaaaatcgtttttgtagtattttcgaaaacacaaaatgacaagcatttaattattacgtttgcaacttaataattaattattattattattatttatataatatatatagtacatacgtacagtagtgatcgtgctaaaactactaaaacttagaaatggtctgaggtcgaccttgataagggtcagtctctggtttttgactatttgtttccaacaacaaaacaactaattataaatatgttttgaccttctaattcaaataattaattattaatttggttgggattgggaattaattagtgagtcatctgtatataaactaatttataaatacatatataatttgtacacgtgctttcattttattgatcaagtacatgtgcacgtacatacacattaactaattaatcacttcttatatatttatattttttatgtatacacaattttgagtagtactagctagtagtattttcttttttttttttgagaagaagagttatgtttttcatgagagattatatatatatatgttcatcttgtccagcaatatgttagattgttgtaattggtattttatgtttcagttaaaattgtcttgttattacatagtcgacttagtataaatattaattagcttcattattagggctgacttttctttgatcgatcgaagattgtttacttgttttctctttgcttttctatctttctcagttttacaggtcaaacctcaaattccattgaggagtaatatatagtatgcatcgatccatatgtatcaattaataattaagaaataggtacgtaatattcttaattataggtctagctatagctaattaattaattaattaataaataaatacacacaaataaagccagttgtacatgtgtagagatcgagcttcgatccaaagtcaaatacaaaaactaagtggccaatagcatattacttaacacaacattcttgcttaattaataatgagacttgaatccatatatataaatgaatcactcgtgtatatatatatacatatatatatatattagacaacaaatactcaacaggttcggtccgatcttaagaataagcaagctcgttctgtgcttaggattcacttagttcgaagtcaaaaaaaatttctcttttaaatttatatattaattgtctttcactaattttaaaaaataacataatattctatttttttttcttatgactcattaaatttcaagataaacctggtaggtaacaaatctagcataggattagattttaggaacatttagtaattatgtttcttgaaaaaatcattttatttatatatatgaattttataaataaaaatttttaagtgcggtatttagtgttatatatatttgatgaatagtggatggatggatcatgatttttgaaaagcggctaggctaagtgaagactatatataactgattaaataaacatatcgaccatcaggggcggacccatattgtagcgaggggggcagtcgccccctaaaaaaaaatcgagaaaaaaatgtatatgtattttaattagttataacatatatttgtattaaaagatgatatttatagacataacagtaatcttggtgtaatggttaaagtaattggtaaataggttagagggtaaagattcaaaccccactaacactttatattttctttttaaatttatttacgcccctcactataaattctgactttactttagttgatgataatgcattttccttgcatgcaaaccaaatctatatatatatatatgtaatgtagctctcacttacggcctcatgacattaaatttgaactatacattaatattgattaattaattaattattactatatagtcaacaccattcatgcttgcatgcatgcttttaggaaatgaagctccacacatcaactcaaccttccattatctcaaccattaattataatcttcatgcatgttgcattcaactccaaagtcttatactctaattatatgtaaaacaatccaataaaaactgatcatttttctgtttccaaaactcatatatatgttttgcatacgagatattaggttatccatctttaaaacttctaaattgaatcttagaattaggggtgttcatccgatc

SEQ ID NO: 46566 - DNA, 2770 bp, Cannabis sativa
caaacaaaacgtgaaatggaataaatttatagatagaaatgttataatgacttgaaaagtaatacctctttcaaaaattcatgtttcttgtcatctttaccattttgaagaaccttaatagctactgggatgtgatcaagactgcacttgtagacttttccatagcctccttctccaatcacattagcctctgagaagaaatctgttgctatttctatttcattcatagtgtatctcatgtacctcttatcattagaaaagagttcatcaacaagctttcttttctctaaagactcttcaaaggctttgacttcagcaatctgtctttcataagcttcttttgcaagcaaaactctttccctctcaacctcctttacagcttccaagtgatttgctttttcttcggctgcaattttcttcaaagtttcttctctttcaagagcagcattcactctgtttgtttctttcaggcatgcagaggaaactaactgaacctgctaatttagacatttgtgaatataaaccttaaacaactcaaggtctctccaaggtcatctttatataattgatatggttttagaaactcattatacacggatactaaattagattggttacggcatttctggctaaccagatcaaagctggggcacaaatgaattatttgtttggagctcaaacactagagtagttgatctctcaccttcttttgggcatggaccaattcttcacaagtttttttatacattgcaatagtattttgcaattcttgacgcacacgggcaacctcagtctgtgagtctaactgcagaattatatacatttattatacctccataagcttcaatagatgttacgcaaaactcattaaaacaaaaagcatgttctgacaagtttttggtgcaaattaccttgtcagtatccaaagaatctgcataattgcatccatttaatgtaagagtttcaaggctattttccaagatttggagatttaagtcttgaaaactagaattggcagaagaaccattttgttgaaatgcttcagagtttaggtagttaagatccagatttattgatgctccaagactttcatttaatgaagactctgctgagaagaatcgacgcctggataattgttcatctgaaccactgaatccttctctgttgtctcttgaagtataaacccagtgtgcggtgctagtctctgtaaggtaagaagtatagaataaggacaaattaattgactcaactctaaatagaacacttaaaaatataccatatgaagatgatgaattagctgcctttgtaattattttcttcttcgatacaacatgaatttcacatgggttggtagtacaacttaaaaggcttgttggaacccctggtcccttcagtttcctaacaaaattgtgactccagacttagaattatttcattaaaataaataaataaataagaagaagaatgagaagaagaaaatttcactctgtttcattccatctgtactataacttcatattcacatcataaataaaactgcatatatggagatatttacaaaccttttcaaatttgttattaccacagaaatttatatagtcaaaatcaacaaaggcgtgtctactgatccataatgaaaagttgagcttgaaactatagtataaataaaaaaaattgtaaaaagactcatgttaccgaagaatactctgagaattctgatttttttttcgtttcaaatggataatatacgagtgaatagtaaagagaaaaactttctcattccttagttcctttagtacagttcaattcataactcagtcagtgaaatgaaaccttacctagttagaaaatttgaagaagaagaacccagaactaagcattcaatccctgcatcagcaacatattttagaagcgtggatgctggatctttcccctctaaaatcaaagtttccatctgcaaaagatattaactacattatacatatacaaaaccagtacaaatcaggttcaaagagaaataaaagagcaagacacacctgtttcgttctgcacagcttcttaaatggaatgaaaacatcttccgccttagattttatctcctcaacatacatagcaaccatatttgcgtccagttcagacacgggaatccaatccccagctaaaaaacataacataaaaacatcaaatacaaaaccatgggtacaattttttttccttcattaaagtaatttgaagaactaaaaagtgttcaaaattgaagctgaaaaaagagaaaagtagtgcctaattttcttgctggccaaacagagttgagattgaaatataaaattttgcacagatgatatagcagagaaagtaagaagcggaaaatatacatggagtgggaatagaggtgattttgggcatgacatggatcaagacgaagcttgcagattggggcatgagattctccaccgcccagctgactgcgcggtggctgccgttgccaccgtcaacggccactgccactgacttcattgctgtcggagtaccaaagtcaccgtcgtcgttcaaactttgaaaatgaaaatcaaccgaatagtctttcgaaaaaaaaaatcaagcgaatagaagggaagagtagactaacaaacaaagaacgatagtagtatgttactacgttgacgaagaaaaattcgcagctttgtaactaaaataattactctatcaaatattaccaaaatttacagtaactacttaaaattgccattcattttcttttatgtataaa

SEQ ID NO: 46567 - DNA, 924 bp, Cannabis sativa
tattattaagtatatttggtaatatgtaataacaatgaataatgttgtgttttcgtaggcaccattccaagtgattcaacccatcaatggtgaccctttcattggaagcttagagactccagtaacatccagcccattggtggcatggtacctatccaacctcccagcataccggaccgcagtgaacccacttctgaggggaattgaggtgggcttggcccatgggtttctcctggtgggcccatttgtgaaagctgggcctttgaggaacacaccctatgcaggtggagctgggtcattggctgcagctggacttgttgtgatcctaagcatttgcttgacaatgtatggagttgcttcattcaaggaaggtgagccatccattgctccttctttgaccctaactgggaggaagaaggagcctgatcagctccaaaccgccgagggatgggccaagttcaccggtggattcttcttcggtggaatttccggtgttacttgggctttcttcctcctctatgtccttgatcttccctactactttaaatagagacactctacttcgtacttattttccttagaaaaaaaatgaccactttatcatgtattaatgttttaatgaaggaaatggaaaaacatttgtatatttgactttctactactttgccccctactttaattttcaagtttctctttcaattctttgtatatatgagtacactccccactttctaaaatgtttgatatatatctaccacttagacatcttttaaaacttcttttggaattaattacatgcaatatatttctgtatatcatttttcaaaaaaaataaaaataaataaataaatagaaaaggtagctccatcttagaaagaattaatcattattataaagaaaggtacattttaaccaattatactt

SEQ ID NO: 46568 - DNA, 1145 bp, Cannabis sativa
tgtctaaataatatgtttagtcacaaataattttttttattgtaactaaaaatcacatttagtcacgattttttttttattgtgactaaaaaattattgctcacttttttctttgttgtcacaacttaaatttcttttaattaacttgccaacaacatgtatatatgtaaatgaaaaggacctacatcatatttttgattaaatgcttgacagtgtacaattacccacatcacatgcatggtgcagtttgagagattttaatatttataatttataacaactactatacactatttatgatgaagaaaaccattgattgataattaattgagtgaaaaattataatcaattggtgtgtgtttttatacatatatagttcactcatgtatgaaagagatctcaaaatattcagtgcaatatttagtagttagcaatccttttctatgctttaattatggtataactaaataattatatagtatgttattagccctcgcaacaaacgatggtgttattatataatatatatattgttgagacatataagttacgagtttaagtataaatagagagatattaaaaatttattgtagtttaattactttccctaatacaatagtaatggagtttatttagaatttctactgctcaagaaaaactagaaagagatgttctagatttagcagaatatgaaaaataagctagtaactcgcttttataagcaaggaggtacattacatattaataaaatattatagaaaatatatataaaaaaatcactttggtcttttttattaaattaatttatgtacattataaatattaaaattaatatatttgtttcaatttgtatgtgactttgtttcaatttgtgtcctctaatataatatatattttttattttaataaatttgtgctactgagttgtttgtatattattttagctatatgtatttatcttttttgttttgcattgtaaggattataatgttaaaattatatgttgttatgacttatcataaattatttaagaaatttaaaaaaatatgcataccttaatattttatccctaaactaatacatattaaaattgaaaacatatgaccactttatctaaaaccaaaaaatacccctctcataactca

SEQ ID NO: 46569 - DNA, 823 bp, Cannabis sativa
ccattaatgcgccggccgatctctgaagttcacccgacaccttcccgctggacaaaaattccacctcttctctaatttcttcttcccttagagattgacttttttctgcttcattatttttatagaactcagagtcctagtgccatattgtgttgaaaaaaccactaaatctatagccccagtcattcagtctgaactgtttcaaaggaaattcgagtcccccgtgacgtaacgaatagagttgtttacgaatccctgatcgtctcctcttaatttgagtctcaagtggtgtaaaaagttcttctctgctgtgtctttctctacatccagcagacctccatataagccaacaaattttccccatgatctcaaggttccataagttcaggggcaccccttctaccccgatccacgagctcctgcattctactttcacctctttgtattgttcttcccctaaccacttaacaaaagagacaatagtgtcgcctgttcccggtattatagtacttttgatcttcagtaaggtttccatctcttccacgttcttgcaccatattatagtacgatcatcgaacatttgactaaccactaactttctattaatttcacgtgataggttatagaaaatagagctccaagacaattcgctgttgtttctgaacataatcacagctcggctccaatccttatcacaatcctctacttgtagaaattcatgaaaaattttccgttccattctcctccttggaaatggatttcgtggcctgaaactcccattaccttttggtaagaagttccaatatcccaatctgttggcttt

SEQ ID NO: 46570 - DNA, 2414 bp, Cannabis sativa
taaagtctgaacttccatcccgaaaatcccgaagtcaacttaagcgcaaggctaaggacccctcccaggtcgattgctatgactcggttctactcaactttgtgacttcatccttcttgccatgtgtcaaatattgatgtctacgttattagagaagtttctgggtgaacatcgtgcagttgatttctaattattttttaagttgttttcttatttttttattgaaaaaagagtatttttgtaattttaaaactttaaaagcgtatttttataaataaaaactttactaaataataaaaaaatatttttaaaaatttccttaagacattttagtagagattataaattgatgtgaaactaacaagtatttgatgatgtttaactttgttaggattgaaaatgagcacttgaacaatgtaggcaagtacagagcattcaaatcagtgcctctacctttcaactatgatgatgagaatgatgagaaagaagagtgaaatagtgacacaacaagaatatgtcaagtctcaaccaattttttttttaatttttttactagtgttttatgatataatgtatttgtacaaaaaaaaaaaaaaaaaatcaattagttgggtttgtaatagtaatagtggcttgtggatcctccatggttcaagccctaaattttatttttgtattttttttgtttctcctctttcgaaaaaagaaaacatatccctcaaatccctaaaatcaaatatattactgggagacgaaagcagccggccgagatagatgggagcagacaggcaggacgaccaggaaagggcggtggttgagatggggcttaggggttggggaagagagagaggttgaagaagaagagtgaagaaaaaaatagggaaagggcttggagtgtatataatgaattgtatcaatattgatatatgtcactttttatagtgcttgacactttaagatacgattaattatgagttttgattatcaaatagaattaaagagcttaaacaagtgcacatgcatgaatcttgaatctaatttaatgtcatgtcatcacaacattgaattatatagaagagaactaaacaatgctaaataattgtaaagagaagatgttatgtttaattaatttgagtacaaatacctgtcacggagagtaaacatctcatcataaatgtgtgtcacagcttcatacattttcttcaattcaacttcaagtatctattataataacatatcacaacacttgattatcatttcaataatggaatggaattaaatgtaaactttgattgaccaattctaattaaaaagcttaagattagagactactcatcacttaaagtcacaactcacaactcaagactccaagggcaataagtataggccattatttttattccatgatgaagattttgatctaattataaggccacgttaatgagaaccaagaacgaaggaaataatatcctataatgtaatgtagtcactcccacgatattcacagtgaacatatataatagtatatcaaattaggcagagagagagagagagagagttggttgcttacatcaacttggcctttcttggcaacattggatttggaccagtcagtccattcaaactcaatggtgagagtggctggagggtttttctcaggtgcccaaaaccaagttgtatagtcacccttctcaggtgcagtgaaagcaaaatcaccccatttcacattgtccatgtagtgataaagataattgttccctttaggtgaacttacctacaatatacaaattacaacttcatcaatttccacaaaattaaaattgactaagcatttaatacacatactctaaagtgttctaagctaaagtttgattgatttcttttaaacacttcaaccacacaaccaaatctatcttaattctcttgagtattcttgaggatctctttaaatttccacattgtattttatacatatcagaggatttacttgtattacaaaacacattccatgctttgtgataccaatattaaaataactcagtttaagtaaaattgtcattataaacaatttgagttagagcgggatcggtcttaaagtttttttgggctataagaaaaaagttatttttggactcttatttagaaaaactttgataggatccttatttagaaaaaatataatattttttaaaataagtaaaaaaaaaaaaaagtgtaatttaaaaggaaaattttctattttgggtctctgggctaggtgggccctaggcataggcctcgcctgcctatgcctaggaccggacctgagttagaggttgatagtctttgtgtgaaaaattatggaaaatttacaaaaatactagaatttgggttaactattacaaaaatactgtcacacggaaatcttttcaaaa

SEQ ID NO: 46571 - DNA, 815 bp, Cannabis sativa
  modified_base (47)..(70): a, c, t, g, unknown or other
  modified_base (752)..(775): a, c, t, g, unknown or other
ccatgcaacataaaagcaatttttgatcttatattaattagtaaatnnnnnnnnnnnnnnnnnnnnnnnntttagggcacaaaacccaataggacttccctactccctttctatattaggtagtttgggtagctaactgcttggttttttcttctttttatagaaatcatgtcttagaagatccaacaagataaggttgaaatggaagaggaagttctaaagcaagaggatgctctgaaactagttcttaatgatagtccatgggagatgaccaacatgtcaataagtttagaatttatagcttaagaaagtacaagacccaacgagggctcgaaagtgttcatagattgtactagaataggctctccattcacgaagaaaaacccagtaggtgtgcggatggaggcttcggtatctagagctgtgcccatgtagagatgggtgcacacctttcgttgaggtgttactttgccaatttatgtgccgtagtcggagtggaaccgttccaattcatccctcatgtataccgtcttttgtcaggatggtatgtcctttgtgcttagcacaacaaatttgcatcaatgctggaggagatcttgtacttctacaagattaaatcccagtccatgagggatcataaggaaaaggtgggtttctataggttggagcaccattctaagagtgtagcctgccttattagatccacgaagtatacacatgacttatgagactactgttggaaattattttannnnnnnnnnnnnnnnnnnnnnnngtatgttgattaacaccctaatatgaacttctaaaacgat

SEQ ID NO: 46572 - DNA, 5565 bp, Cannabis sativa
attttatatttacattcttatcacgtctaaatctcataccaaatacgacataatttgctaataattcctttcatgtttttgaagagacctattaaaagaaaggcaatgtgacaacattataattgtagagtgtttattcacatgcatcgtcaaatttatatataaagatctatttggaagtttagaaactgaatgatgatattccaacattattgggcatttttgtagtatatatagagagagaagagagagaggccggacaataataatggagttcacataatattgaaaaataaataaataaagtaatatgaagcatatgcagattttttttttcttttaataagcatatgcagctgatacgtaaggatatatattacatttaaaattattataaatatattatttagatcccttaaaaataaataacaatatataatgtataattaattgatacagtttactactacatgccaaatgggcttcgatgagtgggcccacttattcgtcggctttatgtcgggtcgggtagcttactttgcgctccacccaacagagagagagattgggctgggcccgacttgactaaccgagacttccgctgaggataagagaaaatgaaagtgacaaaaatgaaggagtataatgaataaaagatccaccctcggattatgtgtaggacccattagcgacggctgagattaaaacatctggcgctattgaagaaagagaaataccctagagttgcggcatgtttgggagttgtcaaatcaaattcaatgggcgtggccgaaccagtatttactcaattattgttctcccttatggtggtgttcgcctctttcgaaccaattattgtactattccaatttccaaatatagtttcctcattaagtttatctttgcttttagattataattgtaatttgctcaattacattacagaatctggattttgattcgtcgaatgaaaaagataaaaccttgttttctagttatgttcaaaattgttgcaccgtcagatttggttagaaacacgaagtgatcttactgtggagaatgtcccacgtgaaataaatggtagagaattgagtcataagaacatgaactactccactcattgtcaattgtttttgagatagaaataaagcatttattatgttgaataaataaaacactgaaaacagtaaaaactgttaatatgcatctgttcaaagcaattattatgtttaataaactaattagtatgtgtagaaagggattgaattgagaagaggaaaggaacacctcaaatgttattggaaattttagacaccaattgtacctcttacctctgaagctcttgcttgtactattatttttttcttaatgtataaaaaattaattaggtagaataaaataggttttcgctcctgtcaaataaacatatacagacataattgcatattattttattgttataatattttattccatccccgctaaataaaatccaggatccgccagtagatctatgcatagcatttcgtttttctttaagatattttgtttgatctcatgataattttgaaaagaaccttacaattagcaacacaaaattcataccattcacatttctatatgacacttggaacatattttcattctcatatcaccaaaatctatatgagacacgaagaagactctggaaaaacaacaggactctaattgctcatgtgccaatacttgtgaggccttttcactaatattagagagatgggtacaattgaaaaatataaattaactattattaccatatttatatgtataatattaacacaatgatcaatgatgataataataatgaaaaaaaccagtatataattactcattcttgttattattattacatttccttaatgtgtatatttagatagaaggttacttatattatgacattattcttataaaatgatattaattatgtttatggcatattagtagtatttttgtgtgcaatctatttagattgtaatgcattgttcgtataatatagtaatctaatatcattcaccatttgggttgtttataaaataaataatccaattaatttaatcagcgcgatcaaatttaattcaattccgcaaactatgaatatctacacttatacagattgaattagattaaaaattttaagattcgcacttatgttgaatgctaattgacatataaaaataactgattcaattcaatttacacatattaattaatatatttcataactcaataaatcaaatatatattctatttgtatttaatttttttaaaaaatataatctaaaataaaaattaaatatttctttataaatataattttttttccttgaaaatcgttattgtatttattttaatttgttgttggcaaaataaaatagcaataatatgttttatttttttgttatttatgtgaaaaaaaaattattttttaataaatattaaataatctagtattaaaaggtaattaatctaaaataatcgatttaattcatatatttccaaattgaattagatttaaaatataaaattcacacttaatacaaattaaattgtatcttggattagatacacccttattcattccctaattaattatgtacacaatttttatctaaaaagatatatatgtacaattatcttatcataataaagtgttgaaattttatttgtaaaatgttgtttattagaaaagattgtctatatccttttaaatattttcatggatatatatccgaatctaattggctggatctttcatatattttataaacagtagaaaaatggtacccattattggtatattccatacggtcatatcaaagtagcacgtgacaggaaattaaaagtaacaaataattgactcgtgtttatgctaaagttagctagtacagtaacagtagctacataattattattatgaccgaaagttttaatttgagattagaaacacgtacttattaaaagccgataaagatgtactagacgagcagtactgcactgtgtaccctcacacactagctatgttataaatagtaaggattatgaaaacaaataaagataaaagatccattcagtcaagctaaactcgacagacctaatccatcaattaactatactaacatctttatcgtcaatgagataaacttaattattagctaaagtttctctttagtcaataatttgtccttattacaagtagtaggcaatatgctaattaatctgctataattaaaataaaatttaaagtcaaaattcaccaagttttaccaaacaatcaaacaacattattcgatcacctacatcactatatatatataatgcatattgttgactttaactttttcctccttttcttataaacaaaaaaaaaaaaaaacagtagaaaaataataagttaataaacaagagtagcaaccacatggaatggatcaatggaatgtaggtgatcgagcgcatttttatggggcacgaaggttaggtaattatcgttatgaggcatgtaatctgcctattgctatcgtgaatcaagatgttaaggcaccaaggtagctagctagcactaggtttggtcgtgaaatataacagataatagaaaaaaatatatatttttaggccttcatttataaaaaatattatattttttaaaattagtaaaaaagatatataattctaagagggtaaaaaaatttggacttctgagttaggtgggctttagacacagatttagcccatttatgccgaggaatagcaagcactactatgaggtgttatcttataattaattagtcatttattaaaatatttattaaagtaaaataagtgagactcaatattaaattacacctgtagtactgatattatacttcacaaaagtgttagacaattatctttgagcatttatcaaaataggtttgaagtgaggtattttattttctaataacaaaaacaaggataaatatatttaaagcgaataatatcgttctattattatttttttactaaaaattatatttctattattatttaaaaaaaataaaataaaatgtatgatattttaaaaacaatgaaaaatattataaaattaaaactatcacagtaataaaactaaaattataatttacaataaattttgtatattattatgttttattaatgaataacacttaaaattaaatatcttttaaaaaaaactaattatacattaacaatatatataactaaaataaaaaaactaattaaaaataaaactaataatacttaaaattaacatatatatatataaccatttatattttaattttttcacaatatatagggtttccatgcaccatccatttggcaagggaacaaacctcagaaattagaatgttctcgagtatatacttatttatttttcctctttcttaattttatgagtatggctttctttgttttttttttttttgctggaaaagaatgccctttaggccttggggacagagtaattaccctttggccacgtgtataatgggatggaggttggataaaccccggcccagctagctagtcattcttctaggaaagaaccaagtaggtacgtattgtagatggaccaattagttatagcattattcagtaaattaaccaaacgtcaaatggttccagtgtctacgtacgtacacccaataccagacactgatctagtagtagaaacttcactatacgacctgaccagactccaactggactccccatcaaccaaattttcatatttctatcaactatgctttttttttttcttgtgtgtgtgtctcgaagacgggaaaatttgatatcatttattaatattaacaatgttttctttttttatttaatagcaaattttattattcatgccttgattagtgctgatatggatttttttgtcacaagaaagaaaggccagtacaagcactcgatcaataaaaaaatatataaattttggaacggcatgacaaaaaaaatatgagtttaaacatgcccaaaagcacggtataagtttaaaagttctattattatttggtaataacaatatttatttattaattatacaaaaattaaaatgctaataaatttataaatataaatatataaacgtacaccaagtattataattaatttataattaaaatttctggaaaatgtaaaactacactacacattaatttattttaagaattgtgacttaaaaatttattaataaatattttaattataataattataattgtttttcaatggttgtgtgtaaattattgaaaaatgatgtaaaaagaattgaaattataaataacaaataggcaactcaggttaccattattaatgtaggttaaaattattacacatgagtcacgtgacttgttaagtcatttcaggatctgtaatttccttaaaagaaaataaataatcctgtaatagacaggccaatgtataaaactctaattctctctcaatatatatataaatatatataataatactctataaattataatataaatatggaggtag

SEQ ID NO: 46573 - DNA, 1351 bp, Cannabis sativa
tatatatacacataagaattttttagttgggtatcacttttgtccctaacatagaagtattttttgttttcggcacctagaaaaattgtattttaatgctttttttttattatataacgatgtacactatagttatattatgcatttggcatattttcgagaaattttgaataatttaccgcatcaaaaattaagtttaaaataattagttgcatgcatacaactaactatttaaatcgtatttttgatatcataaattattcaaaatttattgaaaatagacaaaaacaaaacaaaacaaaaaaatctaccataactataatatactcctttctattgaagaaaattgttgttattaatttccctatattctaaaaataggtatgccctacggtaaaagtaatgttcttacctcaaaaatttcaaatacatataaatacacatgcaaagaatgaactatattaaaagtgataataatgaactataaaatcaaatcatatatggtagtcaagcaaatcaaattacaatatatattaatatatatatatagatatatagatatatataatacatttttttggtaacaatagatatatataattaatacaatgataatatcttttttgttccaaagtttagcacctgaccttcctcttaagagaatcaatttcatgaataaacttattatcctgaaccaaaaataatgttaagaaaaaaataatgtcagtcaaaaattattatatataataaagacaattattagtattaaaaaggaattagaaaaatggaataaaaaccttagtttctataacacgttccaagcctgtctcaatcattttctctagtctctttaactcttcaaggcttaggttttccagtttttcacccttcaaatgcctgcattaatacattataaattatatatatatatatttattgaattaagcatttaataataacagtataaataattaataataatataataccttatttccattgtcttctctgcaatttccctagtcaacagggcgtgtctctttttctcgcaccaaaaaagaacaatgctaattatttataaaattaattaaatcttttactgattcatttaattatataatttgtgagattaattctccaaattatataaatatatatatatttataccatcagcagttaatcttaactgactaattcaagatctttcctttattattggaaattagttatatatacagttatgtatagttatgttggttagagagatttaaagtagtaagattcttttgagtgaggggttttggagtacattctaaattgttatgtgttgttataagagagtctatatat

SEQ ID NO: 46574 - DNA, 2687 bp, Cannabis sativa
  modified_base (142)..(142): a, c, t, g, unknown or other
tttattattattttaataggaccctcttccctgtaaaagagagtttctctagttcatttttgacctccagaaaaggggtatctctctctagaaattagagctttcagacttaaccaattttcttgtaattctcgtgagaaanaaaaacttgaagtagacgtagctcaattaccatcccgacatagggagtaaagtactataaattttgtgtgtctctctatttactttacttacctacattattcatctcacccatctagcgaactggtgttggccacttttcagcggcaacaataattgtcaataagcaatacccattaaaaagtgttccatatagctattaatttattgagaataaacataaaagttcaaacagtactatggtttctttgcaaaaaaaaaaaaaaaaagaaaaaaaaaagactgattttaacatcctaatataatataaaaattcttaaaaaacttgtatgatgtcatatccaaatttaccagtttttgttcacgattatagccttttcttaaatcttagcaaaaagatttatagcattttcattttagagaacaaaatatccccagatacttcgaatcaagcaagtctctagaatcctttttctgcgcttgtttctactggaaaaaatttgaccgaacacgtatgtcaaggacttactgaggcccattccttcttgcactagaggccacctaaattatgaacaaataaggttatgattgctaaaataaataagatcaatttcccagtgaaagttagcgccaaaagatttaggtgacgtttggttgaaggtaatgaaatgaaatagaatgaaaagaaattatttttattccaattttttgtttgtttgcattttaaagtattagaatatcattttaatggaatacactttctattattttggtggaatgattattctattttaaaataaaaagaaaagattattacaatgtaatatcagaaaaaatttaataattttattatcaatatttttattaaattttattctgttttagtactattctcattcctattcccattttatttttatattttcattcttcctaattaaatgttacttaaatttatatataatatctttttttagagctctcctcttatattttaagtaatttttggcaactttactatcaattatatatccattaaaaatatatagaatagcttttttaaaggtaaaaagtgataataatatataaataatatataaatgctaccaattcattttttagtacaatgtggtattacaatcaattaataagtaagacattatgaattcaaacttaccactaagttagtcttagtggttttgctactaactcttaactataaaattttggtaattaaataaatattatgtttggcataatttaacaaaaaaataataataaaaaaattgtgtatatttatcccaccttactttgtatgagttataattttatagtgcttatatgttatcgatccatataaatacattatattcaaaaaaaaaaaaaaaatgcctaatgtattttcctagtataaaataccatgcagcattatgcatgagtacatttgattcataattgttataattttgttaattaaataaaaataaattaaaagtactaatataattacctgtttattcataatcccaaaaactctattatacattcctttcgatacatatctgttgagctttgacatcaattatatcctgaaacaaaaatataaaaatcaatcttcctttactgtaatcatggcaccaccatgcatcaataataatcaataaaaatataattatatctagtaaatcatcatgacaaacttcatcaattaatgcaaagaaaattactctcgtacacctaaaactctattaatcaaatttatacttttattgcaaacaaaaatttctccataaatgttgaaagggtatctttataagtttctaacactatattatatgacttgtaagttgtatcaattaatattgaatttcatatattttattttattttatctgtgtattttattataaagtactagcaatggtttttcatagttctctaggcatgggtgcacatgcatagcacgtcacaccaaaatattctcaaaactacaataatttgctaattttcatagttcatattagtgctggaaatttgtacatgtattagccccattcatattataacatgctttttaaaatatacatcatgtcatgcggtattgtgtgaatatttttaaagggtaaacttgatatttttgtatcgtacttaaattcgtgcggtatttaatttgtgctagctatttttcttaaatgggccagcttattttatatttaaatttcaattcgtgctttacttttcacattttatcttcacaattaatgaaccagcaactactaaaatatatgtattattcaaagtttcattattgttagtgagtattacttataaataggtaatatttggaaaatttgaatttttatgataaatttttctatctaattagacatatctcttatttttacattatattggttgtggttattctatcgcttaaaaaaattaaaaaaaaaaggcaaaaaataaaaaaattgagtttgacttaaataattaaatattttatataaatatatttttaataaagtgtaaaaagagataattttttt

SEQ ID NO: 46575 - DNA, 736 bp, Cannabis sativa
tagcatatatttaatcaatctcttattttagtccttgtattattttacaatagagttgtaataaatcttgattttcttccattgttataaaatctctaacagttagaaaacataaaggttggatgtaaatgattaacaccaaaatcttcaagtaaagcaagtagtcatatcaatttgcaagttgtgttgatcatatctcgaacactttattattttgaaataaaatatttgttattataataaatatggctttatatagagggatatccaatgatggaaatacacattaaactaaattaagaataacccaatttctatatccaagcataaaaaataattatttaatacttaattctttgccaagctaagttacatttctatattataaaaatacatacatatacatgtatatatgtatatttggggagaaatgaaaaaaaggtaagaaaatgggagtattattttctatttaaaattataaagctaattagttggtgaaattatttttgtgtaagatggattgtcaagccatgattttagttcacgagtcattggcaatgtaaatctcaaaatttagttcacaagtcattgacactatggttcaatggatttatttttttttttcaatatatatatgtataatgatacacactgacacatacaatacaagatcacctaagctcctttacttatttagtaaatcaagtaatataaaatcctgaatttttatatagtg

SEQ ID NO: 46576 - DNA, 1099 bp, Cannabis sativa
gctataaaggtatatcaaatttaaaattttcaatttttaataatataagtaattattttattaaacttttaaaaaaaattattaaaaaaaaattaatatagaagaaaaattcatcatactattttttattttttattaaaaaatcgagattaaaaattcttcacagaaaatagagatctaaaaaataattgataaatctacagaaaactaatcataccatttcaaaatcgttgtcattcaaagccgttgtaatcaccgtatttcaattgtcactacaagaaaaggtccttttggcggcgctcaaagtcgtcggcaaaagtaagaataacgcgccgacgaagctttgtcggggcctttactcgccggaaaaagctaccaacaatggctcatcagcgtatcactttttgccggtgacattacgacatgcaccggtaaaagtatttacaccggcgcatttgtttgccggcataaggaccttaccggcaattggtccgtcggctgatgtgtccttgacaatgttttgctggcgagttatgtcaccgacaaaatttttggcggggatttggcgcctaatatttgccagcgagtttagtcgccggcaaaactaaattagaaaaataaaaaaaaaaacataaaataatgttttgcctgcgaggaatgccctagttttttaaaaaaataaaaattttacttatgccggcgacatatgcgccaaaaaaataatataaaaaatttaaaaattaaaaaaataatacttttgctggcgcatgttacgtgccggcaaaaatattttttgttttttaaaaaaaactaaattaataaattaattttaaaattaaatttaaattaaaaatcaaaatattattaaatataatatcaaatatattataaaaccgaaagttataatgttattacaaaactatattaaacatcataaactaagtaaaagtattatgaattcataaacaataatattatctacattgtaaactaaaaaaaattacaaatcagcatcatcatcgtcgtcatcactggaaggggcagtctgtgaggagaaacctgctgcatggccagaaggctgaaatggtagaatcagagg

SEQ ID NO: 46577 - DNA, 1207 bp, Cannabis sativa
tgtcagacattcatatgactgcatttgttttgtttgtcaccaatattttcatctaacccacgtaggctttatcttgattcaccatttttctgttatcagcgttcccagtatgataccgatgaggagatacgaaaagcttcaaagggaagcagcagcagcagtaatggaagacattcagatgcttgtagttctggaagcagtggtttcagacatgaattccgtagctcaccatttgggagaagttcatacagacgcgatttcagggataactggaagacttatgggaactcatactcatcatactctagatggtaacaaaacaggagagaccagaaacaaaattcttttccaacttctcaaaggttagccgaaaatcatttgtggaatcgaatcgactgaccaatggtggtgttggagttgcacttttgggatcgaatctggttggtatggattggtcggtcggtcggtctgaagcgacagttattctttacacaaagttgcaaatttcatgtatatgattgattcaacctcaaaagccaatatgctaattctgaccaaaacttgtccattcttttagtattcatcaattttgaaggaagaaaagaaatgttgaattttctttctttcattttttcatgtattcttgctgttatttatttcagcagtaagaaggaaagctttcttgcccaatttcaattattcattgaatctcataaagtattatatatatatttggttaggaatgaagatattatgagcactttcttagtttggtcaaaggatcacatgggtgtcccaacccaagtattgtgcttcattgggctgttcatagtgatacttttatttcatgtacttttctagtgtgtttacttcaaatatatattttttaaatatatatatatatatttatataaagcatttttttaggtaagtgtcatttttgttgcatcatggaaattataattcaatttgaattttgcccattttcaaaataattttgaatactatttttgatatggcaaaatattagtttgttttggaaaataaataaaatatttagttataagaataaataagaattttaactaggacacttaatttaaataatcacaaagctctccttttcattttgcttattttttgaaataatttattaatgtgcctacaaattaaggatggcaattttatctaaaagtccatttacgtg

SEQ ID NO: 46578 - DNA, 2677 bp, Cannabis sativa
agttccttaatcctaggttcagttgttgaacctgtgagtgttctggtgtgaagaaactcacacctgctggtgtgatcgaaactggtgttggctcaacaacatataattagattgtctacttttccgtggataaattgtatatggtagtgtcaacaaagtagcggtgttcctccaaatagttatttattttcatctaagatgacaagacatggtgtaaataattaattaaattaaaaaaatctacttatgaaaggcaagtaaaattatttcatttatttaaaactacacctctacagtgaattcatcagttgggcagaattttccatgacaaaattcaaattttttagcactaaccagattgaatttttttgagccaaattcaaattattaaaattatgcagagttgaaatgcactacagcgtaaaatgccacaaaggcttcatgtgttgggtcaaactaaaggatcattgccaccaacacaaaatgtaattgatcaaaaagtaaaaaaaaaaaaatgagcattgtcaaaataataaaagagctctaattaatttgatgattgaaacctccaacaattttgcttctgcaatctgaaaccactaacaaagacaaagctcacctccagcacaaagcttcataaccaaattcacagagtgtcgatcctcataagcacctctaagctcaacaatattccaatgaccagtactcatatgatgcataatatgaacctcatgccgcagatcctcgatatcgtcgagattgattagcttcctcgctgctatggatttacaagcaaattgttgcttagtctccttataggtcaccaggtaagtaatcccaaactgaccggacatcctacatctatcgtacttctgcattttggaaagaaaaaaaaatacaaatgagttaacctaaagacacattatcatctatctctttaatcttggtaataataatgtcagcaagagtacgttgtggaactgcattttttgacatgcataactcgagtagtttctcatatctcttcatcgatttcctgcaacaatacaaataattataatataaatctttacatatgaatataaaattttggaaacaaaaaaaaaaaccctactcaaacatgggtctgaaagaggaaaaaaaactcacttcggagactgctagttggcatgatttttgaagttctttgactctgtttattataaatttcgtgccactgctatttggatccatgaatctctaaatgttatatacatacatatatatgtatataacatatttaatatacaaagaaatacgtaactaaaccaaaagagttttgcttcacaatgagaacaatgatgaaaaaatcaaaactttctcagtaacgaaactcagttaaacctcaccaaggtaagcctgcagtaaggtcatgaaacctgtcatattgaaatgaccactcgaactagaaggatcgattcatcattattaccaattactgaggcaacatccatcatagtagactggggcaacttagtgatgaaaattgatatcaaaatcttcggctctttcgtactctgaatcatctccagaacgagtgaaaatagttcgaaaatataacaaaccaggagcccccaataatgagtacggactacttgacaagaggctggatctgtgctgatgggaagaaaatgggagagggctagtggcaggctagtggcattacaagagttagggtttggaataggattggtgagaatggggtattcatgtgcatgagagagagtagagagataggttgctagaacagaaccggcaaacgtagttgagaattttgtatgtcgccatcgacgacaaaatttggacgagctcctctttctttcagtagaggtagtcttcacgcatcctaacccctcaattgtttgctggaagatataggatttgagatttgaaaaaaaaaattatagatgaagatataaattgaggatttgaaagttaacggagacgttaatctcccgttaatttttattttaaaaaagaaacgttaaaaacatattacacatagtattctatgacatagccacattttatatatactagcaaaaagttacgtgcgaggcaagtatactaaattttatgctaggttttttctacgttatttaaaagtgatacaattaaaaattaaagaaaaatataattagttattaggtaaaattattattatgtgtatctaaataatataatttataatttttgataattaaaagtaaataccggatgcaatctattagtgtacactgtattctttgtggagttcttatcttgttgtgcattagtgactggtcaaattaaaactctaacaataaatattgtttttgctcttgataaaactgtatataagtgaaaaacttattggggtaatctaatatttggcttagacttatttaatcattgcaaaacttaaatcttataaaaaactgagtttgtttaaatggaaagctaaaacaaggatgtggtagagaaataggggaagtagaaacttgatgatgagtgtgctttatttttatagtgtgaaaagctaatgacttatataattattaatgaaactaataataaggagttaattacttttgtttaaaagaaaaattaaacaactgggaagatgcagattaacagtgctactaaccaaccgtatgag

SEQ ID NO: 46579 - DNA, 2603 bp, Cannabis sativa
ttttatgatttttgtttggcgacggctgaaaaagtgatggatggtcgttagagtcacacgagtaagtttagaaccttgtttttagcgggacaaactattgagatatttagaatgccgtgtttaagcgaggttatagttttggaccattttatccctaagcttaaaactacttaagttggaaggaagaacaaaattttgggaatttcgttattaagtttaggtggatgattagttgtgtgatagctgaccattggtgttttcagcctaagttattgtagtatataatggattaataaaaaaaattagagaaagagaagaagcaactagaacctctccctttctctttctcttttagaaccaacaaggaactaaggaattagggttcaattcagtttgttgtggttgattcgtgctgggaaattagtagcctttggaaggaggaaagtgaggtatggccctaaattcttcttaatagttttctagtagagttgttggttctagcatgtaaattttttaattaaagtttgttttccgggtttaatttgagttgattagagttggtttgaggttgtcttgatcttgattcttgtgttgagtaacttgagtttaagaactcaaacttggctcaacaatggcatattgagtttttgtgcattttggctgctgttttttgttagtatctgttattggatgttggtacaagtgttctgaaaagtttaatgaagtttggaattgatttgagggagtgtcgaacttgtttgtggaacttgctatcaaccggttgaccggttctagaggtattgtagaaccgattaaccggatcaagggcaggattcccaaaaaaatctattttgtcaattcatgttatttttagagccatagtttgttatttccttgataattaggatattgtcatgttaattattgatagcgaaacttgtagttgtgagtttagattctcatattaggttttggcttgttatttaactatttgcgtaaatgtgacatagagcattcatctagcacgtgattttttgttaggttggctagtgcacttgaattcagaaacaaagtaagattagcatagaacgtatttatatacgaatatgtgtatgtgtgatatatgcattttatttatgattcgtgcactaccaatactagtacggtataggtactgagtgcattggtatagtgtctgatggatctagagggtacagtacggtgttacccacattagtaagagtatgtagagtgtatgtggtataatagttaagggtactcgaggtacggagtaaaccctaccaacactcgtacagtagcggtacgtagtgtatgtggtataatactcgtaccttagtaaagaatgttctcacttatctaataagccttgtgaataggtgtacgggcacctagttacaagtcaggaatatattgtatgttatgtgcttttcttactgagtctattgactcacaaatattatttccgtgtgtaggtaaagaaaaggtgaaagctgaacaggagtgagttccgaactcgggtgatgattgtacatatcgagacgcggcgacctggagtgttcggtctcgggataacttgggctgtattttgtagttgttgtgcaacacgtttgtaaaagtattttgataaagattgtaagagtttaaacatgggatcctaatttatgtaaatatatatatatatatgtttataaagtttaataatttaaatcaaaaatttatttaggcacaacttttgaggaaaaccctttgattaacaaaggtagtacgttaattagaaaatcactgtgtcgcacctaagtatcagggcgcaacactaggcctctcttctccttaagtttttggaaagtattctttggtttaagcatgcaaaatgatgagttttttgtgtacgaattagggtttggttttttttttttgtgttttcgcagtttgtaattaatgatttaagcttgttaggtttttttaggggctggttgtgttgttgagcaagtttgattcaagaagtcaaaaacattcctaaataatggtgaattgtgaaatttttggttatatttggttttgttgcttgaatttggtttatattgatgatactaggggttctaaagcttagattcgagtttggggttgttttgagcatgttttgaggctctttgtttttctacagtgaaaaatagcaggccgttttcgtactggtgtaaagcccaaaaaaaaagcctcctatttttatagaaatagcctgccatttttgaggcagtttccccatttcattatttttctcgtgtttcctcgatacttagggttttgccatgctatttattgatgtggaaatttttagtttcgagtttagatcaccgaaaaggtttagaaagttgtttactcattttacgtgattgtgacatagggcctccgttcagtaagtgattttctattcaagttgactggcacgcttgaatttggaaacgaggtaagactagcatagaatatatatgtatatatgtatgtatgttatatgcatgttgttatatgactcatctgctaccaacactagcatggtagcagtattgagtgcatgtggtacaata

SEQ ID NO: 46580 - DNA, 1009 bp, Cannabis sativa
ttgtgtgaggattttccaatttccaacctttaacctttttttttttttttattttactataatatttaaaatatttttttgctgtttttttttagataagaaatcttataatgaacttctacattaattttttttttataaaaattataaaaaaatttaatagaattttttttgaagatatcaaattttatatatttttataacttaattattgatacataaaatataaccggacgcaaagcgtgatttgtttcatgcttatacaattagatgtacggtctctctgactgagacatatatatatatatatatatatatctacatgcacttgtatatatttcacacacaagatccatggcaaatatctttaacgtgcaataatcgttatccatacacgtgttgttttttgatttggtagtaatctacatttccattacaaatatatctttatcgtacataataaagacaatacattaatccatgcatgcagttgccctaaccctaaaaacaaagtaatgaatgaatggctgtttttaggtggtccataactagacttgacaattacctcaaaatacaattccaacgtgagaagaaacctcaaatcgtacgttggtcaataatggtgtcttataattaatacataatatattattcaaaactctatatatgaattaatgagtgataagatttttgcaatccaaactttaatatgtattagctaggagtcgcaagacagttttcgacacagcacacgaacacaaacacaaacacaaatataatatgaattttacgagttagggtcggaaaaattagatacgggtcaaacacgatacgactcgcttaacacgaattcgacacgattttttaaataaaataaaataaaaaattattaataatataatataattatataaaaatatatatttagtgattccaatgttaagttaaaaaatttaaaatttattattctttaatttgaaattaaaaatattttgaaattttaattttt

SEQ ID NO: 46581 - DNA, 900 bp, Cannabis sativa
ggcacagacccaattaataatctgttgtatcaagatattgcaaaccagatgaaccatcagtatcagttccagccagataatcaagagagaagtgcctttaattctgcagagtttgatcctagctctcaccctgatccgtcttcaggtatataaatctttgcatagcttcaaatgattaaacatgttattgagttgtgtatttggttgttgaacaccattcctgtggcacagaacctatgtggaattgggattttaggccagctgtaaaagctctcttctaaaacatcttcccttctctcatgtatcattggtttatcaatgattggaactttttaagaaaaaaaactacgtatccaagagaatttctgttagctatatgatatttgcattgcttaattttgttaatttttggttattctttggtgtagtttgtgatacttccacattttcattgcaaccgactcaaaaccaaagtggcaacgataataatggtaacaatagttggttttcttctactttatggtcatttgtggagtccatacctactacccctgcctctgctgccgaaaatgcattggtgaatcgcgctttcgaacgaatgtccagctttagtaggttgagaatcaatgctgctgtgaatgcaacaaccgttcctgcaggtagtgattctgaaaccgtaaagagttcactcagaaatagaggattcatcttctttcctattcttgtggtaataattgccattttatgggttgtgcttggaactgtgaaactatggggaagtagtagtagcaatagtagtagtattgcttcatgaaaatatgtatatgggcggggatcatttttggctgatattgatcttaatattattgggaaaagatcaaagaatgagaggaggagggg

SEQ ID NO: 46582 - DNA, 1967 bp, Cannabis sativa
gaattgaaaaaaaaaattagtgtttaaatagtagttttttggtgttaatttaacaccaaatttgggtttctccattggagatgccctaaggatagtataaaaaggttgcggggttgacaggatgttggctctgtttaggcttatatgatatacttgaccaacggaagaagtattggaaaaaacgatctaagcaaaaagcaattttagttgaaagaagggtatcaaaataataaatattttcatgctagtggttaattattttatggatttttttacagcttcacctattggttggcaaaaatttgttgattttatttcatgcacagtgattgcaacccaaaatttgagtttgttagagcctattaatgagggtgcggtctgaaaatctctgtttcagatgtagcctaacaagtctattagtcctgatggcatgccttcgaattttatcaatagttttggcatattggttgtcgtgatgtggttcagatggtgcaaaatttctttgaacacggagtgtttttggaggggctcaatgactcaaaaacatagtacaaatttcaaaaaagaagaacctagtgaatatggaggatcatacatctatttctttgtgtaatgttctttataaaatggcgtctaaggttttgactaataagatggtcttctcgatcaagtagtttgggatactcaaaatgcttttattcttagaggtgatgcactatttaaaacaaaagcgacaagagagtcatgggtttatggcatttaaacttgacataagtaaagcttatgatcgggttgagtggaattttcagagatcaatgatgatgaagataggattttagcgatggtaactttgatcctaattttggggataatcctaatttagtttggaagtgtatttaggaagctaagtttcttgttatatctggtgcccatatgcatattggggatggggaaaatgcctctattttggaagctccttagttaccatgttatttctcatttttgggtttggttggtaaggtgatgagtagtttgtttcgaactagatccaaactgtaggatgtggaggtggtttgtgatttgtttaaggaacgagataagcttcttattttgagtaaacctttgagtgacaaggctaaggatgattgttattattggagtaaggagattttaagcttttacacggtaaagagtgcttatcagttattggaacaacttaaggggcgtggggtgattgaaattctggattttggcataacttgtggcaatttaaaatttctctaaaagtaaaagatcttatatgatatgcttgtacttggtgtctttctacgatgtatcaacttagtttgaagcgatgtaccagttcaacgatattgcgctatttgtttgcgtgaggatgagatgattgttcatagtcttattttctgttctttttctactcagtgtttggataaagcaaatatagtggcaatatggtattagatttgggggctaattttgtttggctccaacaggttaaagctttggtggttaaggaaacggaaggcatggtgttgggctatttggtaagcttgaaattttttttttttttttttttttggaataagaagatttcaagtgtgaatgatgtggttacttcagcaaaaatgtatctacaacaatagaagaatgcccaatacacaactattaaatggtgtggcacaagatggtgccaagatttgggtaaatctcaagtgaatcaaatcaagataaatattgataccacattgtttgttgtaactcatcagtttggcattagcttggtaactcgtgatcgcctagactatcttgttgaagctaataccatttgttgtgatgggaatgtagaacttgagtttgctgaaattataagcattaaaaatattctcggttggattaagaataaaaatagccaacggtagtagcagggatgaattgtttagtggcag

SEQ ID NO: 46583 - DNA, 874 bp, Cannabis sativa
ctgaagatttatggctaaatcattcaaagttggttcttccaaagcctcacagaaaagatagtccttcatggcaagctttccaaaaggtaatgttcttataagattttgtgttataaaaggccaaaatacatatactatttgtataacacaaagtacaaaataaggaaatgttctaaaataccatttataatttgatagagtggcttttcattaactccaaacatctcttttctaccatatttggttatgtaattctgatattttatttgcagattttaagtaaaggagagcagataggattgaagcattttaagcctataaagcctttgggatctggtgatactggcaggttggtttcttttctttcttgtaccatttttataatctaatggaaacaatgatctgatttttaaacatggcttggcagtgttcatttggtagaattgtgtggaactggtcaactttttgccatgaaagctatggataagagtgtgatgcttaatcgaaataaggtattatataatgaatttgactctattttcattcatgcttactatttgactgtcttcaaaagatgttgagaagaatggtttcacttttacaggtgcatagagcttgtgcagagagagaaattcttgacatgttggatcacccttttcttccagcattatatgcttcatttcaggtaataactggtattttttaacaatctgatctctatgatatcacttcttagtacttacctattaaaatagtagcaattttataatatactagtagtgtttaatattattatgaagtgacacattattcataatttaatgattttcttataattattactaaattaaaatagagtaatttgtggcgaaac

SEQ ID NO: 46584 - DNA, 928 bp, Cannabis sativa
taaatctgattatatattgaaacgggttttatttagggcacaaaacccaacagaaagagttactcatcccgtggcttgtagagttgcctttagtgatcagctacttacgtgcagtgcgactcttccccttcatccatttcttattgtagttttggcttatttggacattgctccactacagttggctctgatctgctacatcattttatcgagcttcgccattgccttcaaatgggcaaatggtcatttccccttagtagaagacttccattcggtctacaacaatccctatagctccacaacgactgatacttatttctttaggagagtaattgctaaggatgttgaatgtttatcgaggatgccttctaaaatttcgatcaagacctttagatttttcatggtagagggcatgccagctggtgtcatctctaagtttaaattggtaaaatcgtgattcactttctttacttttgctttattttgctctctttattgtaggcttatgctttacttctttgttgcagtgaccaagaatattcctgagcttagcactaactctcacagggccttgcagaagttccacgacctttcttacattgaaaagactgtcaagcatctatttactcctgccaatctaaaggattgtggcctgctaatactctactttcggtttcagttcttgcgcctatcccaaatcctcctccctagggtgactaggacctttcttatgctctgccttctagccttgacgggaaagaggatgagctggaataaaaggttacactgggtgacgttttggccatgatttgtgagggtacaactccatttgctggttcgggccttgaccctcatgctaaggggaagaagaaaaagggagcttactccaacactcaaaagggaggttcaatgcctccagtgccttcta

SEQ ID NO: 46585 - DNA, 1185 bp, Cannabis sativa
atatgttttacaatattatattattttaacatacatatacacaatattattttaaagtgaaaagtaaaaaataacaagccagtttgtcatataaaatctaaattctggatttgaataaaaatatataatattaattaagatactatatatttttgaataaaatttaaaatttcattaatacgaaatttcgcccattacaatagactgaacttcagcgggacaatcagtccactgaagatcacgacctgaagagaaacaagagctccttgcaatacaatgagcagtcttatttgcagatcgtttaacaaaacgtaaagtaacattactaatagcagaaagtaagacacgacaatcgttaacaatgaagccaaactgagatgggagaatggcattactaagaacagattgaacacacaaaagactgtcggtttcaagtaccacttgaggccatggaaatttcttaatccaactcaaggcctcctttatgcctacaatttcagccatccccgagtgcaccaaaccaaagaagctggtgttaaaagcagccacaaagttcccagccgagtcacgggcaatggctcccattccaaaccgctcttcattctcaaaaatcgccccatcaacattaaccttgatacaatttaatacaggtgtagtccaatgctcaatattcttccctccatcaagatgagaagaaagggataatcctttccttgtttgaggagcaaacttatattgttcatcaagaactgttcttgctgaaaagacaatagcagcagcagaagaggttttgttttgccaaataaactcattacgggacttccatatcgaccaacttaacactgcaacttcctctaaaatggccacactttccttctcaaaaaccaccagcaaccagtcgaaaaaaccagctgcatcagtggcttgcaaattgacacccgatcggttccagcaggcccgagaataagaacatgttaccaaagcatgcatcgtcgtttcatcttccaagttgcaccgtgagcatactctgctgacaggtacatgtcgatgctgaagctgtacacaagtaggcaaggtatttgtagcagcacgccacaagaagttgctgatttttggggggacttttaagtcccacaacttacgccaaaaaccagtattagtatgatcaacagcagccgctttcaa

SEQ ID NO: 46586 - DNA, 1100 bp, Cannabis sativa
agattcttcttacaaaactcaaacccaatatctctcttttctttgtacctctctctctctacctctcaatattttctctttttaactctcaatctcaatttgaagcatcattgaaatgacaagtcaatgtggtatttataggcttaggatcaagatcttaaaatcggtagctgcaagaaatgaagttgttaggttagttaggcaggaactaacttagctaacactcctttgagctagatctccacgtcagtgtaagtcttagtgcgtctgagaacatttatgagcttccgagatcacagaccaaaaggcactcactgaagagacccttcccggaaggacaaggaagccttccagggctggcttctgcaagtgaacgactttccatgaataatagataacaaatagagaccttttcatttggaggaactataccacaaattccatctagttacttcaaattaaaagtgagacaatgattaagaaagaatgtagccattatggttggtgttctaggaatctcagtatactaacttttgagattgatcaagttcaagcaatgtttgaacttgtttactatcaagaccttagttccaattatcttttgttctcaccttttcaaaatcaactagtccttcttctatcttctcgctaatccagtagagtcttatatctatatgtttgctcttgtcatgataaattggattcttacaaaggtaaatggatgattggctatccaaatacacagtcactcccactttgatttgtttcaacgcataaagtactctgcgaagccataagcttccttaaaagctttcgtagttgccatgaattctgcttccgtggttgagagagcaccaaggactataactgagtcttccaccatatacagttctggtgtgtcatgaaaaagtaagaagtggttgattttctcatatctctattcgaggcataatccgcgtccacgaaccatgttaacttcaattcttcttttgctttctcattggtcaggccataatccaagtgcccttcaaatatctcaataaccatttaagggccatttaatattcaatgcctatattagacatgaattgatttaggat

SEQ ID NO: 46587 - DNA, 2996 bp, Cannabis sativa
agagttatggaatttggctccatatcgatgctgcatacgccggaagtgcttgcatatgtcccgaatatcgccactacatcgacggtgttgaagaagctgactcgttcaacatgaatgcacacaaatggcttctcactaactttgattgttcagcactttggattaaggtatacataaatatggcctctaatgaacttgggaatttttttcacttgtccaagttttttgattcagatttacttggtttaatctcttcataacaggatagaaatgctttgattcaatccttgtctacaaatcctgaatttctgaaaaacaaggtagctctttttttaagtacattacgaaaaaaaatataaataggatttatcccccctgaactgttaccactttcaaatcatgttccccgaacttttccacttgttaaaaattgagttggcattatgagccgcaatgtggtattgccacattcaaaggcttgatttgaaagtgataacagttcaggggggataaatcctattttactcttacgaaaatcgtactaatagattcaaccaactttctccttttcataatgaaattgctatttaggcttctcaagcaaacttggttgtggattacaaggactggcaaataccgctcggacgtcggtttaggtttggctttcactcaattcagattttcgtagcgcattcttctgaaattcgtgttttgataaatcttcatgtacttttactaataggtcacttaaactatggatggtacttcgtctttatggtttagaaaacttacaatgctacataagaaaccatatcaacttggctaaacactttgaagaccttgttgttcaagactcaagatttgaggtaataaattaagtaatagtcataactttctactatgaaaatcccactataaggcaatgcaatgtagcttattttggtgttatataacttggtaattttgttgtgtttggcattggcatggcagatggtaactcctagaatattttctttggtttgttttcgggttctaccgagctctaaggatgaaggtttggccaacaaactgaaccatgagctgttgaatgctgtgaactcatctggaaaagctttcatgtctcacacagtaataaacctctcacttagtctcactctagtactaactactgatgatcattttatagattttgatactaaaattaatagataatatggtccacttttgtttgttttaatgttgttaggggcgtctttgttttactgttttaggtactaaatcatgctttccagactttgatatctaccaaatcatgtccctcaaacttttatatatattaaatcatacccgttgaacttttattcatgttagaatttttttactaaaattaaacaaaaatcttttaatttaacaatctcaatagttcatggagaatttttaacgcacaaataattactaattaaccttttttatatagcgtcctacaatgtagatatagtagatattctactagttttaaaaaaaattcaaataatttatagtattaaaagtaaagtttaaaatttgaatgtctgaatagtttttagtaccgtaaattatttaaaattcatgaaatatctgatgtaattatacatgtacgtcgtcatataaaaaagatttaaaattatttctctaatgtgaaaaataaagatattcttatcgataaaacaaaaataatgtctctactgtagaatttttatatatatatatataatcacaagtgtaaaatgcaggtgttatcaggcaaatatgtgctacgcttagctgttggggccccattgactgaagagagacatgtgaatttggcttggaatgttatacaagaaaaagcctctaccttattatcaacaacttaaaaattcaatgttcttggatcaatgttgaagaatttagtaagtttgttttttagatttttaagagtgttccttaattcatatttcgttagacgaccaatgtggttgtatatggattagttgcgtatgcttttaggatagaatgaatgaacaccttatttgattagataatagatgataatcaaagttccaataattatggcgatattgatatctacatattctttggaacataatttttaatggtgaattaagaatttcttcaatgggtcataccaaatttatgtttttttttaataaaaaaaagaattaaaaataaaaggaaaaataataaaaatggaggtattttgaaatacctcaatatttttctcttttattttctctctctcaacactcgaactagtgaccttaaggcaagttttattacaacctaccatcaagaccacaagtgagagttagccatttgattttttgtcttatcaatttaatattttttgtttccaatatttaattgctaatattcagtcttttattcttttttttttcttagatatattgttctcatattaggagaattgttaacaatgttacatataatttgcctaaatatgctttaatgaagattatatctagttagaggatactccctctcctatattttttggtattatgaataaaaatctcttttttaaaaaattttttaataaataaataattatgttattatttctcctctaaaattatgtaggagaattaaaataactcccacaatgttttttacttgagagaatagaaatataaaattaaaaataaataaagaaaaaattaataaaaagggaggtattttgaaatacctcatattctctctctctttctctccctataactctcgaacccatgacctcaaggcaagtattatttcaacctaccatcaaggccacaagtgagagttgtctaattcttacatgttttactattttaatattctattactattattttgttttctttcaaatgtactaatattttgtttttatttgttccataaaattaaaatatggtagaatatccatttagaaaaagtaataataataaataacccat

SEQ ID NO: 46588 - DNA, 953 bp, Cannabis sativa
gcataattcattggaaggacaactggtgagattgtgtacaaggaccattctagttaaagtttattcatttagatgagtttgtacaactcttataccccatttcacgaaataagatctatctacatgtagctttcctaaaggcttcctgtcttttacacaatttatattttgacagagatgtctcggctgggggctagatgcttatctgctgtgagtgcttatgataacacattggacattgtggattcactagattctgctcaggccaaattcgatgatatcttaaactcgccgtcagtggacgaggcatgtgaaaagataaacagccttgctaaggcaaagcaacttgattcttcactgatcttactgataaatgctgcttgggcatcggctaaggagtcccctaccatgaagaatgaagtatggtttgcaccttatgttgagaacattcattttaaatcattgattattacactggacctgtgttggtcttaccagtgtttatcatcagcatctcaacattggaagtacagttcataatagtcttaaaatagttgcatttgtgtacatttcacagtcatctctcgtatgtgtaaagggtattagatctagcaataatgtaggttaaattctaaaaagttaaactctaattgattaggttatagtgcagaatcacatagaaaaatctctcaagcattaaatattgcctcttatagattaattttttctgtacctatcataacatttacagtaagattgtgtttagaaagtaggactggattgaaactgtatctatctctcaactccacaagactggtatgctttgctgaattagttttagacactgtatcattatagcatgtacattaaaagcatttgactttgctgcattattttaagacagcatatgggagtgtctctttttttctctcttgcttcctctaagattacat

SEQ ID NO: 46589 - DNA, 1237 bp, Cannabis sativa
  modified_base (607)..(614): a, c, t, g, unknown or other
  modified_base (1172)..(1190): a, c, t, g, unknown or other
atattttcttttattgttttatttcctttttctttttatttttctttttcttcttcttcttcttcttcttctctattttaattcaactccatagaaaaagaagaagaaaaaaaacacttgaaaaaagagaaaatgttacaataatatctatatgttatgttacatacatgatgacatgatgttaattaacctaccaatactaaaccacatattaatgaattattaattatatatgtaagtacattttagcactaggaaaatttgttggtgaaagcatcaattttttatttactgagatattataaactaattttttttatatgatggtgtactcaatattatagtcatatactaggtatttatctagtttcaaatttttttaataatttataatgttaaaaaataaggttaaaatattcagctgtacaatatttgtttttattttacaagcatgcaaaacagacaagatactttataactacaatatacacgttatatcaaaaaatgagtatataatttcttaaagtatgaaaaataaatatattcccactagagaaaaaaaaaattacttttagtgataactttttagtcataacataaatttttnnnnnnnnaatgtgacttttagtcataataaaaagttgctagtgattaaacataatatttacatataagttgtcactaatttaattttagtcacaataaattataattttggcgactaatacttttagtcacgaaacttttagtcacaacatagaataaaaatttaaaattaatcataatttttttatttttaattataagttttgttgtgactaaaagtatatttttttgtagtagatcttgcattaacaacataaataatcaccctacctgagaaactttgtatctacatatatattatattatttttgtacaatgcatgaacaatagtagtttgacacacaaagaaaattaagaagaaaaagaataagaggcatggttttaattttataaagcaaatggtaattaaggtggaaacttatattttataattttccaatatatatcattgcatagtacggattgtttttagtcactagtgaaaattttaatcttaatcgtgtttctaacgaaaatattaatgaaattggttaggtaacacttttattttttaaattttttaatcnnnnnnnnnnnnnnnnnnnttttgtttttaaaattttgttttcaaaaaataaaaatgtgttctata

SEQ ID NO: 46590 - DNA, 795 bp, Cannabis sativa
gaaaattatatgaatttgcatactaaagcaatggtgcattattctaaactaaaaaaacaaaaacagataaggtgttagatgcagctgaagtagcagaaaagcaagctctttcggccacttctgttgctgcaacaagaatggtcagcaacaggtgagactgagaatatataaaagtaaaagcttcattgcattgaaacaagttataagtaataataagttttgatattatatattaggtatggagatgaggcaggggaagccactgctgatgctcttgcaactgttggtcattgcgctggtactgcctggaatatcttcaaaataagaaaagcttttaatccagcttcatctgtctccactggaatgttgaagaatgctgctaaaagtagcaccaaaatttaatggtactacttcctaacattacattaatggtagttctaataaaagatttaaggcttaaaatgggtataacattattttcaattgtgaagagggaaaactgtttatatgaaagaaaagaattctcttgtgtagtgtgtgtaaaccatggacatggatcaaatcttaggaactgtggtttagattgcaaaggcttgtcatgacacgtttatctttacccaaattaatgtttaatgaaagtgcattgctattaagtatcttcagctatccatgttatatttgaaagtagttaacagttttttatgttatttttttttaattaaaatcagtgagaatttataaattgaatcaataaaatgattagaataaaaactcgaagtagatgtagctccatta

SEQ ID NO: 46591 - DNA, 1187 bp, Cannabis sativa
gaggaggttggaacatgtccataagcataggatcagatccaaatccacgatcatgatcctgatcttcctcatcattcgagaagattataaattcgatccctagtgattcctcctttgaattgcttttccgagcatcaatagatgaattcaatcccttcttttacaatttcttagtaccagatcgttgcttccctgagcctttcgacctagtttttgccatggctacaactataaaacctgaaaaagctagagagaaaagcggggaaaaaaatagaatttcaataatttgcttaagcctgattgtttactaacggcacaaaaaccataattatttatgtgaagaggtattttaaactgagaatgatttgttcaatcactaggtaaaatagaagctacaatacccgaagatgcaacaactagtgctattaattttttgaacgaactacaaccatttttgtcttatacagagaagtttttttcgttcgtcgaggaccatcaataaagaaaaggctagttttttttgtcaaaatttgtatttaatattaatttatgcgcatttttttgtttcaaatttaataactgttagctaatatatcatctttcttaatgatattttctaatttctcagtaatctctttatattatttatcaatttcattattacttaaataatgatcaactaaactataataattgatatctttttccattgattctagaataaatttaatgtgatttaaaatagggttcttattgtaggtgaggtatgtgttatagtacaataatcttcaaacattggttgttcaaatttttgccataactctttagggttggtaggtttatagtatactaagatagtagcaaataaacgacgtaagatatggaaatattaaatgatgaggcttctgataaatattgttcttgatttgtgttagcttctaataatccattaagtaaagtagcttctcgaaaagaggttacctatttacctttaattgtgtttaaatagtcaaatgaggttggcccacgaacatgatttaatgataagcgtaaaaaatatctctcatcttctattgggtttactataacaagtctaccaaaagtttaaaaaatactttttaatagtccaaatattatacttttggttccaacaaaatgttcaggtaactctctataaataaatattt

SEQ ID NO: 46592 - DNA, 2165 bp, Cannabis sativa
acgatttaaaaatgatagtagtttagggagagaattcctaataatctttccctaatatcaatttgaaatatttatatatataaatacattcttgttaaaaattaataataaaaaacggaggaaaaagaaagaaagaaatatgatgccactggaataacccattgagtaaaataccatacaaccaaactaacatgggatatatacatggattactaaaaaggttctaacttgaattactagatttactaatatgacaagattacttgtaatgtgctcagttttttcaataattttcatcgaggtattgaattaccaaagatcctaaacaatacttggagtccatccaaagaataataaggatacttcatcattcaaagaattaccaactcttcctcttcaatcattctgttgaaccaccaacttattatcttcatctgcctcaaaagcctttctcagcttctcttcatctgtctcaaaagcttttcttgcttgtttgagctcctcattcattgatagcaattctttacaccggttaagtttccgaaagtcctgcacattaaaaatgtggttattttgatttatcatttctctaccaaccaaaatggaaaattacattctaaacaaccaaggaatcaagaaagatttatagcaggagatgcttccacttaaagaaaggggtccctataatccacaaacgtgtctttgataacttaggatgtgcattatatgtttaaaaccaaatataactactatagtactacttattaagacacaccttccgcattaagtaaagaaagtcctcaactgatagctttccctgctttgaaccattatcttgtgctttatgtacctgcagtaaaattaagacaacagtaaagtactctctctaaggatcttacttggtaaagaataaaatcagaaagaaattaccaaatctgtgatatactctacaactatgtcctccataagtgccacgctttctggaagaggctgacaataaacacaaaagaattaattaaaaacaaaagcaaaaatgaaaaaaagaggtcacactgaattctctattactgtcagtataagaaaacatcacagcaaaataaattacagaaatttcatactaaaagtaaacaatgatgcattgtaagctcgaatgaaattgtcaagtgtatcagagaaactcacattaggatcatccccaaaaccatacatcatatgctgcactgcaaatccacaaacagcaaagtaaaaaaataatgagattttgctttgggaaatcttcaactgcctctaacaatcataacttacattctttctgaaagactcctcgtttgcgcttagacgaagtttcagaagactgcgacgctccagctttctgctttgaagatgctccggcagaagtgttcatcttctactcacaataactcacccctgataatctgatatgtgttccgagattattgtcatcacccaatagctcattaaattactatactataaacaatttcaaacccttaccgagcaggaagccatagcctgaagctttaaaccattaattaaacaaaaattatagagcgataggtggaattataccataaaaatccttcagttgatttaaaagggaaagaaaaacagaaattccataaaaaaaaattgcgatatgtgatactgaccgtcggtcaaaattcagacggtagtgtgcggcgaagaacgggggtagccggaatgcttagccttcctatagaagcttctctacaagcatcgtctggctgaaaccacaaatcattccacccaaaattgacaggctgaggcacaattactttgaagtttgaacaagaacgaaggtgattgaagatgacaacgtaaattgggtgaaaagacacaaagttgttgttttctgtatgaaatcgcaggttgaaaagagaagatcgtgagaatgaaattgggggaaagaaaccctagaaaggcattggtggtgtgtattgaattggagggatgaaatgaagaagaaactattcgaaaagcagcgggtggagttggactgagctgagctgagctaaatcacacttcttttccgtcaaggctaaatccacgtttctaatttttaattcactaaatatactgtgttccatgtggaagtggtgcgttggcttttttttttttttttt

SEQ ID NO: 46593 - DNA, 1215 bp, Cannabis sativa
taacttgttgcgcacctatctaaagtgagaaatgcaaagggaatttattgtgtttaacactcttatcaaatgtaatattacggtgtttaacactcttatcagatgtaatatcactaacagtgtaatttaatatcgagttttatttattttattttaataataagagtcaataacgccatatgtaccgaaaattttaagtatgtatgtggtataaattcaataattttttattgacatatatattcaatgtttgtaaaactgaaactttcgtctagttttgtctgtacaaactctgttagtatcttaaatagggcatatataacgcccagatatcaaatcactaggtctggacaaaacatgttgtattaattacttctaaatctttttttaataaattcaaaacggagtttgtatagacaaaactagataaaaattacagttttactaacattgagtatttatgcattgccggaagattattggatttatgccattaaaaaactcattagatttatattttttacaaactcagaactttaaatctttatactacaaatttttctaataataattatagaaaatcactaaccacttataggtgtcaccttatgctggtgcaagacagcatagttccttataataatgctcatataaaatatgctacttcgcgacaataataccttaaagtactctagtaaacttttttacattatgctttaaaatagttcactaaaatcttattattattttatttaaaaaatttacattacctgtgtactttattatattatatttctaaatatattttattcaattctcttactattaataatattctcgtatcttaattttgtaatatttattatctaccgatatcaataatatcatataattatattttatgttttaaattaatttaaaataataaattattttcttacgtaattatagaaatatttgaagctcatattgagactattgagacttgttgaggaggttttcggtttcgcctctttccttgagctttatcttcttatgtagtggaaattacaacttatacttttgaatgtatgaattctatagaaaagcgagcaccttgtagcattacaagaacaaacgatcacatgactaagagaaagatgttgaccaaaagtcaatcactcacttattttaatgataaataaatatttgattattatttgttactaatctttt

SEQ ID NO: 46594 - DNA, 1159 bp, Cannabis sativa
atgattattagttttaagttttagttctatgagtatctgaatcacatcatttttgtctaggactttgttaacgcaatatgcttgttatgtgctctaaagagtgtacaagaacttatcctagacgggtagttgtttgctcctctaaggtttaggttcgagtccctcctaagtaccgacatagcaattattagtttcaagatccccaatagagaacaaaatcataactaatagtatcctttctttttcaaccaattaaccaaattgaatttggtgttttgtaggtgagtcttctgactgacaatggaaacaccaaggacgatctgaggcttcccaccgatgataatctgcttagccaggtacctcactttcaaactctaccgagtttagacctttccgtttcatatattttaatgggttcttgagtaaagattaaaaatttaatagggttgtttatgatgtgtatagattaaagatggttttgctgaaggaaaagaccttgtggtgtcagtgatgtctgcaatgggagaggagcagatcaatgcccttaaggacattggtcctaagaattaaatatgatcacaatgatgatgatgctttagcagtagctattgctgatgaaacaaaactacaactttatagatttctattttacaaaatttattacaatgttgctgacagaatgttatatcaaccctttgtataatgttgtgtgcaaaataaaatgtctagttaagatggtattaaagctatgaaattacctaaaactggtcttgttagttacaagggaaattttgcattttatggcaaacattatagtacaagtatatacgtgagctttctatctggtttttatatgttggatcttgttgtgattaatgtttagtgctggtttaactgtccaaaattgtatttattaaatagtttatgctttttaagtgttgtttgataaaatttacagcacgactgtggtgggacggagctatgttgtcctcaattttgtatagtttggcaccttaaggtgttcaaaagtgatgataccgagttataattagttgggagttttttttagggaaattttattttaaatgcttaaaaaaataccctctaacaaaatttagacttctaattaatttatacaatttaatgctattgttttcaa

SEQ ID NO: 46595 - DNA, 810 bp, Cannabis sativa
aaaaattaaatgaacattatgaaatattagtttttgtacctcacttttaccattatgcagcataatactaaaaattgtatcaaatatatcttatatttactttttgtgtaaaatatattaaattttttatattttccattaaagataggagtgctaaatacaaagtattacaacaaagaaatcaaactaaaataaaacaagctaaaaataagaagaatttaaaacaatgccaccagactaagaggcaccacacacctcatttcatatttgggagataaaagaaggttgaaccagctctgccaagcctggtgtcgccacccacaacacccctcctcatctccaagccaagccttcctccatcaataggtcatgcaagttgatgaaattttcaaagacaactcacattatcgatgactattccatcctcctcccattacctcttctatgtgccaaaattataagcaattaatgtcaacctcaagatttgaaccaaaatttcttcaaaccttgagaatgtcaaatttaaagaaaaatcaaatttagttctaatactttagtataatggtaaaaattagagattgatctcttgacttcttgacttaaagtaaagattagagaatatccattcatggtgtggaatgaaatttggtgcataatttaatatgatcttgggtgaagtggtaagaagattccacatgaatttgttggaatgaagaaccattaaaaatgctcttttacaactatttttctcacttttaattttttttaaaggctaattaggattttttttccctcgaactttgacatata

SEQ ID NO: 46596 - DNA, 2484 bp, Cannabis sativa
attgtatttgaatgtgattaaatggtagctataaaatatagttgttggggcctattgtataaatgatataaagtcaatgtgggaagttttttgaaccgtttgaaattgaaaaaaattagtaattgattacttgttaccagattttggaattttacactacaagagacatgtcgcttagagagagacattatgtcgtctgaccatttttcaacatgtatttttcacgtgtatgaacgttgtgcttggttcaaatagctcctataacccccaaatcactcatttgtccataaacgtccaatttaacattggtaacagtcgagagttttatggtggttattcatgttcaaatgagaatgaaaactctataaatagagctcatattgttcacttgttatacatgttgttaaatacactttgctgtggttagaacattgtgagaatatactcatttttagacactaagttgagcatatgaggcttgataaatctttaagaacgtttttagaatttctctaagtgttcaagggaagaaataactttaagaataaaggtcgttgaccttgtttgagcctttgagagatcttctctcttatttgttttcatatagtgttatgtactattattgcacatctcttcttcttctacttatataatcttgatattatacatttctttgtattttccaacgacaatgccgccaccaccatcgatactgtcaaagtccgaccccccaagaaaaatgttaagttactttttattctgccattatttttaacaaattttacatgcttagattatatttaaaaataaaattgttagttgcgaggattttccaaatttaattctcaaaattcctattattcaagtttaaatttatttatttttttggagtggttccaaagcttaaaacataagagtttttatactacatgtaaaaaaaattaactgttttttttactatgggacagaatatttttcaaaaatattgtattttatttaaaaaaaatactgtgtaagttttatattaagatttcacagttgttccacggttattttttaagttgttctactattgttttaatttttttgtttttttgttttacgattgtttcataaaaaaaatagtatttttgtaaaaaaattcttatgacataaattataaatttttgtccaaaatctaatatttttgtaaaaattccttattatttctagtaaggtaatagttggtggtactggtatgtaacaacttgataaactgtgggtgtgtagttagaccagtaccactgatagttggtggtactggtatgtaaggctagattaatcactgatatatttttttgacaatgctattagatattttatggtgcttaatactattggtggtgcattaggagtgattagtaatttattatattatttattaaattaaactaaaatatataaaaatccatattaatttacacagtatgtcaattcttagtgacatgtcctttttttctcattataactctttgtcctttctaactggatcgttgactgagtttctaacttggttaaagtactcttttctatcacaaacataaaaatatgctttcactatctgagtttataaattataacaagaagccaataaaataaattgtgtagtgtccaaaagtgactttggcttggactgactcaataatattataccgtccaaattattataatgctcaacttgtcgtcacaagccacatgaaatatgtgcaccaaatagtaagtgaaattgatgctaaggcataagtccaaaacatgataacagaacattctttctctccagctccaaacaactgtgtcatggttcctgtaaatccaagattttaattctctatccatttattcacacacaaatatatactatatatatagggacacggttttgtcctgttattgtactttcacggaatgtattccgtaatgtacggcagccgttagattcggaaattatttgatctgagagttggggttgatctaggggtaattagggttaaaaaataataacgtaccctgagactcatctaaaggctaccgtacatcacctaaagatcacggaatacattccgtgaaagtacagacaaaatcgtgtccctatatatataattaataaaaaagctttttcattgtatacgtacctatgttcatagcaggtggtactacaaattgtaaaagaagaacaaactggtacaatggttcttgctgcaccagacccaagtgaactgcccccttaacaactaatatgcctgtcaaaggcagggctatgtaacgagctactacaatgccaacaactagagatttctggattccctctcctcttagacctgaaaaagacaacaacaacaacaacaaagttatactgaagttcttagtagtttagtcatcttaaatgtagtgatttgcttctgtggtgttataacctctaagaagatttcctccaattataagtgt

SEQ ID NO: 46597 - DNA, 1464 bp, Cannabis sativa
agtttacctttcccttgggggtagtcaccttgctcaagctagggagaaaggtgatcgccaaacttctcttccaacgatcatgaccaacagttatgactttacacattcttcatcacttcagtctttatattctcattccacgtgtcatcattttgccacgtcaccatcgttaaaatttaagtaaatatttgctcccagtttttagtggtatgactatacagtagaaagttttttgtgtagctcgcgcttcaattttgttgttgatgacttggtggtatggtgtcgggaataccatgtttatactagacttacatttcaaaccccaaaaaataattctcccactttttatatttttgcaacatatcccaatggtaatttttgccttgaccaacaaaaataaattacaaggaagaaaaataaattgcttacaagaaaaatcaattaattatttacaaaaggaaaatctagttatttgtagaaacatgataattcttggaagctttgagattttcatcttcatagtgggtaagttttccgtaacttccattgcattttcttgcttgaaatttgaaatttgatgaagtctttggtacttcttcttggtagttttctccatggttgaaaatggcatttaatcattggggttcttaagtttttaatgatgggtgagtgtttgatgattgagttttgtagtatagatgattggtgatgtatttttaggtttgatttgataaaatttggtgaagaaatgagaaattttaaaactttattaggttgagtgtgttcttgagtttagaaaaacatgaagaacatggtaacttttgattttttttcactcttttcttgctttcattctcataaaaatgataaaaaagtgtttgtggagatgtagtgtacctttgaccaattttaatgaccattgcttggagggtgttgtagttgtgacttcgggtcaccttattttttcctccacaccaagacaccctcttttggggttgaggttcgctaccctgaattcagccacaaccacctcgatgtgggggcttcgggatcatgctatttttcccccctgagatggggtttcaccccgggttggtgtggtctcgggttaccccctatgaatgctttgagtgtaccctgagtggatgctttgagtgtaccctgagtggatgctttgagtgtaccctgagatgggcattgagacctccaccccaagactaagacaatatcacgtgggtttgggttaccccgagttggaattacttaggtttcggggtacaccaccccgagatggggtcttggctctagcaccctgagatggggtcttagctctagcacctcgagcctagactgtccttccctcaccctgagttttataatgcataccttgaggttatggttttaacttgtaccctgagattcccgtgtatctcgagttggggtgttaccccgagatgggggggg

SEQ ID NO: 46598 - DNA, 2629 bp, Cannabis sativa
aagagaacaaccagattttaaagaggttcggccatatgagtatgagtatagtatggtaatagcctactccccttgtatttcgattgacttgagagaaggaataaagtatttttcctctcaaaagctcttataatggatctctgagttattttctctcttagatcactattctctcttgagtgtatttttgaatcaattctctcgacccctccatagtgagattatgtcactatttacaggggattaatacatgaggaagggtttccctttgtttataatgaacaaaataagaaattacattaattttataattacaatgtaagaaataggaaactaaagtgtgttgcctttattctttgactcaatcccacaattatagggattgtcttcgtgtcttcgaagcgaagagattgatctctagaattaccatcttacacactttgcttggcataagcatgtctggatcttggtcggacatcttctcgaccatcctgcctggatgttcaagtgttacagatgttaagtagccattaatgagctactaggaattttttcctccgcctaggtatcgaaaatgtgggacacgtgtcatccattcttactgccacgcaaatgtgcaaaaaataggataacagtaaggtttcctaaattttatatgtgtttatttttattattttaggaattcatatttagagtgttagattatagaacatacttgttagtaaatctagatactggtaaaatatattctaacaataccataacaaaattgaaatgttaaacaatttagttaactgaaacgagtttcaataagccaccaaatgaaaaaagaaaaatacacacacaaaaaaaaatagtaatcacaaatataatcaaaacaacacacaatgctaaacaaaatactaatcataaatataatcaaaactagtttcaaacctagaaacaaaataataaaaaaaaaagaaacttaaaatgaaaaatatataataacatcataagatggaacaaccccattttataaccctcaaaacatgtgaaatcagtttcaaacctgtgaacccggtgaaaccagtttcgaatctgtttaccagtttcaaactagttaaccttgtaaaactagtttcgaccctatgaaaatcataataaaacctatgaaaccataacaaaacttgtgaactcatacaaaaccataaaattccaaaacatcaactaacaattattaaaagtaccaaaaatttgacatcataatgaaactaccatttacttaaacacaaattacccattttctgtttccttcacttcatcgtctttgtgacaaaccaaacgtagaacaataacaaaataagtttctacaataaataattacatgtaacattgataaaatttataaaaatcaacaagcaaaataaaaatttatggtaaagtagtgtaccataacacataacacattgacataactgactaaaaaatggattgaaaccagtttttagcaaacaccattaacataactcactaaaaataaaaatattaaaactagtttccataaaaacatatctctagttcaccatgcccctattttaatgtgtactttgatcaatataataagtaatgagttgcgtactttaatacatgcaaagagtacaaccaatgttgagattattaatgggttataaaccaaaaagttataatttgcaaaggaaaagaaaaggaaaatagctaaaagatcttcctaccattcaaatctcctttcccctatcttcatccaatataagattgggtttatgtaagggtttctatcttggttgttatataagaattgaatattgtaaaggtttctaacatagttgttgtatgagattgagttggtgtaaaagttgctaacatggttattttataagattaagtttctataaaggttgctaacaatgttgttatatgagattgaattactaacaagctatattataagagttgctaatatcattgttgtcttgtgtgatattggtttgttgtaagggtttctaacataattgttgtatgagatctagttgtaagggctgctaatatagttgcggtaagagactaagttacactactagaaagttgacttttagtactttatagtgacttgcacaaaaggtgcgcactaatattttagagaatttttagtgacacgcactatgggactctaaaaatttaatatttctaacccgcaatgcctctcactaaaactattctgaaattttaaattaactaactatagtgtcttccaatgcacaagtgggaagagttttccacttgcacatagagagacgctgaaactaaaacaattaataataaaaaaagtgtgtaccattaattaataattaaatgaaacctaatatattcctttctaatatacacaaccttatatattaaataaacaaaccctaaaatttctcctttctaacaacacctcctctctccttttcaaaaaaagcagtgcctcctccatctgaaaaaaaacacaacacctcctccctctaaaaaaacgcatcacgtccctccctaactgtttcttcctctctctctcattgttgtagctgccttgcgaaagatggtgagactcgacctccggtggtctaatctg

SEQ ID NO: 46599 - DNA, 2060 bp, Cannabis sativa
  modified_base (26)..(49): a, c, t, g, unknown or other
cttgatttttttataacaaattagannnnnnnnnnnnnnnnnnnnnnnntaaatagaggttctactgtaattacacaattttgtatatttagttgaccacgtaattatattataattgagtaattagaggtagttgagagatcttaattacactttctaattctcatgtccctacaagaattgggtgtaagtaaactgtgtaattactcaaaattttacatttttaaatattaagttctatgtaattgctaaaatgtattattttttgtgtaattattaattaggtttttaaataagatattaagaattcataaataattatcaccttatatcaaaatacactttatgttttactttatattatatagtgtaattattattataatgtgtaattactgccttaataattacactacttacagtaattacagtttcttctaaacgcacaatgtgggtgtagaaagattacaatttaagtgcagaatcaaataagtaaaactttaatcaacaaacaattaacaatgattaaattaacaaatgacacacaacaatcaaagataaaacaaggataaatagagtactcaaaactagaaacgattaattaaacaataagacaataaaatcaacacaaagatatatatcgttcaagtcctatagatcgatgtgatttatggctttagtactccaattttggaacaccatcgaatctctttactcttttattgattgagtacgaacagagtacaatagagttgagatcaattctttaattatatctcaatacacagagttatgataatcacaatattaacatatattacaattaatattacatcatatttgtctaacagaaaattggactatctgagtggtttcgtgtgtccgctctgatagagtccaatcttgacggttcccattaaaagccaacatcatatgtgttaaacaattaattaatattacattacacacaaatcacaaatcacaattttaacatatactattgcaataaaataattaattatatggtacaattaattatattaaataatgtataagaagatgtaacatcagaaaaatttgtcacttaaacatatttatgaaatcataatattttttttttatcgaagtcataaatatatccatgttacacatacttgtgtatattcgttacatctttttattataaatttaatacaatgatacactgtttggttaagtacaaaatatcatcgatctcggcctatatgtatagacacgtgatgttatggaattggacctttaggggaaataatggggcgagtggctggcggaggcgtacaatctttacgtcctctgctactcggacaatatctattcaaatccctgcacataattatttaatttgagacatcttctttgtatagagaagttatatagtaataaattgaaaataataaaagattggaaaataatattccttacatataacatatacatacaatatgcagttaataaccaattaataatatgctctaattttcaagtttaacactacatagcatatttaattagttaattgattattattaattaaacttaattaatttgttaattatgaatattaaattatgaatctgaccttttgaatgaatgatatggacgagcatctccaatagaaacatattggtagaaaactagtagagcaataatgcagaacaacctcaaacccaaactacacaccttcattattatatgatctaactcttactaatcaaaatgttctaataaccagtttttataggaaattatagagagtagaaccatatatatataataaatttatgtgtcatttgtaaattataggagttggctaggataaagagaaaagtcatgaaacttattaataaattaattaatatagttaaatattattagttgactaggatattaattaattaagttgcatatatatatacacgccaccgacaagcaatttcctctcaatttcttttatatattatattaaataaagaatagtatatatggttcaattatatgattaaagactttttattattttt

SEQ ID NO: 46600 - DNA, 1844 bp, Cannabis sativa
  modified_base (1004)..(1004): a, c, t, g, unknown or other
attccaacaaacccaaaagaacaatactgaaatagaatcacaaaccggggaaaaaccattcaagcgatcaataagaaatgaaaaaagtaccatatacatcagaaataagaagaatggcaagcttggagtctggagagccgacgacataggagggaagaccaccaagttgctcaacatggcctgctccactgtttgcattaagggttggagggtttgagcaacactgaggtcctgacatcgttaaaacacaggtaacaaagcttcccggtacttgggaataacagtttcagaagaagaatgaagaaaaaaaaagaagaagataacagattgattgatactgtgaaatgatgcaggtaatatctttcgaaaattctataatatatctccgtattactacatctttataccttttagtatccaaaataattttttacttaattttttttcacctataattatttaatacattttgcaaaattttaaaatttttgaaaaagtttaacacattaaaaaaatgtgttcaaacaatgtgttgcacgtgtgactatcttattttatacatgtaaaataaactgtttaattattattttctatattagaaattatttcaaatttcttcaaattttgtaagatatcttaaataactatttaagatatcctacaaaattttatagagagtgcatcaatgcacttattttaaagaggtgtattgtagaatcacccaatatctttatctttatctataaaataaccgtttttattgaaatattttaaacatataaaaatattttggtgattctacgatgtgttctcttaaaatttaaagagatatactgatgcacactctacttatttcggcatctagaagaattttttagtatatttttttttatattcatgtacattatagctatttaagatatcctacaaaattttgagaaatttgggataatttacaatatagaaaataatatttcatcagtctattttacacgcgtataaantaaaatagtcacgcgtgcaacacattgtttgaagtttgaacgcaatttttggggtgttaaactttccgaatttcttaaattttacaggatgttttaaataactataatttacataaccatgagaaaaaatttgactaaaaaattatttcgaatactaaaacagatgtatcgatgcatctttttaagggggtgcattatagaattttctaaaatattttgttaaatttaaggtggtaatataattatggatgagcagcatgctgttcttcaatattttgttcagaggcatcctgatctgcaatatttggttgaggactcaagtgctcaagattaacagtagttgagtttgtgtgttcacttacctcttgctgactttgagtggcagatggtgttccaagggaaggtgtagatggattgttggagttgttatcgctatagaggtgacattaggttgggaaaatttagtgaagtggatgtttggaagcttactccaatgagtggtctagactatgatttttttttttctggtgcatgagtattcaagaaaaccagatttgaaaggaaattcactttcattaaacacaacattcctagatatatgtactctacctgtaaaaaaatttagacaaacaaattcttctaaatgcccaaataagtagagggtgcatcaatacatcccttttaattttaagagagtgcattgtagaatcatccaaatgtttttaggcatttaaccatgggagttgtaccttttagggtacattttcataaagggcaataaacttagcaaagaataatatgtttcatgagagactcaaacacattgatgttaagttgcat

SEQ ID NO: 46601 - DNA, 884 bp, Cannabis sativa
ggttagccatagctctatcaattttggagcaaattctatctttcccttgctgtttattcgaccatgtgaaaaaattcccagttgccttcacatcttccaagtggcaatgctcaacacatttcgcaaaagctatatccgggtagtacttgactttatgccctactctctcctcctttgagagaatatcattgaaatctcccattaaaaaccatttatcctttgttgctagatctgtcaagtctttccataacatctctctaccattcttgtcattgaaagcataaatgatagtagcaaagctactaaaagtatgatccattgtagaaatttttaaatgcattagttgacttgtacatttaataatatctacaatgtatcttaccggattccaagcaatgacgatcattccacctcgatgctaagctatgtttgttgagaaacaccatccatcaaacacattaaggtacaaggttcccaatttgtgaaccttgacccttgtctcgaggagccccacaaaaccaacaccctgagtatgaatagattgcttgatttctctttgtttttgagtgttgttggcccctcggacattccaacaaaggaatttatccatttccaagagagggatccccccctcttgtgttgtcctttttgcccccaaccaatgcctcctgtacttcctgctgctcttcacttgtagctgttagtatgctaaatgcattctgtgtttcggtttccgcaggaacttctaggtttgtggttttctttcctttagtaaccggttgaaagccctatgcatccaagtgcttttttgtgttgtctactctataaattcttcacaatccattccttcttgcctgggccttctttttgcattcagctgtcaa

SEQ ID NO: 46602 - DNA, 1559 bp, Cannabis sativa
agataaactgagatggtagtgtggacaagaagattgtggcattttagaagaagttttgacagttaaaaattcctccaaaggcaaaaaaaaaaaaattatgtatggagagggcagctagtgggtgtctttcgacgagagttcaattgaagactaaacacgtaaatttgtgtctggtttgtcatggagcaggtgaatctattttgcatcgttcagtttcctatgatttttcacaaaattattggcggtcgcgggtttaattatggttctagttgatgcagggtcgtttgggggttggttctttcactcgttctcatggctaggtgaagaacaaagtgttcatgcagtgatgttggtttgagcgatttggttcgcacataatcaattcttatggaaaggtaagaaatgttgggtggagttcgttgtcaatttagctcgtatcactcttgatcaatggagaaaaactcaagaaagaagtttgtttccttcatttgacacttggtatattttggatttgagctatggtctaaaccaggttatgaaaaactactcaaggtgaatactaatgatgtgttgtttgatgaggagggaaggcatggttttggtgaggttgtttgagatcaccatggtcgggtcgtgtcggggattttgggactgcgggttgggcgagttcttccagagattgctgaagacgtgtctctcaaagaaagtgctttcatagttgaagtgtgatttcccaagtgttagtgttatcgaatctaattgtctagtatcagtacaagttgttagaaatttgaatgttttgtcatccacttttggtggtattgttaaaaattataaacaacttctattttcttttcatgatgtttctttactttttgtcacatgatgatctgctaatcgggttgctcattttatagttagagcgtctcgtttatatgctgattgtacttttttagaattcaatttccttttttaatgttagttataattgaggtcgaattgatctagttgaataaaatttataattcaaaaaaataaaactaaaaatagagacaaaagtgacactcatagtgtgaccttttagatcgtattctcattctcatatatttgaatttcaaactgatgagtacgtggtggtcttatgtaattgaattaattaaaggagaacctcatagttcatacaccaccgctttttaatttcttttttttttttgtttacactttactatatatattctcggatacttagggcagctccaacgcttatgtttggagattgcttgtaccgtagtcttgttttttttaaaagaaatattatataaattaatattaacatatatataaaatgtattaaataatagagtattaagatatgacaattttattattgatataaatatataactgtggggtttttttttttttgagatgaaaatgcattttatattaaatgaacagtcataatacaaaaacatttaacgggggagacatttcctccaaccaagaacaaatagagtccaccgagagagcatatttggcaagtagatgagccgccgaat

SEQ ID NO: 46603 - DNA, 2815 bp, Cannabis sativa
  modified_base (2494)..(2495): a, c, t, g, unknown or other
  modified_base (2756)..(2759): a, c, t, g, unknown or other
ttaccctttcccgccactaaggcggatcgtcgagcaggtctttcaggttcctccctaatccggatagaccattcaacgggcgcttggctagttagaggggctttcttccttttttttgctcggagtctcttgtttgggctcagcctttttctccttcttcacaacctttggtacaaaatcagttggaaaaagtttatacttaacaaaattggtcttggaggtcaagaggcagatgttccgtgcagtaggaggcaattgaaggatcttttgtgccctcttcttgagctccagtgtgaatggagggcgacagtaggatggtacctgctagaagctactgtgaacggtacccattcctttgacgaagtagtattcgtccataaagtaccctatcttagtcacctcagtaggtgtggtgcccgtcaaccatttcttctcaaattgagaaaaatagaagtatcctaacctgttctgcttgggacttgacttcagatcaaagagccagttggtatcatgcggggaaggctcaccccacccttgtgagacatagagaacgaatagggcagacaagtacttgatgtccttaggagtgaactggggcggacttatatggtaatagtttgcaatcctcctaaagtatgggagcaagggcaaaatagcaccctgcttggtatgaacgcccgaccaagcacaataaccttcccctaggctagtcgccagctggtcgggggagtgaaggaagcattcaacactccctaggtaaccacggttgagaaaattcttcatcatggccatggtcaccatagatggttgagagacccatcgatttcctagtgcgccttgcctcctcaaaggaatagcctcggtgtactcttcaataacatagtcttcactcgcctctagaacctccccgacttcaggcacgggctttccttcttcattgaagccaccgaattgtgacacccgagctactccttcttcttcatctcctttggcctcagcaggagtagcaggacggacctcaccctagtcctccatctaatggacttcaatgtcccaagttatgtcctcctcttcagtggcaggcccggcctgttcagcatttggcaaagtggcgagacaggcgatgagtgggtcaaacaatgaagatttccgttacagtttgcttggttcgcgccatcattctacgtctggacaaaactttgtttgtctgcctagcaatagtcacaacaaacatggcaacaggtttacctgcaactgtagggcttggacgtccttcgagcaaagtatcagcaatgtctagacggacaatatatgtacagtcgaacagaagatagcgtctccaccctttttgagttcccaaatgaagcgtccgtaaccttgaccttggatctagcaaagataaaaatggttttgcacctcaggttttggggaaggcgtgtgttcactacttacttcccagtcttcaaagcaagaattagaaagataatggaggcgaggataatccttgtacaatagttgaagcagatcctggtcgatatggtgttcgcctccccaaaactcactagggttcatctacaaaaggtacgaggcaagatgagaatttggttggggaaacgaatggaaataggttggttatactgaccaggtacgattgagggatcaaaaatagaaatttcatacagtaatggaattttcaacccagaagttcaaaattttgaatcgaactctgattctcactaaacccaaatggataagtgaaaatgagtatcgtggggttaaaatgaaagcgcaattagaatcaaacaacgtggttgagcataatcaagatttctaaatctcaaacgtagaatttctatggttaccttagaacaactcaagaacaatcaagatcggcaggtagaaatctagaaaattaagcatgcaaatgtgtaaaagaaggaaaggaagaacttacttactgatttgaagcttttgatctgcttggatggtgctgaccaaagtattctggaaattcttcgaagaaattgagagagaaaaagttcgttgctctagttcttcaagaatgagaataactaaagtgattaattagggttttcaatcctatttataagcagttcgaaagggaggagtaatcatttcaaattttaaatatctcgaattacccccaaaaagtgtatattatgtacttattactagcatgaaaaccgtcttcacacgcgaaccttaagacgcgattcgaggtaaaaattatcaatcaacattaatgagccgaaatcaagctcgaaagaaatcatcgtttcacttctagaagttatagaacctatagattctacatctatgattagcgctcccactcaattatactaccatgttcctaaaatgtaattattgggccaatccaattggtcagctttaacgaaaaactccaagaacacaaataacacattcaagccagaaactaactatcctggattaagatctattgacctaagannaactaagtgatattgacttagatagatataacagtaagtttatgatatcttatccaacgtcaatatcggtccagaccgatgtataatccatacatctgatcctagcacactttgccaataccctaaaaatgacaaaacacttatccaaggtgtaagtaaagtttatggctgattatgatgttagtgtaaatcaagtgtactgacaaatcttgagacaagaaattgaaacatataataatgattatattccattgtgttgannnnactataatcatgaataattatatattctggatttaatcgaatttatacattaaaca

SEQ ID NO: 46604 - DNA, 2080 bp, Cannabis sativa
ctctttaaagtcaaggccgctaaaagttttgagaagtcaagcatgatcccagaaagttaagtgcaacttatttttattacccttgacactttaaagaaatttcttacaaaaattttcatagctgcagcaactttctgagaaagaataacgatttcatccaatatttacaaatacacaataacactgagtgaataagctgagcataaccagcaaaaaaaaagatttttgctagcccaactatgaagcttcttcctctggattttatccaaaataccaccagagtcagaggctttctatttggtcggtctcaaattaacaccaaagtaccttaaaggaaagatacatttaaccatttgaatatccttcaaaatttacctcttaatgtcatctcgcacatcactgaaataaatttgagatttatttttattaattgaaagtcctaaaattacacaaaacttatcaaaagccaactgaacgacttgaatggaatgcatgtacaacaagaagtgtatatctttttttttttttatatagaacttatcaagttggcatgtttacttaaagggaatatgaatgaatggtatggtattgatgcttgtttactaaattttgaaaatgggaaaattagtggaacccacacaaattatggagaaaataaagggaaaggttctcccccatttttatagggaatgcctttccatttccttacttaatttattttaattttaatttaattaattaaaaatgaaaaagacaaatataccccttaaaaatctataaacagaaaataattacatgttctaataataacaattttgtcaaattaaagcattccgattacttttcctagttatgtaaacaaaataatataattctgtttttctttccgaacagtttagtaaacatcataatgaaatattgtttccgattattttttattttaaaccgatacatttctcctattgattattctaattccaattacagtttagtaaacgcgccaacttgtatatataatatgaacaaataggtattttgcccctcattggccgaagaaaatggcctctaatttaatatcgtgttaaatagtcatcttaccgctagtaaaatatgagatttagtgaatttaccctaaatttaccatccaactataattactatgttattttgtccttcaaaattttaatgagcctttttaataaaagagaatggtgtgacagtgataaaagttggagtctggagggacaaaatgatgatggtgatacttagaaaaggacaatgctggaggaatatatttctatatattagactccaatcttgtctaatatatggtaattttaaaatattagtaaatcttgtaattttgttgtccataatgtagtgaattagacatttactgatcagaagtttggttttatttcactttcaactattcttacaatgtaatgacggagtctaaatttaccaatctattataagtatgtttttattaaaaaaaaaaaaagatcccaatcttgtccccacaccatatgtggacccctccttgtagggaattcctaacttattggctctgttttttatttcaattttcaaaacaagtgaccccaaagcttgtgatttgcagttgcactgtgggcgcaacagcaacagcttgcacatttcatattggaccaatctcaacttggaaacgaatagcctagtttaaacttatgccttcacattcgatgagttcccttctttatgtgtctttctttaatctttattaagatatgcttaaagaaatgagaagcaatgaaaatttgattgcaaaataaaaaaatattagagttagttctacattgttaatatgggaaaatattagagttagttctacttctttcattatcaattaattttgagatggaaccttatttaatttatctcaaattctataaaaaaaaaaaagcaatttgaaagaaaactacagaatccatcattatacatttacaacgtattttcttttctacaaaaaagaaaaaaaaaacattacaatacaggatatatacttattactgttataaatattaataattatgtggat

SEQ ID NO: 46605 - DNA, 2881 bp, Cannabis sativa
  modified_base (273)..(279): a, c, t, g, unknown or other
  modified_base (370)..(373): a, c, t, g, unknown or other
  modified_base (538)..(540): a, c, t, g, unknown or other
  modified_base (606)..(609): a, c, t, g, unknown or other
  modified_base (2840)..(2846): a, c, t, g, unknown or other
gcttccaataaccagatctagaatccacttagattttggaattgcactctcaattatatagaacgttctgaatgttccacaatatagatacgctatgacttatccattgttataattctaataatcaatgatcctctataaataatttacattgagtaaggacaaaattactgtttcacccttcaatgttttttatccttaaaacacttagtaacctataaatgatatttcaataaactaatgtattcaataaaatgagcgctctatcatttnnnnnnntttagccaagctcgaaggaaatcgtcgtttcacttctatgtctagatagaagatatagatttcgtatctattattagcgctcccactcaannnnactaccatgtccttaatctatatgtcacgagaagatccattggtcgactttaacaaatagattgaagaacgcaaataatacaattgatctagaacctaaccatctcaggattgcgatcatttgatctaagatcaactaggttatatttaattgaatagatattannntaagtttatcatatctaatccaagttcaatatcggtccctttccgatacatactccatgcatccannnnaagcttactttaaccaataccctggaaaggagatagcacttatccaaggtgcaagtaaactacgttgtagattatcatatcagttaaactctctgtactgatcactactacaatttagccttttagtgacagtatttagtgacacgcacaaaagtgcgggtcactaaatagttaggagtgatttttagtgacatgcataattagactctaaactttcggtgttagcctcatgtaatgtgtgtcactaaaaatatagtgtcactaaagagtaaaatccatttttttttttacttttattaatttaaaaatatatggcctatagtgacgcgccaggtgcgattggataagtgttttcccacacacttagcgcatcactatatgataatactattttttttaaaaaaaaaatacagctgtattaattaattaaaaatataaaaaaattatgtttaatagtacattggaaccggccctatgtgagatgcatgggttttttctaaaaaaagaaataaaacgaaaaacctattaatttcacttttataacctaataaaacctaataattttctctctcacccaatactagtgcctctctcctttacaaaccctaatataaactttacctctctcctttctaactctccagcgcctccctgtatcaaaaaaaatgcagccctctctctctcttgttgttggagctgcccagcagaagatggaaaagcttggcctccggtggtctaatccgaccactatatgaagacatttggaaggttcccgttgtattttcctctctttctcttagacagatcgacgtcgaaattttgtggcgttgagacaaacttaggtatgactgctctatatatatctctctctatgacgatctctctttgaggatgaatatgcatatgtggaaatggttggtgaatttgaggatgtgcatttggaggaggatagggaaacagaaaaattagagtacaagaaaacacaaaattgaaagtgataatcactaaactatacttgttttttttttggctttgttttacttggatttatgattgagtttgaaaagaaatagaaattcaacacaataggaatggttcatgcaaaagtctccaaattttataactcgaaagtgggccctaagctatgatcccttctaaatgaaggataaatatgtctttcagcattttaaatggtgttgaataagttgaaaacaagacattgacctagggtagctatcatttaatgggtgtttgagtaattttttatataaaagaaataaaactcaactacaatatcatatatttaatgacaatgttctggtattaaaagcttgaactcaagactgaaactccattttattcctcttatatttttttgtggattagattgattatggaagggctaatcatattaaatggtattggtgactccgattgctttggagttgcgcagttggccggagttcgggttgcagaggcggtgggtggggaggtcgggattattggacttgagtttggttttgatttttggttaatgttgtgttttcagtatagatttggaaaaatgtttgtacattttagtcatgtaattacattataaattattttatattgatattgatctgaaaaaatatttgtaccttttggtcatgtattaattactttgtaaatatatattaacttacacttgataattttatttaattttaccaatctgaattcaatagactagattttaaaaatataaattataatctttttaatttttttcgggtacaatttactaaactaataataaatcaggtttaattggacttttattttactttttagtataaaacaaaataaataaataaatacaaattaacaatattaataaaaaaaaaatatttaatatagtggcactttttgtgtgtcactatatctccaaaaatattaataaaaaataaaacaaaaaaaagtaaaaaagatatcgtgacacttcatgtgtgtggctgtagatgcctatagtgacgcgcagaaaatgaatgtaaaaggtttcagtgacacgtgtgaagtgtcactaaaaactatctttccagtcacccttattagtgacgcgcgttgaagtgtcactatacacttttagagttactcaatgtgtttcactaaaacgcaattttctagtagtggataaatcataggaatacatttcgtcacacaatcttgattacattccactgtgttgacannnnnnnaaataagaatatcaatgtgataagaatttggatga

SEQ ID NO: 46606 - DNA, 1594 bp, Cannabis sativa
  modified_base (47)..(77): a, c, t, g, unknown or other
ttatgtgtctatttcattgttttataaattcatattaggatgttaannnnnnnnnnnnnnnnnnnnnnnnnnnnnnnggtaaaatatttccaacacacacaccaactgaagttcccacacggatttggaggaaaaatgttatcccaaaaatgcacggatatcgtggtacttctctgggtgacacatttccaagacttggatagaaggtaccatcctcgttatgccgcttagggtaaatgacccgtcaaataactcatgtgcgatgacaggtaaatgtgtcgtccagagcaaacggcttgtgcgaatagcttgtcaacatatcactgtctggagaataaggttatcgcaccatacaagatgtgcggaatattttgaccaacatcaacaattcagcctcgcatctagggtaaacacgaggatcataatacttaagtattctattttgttatcacttaaaatagaaaatgtcctagctaaaagtttcagttatatatataagagtaaattttggtataaatacttaagtttaactttcgattgaaaataaatacttaaatttaattttttatggtaataatatttaagttatatttttagaacttccgtaggtacctgaacgttaaatgtcaagtgatcattattcacgttttatttttttattggtaaatttaaattaatttttaaataaaaaataaaaatttaatgacatggaccaattagggactctcacgtgacaatttacttgatacttatcggcttataacttaagtattattaccgtaaaaaattaaaatatttatttgcaaccgaaaattaaacttaagtatttatgtcataaattattctatatttatatatttttgtgacaaggttgttattaaaaagtttgtagctaataattttagtcacaataaaaataatattgccactataatttattttaatcacaataattaatctttataactaatagttatattatgtcatttacaactttattattactaataattttttgggacaacatttgttgttactaatatttttttatcactaacaatttttatgatatatatcctcccatgacctataatccaactataacaaatcaattataaacatactccggttattgagttactgctgctttgccttttgtgacgacaattctgcgacaatgaatcttgccttcagtacttggtcatctgaaattgaaagtcgatgtcgagatgtttattgcttatcgttagttgggttatggagcgatcgctataaaaataggtacttttagtaataaatttttattcacaatataaattttttgtaactaaatataatttttagtcacaacaaaaagttacttgtcactaatttacatttagtcacaacaagtattgtgactaaaacttttaattacggacattttcatatttttatcttatattttttctatttgtgtgctcatgttaaaggtattaattttatgcactataaacgaactaagaatataccataggacatagtcttgctcaaatgagagaatttctcaatttcttaagaaaaaaattataaacattaactaatttttcttttc

SEQ ID NO: 46607 - DNA, 1982 bp, Cannabis sativa
  modified_base (1909)..(1916): a, c, t, g, unknown or other
taccagaataaggcttaagcctagtttccatcaaaaaaaggatagtgggtttgtgagtcttaaaaaggagggaaagttgatggaatgctcgaggactccccagtcctcgagcattctagcttaggagactcatttttttgggcgggtgtgctcagcatcacccacacccgcctgttcaaagtcattagcagagggagaagcttcagaatccttgtcaccggccctagcacgtttgagcatggaacacatggaacttcaaacgttggcttaagaggtttgaaatgacggcctcttaactcttgaggcacaagcaagccccttgcctttaacctgagggtcgtagcaaggaacatccatcctagaggttcgattatcagcttgactatgactcagagccagagagggtaaagcttatgcaagggagtgggtagcatgcagtagttcagggttggttaaagttgggttgtcactaattataacagaattagtggaaatcgaggccagatgagaggagtgagatataggggaagagctagtacatgatgtaccaaaagacatatgacccatggagatgttggggttaataggagtaggaatcatgagactttgggagttcctgggagcactaagacatgaaaaggatgccatactcgagcaaaggagtgaaactaacagattgattgagaacgggatttaccatttggccccctgagagaagtcagaaaggtccaagtcagctattgtaatggctggatgatgaggatattggaaaggaaaaggcttctcaaagggcttctcttttccacgaaggagaaaatcataagggcaaacaggtggggtaattgattcatcacacttctgaaggtaagggtggcaatatttcttagtatgatctagtttctcacaatagaaacagaaatcagagagcctttcttacttgaaatccaaccatttagtaaattccctccccattttaagaaaacaaatacgaatgcctctcctaatgggtctattaacatctatgagaaactggaccctcaaataaggcctagttccatccttgacagtggtgatatccacttgaatcaaatcacctacgccgtggtaatgagcttagccaactcataagatttgcaacgaaaagggataccatagatttgaacccagaaaggaacctaatgaaagtttttaggggttatgtgaaaagagttatcaggggcaacaaagatagtaagtgtaatatcccgatatgcctaatggtaagtaattaggatttataattatattatgggatagttagataataagtgggattatgatcctactaatctagttcaacataaatttaaattttgctataagtggataaataagtgtaatttatacggagatttatatggtatatgtgaatgtaatatgagttactggtggaataaaaatattttcagatttggcgaccttggaggctcgatcaggggccaaaaatatcataacgggtttaattgataaagttgataatataggtattggggtaattggatttgacttagcgccctataaatataaatttcttagtggctaagaaatgataggataattatgaataataaagtttttattaatattattatattattaatattaatattatattattataatattatatttttttatataaacttatcatataagtttataatatatattttatatattagaagtttataacagtaaacgtaagagaacgaagccctcttctcccttcgacgaaaccctctccctcctatatctatcttcttcaatttttaatctaaaatctagcgatctaagctccggtagtagcagaatagcgagctcatagagcgggaaagcttaagggctcaggatcatcgatcgtactccaagnnnnnnnnccaacatacctgaaccggaacttgaggtaagaaaagtatattttactgcatagtacgttgtatgta

SEQ ID NO: 46608 - DNA, 2791 bp, Cannabis sativa
gggaaccaaagaaactggtttagtacaccttacgtatgtataacaaagattgtacaccagtttctgtagttcatcggaagtgaattggctttcatcccacagaatatgataatgtgttggtcggcttgttcctttcataccccaatggctgcaaagatagaaatcaaattctcttggatgagtgatcactgtgtccaccacagtccctggggcaatattttcatcaaaaaattggttctgtacaattgaagggtctagtttgaaaggaaacaatctagtgtggtgccttttttggactacagcaaaagttatgggaggttttgaatcaggatatctagaagaacaagctgctttaatggcctgcagctcctcttgaagaactttgtagaattgggtttcacttactccgtctctgaagaaaattattctcttggggagtttgccaactgcctggtggaaatcatccagcaattctcctaccatggcaccaagatcctcaatgatttcttgcctgtgcttttgggacctcattcttgaaacatacttgtttgctgctggccaattcatgctgccaacaacagcagcaacagatgggctgacatcatcgagtggatgaggatgagtaacatctgcacccatgaagatcacaggctcatcggattgaagcagtcgtgggatctgagatgacaatgaattgtatagagcagtcgtgcaaccacctattttggcattgattttaagagccaaatttgccaagaactgtgaattcggcttagagagattctggtacaagcaacactgacttacaaacccaacactagtctctgctattcgcttcaaatctgcataccctttgtgttttctttccataacaaagactagcagttggagattgtttgatgcaactctttgaattcttttgagtttagattccaaaagggaaacattattcaggacttgtgttggttcaaactgggggctaatgattgtgtttttgttaagaaatatgcccaactgttcacacctctgagtcagttggtttatgaacgttggaatgcttgatttctgttcagcgttgccgccaaaacttatcaacgcccacctttcaatttgagtcccttcaaatacatggttgtccagaaggttccattgtcgatcacggcgagagggaaccaggtctctaatgtgccctccgtcaccaaattttagttttggaggttgaagaagtcttccatttaatcttgtcatttctctggagatgtggagtttgaattctcttccctggacgccactgccaaaacacaagaaatgaaaatttaacaaagaaatattgttggcaatttaacacaaaatattattttcttccagattgaggttaccttgttggcccaacaggcccttgcatgacaccatcaataatagcttttctctctttaggccgttggcaacccatcttaagaattcgtgcggtctgatcatctgagagctttccaagaaatttctggccttcacataccatgcatagctccattggaagataacatggtttgctcctactaatctgcaagcatggcaaattcctgtattgtatgtcatagttatagtgatccttgaaataactgatcagccttagattcttcccatccctatctgcaaaccacagattctcagtggcttcctcagttaagccatagacacggtacctctgaacagtttccctatggcaaacaaagattctcatgttcttcaatgctctctccacttccttcctttcgggaccaatcaaaccccttgtcttcctttgaggaaggtctcgaagaaactcgaggcgcttctgcaagtacgagattactccaatgctttcatggaaagcagtcactgagaaatccacattaagagctagtccttgttgagttggtctaaggctctgaaagaaccctctcaacccaacagctcctcctccaatttcttgactccctcccattgagctggaatagagtgatctccccacaggtatgcacttctcaatggaaccctccctcaatacaacatccaaggcttggagatagtcctgaggaagtggaatccaatcacctccttccttgttcaagtaattactcagctctttcccatcaagcttggacacaagtttgatgtttaaccgaaacagtttaagctgttgatgattctcttgaaatccattgagttctccatatggagggcttggtttgtttgtgggtattggaaggcttataaagagttcaagtttatctttttggaattcaactgggctgtaaagattcttccggccatcataggcaggaatagcaccacatagaacagcagagttgtcctctaccagtttctttttgatcattctggctatttccttggagggataaggagatatttcaacattgtagtggaaaatcctttgacaggaatcaaattggactagaaagtggtttgccaaaagggatataactgacccttctacaccaccagaatctggtctccttgctgctaccagggcttgacctggttttccacttgtgaacgtatgcttttggaacttccatacatcttcttgtttgagaggcaaactactttgcttttggagcccctctgagatgaacatataaagagcaaagtgagttacaacggttctacaccactactactgcatatatttagaaacatttaagccttaaacatcttggaatgagttttactctcattacagaaaactatatatttagaatatgaaccgatggataattataagagagag

SEQ ID NO: 46609 - DNA, 1836 bp, Cannabis sativa
cagaattgtactatatacaaataatttatataaatgaaatttctttcatggagctaggtatctcatgaaaatatataatatattcaacaatattttaaatttattttattttgagaaaaataggcaatatagtgaaccgtttttttctttttaattcttaattcaattaatgtttgtacgttaaaaaataggaaaaaaaaagacaagactatgtaattattaattaatataataccaatgatgaaataattacctgaattaagagcaagggataagaagaaattccaagagaatagtcgacagttggagtgagtctccggagttgtggggtaggagcaaaatcaccaaagtcatcgatcacagcggttgtctccgccgtgacaaagaggacaccttgttcgttgcagtcaatctcagtccgcggatgggggcctcggccacctccgtggacctggacgggccgtaagcgacccgctatagggtaaaaggggacaagaaccttactaagagagtgtttgagaatattagcatcaaaaaagttattgttattatttgatggtgatgatctgaagaagtagatgactggattatgacttggattgttcatctggtctaaaactgagagccaaagccgccggcgtggagtgttctccgatggcttcaccatactcctctctttttccttgattattatcatcatcgatcctttattatgttatctttactaataacctagctaatcaatcgtttgttctccttttcttgctcttttgcaatattaatatatagacatcgcatcattttgcaaatgtggttataattagcgatcaatagtgcgtgatatgacatctttaattgcatggtgtcaagttgtgcctattaacatttttctcaaatatttagaacaaaaatattaataaatgataccttgaattattattattgcatggtagggtcgtactagtgggaaaacatgttattgtgtcatatatattgccatgtgcatattttttactttatttttctttacgtgttgttctttcttatttgctaatgttgtattatgtccattagtactgtttaattaggtgatgaaattgatgccattatgagttagtcattatcagattctttgtagctgacatttatataataatgctgatcattttagtcatgaacacattcaactttagttttatccataatttcatgcttgccaataaaattcacctcaatatatatatatatagtgcaagttctatgatttgcttttaatttgtgaatgcagtcgatcaagtggatcaaccaataatgatatatagtggagtagttcatgatagtattgtgatttctaacttatgggtggcctgggacgatttttaattaatgtaatctatgtagcggatattatcattactagtatatgccgactcagatagaatgaaaagtggaaaatataaatattatactattgtctatgtcgaagcaaagaaagattaaaatcctacatattaagagtatctaatttatttttcttatctataacttttagatagatgttacctttaattattaacaatttagagattgatttttaattttctcttttattttacacacatttaaatttatttttttttgatgaataagaattttattgctccaaaaacacacatttaaattgtgttttatttagtatttaaacattaatttttaatttatttttaaattatcttaataacatattacagttaattatatcacttattaattattaataatatttttttcaattattaattataagtaaaaaataggggcttttttatttttaca

SEQ ID NO: 46610 - DNA, 1544 bp, Cannabis sativa
actatatcatggctgtgtgatgatgatgatgttttttttttttttaattattattattaaataattgagaattaggagtgaacaaaatgtagggtgactcattcaaattgaatttaactctgttgaattactatgtgaataggccattattaggttgcaagaccaacaatggttcaaatcgaatttgtaatgtatagtaattatatatatttttattttatagatagtatatagatataatcattttaataagtatacgtttaaatattatcaatatatatacaataagtaataatgttatcaataaagatataaaaaaaactgtttgaaatataaaaataaaaaaaaaaatccaaaaaaaaaaattatcactaatatcagaatataatcttttggcattacttttcgatgctattataaaacataaaagtttaaaactaacatatgtgcatactattattatgcatgtgtaaattatatttctatatatacatagttcgtataattagttattaccaaaatatgtttgtattattgttgattatgttgtaattaagttgcgttgaccaaacttcacacattgataaatcaaattaattttgttcgtacttattaattgatcattcacccaaactcaagttacatcttacatgttatacaagaaatattattcatatttataagccactaatggtcaattaataattaattattgatgatattgataaaagaaaaataataaaaaaaaattattcatattaaagaacatgaaatgtggccaccactgagaatataaaatgaaataataagaacaagttaatatataagaaggaatataatttgaaactattttatttatgttagttttaatatataccacgtttattaaaaaaaagaaaataaaaggctgtattgtcattttgtgaggtgttgactttgttaaaacgttgacttaataaataaatgatgattaatatgaggataagagtatattctaagatgcttttgtattatgctttacatcaaatactatatatatctattcacttttttctccttcaaaacatctctaagctaaatctcatactcctcctacaacttcatatatctccaatccaaattatatatacacagaggtcagtaacaaatatatatatatatataaattatttgtatctattatagattataactacttatacatatattttatttctacacataaattacttgttaaaagtcacatattattagttataaaaaaaagtgaattttaagaaattattgcttcaacattttgtgtgccaaaaaaaaattacatgcacgtagtctatctcactctttgaaatttcttatgcaacaaagtattttaaggaggtctaataagttctcttttaaatagttaccaagtaatattaaaaatttaactaaatatatctatatatatgtgagcattgctattggacactaatactgcttagcaccttcaataggtgtggctcctcacaactagttacgatattctttaaaagttatttttttaa

SEQ ID NO: 46611 - DNA, 2097 bp, Cannabis sativa
  modified_base (27)..(30): a, c, t, g, unknown or other
atacataattatctagttagggttttnnnnatccatttcttaattccgggtattacattttcaatatcttaaagttttcatcgatgagctttattattcttgagtttcaaccaacagcattttcctcttaatgattttgttactgaacttgctgtaaaatcttgcagaatgtagatttcgacgacgatgaagatgattttaacgtggaagatgatggtggaggtaatgagcattctttctaatgtctgcatctgttatgctaatgccatcaagattggaactttcgaaacattccacgttcttacattgattgatttcttttgttgcagatgatgatgtttactagtggctttcatcaggaatgtccttttgaatttctgatgatgtcttgaagcaataattatagagtagtacttagttgaagggtgaagggtttttctgttgattgcaagagctagctcgccgttttcttccagtgacttagttgtaggcgttttcttcgttgggttagaatctcattccactcatcttcaaatgcggctttgcttctaagttgtaaatacacttgattctccattttagagtcttattctaacagatgatgggaggaaaagtaatttaagcaatcaccattcttaattttgtagttcttttctttttagtttttaattaagatatggaagaattttacttgtgacctatacatttgagtatgaagttaccaatgagtagattgtatatatatatatccttttaacttttattatttgttttgacttttacttatatctagacttcatatatacactccaaacaaagcctattcttattttagatttatttatttgtaattaaggattaggaattagagttttaattcaatttttttctctctaaataaaatatttttaaagaagatatagaaaatgatggatattccatagtgtgatgttaaatggagaatgatggacttttatatattaaccattaaaattcaagttcatgatagggtataaaataataataaaaaaatagaagtgctaaaatatattattagtgcttagcactctcattgatattattaattaagtaatgggtttaagaaattaatttttagagagtattactaattaattatagtattacctatggaaggtgttggacactgtactcaatagcaatgcttaaaaaaaaattagtacttgtgaattggtggtaattgaataaagagaaatgttaaaatgtattagtagtgtctagcactttcttcgatgtcatatcgtgctattggtacaattaagtattgaatttgatataacttaaattaatttttaagaaatatcgttaaccaatcataaaacaatacttttagacaattactagctactactaatattcaataacaatatttttaaataaatgctaccatgttattgaattttttttttaataaattaaaatccaagtcattatttttccatgaaatataatttgtgattggagcgtggttttacaccaaacgtattggctatattaaatttccaatttaagtgttgcttaaactttaaactatacattaactaaaaaaatagaaatcacattggacattaactcaattaaacttattaagcttaagcgtcttacaaaaagatgagaaaattatcatactaaagtgattccatttaaggttttttttttattattattttactatttttaagatataaaataaataagaataattagttggttggcatctcgaattaaaacaaatcccaatacatgtggatgtggcagtttcatcactatcaactaactattagtctatacaaccaaaaatagaaataactaaacacaaaataaagccttagaagacatattctatctattctatcctcattattctcacaatgactcgctcaactataactaacaacccttttcaaccttaacttacccaaaagaaaagacaaaatagagacaccataccccaaaccaaaccaaactctaaaccaaattatgtccacttcatataactaaaaaccatcccaaaataagagcctctcattccaaattactttacacatggtcacactc

SEQ ID NO: 46612 - DNA, 2262 bp, Cannabis sativa
aaggcttgatatagatgcagtttggagaatgtagttttctctacttttctctgaaactattttgttctttattaacagttacttcaaacaaaaaaaaaatatgggtagacaacttcttgcaataacaggaccaagatctcacaagtagagaagagagatcgcatgctcgctagaaggctccaaaaagagaaagcaaattgaccatgtgacaatttctgaatcacaagttttcagtttttttaaattaaacggaataactgatattaaaagtgtaattttattatattattgtgtataataagtggacatttgagtttatatctattattactctcttgaaaaaaataatcattattatcttgaatggtagggggaaaacgtaagctagaggaacaaggcgaatttcggtttataatttttttttttttttttaaaggttcttttatggatgaaattatttttgtccactgttttgttataagagcaaaatgttcaaaaattttcttatagcataagagagtttgtgttgcgatattcggactccaaattatgtacgatggaaattacgacaacgggtcgaacaagccaatatatagatagaagctgtttcgtccatatttggaaaccacttcacaatcataagttttgaaattttattcttatctacatacgctaaaactttaaactatatacacatacatttttttgttttattttttaaattctacacttaaattaatcaatatctgaaaacttatggggtaagcttccttgttgcgtggcttcttcaagaagctcacctataatgtcggctggtgcccaaaaataatttatttagaaaaagagggctgctggtctgtgtgtgttcagagtcgtttttcttttttatcaatattcgtgcaattaaatatcagagttcatataatttaagaaatttattatatttcttttttaaatttacaatttaagttattttagtagtttttatgtgagttgctatgtgaatttcgattacgatttagattgctctgttaattattataagagtttctatgtaaaattgcgtaaaattataaaaaaaaaactgttttaaagtgtacaaataaaaaattcctattatttattataataatttttagaaattaattaattgtaaattgacacatttagatagtgttagacactaaaatcaggccaactccaatgagtattgcctatatagttgtaaaaaaaatgatgtgtcatatttagagtttgaaaatttataccgcaggaataggtaattgcggggacccgcttctaataggctggagattctttatcttggtagttaattcggtggtggcagggaacaatttcaatactcgaaacgggaatagggcaggggcggagataatactatccgcattacttctgaccccaatataaatatacatatatatgtatagtttcttttttattcttaacgtatacatagtatatatatatcattgacaataaaaattattttcattatcatccataatctaaatgatatatcatatgtttaaatcatgaaaatttaatgacgataatgaactgatgatcattgtgaattacaagtgtaaagatattttttttcttgatttttagtttcatctttgtttactttaatttttaattgttggaagatttaagaggtatgagactatgatactatactgggttatgttttttttatatattttttttcaaactttgagaaagatttatttattatcttttattattggattatattaattttttttttcaactttgaggtagatttgtcttttatcttttatatggattatgaacgtataataaatatttataaaaatatagatttaatttaaattattttaaattatttaaggtgacatttggtagcatttttgtttttaaatttttaaataaaaaaataaaagtaaaactttgtttttgataaattaaaatgtgttctataactacttttatttttcaattttaaaaataaaaaacaaaagtgtgttctgtaaattttatttttacttttatttgttaattttatttaattcgggtctgaggctgggtctgagatcgagatcgggggtgggtccaagtctgggagcaggtccacgttcagtttccaagtataagttggggtcagagtccaaaatattgattagaaaaatctgttttaaaaaaaatttgaaagtcaatttttttttttaaaaaaaaaatttagattcttaattaaaa

SEQ ID NO: 46613 - DNA, 1335 bp, Cannabis sativa
tgggactgtggtgttgcagaagatagctcttgatggtgtatatcagtcgaaggactactggtttgtgactcaaggttagggacattaacacaagacaggtcaggatctagattttgcttaaaaacatcagaatttggacaactaggtggctgtacagggagataaaaccatgactcaggagttgtgacagtaacctcagactctctttgatagttatttagaaaaccactcttaaagggaaactcattttcattaaagacaacatgcctagagatataaagtctaccatttgaacttaggcacttatatcccttatgagactcactatagccaaggttgacacatttggtagaatggaattggaacttgtgactttggtagggtctcaaacatggataacaggctgacccaaaaacctttaggaatgcataatctggttttttgttgaagagagtctcatagggtgattttcccttgagagtaggagtaggtagtctattaattaagtagactgaagtttggaatgcatcacaccagaattttaatggcatgtttgcttgagcaaggagtgttagtcccatttcaacaatgtgtcgatgctttcgttcagcacgaccattttgttcggatgtgtgaggacatgagtggttgaagagaataccattttcagcaacaagattgccaaaggactgatattctccccccccaatccgtgtgtagttcctttattttcttgtcaaattgattttcaaccatagctttaaagtgaatgaaggcacctaaggcatccgatttggctttgagggggtagagccaagtataacgactaaagtcatcaacaaaatggatatagtatcttaaattggtgttagacataatgggagcgggtccccaaaggtccgtgtgaatcaaatcaagaacactagcagctctacttgttgagtttttaaaaggtaatgcatgagatttcccaaattgacatgcctcacaaaagctaggattttcattaataggaacttttacattggacaagcttagaacttgatttaacactttggatgagggatgacctaacttcctatgccacacatcctttttagacacactactttgactacttgaagcaacagactgcttgttagactcgactaaaccagaaaataaaaaaccagcagactcgaaattggataactgaggtgtagatgactcaatggacttgactgtagatccctccaaatgatatagaccatctttaagtttcccccgcagcaccaccgtctttgttgccatgtccttcacaaaacacacatcagaaaagaattcaacaaacacttt

SEQ ID NO: 46614 - DNA, 1860 bp, Cannabis sativa
ttggactctctctctctctctctcaactgaatctaaagtatgagctttggagattaaagatcagaactctcaactcagacctctaaaataacccttgtatatagttgctggtgggtcccctttaagttggtattaaagccaagtgttataattgcagtagctttcttcagattcatctcattagcaaatagatggacatagtgacttgagaggttaagtgagtttaatcccaacactctttatataaaaagtaggtgatcctttgagtaacataactaatcagataggaccattacaactttaattatatttaattaatatgaaaacgtttacaaaataaataaaagaacaatttcgatcgttctcagttaatactcaaatgtatgtgaatttggaagttacatattgactattcactttcttgagtaacatataaacttctggattatatgttgtgacttcttaattttttttatttctttacttagtggtacatgggtactcacgatatgtatttagtttaattttacttgagcaaagacaattgacacttcaacaattcaaataggttgatagtcttttggaaaactattagttgatgtgaagttgacaccagtggaaaaaaagacttggttggtgagattgatacttcaataatccggtgaggttgatagtccttggaagaaaactattgtgagaggtttggagaaaactttggtaaaaaattccccagttgtaggggttagtcaagcctgttaacttggccgacagttgaactcaaagctaggtccatagctttaacgaccaaggatgtaggtggctttgttctaccaaaccttgtaaaaatcgagagtttataatttctatcactaacttctttacatttcaagtttgctatttgtttatacttgtgtttatcgatgtgatagcattaaatttgaatatttgtatatattgtctttggggtttttaaatttttaatattagtttaaatttccaattccctctccctcctcttggaagtatatcttgggctaacacgaagcaagtcccatgcttttcttcgaaggctacggttcggttcgccatatacccaaataagacgaaacgaaggatacccattaagagaaacacacactccatgtaatttttagaaaagatatttatttttacctcatcattatttttccataagataccaccacttctatcttaagcctcaacaacaaagcaaccctcaaacccaatttgtcttctcaaccacacaactctttctttatcgtttaacataaaaatatcatcatgggcttattttacaatacaagttcttttaggaactgtatagtccgtggaggctcaagcacatgatagttccagcttaagatgctcataacgactggcgagccccttctccaaggcttgccattggtaagttttttgaaagtccatctttcccctcaccttactttgaaggcccctttgaggaactctattgtaaactattcaaatattttttaaaatttacaagttagacattgtaactataatgaatatcacaataaaaaaataagttaattaggattttcgccctcccttcccacaaactttgatatgtactaaattatatctcataaacttttcagactgtcaataattctccacaaactattaagatatttggattcaagcaatgacgggcccaagattaaaaatgagggaggcataattttttttataaggcaagggaaaaaataaagggaaatttacaaaaatactggaatttaagttaacttttacaaaaatactgtcacacggaaatctattcaaaaatactgtgtttttataaaacaccagtaaaac

SEQ ID NO: 46615 - DNA, 1086 bp, Cannabis sativa
aggcactgaagaaaccataatttgaagctaatttgttgtaaatttcttacttaccatccttcaatgaagcctctatcccctttcttttttgtacgagtacaacacttagtcttcacatgatctgttttgtcattaatataaaccaacttagtcaaaacaataaagattttctaaactaataaaagagccaaaaacaataatgaaaacctgaattagggtgtgatttcttctcatctaaatcatgtggcactgacttttgttctccattcatagccattttggggtttagaaaactatattacaaatttatttcactcaatttttctttgtgtctaagtttatttatatagtgatacaaataaatggaataaattaatgacctttctttttatcttctccatttgtctaagaataagaatctgagtttgaaaatctaagacaccttttttagctagcttgcatttacatgagaaaattcttgatttagctttagatagagaattattatatgttgaagaatattattattattatatgagttggaaaagagttctttcttgtgtgctaagaaaaaaaatgagtatgagattgtgaaagaaagaaagaaagaagaatgtaatttgtcaaaaagttttgagtgtgaaatttcatccatctttgtagaagaatatatactttgtttcctttgtggaaaagtatatcttttttattagtagacaaaatccttgggaatatataggtagtatttggataattcttgaatttaaattcaatttaataaaatttttctccattaaaataaaatggagggaaatttttaaaaatatccttattttatatttaatttataattttacggtttaaaaattttaattacaaaaatacacttataaagttttaaaattataaaaatatattttgttcagccagagtgccctaaaatttttactgaaagatatttttatttacgaataaaaaaataaaaaataaaaataaatttttttctgtaatgtatttttgtatttttttttttcaatttttactatatcatataaatttttctaaaatgaaagcctaagtggtttt

SEQ ID NO: 46616 - DNA, 2244 bp, Cannabis sativa
aatccaaatcagtcacataaaaaagtttcttcaatagtgatatattccagctttgtcgattttcctcaaataagtttttaaccatccaagtataatctgtaacgacatttgaagacagtcgaaatgaaaataaacgaggcctttttcaagtaagaaccatcttcatataatacttcttcaaagataaccaagcttggtgatcgaccaactagaaaaaaattgaatcacttgaccatcaaaatgaaatattaattaaatcacaatagtaaaactaaaccttacaaacacaacctctatagacaataactcaaatcttatgattaagacatccttacgaaaaaaatgtgatataggaagacacaaagtatcaaatcaaatgtaaaagagaaattaaaagatttgaaataaaaatataaaatcaactagaaatagaaagtacaagaaaaacaaaatgaaaatagcccaagattttattgaatttaaacacatccgaatcaaacaataacaaaataatcaacattaattggtgatgtaaatagttaaaaatacttatacaaaatttgttggaaattttctagctacaagaggaaataagagaattacaataaaaatacttaaatacaaataaaagtattacattaagatcataaaaaaactagataagaagaaaaagaataacacacaacaggcttggttaaagctcgaagacctttgtactaaaagtcatttcttccctcacatagacacttaaaaaaaattttaaaaatatttttaaagattttcaagcctcatatgctcatccttgtgtctagaatgaacatatcctcacaatgttttgttataattttataaaatataatatttaaattaaatactataagtaataaataaattagtgtagcaaataaaatttgtcaaactataaaatataaatataaattacatatgtgtgaattatgatccaaaaggagttctacattttttatatttatgattataaaatttgtaactcatctccctaatcatctttctttaattactaaattgagttacaagtggtatttgaatatggtaattatagaaatatagttattggaggcttatttctattatttataggatgtataaatgctataatgacaatgtggaaagttttgaatcgtttggagttattttaaaaaaatgttgataaaattattaattggttacttgttaccatattttgaaattttgcaccacatgtgacatgttgcctagggagaggcgacatatcgcttgaccatttttagcatgtattttttttaacgttttatgaacgttgtgctcgattctaacaattctcataatcccctgttgatttcgaaatctagattagacctctaagtcacactcgctcgctagattgacgagaatatgaaaagtagttaagtaattacagagacacaactaatttatagtacttcacccatatattgtaataatagtgagattacgtctatttcgagtttttatttctcacgagatggtaattaaagcaatagactaagtatcagaaactccaaactctagagagcaaaagtctagtgagagaagctctaaccttgtgggtagttttctgaatgtgaaaaatgagctaagatagctctccttttatgggtgaagaaggcccacaaaatagaaaaaaatatataaataagttattttccaccgttgatgatgatctaacggtgaaattagcttctggtggtgatggccaaattttggtgcacgacaagtcccgttgcgggttacctggagcttatttttcgtaattcccttggggtgaattttgacaatgatagctttcgtattacgtctggggtgtcacacatgacttgatagagaatttaaatagcttcaaagcgcaagctgaatcgcatctatcaaataaaaatttagtgagttatgattgttttactgaaggaagtttatgtctgagcgcccagattgacatccaacgctcaggttgacatcccaacgcccaagttgacatcccagcgcctaagttgacatttgacgtcaacttggatgctgggtaagtgtagaaacatccaagggatgtcctctaatattcctaagtgatagtttgacaccacttagtctatttatatgttttattgaagttggtcaccagttctcgaagatgttgctattttgtaaaaatgagagactgaaaactcgtcatttctgggtgtgttggaaatg

SEQ ID NO: 46617 - DNA, 1187 bp, Cannabis sativa
  modified_base (1127)..(1139): a, c, t, g, unknown or other
tatattattttatattatttcataacaattaataatatatataaaatcttaattatatacaagcaatacattttatatcttaatattttataatttaaaatcaatgatcaaaaaactttctcattccatagaaaatttatactaaatcctaaaaaatcccaacaccaatatatattcaattatatacaagaaattcatggtagaaagaggtatacaaatataatataagagcctgacctacttgaaaataaagttcaatatccaccatatatattatatttgatccttattctaaaactaatactgtcggcagctttttagcatgctggttagaggtaaagtggaacataataattaaaatttaaacatatagacacaagaataataactatatactttcttcactctcatttgtttttgttttttataataggggaaaaaataaacagaaaaagaaaatgaagaaaagctttgaagggtacgttgtccaaagagtattcatatggaataatggaatggtaactttcttttctcttttttattttattctgtttagcttttctatttctttataaagtcaacaattaatatggtcaaagtcaaacccattatcatttacaaacaaaccatccagcacaaagtgaagtgaactaataagtagaaaatactgaatgaaataagatgatgaaataattaggtgaagttttattattattattattactagtatgctcttttttatttgagcattataattagacactaaaagtttttttatatgccgtataaaagtcgtattgtattaaataataaataatagtatatttagattaaagaatgtattgtattagattgtattataatatttacaagggtttggggtcaacaccaatctccgacccgaactcagcctcgagacccagactcgaacccgaatccaaaatcgggacccgaacccggacccggacccaggacccagatctggacccgaactcagaccctagacccgagaccgggacccaaacctagacccaggactcgggacccggacccagaccgagactcgggacccggacccagagtcgtagttggtattggggttgagtgtattgaaaatatattataannnnnnnnnnnnnattaatacaagtcaataccaaatgtagtattgtattaaataatactaa

SEQ ID NO: 46618 - DNA, 2025 bp, Cannabis sativa
agttaccctaagggtacatgattatccttacctaattttctcatatttttcaaaaaatttcgataaaataatttttttttttctaaaaaaaaaccatgtttttgcaaataaagtataaaaactcataaaatttataattttttatactttattctatttatacatatattttcaagatacagagtgttgttgtcacgttgttgatacagagacacaacatgaaatttgaaaacaccacactttatttaaaaacaaaataaaaatgaaaaacttataaaaaaattcgtaaaaatataaaataaatccaatttaattactgcattgtgtaaattttctttttacacaatgtaatgtaaattaagtttaattaattaatagagaaagaaagctcaccaagcgaggattcttcggtttgacataagatggttgcattagaactttgaagaaaggtttgttcacaaaccctttagctttatccaaagcttcaaacttttccattgatttaattctatcaagtgttctactttttctttctccttttaaataaaataggaaaataaatacacaaattagcactaaaaatccctaaaaaaacaagagaaaattaatttacatattttcctaaccttgctttgatgattggcctttttctttggacattgtttggtggattggtggtggtttagggtaatcaatctccatagttgtgtaattaaatattgaagcttcaaatgtagaattacccaaatatttaaaaaatattagatagccatacaatatattatagtgcttaaaaaattcaggccatccctcttgtagataaagttgcccatcaatacaagccaaccctattttccattttgaaccacatggaatatttactaatatttcttttgataattcttcgccatgaattctctgaaacttaactggaatatgctgcaatgtacgtatatataacaaggaaaaatactaagattctcattaatttatgtaagagtacgtaacatattaacagaaaacaatatcaaacaatttaaccgttagaaacttgttaagttagttacatttgtgttatgagagttagagtgcacctagctagggttagttagtttctatttaaggaatattggtaatcactttagtaaatgttgttcaaaataataagatcgaacataagagagggaagtgtgaatgcgagagttcaaattttctgatcgaagttcaagattagtgttctcagaagaaaagctcgagctgagttttcgagaggttttgttagtaaataatcctcttttgagaaatgacaaatctcccaaaataaactaaagtttcatttctcatttcatatccattaatttataaacaattatatatttatttagaggctacctctatacatgttactaacaatttactaagctcctatgctatattttcatactacataatttcaagcaatgtaaccaatgattagtggaataattcaaattggggaagtaattggaagtaggttctttgtttgaccgatcaacctaggataaaaccttgtctcttttattttcaagttttgaacttaattttttttttttttgatttgcttgattatttctcatataagtttgtgctatcaaaataatatttttcaaacagaaaaaaatagaaaacttactatcatatatatattttgtttaatatgttaacatttagtttttaactctaaataagtggtatatatattatgagataattaaccaactaagctagctaacaataacatagattaagtactactaaattaataagcattgctttgatctaacactaattaagaaattaacacacattaatatatttatgtaattagaaaaaagaaaaaacttaccatcatattttgttcaatagttttttcagtgataattttgaaaaatttagtacttgccatggattctttaaacaactgcagaagaaataatcaaaaacaaacataatcaacattgcaaaataatactgaaaagtctcaaa

SEQ ID NO: 46619 - DNA, 2372 bp, Cannabis sativa
aatatatttaacagtgcctatacataaatcgatctattgtgtataacatttgttactttactttcttattataaccttatatttaagatttttcttaaagaagacggtagggaattttgcaaattataataattattataatcaaataattaaaatatagagtgaccagtatgcatatatatatatatatatatttgaaaacaaacaactttattcacaaagccaaagattacaaagaattagagaggtcagctttaccaatagcagccaaccactcgggtaaaaaatgagaaaagacttgagtaattttattctcaagacttttcttagcaagcctatgggctaattcattattctttctcttaacaaaaataagctttgtacagtggggaaaaatttggtgcctctttatcttgtttataacaatgctaacatcacttaaagtgctgtcgttatccttgaagctctccaccagcatcttacaatctgttcttatttcaaagggctcgttctcacctattggggacgccttcaaagcagcaacaattgcttcacttctgccagaaccgcctggcagatcacagggagaaaaatcatcccagccgagagagtagtgccagtccaatctctccaaacggaccccagaccaacgccctcctgacctggaatgacagcagcatcgcagtgaacacaaacagtaccttcgggaggagtcaaccacgtaccatcgtgggtgatctgcagagtgatattatccccttgcttctgagtagtaattggaggtgaatagctattgaaaacccagtcgattagccttgctccattcatgacctgcttcttattccattttctatctcggttcttccaaatggcccaaggaatcgtaattacctcctcaaactctgctttggacaacttgttcttgaattccacaagcatatcgaacatggactgtcctttgctgtctctgatatgtttgtagaaaggcagcagcttccacacctgtttcgccttagcacaagaccacaaagcatgagtaagtgattctgcatacctaccacatatatcacaagtagggtcaatcttcattcccctatgaatcaaagtaagtttagctgggagcccattattgcaaagcttccaaccaaacaacttgattcgagggggaaggttaagtcgccaccatcttttccaccactcatttatttgatccatgttcgaacagcgggtaggactaaggtgtaattctcgagctaccctatatccacatttaaccacatactccccattggatgtgaaaggccatacgagtgagtcctccatatatatgttcacgggggtgcccaaaatccaagggacatcctcttgatgaaaataggtatggatagcctctttagtccattctccatcttcatttaaaagcttgtgaattgtagaattaggagcaagcctcgggttacgatatgaaattgttccattatgccaagggatccatttatcttcccaaatgcgagtatttcgaccattaccaattctccaacgtgccccctcttgaattatttgtcttccccaaactattcctttccatatgctagaagctccttgagggcatttggccgtgaggaagtttggctccgggtagtagtaactctttagcaccttagttaataaagtatgcggtttatgtattagacgccacccttgtttggctagcaaggcttggttgaactccatcaaactttggaatcctaacccctcttctttcggtctacacagtttatcccaagtactccaatgtatctttttattttcttttgtatcgccccaccaaaaattggccgctaaggaatggagactcttaaccaatttttttggaagcggaaacaactcatgaagtagcttgggatagcttgaattaccgctttaatgaggatttcttttccggcttgggagaacattgttgctttccaacttttgagtttatcccacactttgtctttaatcacctcgaacacctctttctttcttctacaaatgaaactaggcagccccaagtattttgtatgatgaggaactagttttactcccaaccgagaagcaaggtgttgacccatttgtgtagatatccggcttcccatacttacttccgattttgctaggttcacttgttgccccgagagtctagagtaacagtttaggatttgtagcaaggtatcacactcttcttctctcccatccaaaaatacgaaactatcatccgcgaagaagagatgagacacttggaccccttctttgccaaatctaatgcctcgaatttttccagccctctcctccgcttggataagacatgaaagtccttccgaacaaataag

SEQ ID NO: 46620 - DNA, 1607 bp, Cannabis sativa
tcgtaactttccaggttgactcaatcatgaacgcaagtgggaatgtattcttttattttccttaatttatgatgaattcggaatattgccatctcagtttgtttgtctgtgctttttttttttttatacatatatattttttgaataacatatattttattttttaagttattgatctttgtgtatatttattaaaatatctaatatgaacaccattttaatccttttgtcaaaaaaaaaaaaacagaaactttgtacattttgcaatggtagagcaaatttatatactattactgtagagaaataggaaagaaaaataaaaatatcatctaccaaatcataaaattgagtgaatatttagtaaatgatataaaattaatggcatttgcaacaataataatggaatcggtttcaataaagttgctctcttgagtaattacccaatagaggctgtgccatagagccactgtttccatttccgaggaagcatagcaacctttgattggcttaaaaaaagctgctacaacattaccaaattagtcacgaactatggctcatattccaataatgaaactgttatccaaggcagcatcaatattcatttttaaagctcctccattagggagaatccacttgacagtggagcttctaacaacaggagtctggtatgatcgatcaggcccttggactgttgttcctttgctaatatttgtcaattgaggaacttgacgaaattgtgcaatgtatttgtgagcaaaggtgcaaatgaggggagcaggtttgggttgtgatccatgcatggacttctttgttgcattcaaaccatatgtaccacattaaacaaataatttttgctagatcctcatttgcaaaagtataaagcaacataatgaacaatcaacagaggtaagaactttcctgtgagttaagttcacccatgttgagattgcattttgaattactctccaaaaaaaattatgactttttgtggtaagtgtaaataccaaaatctattttaccattgacattcggaatgagaggaagaagtacgtattatctaagtactttcagccacatgatatactgattgtatagtataagtttcggaatcggtataattccataaaaggacaccatctctcggagttgggctcaaagaaatagcaagtattaccaaaatgttgttgcaaagtattcagatcttattttcagtcatgtgtgatgtaatgtgacactgtaaaatctggatctccacaataagcaaaagatgtaaagaaagggggaattcgattctcatatttaagttataattatttattttttttacatattttttagatgagaagttcatactttaaacaaatttttgttttttaattagaaaggtaaaaatatttttaaaataagggtaaataacggcataagtacccaaagttttaagtttgtaagatgcataaacccaatatttatttttagcggcataagtacctaaaacaataatttttttctatttttgtcagtacaaactccgttttgaatttattaaaggaacatttagaagtaattgatactacatgtttctatatagacccaatgatcaagaatct

SEQ ID NO: 46621 - DNA, 1943 bp, Cannabis sativa
attcatatttctaatctctcatacgtatttgaacaactttatttgatttcttttaattttctgtcaattactattatttccttccaagattattttgattaactaaatagaaatataaatctagtttaatagtattcaatttcaattctctgtagttcgacctcaattgtgtgagtctgctcgatacgttcatttacgtaagctttacaattttgcataatatcggtagagaatttggaattcgaagtcatgctttagaatttggaacttctacttgattcagaaaattgattaaagctaagaatcacaacacctaacaaattttcctttaaattctataggtaaataaaagtaatttatcataattaagaatcatttatgcttttagattgatcaataagcatgattaaattacttacaagattgtgggcttattttttatcaatgactctatataatttattttttaaacatagttctacaccctctaatgtaatggatattgagaacaaaaatataagattattactaagtgccttcaatttatttatttattgttgaacctaatatctcaaatagtttgatttgtgtatgttgataaacatctttttttttggtccatttgtttgcctttttcactttggaaaataattttccatttgtgaaaaagttaataaatatctatgtattgaataagtgaaaaaattatattagtcttgataattttaaatttgatgtgtactataatttttttttttggatgaaagtactataaattttttccattaatatttgaatatccttgaattgaaggcaactttcatctcatgtattttggtgtttattatatatatgccaatctataatcacatgatttgtctcccacactaattattaagacctaactattttcacacccctcacctacattatgtgacaattaccaaaaaaaaaaatgtatattttagttactaaaaatttaaaaatatattattattaaaaaatttatgtctaaaaacattattcttaaaataaattaaagtgattatttatagtcacaacttgaaatgaaactatatatttgtatctaaatattattttttaacaattactaatacatttgttgtaattaaaaaagtatatttattaaaaaaaaatcaatattatgatcgaacaattatcactaaaataatcgttttattagtaaatattagttaattgattatttctattattatttgaaaatatatgtttattaattaattgatttattattattactattattatttattacatcatcagggccgactcccacattattggctttgagattattattctgatctcattaaccaaagtaattgagtttaatttcaaaagctatacttgatgatgatttgatatggaattaaaatacaaatatatattagttagtctctaatatatttatatagatagatattattagctaggctaattaattaatataaataggtatattttcttatgaataattgatggtgattttgaccctctagtttttagaatgacgtgtcaatggtgtttcttttcttgacttgtatattttttctcattgattatatatataagaattgacatgttaatttgtttctttatatacataggttgaaaataataagaatcaaacaagtgaaaaactatacaacaataattatcgaaatgagaatttctcgaattgatcagacaccaatttctatatgacattaacaaggaaacaattatattatatatcttgaaaaaattctgaaaaaataaattaataaaataatctcacctcaaaataataaactataaaacaaagtacacaaaaaataatatgtattacacataattatttttactataatttttgatccaacgctgaatctcgtattttaaaaaattaaatttagattttt

SEQ ID NO: 46622 - DNA, 3895 bp, Cannabis sativa
  modified_base (3743)..(3752): a, c, t, g, unknown or other
tttattttttcatttggatcattttgggattgaaaacacgaaatttttttatcggaattgtttttttacgattgggttttgtcgggttctcatgaccctcgcgcaagaaaacgggaaaaattggctcggtttgttggagaagatgacgcaaaataatacgtcgttttccctttgttctgtccaaacgacttgtcgttttaaggaagtgtttttttttttaaaagtaaaaatgacacgtcattttccttacattaagaaaaacgacatgtcattttctgaaggcagattttccaaaaaaaaaaaggaaaattttaaaaaaaaaattaaggaaattctgaaattttttttattttggaattttattttatttccttatttttatgttaatttagtcaattaaattatattatttaaattttctatttttatttaacatatattttcatatatgttatttagtaagaaataattatgaaatttttttaatttggtaaattaattacatgttttatttttacatgtaattataataatttcgatattttaagaatgtgaatatttgaataatggtggaaagtgcatggagacagcaggtgaatggcacaaggatgtatcaagtggtgaaaaaattgaagaatctcaagagtgtttttaaggagattaataaggaaggtttctcggatatccaaaatgctaatcatttagctaggcagcagctagatgatagtcaaacaaagctacaccaagaccctcttaattctgagttacaagctcttgaattggaagcaagaaagaaatttacagatgtgaacaaagcctactgctcattcttacaacagaaagctaaagtgacttggttaaatgaaggagatgcaaacactagcttgtttcaccagtctttgaagcaaaggagaagccaaaatcgtgtcttctccattgtgaataaagagggtgaaagagttgataaccctgaggaagtaactaaagccttcatctccttctatgaacaattgctgggctctaaactagaaaaccggaagctggtgaatcagaagatagtgcagcaaggtccaatgcttaccagtgaacacattcagctactcgaaaaagactatacaaaagaggaagtcaaagcaacatcgtttagtattccgagtataaaagcccctaaaccggatggttatggaagcactttttatcaagagatttgggagttgtttggtgatgatatagctgaagcagttttatctttcctacactctggagcaatcctgaaggagatcaattctactgtgctcacccttataccaaaagtgaaatgcccaaacaatgtaagtgattatcgacccatagcttgttgcaatgttatttataagattgcaactaagatggtatgcacaagattgaaaggaatcctccctgagattgtctcacataattaagggggattcataaaaggtcgatatattgctcacaatataatgatatgtcaagatttaatcaggcattatggaaggaaaagttctaaaccttgttgcatgattaagctagacttacaaaaggcttatgacacaatggagtggggttttttggaggaaatgttgctggccctgaactttcctgttaaattcattaaactcataatgaaatgtgtaaccacacctaggttctccttgctctttaacggctctttccatggattctttgaacccaaaagggggcttaggcaaggggatccaatgtcccctctattatttgtcttgggaatggcgtatttaagcaggattatgcaaaaagtgggaggaaaaaaggaatttggctatcatgacaggtgtagagacattaaactaaatcatctcagttttgcagatgatgttctaatgttctgcaatagcgattttaaaagtatatatctcatgttgcaaggactgaagaccttctcacttacttcagggctattcccaaacattcataaaactgttgtgtattgttgtggtatgcaggaagaagaaattcacagggtgctaaatatgtttgggttcagtagacgaaatgtacctttcagataccttggggtacccatacgtgccaagagaatctcagcagaagaatgtaatgacttagtgcagaaaatgatagtaaagatcaaagtatggagttccaggaatatttcttttgcgggtagagcgattctcatctatcatatgttgctcacaattcacacatattggtgtcaacttctcattcttcctaaaagaatcattgctgaacttgaaaaaatttgcaggaattttctatggaaccaaggagtggcggatagagctggcaatgtagcttgtgattctttatgcaagtccaaattagttggtggactaggcttcaaaaacacacccatatggaatgaagcagcccttatcaagcatgtatggtcaattgctacaaaaaaaaaagacaatctatcgattaaatgggtacacagtgtttacatcaagcaaggggattggtgggagtacaaagctcccccaaccagcagctggtattggaaaaagattgtacaagcaagggatagagtgaaaagcatcatgagcctaaccaacttcacagctgagaaatattcaatttcaggtggatacaaattgctgcaaccggtttcagagacgaagaagtggagtaaactagtgtggtgcagaacaaatgttcctaaacacagctttattctgtggttagcattccaggacagattaaaaaccaaagaaagtttgtacaggcacaatattattgataatgcagcttgtctactctgtttgcaagctgatgaaacagtcaaacatctgttcttttcgtgttctttgtcacaggatctactagatcacgtgaaggcatggctctgctggaacatcaataactctggtggaaatatcaaagaaaatcgagaaagggagacactcgaaaaccataaaacaggtgctttgttcagcagtagcagcgttggtatatactctatggattactcgaaatgaaagattgtggaatggaaatcagcaaacgatctctaatctgatgcaacagatcaaattaatggtaaagaatagagtgtgtagagtttgtccaaaaaaagctacagcaaaagataaacgttggatagaaaattgtaaaaagaaggtttgtgtaacaattttagacatacacggctaaatatattgtacagtagtatatatggaggcctctttggtgctcttaggatgtatttatttgttttggagcaatggaaattctgatttatcaaaaaaatatttgaatattctacaattaagtgggtaattattatatttatttatcaattaagtaatttattgattgaattaattgataatctatcattaagtatgcgttttcttggattttgcaattaattcattttcaattaatttaattgtactaatttgtatatttaccttatttatacaaatatattatgagtataaatatttaagatattatatgtttataaatgcttaattaattacatattttggaatttggatttaactaattatcatacaataattgtatcaatttatatttatttggcaaatttattttttaatacaattaatttagattcgtatgatttaaatgctatacataatttctttttatagtgctcgatatatttaaaaatattcaaacaataagataggttgaatattttatttaacacattaagtttcataaaacttcannnnnnnnnncataaaatattcataaaacattcctaaaatgaataaaatataaataaaacttaagtaattgtgtggtttgccataagaaaacatgaaactggaacaaatgctcatatctagaactgtttttaacgatcttcgaacgaccacag

SEQ ID NO: 46623 - DNA, 3017 bp, Cannabis sativa
atcttaattcttttactatttccattaatttctttctgttcattcattgttcttcattattattgctgctattaaatatctgaattagattctataaaaatataaaaaaatctttcaatataaaaatatattttatttttaaaaaatagtgctttatgtatttttcattattaaatgggtttttttatgatagatgaacatatagagagaaatagagaaatgaaattagagatagttaaattcttaccaatagaatctcattactacgggcaacaaatatttcacaaaatttgtatatgaagtcttccggtgcactaatagtataaggtgatgagggttgtaacttccaaatccatgaccaaaagtgagctaaatatacattatctatttttataccatttctcaaaaacataatagaaaaaactacttttaataccaaatttggccaaagtttacaatatgctctgaatttttatagcttctttagttacacttgcacctttggccaaacaatattgtttttactacacttgaacaagccaagccaaacgaaagctggtcaaccggaacactaacaagtagagtcagtagttaaatccctggttttgaagtctttattgccagggaaagaacacaaatgtatataactatcagtcaattcaacaaattggaacaaaaaagatgagagttacatagcttcttcatggttgcacagcctccaaaagcttctcgtacacttgtcttgcagataaatcctcaacctgaagtaataatatgatttgttgtatggaaacgatgagtaactagttatatgctatatgggccaaaatttagtaaataatattgttctactcaccacaagtagttttgatttgttattccatcctctttgaagagtcatctggctcaatctcagacccaacacctgtatgaaaccaaataaagtgagggtaaattttgaacgagaaagagagagtaggactaggagggagcaagagatgaactggtatcggaagtatacttttcccataaactccaaaagttcattattagcttctccacgagctgcaggagcggcaacggtaactcgaacatcgtcagcattcaccccttttaataaaaagaaagaaaagttagaacaatgtatcatccaagttgtaaatatagatgtttgttcatctttcgttgagtaaggagtgtaagaaactagatcaacaaggttattagaaaataacatgcagtcaaggacacagacatcagaagagagactcttcggtttatacattacagaagactgaatctaagtgtagaacaaacaaaccaatggatgtagtgttttatgataaggtatgaatcaccatgttattttagcagagagcgcccatgcccacagatcagcaccagcaagagcagtatagcatcaataaacactggcggcaagagactatgttcatgggatttataccatgagagcaatatttgcttcatgagactgttacatgttaatcattgcatgttgaacataaactcctgtagggagtatctataataaggagacgaataagacgcaaggcaagcaatataaaggaattaactactacttttcatctcaagcttttgtgagccaggcttcttcataatttccaagtatacaaacacaaacttctaatttacaatatcatatgcttaaaccttcttggaaaatataacaactgattttctgtgagcattagaaagtgtgatagttgccaaaataatcaaagccagggtaaaactcaaaatgctatctataaagactgcagaagcactgaatacataatagttttgaaagtgtacagagactttattaaagatggatgtgagaataattccctacttgttattgcagagcgttgtgcgcgatcttccacttctatagccacttgaactagtcctccttccaattgcgatatgcaagggggcacaggagcatcctaaaatgcatatcaacaaaccaaatcttagtctcatggaaatttgctaccttaaaaatgaatccaaatgcaaatgttatacgaaaagaattttctccttcagaaatcaacatttccatcccaaaaatcaaaatgatgaaaagataaagagttttagaatatcattctcctcgacgattatgaggcaatctaaagtactacgagtaagaatcaatatattctctgaaaaaacaatcttaattatggctccttgacaatcaaatttacagaaaatcgttacaaaattacaaaatctatactacctgtgggttggtttcagcagcaactgtactaacagcaccatcaacaacatagataaaggaagtagattccaaatcctcctcagtgcgatagcagacaaagagctcacaacctaggcagttcattcggaactgcttctccaccatcccttcacccctggttaagaaagatcaaaacagtgacataagattcacacaacagtgatatattaagttccaaataaacacataactctatatagtaatcctaaaatttctgacaataaatatacacaatgaagacaaatttaccgcttaagaagaacctttccaccctcactaatgtttaaccttgcaagatgtttcttcttgtctaatacatgagctttatcagtctttctttttggcattttctgcaactgggtatcttacaagaagaacatttcagaactcaaaacagcaacaatcaactcaaattgaaagaaaaagaaaaaaacatagtttgcataagataaataaccaatctcaaatgggtctattaacaaaatttcaatccttcaattgggtttaggtggtttcaaaactgagaaaaacaagttcatacagcttaacaaggaacaatgatttgtagttaatcgaattaagcatacatactactaacaaagatacaaaggtacctttttcctaagctaaattgaaatatatatatatatatatatatacacacatagttttttatagataaaagaaggaatgaataccagta

SEQ ID NO: 46624 - DNA, 3792 bp, Cannabis sativa
agaacctagtttaaaatttcaagagctcaacatcaatggcttcgactagatttaaggttgacatgtttactgggatgaatgacttcgatttatgtaggatcaagatgaaggctatcctagttcatcaatgcatttttgaagaacttgatgccactactctcaaagagcttgaagataagaggaaaattcatgaaattgaatcagaggctcataatgcaatcttgttgagtctcagtgataaagttctttgagaagtatcagatgaaagtacgattggggtctctagagaaagctttcagccattttcatgaagaagtctttgaccaatacactctacctgaagaaaaagctctacgcgatgagaatggatgattccaaagagcttaggaagcacttgggcgaattcaataaaattgttcttgatctaaaaaatataggggtaaaggtagatgttaacttggaaactttctatggtgacgtggacatcaatatttgacatgtggcatgaaggatgacgttacagagttgagtagacccaagtcatagcagttggcctgcgaggggaccctagtccagtgcccaggttgatttcgagatctctcaaatggaagtttaaactttaataacttgaatctaacccactatatttcagtattctaaaccattaaaacatggagcaactaatccaagccccgagagctaaaattacacgaacttgcagcctagaagccaacatgggcacctaggtttcacctagtgcctaggttgacattcccaactacggtttcaatttttgggtctgtcttagtagaaatgggtcaaaacttgcattaggacatcaactaaacataccacatacatatttgaggtattagaattagaatcagaacaagttcatttttgagcacctagggccctgagcacacaacgcctaggttgaaaatctatcaatctaggtgccttttaagtatcagatcaaagatttgactttgaatcttctttgtattcatcaaacatggggaaataggtcctttcatggaaaaatagtactttctaggtgccaaaagcaaggcccaacacccaagttgacacctagggctgtccctacactcaggctgatattttgtcaacctggcccatcttcaatggagtttttcaagaacacttcaagtgtcttctttgttttaagaaaatattaagattcaactattcttggggaccaaatataattttcagagggccagaactgggacccagcgcacaggtcgacacttggagataggcccagcgtttaggttgacatattgtcaacctgggttgtttctgatcaagttcaccaaaaattgttttggatatttttttcgtcataaaaaataatgaagattcaagcaaactcggggagaaaaccacaaaattgagcccttggaaacgaggcccagtgcctagtttgacttggtgttaggcctagcacccaggttaacaatcaacctggggcactgcgttcaattgctcaaatgtcaaatctgatgtgaccattaaatctgtaatgatcaaaaatagggtaggagaccttgtcctcaagtccaaaaaccttagaagtatcaaaatgagatcctaggagcacgggaatagggtacccagcgcccagattgacaaatggcctggtgcagtaggttctgcttatccgattctaattttgcttcgaccgtccatctagttgtttacaataactaaaatatatgaagttagagaagttaaattcacaactttgcatttctcattttggacatggggaactcactaaaaaatgagttttgagtctctcatttctgtagaacagcaacatctccgagaactgatgatcagatttgccagagcacgaaaactggctaagtgatgtcaaaatattacttaggcatcttaaagtacatcccttggaagttttcacacttactcaacatctaggctgacgtcatatgtgaacctgggccctgggatgtcaacctaggcgctggatgtcaacctgcgcgctgggtcatgaactgcttttagttaaacagtcataactcactcaatattaatctgattgatgcgattcaatttgcatttagaagataattcaattatttatcaccgtcaaaacttaacctcaagggagttacaaaaataagctccaggtgacccacagcaagacctgttgggctctaaaaaatgaccatcaccactaagagctaattttcactgttagatcattgtcaacggtcaaaaatatcttatttttatgtttggaagacctaccgggctctaaacttaaccccagagggcatgcggacattcagagaaaacaataattactaaccttttgtgtaattatttcaaagatcactcttgaaaatcctcaagattttgaaatcgtctccgtcaaacaagaattcaaaactttagagaatttcttaagtttgaatttctagatgagaaagtgaagttagaaaatgataaggaaaaagaatgagaatcaatttatattttagggggttaaatactaacactctttattcattgggatgcagacacgtggcaagggaatgcctaaggcctcccaatctaatggtctccaaagagagcgcctgcacataccctgaaaggtcttgacgacgtggcatattgaagaaataaaaataataattacatccgtctttttaaaaccctcaacaagacaacaaaaagtcaccatctcgtgacaataactcgtctgcctatctctgatagtttccttaatgacacagctgttaatcgcgaaactaggagcatgcgttatagtgcaaattttttgcctagaaactcaagatcaatctcttataaaatcgacacgtggatccaatcctcaagggatggatgagctgttaattaatgactctcccagagttgacctcgcttgaaccaaactcacaagatgatgcggccttgacagagtctaatcgcatactatgccttatgtagtgtagtataaaatggaccgagagaatttatataagttgcacatacattgaaatatatgcaatgactaagtattattctcttgtgactaggtaatgatcgcttctttacataacgattagttcgaatgacaaaagatgtttgacgactcgatagggactcgcatgtcccatgttgtcaacgcgagatgtccgacaaagtgacgtagatagaacacagacatcctagtggtaggttcattagcccttttatgaatatataacgcacctaaagcctgtgagcttgtgcgagaatatgaacgggcaactcacacccgataagtcgcatacgttgttgcatttattattagaacaaattaaactgttttttatttatccttttacgtttatttaaatttaatatttttatttattgtaaaacatttatataaccgatcaattatgtaaaactaaaaagacacttgctttctatataaagaagtgatccaagttgaataaactaagcagaaattatttggaatagtaaactaagcagactgtgatctgactgaactactatattcccttgtgttctttgtatattccggttgttctgttattttggtagcttcatgttgaatactcgctactctaagtgagtgttcatagtttcttgttcattttatttactgtttacacgttttatggtattgtctgaattcctccaaagtttgctaagaaaaaagataattaaatgtaaaaaatcaaaacataaaaagttttaccacaaataacctatattatatatatatatata

SEQ ID NO: 46625 - DNA, 3083 bp, Cannabis sativa
tcaaaaaaattgaacagaaaatatcatctaaaagagaattaaaatcattacaaagagaatatctcttagcaaagacagaattcacagctaaacaatcagatctaataaaaatcgatacttaattttagcattaagcactattaatttttttttttagcatttctcgtattttagctcttttcagtgctccatattgaagctattttgttatattgaagctattttgttcttttgttgaacttgattggggtcttacagtacatgtgaaattttagtacaaatattttaatagctctattgtcagttttgattcatctttctcaaatcacaagatcttgagctagacaatgaattatcagttcgaaagaggaggtttttgcgcccacaagtagtgtcatccctcatagaactcaatttagttacagtttcggatttgtctgtgttggattccgaggcatcataatattttgactcataatagttgtaaattgtaatggtttccttcgcttttgggaggtgagactcatgtgctcacttttaagttccatttaatgaattcaggtaattcagcaaaaaaaaatgtttgattggttttgactagaagtctaaatattaatcttgaaaagaaaaaaaaacactcataatataagctcttccttttttcttgagaaaaattaatattaaactttccttaacaatgtgtttatgaggttaaaaaagaaagttcttactagttcctatcattatttacacataatgatgtaaattagaaaatcagaatcataaatacagtatcccaaatatcttaactttggaacgactataattgtataaagttgtatcaatgaggcataagcatattctccattgaacttgaactcaaatatcatctgtatttgaacaacatttgaatctcatcaagactttttaaaatgcaataaatccagcaaattattgtaagtctttgtggtcatcaaaccatctttctgtctaaactcctcagcaagtttcaaagcttcatcacctttcccatctcgacacaacccttccaacaaagtcttataagtcaaaaaatcaggagacatagaacaacccaacatgtcaaaaacaacctcagttgcttcatcaaatcttctatccatagccaaactgcatataacaatcatgaaagtacttccactaggaaccaaccctttatccttcatttccttataaaatccaaaaccttgactaacccttcccttctcacataaccctttggtaatatagccataagtataagcatttggctcacatttatacaaccccatctcatgaaataccctaatggcttcatccaattcaagacattttgaataagccttgatgatcatgttcaacacaaaagcatcaggaatcacaccagaagctttcatttgcttcgtcaatgatctaacagctcttaagtaaacataacagacatttaacttgttgaatcttctaagtaatgagttaaacaacatattgtaagtttcaagatttggcttacaatcttctgagtttatcattttcttatacacatcaaaagcacggttgaacaagaactttctattgcagcaaaatctaatcattgaattgtaaagaggcacactcatttcacaagctcctgccattacctcatccaccaaggtctctgcattgctgaatcgcttcccttcgattagaatcttgatcatggtaaggtaagtgaggtggttgtgcttgtaaccgcgctgttgggcagtccagcggaagatgtcgaaggcgagatctgggtccgattgagcccataaggcgtcgcttacttggagaggtgaaaacccaggtttcaaaatctgaacccatgtctcgaattgcttctcgagtggggttctggttcgggatgcgattgggtagttagggatttggagctctggtaatggtgggtttaggttttcggggttttgagtgggtgaggaagaaaaagtgggttgggaagatgatgagagaaagggggaaatgtttggggtttttggaattattgtgagaaggcggcgtagggtcaccgccattgttactgatgagctttaagccaaatgagaacctttaagttaacactatcaaaacccacaaattgaaaattaagcatcgccaaagtaattacaaagcttagaaaaatctaacgaaaacatcattattggtctcgtttcaaatctaaatatgaaaatacaaagaggtaagaaatcattgaaaggaaagttggggatcttagaaagagatacctaatgtggaaagaagcaagaagaaaaagaaagcaggagaggattgagcttggatcttcttcttcccaaatacatcagtcacacatatagcttaacactaaataggaatgaaaggaaatttaggagggatagaaaattagaatgaaaaaaatgaaaatatatttctttcttttagtaaaattaaaattactttttttatttttttttttgccttttttatttttacactttaaaataatttttttttttttttttgcatttttacggaaaaacccctattgcaactagcactgcaatttaaattgcaacaaaaaatcgtacagaaactcctattgcaactagcgtgtaaccactttagaaacctaacatctctttttttaagtgtatgaggtaattccttttttttttttaagtgtagtataattaattattagcttgtagcttaaagatcttaagttccaacccataacctctctttttttccatccctcctcacaagtgtcaccactaaactaactttagtggctttaaaagtaaaattactcatctatacaattttacacacttaatgtcaaaatcacaaactaaagtaaaactattcaaattatttactttttttatcttaaaaacataagttaagcgccataataaacacgttatattatttttcttttttgtttaccattatattattagaaataaaaattaaaataataaatttttaaataatgtaaaagtttttgacaatatcattattggagatcttctaagtaaaaacttagtgcggctaaattttatttaagt

SEQ ID NO: 46626 - DNA, 1306 bp, Cannabis sativa
  modified_base (594)..(598): a, c, t, g, unknown or other
cccttttctaatcaaattattaacagaaaaattaactgtaatgatgcataggatgtgatgatttggttggtatacaataataatatttaatttaactaacatcaattattgatatgagtgtgttttgtttgatgatgagaaagtcaaaagtagaatcatatcaattctctcacaaacaacacatatataaatatattcattttctatatctctaagcttttaaatgccaaaatttcactagtatcatgaggaagaaatagctttgtttttgtgtaaaacaaaaagaatatatatttattttgagtagtttttcaaagggataagaaaaaacgtattaagaaattatatgtctaagcataattgcataagtaaaaactatgaccctcataagtgttggaatgtttataactaaatttgtcacctcaaggtaataattcattggaagattttattgtttttattttttaatcacaactaaaaaaattaatctttttttgggggttttaattttacattttcaaatagttttttttttatatatatatttttacggaaatttacatagcaaagcaactcaaactgtaaaaataaaannnnnaataaaaaataaaaataatatatagggtattttttttctttttttgctggaattatatacacaattttaagttgataaatataagcatattagaatatcatgttaatttttttatttacgaatattagatttgtatttttttggggggtatttatgaaaaaacatctttgttatattagtgcacttttgaatggaaatttggctctaagtatgggacctgcgtacctgtctttaatagacttgcgtacctgtctttaatagtagagattctctatctaactgaagaatggggcggagacatgaataattttctatagtaaaatgagtgagtggatgaaatagaatagtacaccttaacatgggatcgttaaatattttatttattttaaaatattattttaattattatacttatatacatacgttcatgtatgtatttttatagtttattaataaattttcaaataaattattaatatttataatatatttaatttttatgtaattttttttttaataaatgagttcttgtaggtaatagagatggagacaagggaatatttctcgtctattaatgaccttatttctattcctacgtgagctgcaaacaaagaaaaaaaataatgattaatattaattatattaatataatttatgtgtgtatagtattataaaaaaggaaaaaaaacaaaaaaatacaaaaaagga

SEQ ID NO: 46627 - DNA, 1648 bp, Cannabis sativa
aatatcataaattttattaaaataattgtacacataagcaatctaaagttaagtagaagaagtagaatgataattgagaggatttaattacaaaaaatttcttattaaatataaatatattattattactactgtgtagaattatctagtgtgttttgcctcataatttattatggttattcaaacttcatattacttgagtatcgagttattagaatggagtttatagagttttgatgatttgaaatggtagagaataacatatttaacaaataagttttttcttctatggtacttttattttcattaaaaatagttcttaataatttttattaattgttaatttttattgtattttatgtaattttggatcagttgattattttcatttaaaatatttgaaaaaagtgaaacaagtatctactcttaatttgagagtgaaaaatagaacttttcagtaattcaagtagaatgtgtgacaattttaatgacgttggatatgattatatcttcaaaatttattgtacatgttcttaaatctgattttttagcaatcacgtatgtttttagtaggagacattctataagattataattaaagatgtagcaagtatgttatccaggttttttaagagtgtcactgattcatgtacaaggctaaaaagatgaacagcttatttgtctagataactttcccttccatttttctttagaatatatagtcctataacctatgatattattttttttatcaatgaaatagatcattgctttattatatatatatattaatttaataaactattagaaaaataataactactattttgtatcatgtgttttataaaagttaccaattagattttttattttgttaaattgtaaattggattctatattttttaaaatagtataaaatagtactctaagctcaattttaataatttttttaaaacataaacaacctgaagccgatttctagaatgaacaaatgaaaaaaaaatatataatcaaattgattatagatatcttcagttattaaattttatttagataaaaattaagctcagtatactattttgtattattttcaaaaaatataaactctaattttttatttaataaaatagatggtcagtctataatttttataaaataaaaatctaaaacaatatttacccttataaaaagcttacccatctgtaaccttatgtttgatagaaaagaaaactttggagagaaaaagaaaaaattatatgtttggtaggaaagaaaatagggtggaagagaaaaataagtggaaaaaaaagttatagtactagtaggggtgtaccaaatatgagacaaatcattcaatttgcccaatccaatctaacatattttttgtagtaaagaattatattaaaattaggttatgactcattgaactgaaaagtattagactatataattatgagctaaaaagagaccttccaaatttaaaagacctttcatatataaatatattttacatttacaaaatatttaaaaatatatattttatattttaatgaataaattatattattacggtaaccttagaaaatgaattgactaaaatacaccactaacatgtagtttatagttatcatattacttctacaaataa

SEQ ID NO: 46628 - DNA, 1648 bp, Cannabis sativa
aaaaaaaaaaaaaaaactataagagcttataattctcttcaattaattataattttgaattaatatattctttagcctattatattgatatttcttaatttttgaagacaagtagataaaacacgaaaggcttcttaaaaaaaattcttgatagtcattcaaagtaaccttaatcatttgttaaaggtttgactcttaaacttaaaaagttactaattagtattttgtagagttcttgatccttatgtcattttcttgatcaaccaaactcaaacttaataaacatattattaatttaatcttagcttcatcttaattaggtgacaaaattcttactcaactaaattatacaaattattatatcattttgaaaaatttaaagatgagataagtaactttaaagaaataacttaagtcaacaaatttgtcataattctatcaaaatttcggcagtataacaactataaatcagatgttctcaaaaaaaattaagtatacaattaataatatttaacaatctagaacaatgcaaaaataatttctacccatctaaccacatacaattaacctaatttactacgaatcatgaatatttaagatattcaaactccactaaaaaaaaaatttaaagttttagtgattacacattttttctaataaaactagctattattgtgctcttccatcaataccaagaactcaatacctaaaaattaaatttaagacttccatttataaacttatcaaattaaacaataacatagattaaattctaatctttacatctatcatcaacttatataaacataaatatgtataaactataaaaatacacatatatttccgagtacgaagcactctcaaaagatcaccgaaaaaggaggagttcgacaaaatttagcaacgactaaaaaatcaacaatatacaaaaaaaaaaaaaaaaaaactaaaatattacatttacatatttatataactaataacttttttcaataacagtttaaataaaatttaataatctaaaaaaatattttccataataatttaataaataattaaataaaaatcaaactaatacctaaaaaacaaatataaatttatttttgttttaatacttaagactaatacctaaacaattaatgtaaaccaaataatttttttattatctaaaactaataactaaacaattaatctttttaaaaaactttctattctaaaactttcttctaaataatttttttgttacctaaatctaaattaatactttaaaaattaatgaaatccaaattctaaatatatcttaaataaatatgtaaataaataaaataaatatatatactgaacgtgggacagtgggtagcagaagtggcggtggtggtggctcagtggttgtcaggagcccaagtcgtgatgttggttcagtggtagtggctcaatggggtttttagggatttttggataaaatgtggtggtggctcagtgggggttgtcgctggacgagagagaaagacgagtggtggtgattgtcgcgaggagggagagtgaaacgagatcggagattggtgagggagcttcgattggtgcacgaatgagcttggacagacaaacggacaagcttcgatgggcatgcggatgagctcggacagac

SEQ ID NO: 46629 - DNA, 1683 bp, Cannabis sativa
tcactaaaagtagcagttttttatatacgaagagaacaaccctcctcttcttttcattgtattccttagccattttttttttgaagctttcaatcatcaaagctaatttgttccatgtccctctgtaatttatctttttttgggtgctagaatgttgataatcacaaattcacaccattttgattgcagagaaatgagaattgtggcccaccgtgcaattcacttacttttagttgtgagagacgataattgcagcgtatcttacatctcacactgtattgaagccaaaattgtagcctacatcgcaacccacgccacaactcacaccactctcccatgcaattgctctagttgcaaagaaacccacccaaatcaccactctatttgtaatttagggttgcatattgagtttcaatttttgagaaaacttgtgatttaaggtttcgatatgagtttagatggcaatacagagatagagaagcaaggtaatggtggtctggtgaatctccactctgacaatgattgttgaaagttgtcagagctaaaggagatgatatgccgtatgagaagcttcaaaccatttttttctttctttcttctttgtttgaatgacacatttgatcaaacactgtaaatttgcaataaaaaaaattatattgtataaatgaattactttataagttattgtatatgtgcataaagttttaactccaaccgtataaatgaaaaaagtcttttttttttttttattttaatttttttattataatatttgaaatataattacttttgtttaataggtatattttttaagaatatgaatagaagaaaaaaattaaaaaaaaataatataattaaagatatattttatgtaaattaaaaattattaaaataagatgcatttataagtgttttgggtacaaataattttttcttttatatatatataatttatataatttttttagttaattataaatgggatttctatcaaattttcaaatctttttggataatttggataccaaaatcaagaatcaaagtggtcacatatgtaatattaattgtactaattacaggatttagtgttaagacattaaagtggttgtatcttaaattagaacgttaaaaagcatccttgttgcaacctccatttatgatttatccaactacaaactgctttagagttattactttgtattataaatgtgaacatgcatgttgtgtgttgtccttatcataacaccattaaatggattcatttcattcatttatttgattattagaatgttattctagtgaaatgatttttttactatattaatagaatgattatttctttatttgattttttagtatctttagcccaacaacgctctctcacacggtgaggtgattttcgatgactaccgaaaatttctttgtgatctgtggtgtctgatcatagctctctcagcctcaggcaacatatttgtatgttgtttgtccttgtttgtgcttttcccatgctttcaagtttttcctctttgtgagaaattggagcttccaatttgatttcatgtcttccttgtttttttctttgtttacgggcttttctttccctactctttttgtttttcttttgatctcttcatggacaatactactaacgatgctccagaggttccagttaggggtggcaat

SEQ ID NO: 46630 - DNA, 1084 bp, Cannabis sativa
actccaactacatgttccttccattttgggaggtgttaacgactcttatgataagttcttatctagctagcttgacccatttggctaacttggttgagtatggacctaggtgcgagttagatggaacgcatggcctgctagcaatgtgggctagctgcttggtttactagcgtcgtggcgtagttttcgagcttactagggttgtgggctggctgtttgagcttactggcatcgcgggctagctttccgctcttgcctgttgtgggctagcttgcccactagtcgaaagggccttgtttgtatgtccctataggtagaataaaataatagactagaataaaattgtaaggaccatcagacgctatctatcttcacattggtatgatagtgtccgttttaggcctaagcccttacagatttatttttggacaccttcccaaaaggcctcattccaatggagatagtgtccatccttatatactcaagattatttccatttctagccaatgtaggactttggttgtacatcgaacaatccccccctcaaacaaaggactaccctgcctccccttagacgattatagatctaaatctaaatccctcaattccaacactcaagatccccttgagtaagctagatgaatccattcaccagctacattcgacacacatctggtttaaacgacacacgtctggttctaattctgaaaaataagcaattctctacaatgggtgacttgcgacccatcgctctttgcaatgtctcttataaaattctctcaaaggttcttgctaatagaatgagaggattgattgatcatgttatctcaccaacacaaagtgcttttattcctggtaggctcatctccgataacattatggtggcatttgaaatcatgcactacctcaaacggaagactaaaggaaagaaggggttcatggctatgaagttcgacatgagtaagacttacgaccgtgtggagtgggattatttacgtgcatttatgcattgtatggggttcgctggtaagtggatcaatttaattatgaaatgtgtcacttttgtacgaggttccattataca

SEQ ID NO: 46631 - DNA, 870 bp, Cannabis sativa
cggaagtggagcagtccttgcaagctagagataccactttggtgttactcaaagcaaatcttctccgcgctcaacagaaaatgaagtcccaagccgacaagaaacgtcaagaggtgcattttgaggttgggaatttggtttatgttaaactcacaccatatcgtcaacgtacagtggctaaacgcatcaatgagaagcttgcaccatgttactttgggccatttccagttctgactcgtattggtacaactgcctaccgtttgcaattgccttcagatgcttcaatacaccccatgtttcatgtgtcgctgctgcaagctgcacttggtccacaccagcagtcatctaaactgcccccgaacgtcactgctgatttcgaatggttgctggaactagaagacgtgctgtccatccgtccaggcactcttaaaacgccacctcaagctatcaagtgggagaatatccctgcatctgaagcaacttgagaggacttaactgccattcaagatcagttccctcggtcatctaaactgcccccgaacgtcactgctgatttcgaatggttgctggaactagaagacgtgctgtccatccatccaggcactcttaaaacgtcacctcaagctctcaagtgggagaatctccctgcatctgaagcgacttgagagaacctagctgtcattcaagatcagttccctcagtcatctaaactgcccccaaacctcaccgctgatttcgaatggttgctggaaccagaagacgtgctgtccatctgtccaggcactcataaagcaccacctcaagcactcatcaagtgggagaatctccctgcatctgaagcgactagagagtactttgctgtcattcaag

SEQ ID NO: 46632 - DNA, 2285 bp, Cannabis sativa
  modified_base (768)..(782): a, c, t, g, unknown or other
atcaaacacaaaactaatattaatgaaaacggtataaatataagggtaactttcattattttgaaagccacattatttgtgtaattgagatgcattttaaggctctgaatgtaaatttcctaaaaaattatgtgcactaaattttatactaagtatttttactttatttaaaagtgatataattaataattgaaaaaaaatattaagtgagattattattatgtatatcgtaataatataatttataattttgacaaatagaaataaatattggatgctgtttaagaaaatttgataattttactgtaatatgttcttaaaattatccaattataaacaaaatattaatgttcaaataaacacaacttgaatatgtgtaaaataagaaaaataaattctctaaattattgataattaaaaataacatcaatctaaaagttgtaaataagaaaaataaagataataatgggtagattttaacactcctttgcacataattaatttcttttttttactctggcaggtcctactcgaatggataatttaaaatattctcagttattagtttaaaaatattatataaagataatactatagatgtatatttgtaggaggagagtagttgaaaatcacaagagaagtgatataattaattattaatcttctattattatagtgagtcgttctaaaaaaaagtgattaaataaaattacaaattattctatatgatttttattcaactgaatttattatattatatatatatannnnnnnnnnnnnnnatatatatatatattaattaaagagtaactcttgctttagtcgagaggtgagtttgaaagagaaattagaaatttagatcacagaatgagaaaattttgagagacagaaactcaaattctctgtattccaattccaattcgattcttgggatatcaatctctagtgacatataattttgagttcaaagtggaaggaagaaatcgttattttctaatcagtgaggaccaaatttatacaatagaccataaaaacgactttttatttggataatatgacagtaagtatcatgacttttacttatgttttagtattgaaatcttaacttattatagatacatatcattttctaatttttttaaaatcaccaacatattaataaacctatgacatagatagtgacagaaaataaaaaaattatgagaattgtgagtgatttacctgcaaacctaaaaacgaattattagtcggtataaaacaaactaatataaaatatataccaattctattcttaatcgtcatctaattagttacaaaatatcataaaatatctcattttattttctaactacatgaaaaaataaagtactttaaaaaaatttaatatatttttatattttaccatttaaaatcttagttattcattatattcaaatcgaattgatgtaaccccatgtatctaaactactaatttataaaagaaacacatttaatactaagaagaagccaaaccttctctaatatggtgatcctctttcatatcatcctctatattgctttcatcatacttatggtgttcatcatcggtttctgaagcatagccatcatctttctcgttatgtgtggtgtactttggcatctcttcaatattttcatatgcttcatgattattattattatctttttcaacattggtattctctgtttgttttccagtgttttctcctgtccaacgagaagcaacaagtcgacctaattcttcccttgacaatccctcggtattttcagaagcaacattaccaccctaaaataccatcgaagaaaacaacaataaacataatcaccttcgaaacacatagtacatgactttaaaaattaaaaaaaaaaaacaaaaaaacaagaaatacaaatataatgcacaaatgaatgaaagtctcccaatttgttcacatatcaatttcatccataaaaaaattttaagtaagtgactctttaaatcatataatcacaagagtctaaatcaaccataaccacaaaataacagaatttattttgtaaaattcagtttggaaaagaaagaaagaaagagatgtacacttagctaatagctaagctttactctgtcttcaaggccttgttgtgaatacttgattaattgaggatgagaaccccaactacaataagcaaagcactagaaaaccattgaattgacaatgtctcttcaaacaaaaagtacccagctaggccagatgttgacattagatacccacattgtgaggttgaag

SEQ ID NO: 46633 - DNA, 1340 bp, Cannabis sativa
aacccttatgcgtttatttcattgttttagagaattcatatttaggatgttaattcaacatacttgttactaaatctagatcatggtaaaatattcctaacaaccccctgcaagttctgagagcgaggaggtacaagtagtggaagcaatgcacctgcaaggtctggggacccaaccaagagtacactacagccaccacctctacgacctgggatcacttgacaccagacaaaggtacgaggtgcaagaccacctcttgcacttacggtttgcaacccaaaagtgacaacttgtttatttgagactaccatgtaattcaagccattagagcttataaatatcctattctcaagtgtgagaaagggttggaaaattactcttaaaaccattatattgagagcaataggaagtttttattttcaatctactttgagataggcacttgaatttatatttcatttatttcttcatcttagttctgagcttgaagtagagtttgattatccagccaaaaagttagttgacgaattctcaccgtcaatacatatagagaaattctttatcccaaatacccctaatctttttattcaattacacacatataaactccaataaaatattattatatattatttttataattataattctacgtatattttaattttagatttaaatttatattacggtttcagttatctaaataaataaaaatgtacagcaaaaaatttaacaaaaataaattacagtagcatatataatttaaaattacaaaataaaaatataaattaaattaacaacaactaaaaacaacaacaacaacaagaacaatgtttttttgaaaaaaaacaacaccacattttttaaaaaatattttgtatgcttttttatcatgataattaagtttttatcaatataatatttatattagtaaatatttatttactaactaaattatttatttatccataaaaagaataaaaaataaatattattgtaggggtgttagcggtgtgggttgtagcattttttcaaaccaaacccatatgcgattttggtaatttctcaaactgaaatcgcattgtgagatcttaaaattacaaaaactaaatcccaaaaatgtagtacaatttgaacggtttacactatcatcattattaaacattataataaaaatttaaaaatcaatctaataaagttttaacaatacaaaaaaaaatcctattaaagctttaacatcataatgtatatactaatcatcaaatcattatattgaattgtctctaaaaaaaataatgtaatatacacatatattatatatatttgttcttatatgaaaa

SEQ ID NO: 46634 - DNA, 1159 bp, Cannabis sativa
ttttctcaatatgctaatactttaattaacacaactaattaataattaaatagcactaactaaacacaatgattcatatgataacacaaaaaaaaaaaacatatatattttatattaaacgacattattatcgaatatccttaagtataaacgaaatcttaattaatttttttttttttttgttatagatggtcagctatagcagcaagattaccaggaagaacagacaacgaaatcaaaaacgtttggcatactcatctcaagaaaaggcttataattaataataatgatgacgtaatcgttcaaaaatcaaaacgacaacgtaatcacgagtcgtatgatgatgataataatattaaaattgatgacacaaaatacgacaatgataataatagtaataatgatagtttggttgtgtcgtcgcctcctcaatcttcatcttcttataactcgttcattagtactgatgatcaaaatttttcggaaactatggacgatcaattttggactgaagttttctcatcagaatcagatgagaatgatcataataatcatgaattcgatttcactcttacgaattcgaataataatgttgattatgatcaagatatggagttttggtttaatgtatttactagatctgcggatttaccagaattattattataaaataatttaattaaagttgtaataataacaaaataatgattaatttgtactttcattattgatcgtaatatttttttattttgttatgatatgtaatttttggtggaaattgagtgttaaaaaattgtttaattaatgccaagctgcccaattattttgaccttttacaaattaaagttatccctagtgtatatactatatttaattcaactatatatatataattaattaccaaataagtacgtacgtacgtacgtaggtagatttatttattcacaagtggaaaaaatatgtaaaaatatatatatgatcatgtcgacatatattgataaattgtaattttattgtaatgcatgacagcaataaagtactatacatctaatcaattaatgaaaatatagagttgaataacaatctcgaaatcatttcacttgatcttagacaatcgtgggattcaacaacttacccaataattctccttacggatcac

SEQ ID NO: 46635 - DNA, 1883 bp, Cannabis sativa
ttaacaaaacaggaagtctaattgataacttttgtaaaacacagggtccaaaataatatttactctatattatatctcctttttttaacaattttattatatttttaattgattgacttcttataattataaaataagatttttagaagaaaaacaatgaaaactacaggcagatatggaaaacttgaattgaacagaataagctgaaaatgttgttggacaaatcaaccaatccgagtaaagcctataatagtcaaatttcttatatttttccaattagtaaaaatacttcttaaacaagaaataataaaaagaatttttcattaactttttgtagttacaaatttccatgacttttggtagttaacaaccagaagaacaagtgtactaacagtgacttttctttatgattagatatattttctttaatttttttaataattagctttttatattttaattttttacacttattatatcacttaagatatattgtttgtaaataataattgatagataaatataaattatatatttttcacattttttatgttaataaataattaaataaaagacttgttttttttttataacaattcgttttttttatttttagctttttatttattaaggtaaaaataatgaaaatatataattttcatctatttattgactattatttatcgcggtcacttgaaaaaattgaatagaatacaataatataaaaactatattgtgatgaatattatttacaagttatatacattaaagatagaaaatttaatagtataaaaaatataatggaaaaatactaattattatttttatataaagatttttttataacttatttatacatattttctttttgttggaattaaatttaaaattatattttattattattatttgtttttttgctggaagttttttttttttttttgagatgaaattagaaaacaaaccaacaatagttcattgattgagcattagtggtccacattctggaaaatgaatctccctcccaaggttcggatatttgtttggaaaatatttcacaaatctctcccagttgtagttgaattctatcgaagacatatagcaacctccccttactgcttcatttgcaattcgtgtgaagaaactattaatcatgccttgtttttctgtccaagagctaaagcagtttggcatttgtcgaaattaccaattaacctgtcaagaacagatcaaagcccttatgaagacattttgctgcaactttcagcaaccatttctacatctgaatttgaactcttcttggtttattgttggagtatatggcatggaaacacagtaaagacacctgctgatgttgcctcatatgcaccttcctttctcaaagaattccaagcagcccgtgctaagcatcaatagccccatcgatcacaaccttccgctgaataaagattcaaggctttttctgaattcacacatgcgccaagatggacagccccacccccaggaagactcaaactaaacacgaatgttgcaatagacactgctaataatgttgttggcattggggcggttctaaaaaactctaaaggttgaattgttgtagcattgtccaaaccattacaaggtaacttcagagcaaaagaaatggaagcattggggcttgccttcagtctacaatggctactatcgaacaacctttcggtggacctcgtagaaatagattctcttttggttattcaaggactgaaatcctctcatttatttatttctgcttttcatgctatacttaaagatgtaaactatctagtatcctattttccacgagcacaaatctctcatgtatcacgatctgcaaatacttatgcccacactttggctaagtt

SEQ ID NO: 46636 - DNA, 1112 bp, Cannabis sativa
ctctctctctcacttgagatttgcgtacttgattcatatattgtaatcatataagagagctactgcagattaattccacaacactaatgatttgagtagtattatctctggtatcaatacaactaaaagaggagtaggtcattacccactaactaagggaggcgaacttctataaaatctcgtgtctaatttacttttatgttcttattgtatgacacgtagcaagcatcagtaataaatacgactttgctgtcaattggccaaatctgagattaacctctaccgttcattaaaagtacatggattggacactattcaaagcctacatatatatttgttatctcttatgtcctttttaaaacataattttattggtttttttttttttttaattttcttaaaattttttaaggtagagttacccatggtatcctatacctatgggcaccctatatctattatggtaatattcgtaccctaattgtaagaaataataaaataataaagtagagtataaataattttatttttttcacagagtaggattgtgaaataagcatatcttaaccataatctgttagcacatttccaagtgcgacttgtgaataaataaattagattgactttttctagaaaaataagataaactcagatatggctcaaatattttttctatttttattagtgaaatataagactatttatgattattattgttattacttgcagcataattattatttatttttttaatgtaatgaaacttttttaatgaacttggaatgtagatgatgcaatgtaattcaaggttgtcaaatcggagtataataattgtgttattaattagtaaataaaataagaaatgtcttaatatattctcttagagcatctcttatactaaattttatgtttacttacactatcactaagaccatcttaaatatttcaaaaggtcctaatctaaatttagaaattagacccctgacaacacaatttaatagttttaaatattttcatacgattatatattttataaattatcgaaaaatttgattccaataaaacttcaaaaaaaaaaaaaaaaatagaaaaaaaaatataaaagtaattaa

SEQ ID NO: 46637 - DNA, 1559 bp, Cannabis sativa
ctaaaaaaaactatactatgttttaatattcaatgtagatattaatgtcaatatagtaattaataaataaaaaaaaaaatagaaaaaggaataagaggtgtcaatgtcaataacaacattgtactctcattcaagttagtattagcacttcttttcaaaaaaaaaaaagttagtattagcagcttatgaatcaccatacatttcagattaacctgaaggcccataacaacttgaagtataatatctccctttataaaaggaaaaaaaagaagaaaacatgaagtatataaatggagttaagagtagattaaccaaaaatgttaacggatatctaaaagtattaagcactacaaaaaataacatactcttatttatgtatttcaaataccaaattctataaattttaatttaataaataatataaaaaactcttaatcaatcataaaacaccatatcaatataatgtgatgctttttaaaataccaaataacaatactcataaattaaatagataggaaatataatcataattttattccaataaaattcaactggattgaatattgtatattttaataacattttttttaaatcaatatattaataacatttataagtacttaatatatataattttcaattgcagaaagaactaagtaaatattactaaaaatataagtacgaaattgtaatattttttcataaaagcttaaagcttttcaattaagtctttgactaaaagttaaaagtgtaaaaagcttaagaaagctttgtacactatacaaaattttttacaaaatactattttttttataaaacaacttaaaacaactaaaaaataactgaatatacaatataaaaattatacaatattttttaaaaaaaatttaccgcacaataaaaaaaactaaaaaaaatcaataaagttaaaaatccttacaattaagctgtaagcataacttggatctagttgtatatggaaccgccatatagcaccacctcatagtgctatgtatatgtaccatgataattaattgattcagcatcccattttgaatgcaattttagtaagagagagagagagagaaagctgaacatagagagagattgttacctttttatctaatttaccaaagttcttcttttcctctttttctttcttctaaattctaacaagagtttaacaaaaacttaacaaggaacaccataatcacattgacagaacaaaatgagaaaaaagaaaaagaaaaattgtatagaaaagaatataattatttttaatggttaagttttaaaaaatatttattcagatgaatttagttgacaaaatataaaagtgttatattattgaaaaaaaaattgtatacaatcattatttttaatagactatacaatagtgttgatgttatttttttaaaaaaagtatatataaataaacatagtaaataaatttgtataccatagtgtttttttgaaggaatttgtataccatagtgttaaaggttgatgttattataaaaaaacactaattacacttacaacagagagagagagagaga

SEQ ID NO: 46638 - DNA, 3059 bp, Cannabis sativa
cttgttgaatcttggtagtcccttctggccattctatagggtcattaagcactctcaatagtttctgttgagccaagagtgacttaatctttctcctctaaatcctgtagtcacactactacaaaaaatacaattctcgtcggtttttaagtgtcatttaaagaattggcgtcggttcaaaaaactgacgtatattccgtagtcgcaaatagttttttattcgcgtcgtttttcaaatgacgcaaaaaacaattatcttcatttaaaaaccgtcacaaaatatacatttttttttatattttctgcgtcggttgagaaatgacgcgaaatcgttcgtggcatttcaaaaccgtcactaaaaagttataccgtcggttataaaatgacacataaactgctgaaatattttttttccacctattgcgtcagttataaaatgaaacagaaaaataggtaagggaaaattgcaatttttcatacagttttccccacatgcattattaaattttagaatgattttatataatagtaaataaataataccaaaaaagtttcaaagatctaaatacagcacaatgagaggttactaattatcaacttaactggctttttatactttgactaattacacgtctcttctcttctctagccaaaaattactaataattcaaggcaaatctaagcaagaaaaataaaaattcaacttcaattactcacacttagataaaagcaaattgccaatacatgtatttgcctagattcataatgcaactatggatcagaagtaccgttaagtagtttgcaacaaatctatcccgtagaaaatgagcaattcgaggtaacaatgaagttatgctctgccgaacaagatgatctcgatgttttaggtatctaagaacaatttctctataccttgacatcatgaactcccctgtattcctgtcaatatatataatataaaaagtgtaaattctatgaactacatccaaacacatgataaaatttattaattataggaacaaaacgaaatttctgaactcaattactttatttaactaaacaatccaaaacatagtttaaccacaaataatctttaaaaaattatagtattgctcccattcaatgatgccaaaaatactccaagattgctgaatattcttccttattactgaagtgattaatgtttattcttgtaaagaagaaaaaaaaaacagggtcattgtatatgagtagctcctgttctattcactaaaaagttaattaaacaataagaagagaaacttgatgagcacaagcatcatttgaaaagccatctcaaattgttttaagaaaatacatgaaccaacataaaagtaccgccgcaatgtagatactcgactcccacctactcacacaccattggtaaacttaagtttttctatttttttttttttggaaacaaaacctcaacttgtatatacctcactttagtattataacttcatgctacttgaaaatcttactgatattttcaatgcctaatgctgttatccacccaaaatttaatatacattataaaagtatagaaaattttatccttgccttaaggaatggatgaaaatgaccaccatcaataagtagacctttagcagtgaaattatattctttaaactctaattccttccaatccccctaaaattatcaaatagaaaataaacatgtcagtaagataatttcatttacaagaataatatcagtgtatccaaagtcatcatgtagacattaaataatggacatgcttatataatacgtaatgatgaaaaaaaaaggtttgatattatgagcatatggtagccagacacatacctctctaagttttcctaagtcaactttgtggccaccttttttctctcctaggcatagttagggccgggcctttactcacttagtagcccttccatatcctcagtaaaaaaacataaatattactacatgagcaaacgatatttatagcatgacttgaaataagtgaattatgcttactaccatatatgttatatgtgcataaactgaacgagaaattgtcactaaacacaaacagacacacacatcacacccaaaaggaaacaaaattgatgataagattttagctagtgcatccacatcatatatccgaaacatggcaagcgtaaattgaggaaaaaatttagctaatgaatttccaaagaaaataaatttcatgcatttaagaagatcgagatgaaaattactgttgagcaataagttttcttgctttgagagatgtcatcttgtcccacaacctgaattcacagtaggaatgatcggtaataatttgaataaagaaaaaatctaatggcaattttttgatattcttgacaaaacaaagtgaattcatagataaaactaaaaacaaggaataaaatgcatagtaataataccaattaccataggtgaaatttatgccacaagcaaacttagtgacctaaaggaataagttgggagagaacattaatagattagctactcaagcaaacatgactaggcaatcttctctattatccttttggaaagaatggaggaaaacaattcaaaagcaaaaacaagtctgaagaaaaaatcaaggctgaatgacacaatattattacctggtttctgaatggttgaagaactttctgccgcacaatacaattgggaaataatgccacaggcacaggaggtacctatgtgatagtacttaaaaaatgtaaaacaacccttgaaacatgatccaaataattgttgtgagcgatatcacctatgtcaataacataatctaaacacaagaacaattcgaccagtaacaacaaagtattaaacaaagaaatggtaccaaagatcgaagaacaaggaatgaacaatgagacttaatctctttattgaaagaattaaaagtctgagaacaaaaacaatggagtcgagctcctcacataaaacctcagacacatgtgaactccgtatacaaccctccttcccacttttgttctctagactaacaactcagaaatgggtattatttttct

SEQ ID NO: 46639 - DNA, 968 bp, Cannabis sativa
tctctctctctctctctcaaaaccatcatcactgacttctcggctgctattccatatacgacgaacaattgaggatcgatgaacaatccatcatcggcgggaatgtctaaggtgatttttttttttcaatattttcatacaatttttggtgtttagatttatgaatttattgatttatggtagaaatcgattgatttgttgcaatgttctgtgaaattcgctagttagggttagatttaggattttttggatttattgagtgaaatctggatttcaggtcgggcccgatgcatgcctgatggatgcccgatggatgtacgatggtctgtgtcaaataaaagtctagaggttgaagagaaatggtcaatttttgcccgatataggcccgatgttggcccaatatgcctccaaatatttggtccgatagtgggcatgatataggatgattatgggcccgatgcttttttaattttttacattttggtataatatgcatgtaggtccgatagaggacgataaggctcgatagcttcttttgtgatcaaaatatgcatgtaggtctgatacacacccgattgtggcccacattttaaagcatttttttttttgtattttgtctgattctggtccaataaggcttgataatgtgcagcaggatttcttacttgatttcttgtgtcttttttccagaattcaagaccgccacgacttataattctaatctcagagcattacacaggccgtgtcacttggtgtgacggaagttattactatccaaaaattaaggcaaaatttgatgaattccaaagtatgggataaggtgaaggaatcaccttttaaataaattcttcgagaggaaactactaatcttttttgggacattaatccatcagttattcatccacaagatcatatatgagaagccagacgaggtacacttttattttgcaaagaagagatgcagattc

SEQ ID NO: 46640 - DNA, 1291 bp, Cannabis sativa
ttttatagttttaccaccttgaggaaggtgattttgaagggtgggaaagtgttacactatgaaatagtgtaagggcttactagtaatctgtaaagggtgtgatagactataaatatgtaattgtgtagctattgttggatcgggaatgagaaaatataattttagtttaattgagtgattggcactgtctcgaagagtacatctggagatttgtcctgtctcgaagaggattattatctatcagaaattctgttattgtcattctcttttacaatctggagtctcaatgtgcttggtttcacaataataagtgtgtattgtgcattatggggtatgacaattctgatgggatagttgaattgcagatgaatttctttgctttaatatgtgtagtttacttgtatcgttttgcttttattctaatttggcttgagttatgaatgtgaacagtatgaaatgtttataataaagaggtaggtgtaatttttattaaaaattatgatataatgctatggtgatatcagctcaattcctctaaatctttctcttgtttcttttgtttagtcttattcatttgtttttcggttggttgttcttgttgttttccaagagttactcctttgtttcttgcacttgtctaaatttcattcacttctctatgtatattttgctcatgcatgtcatgcatttcctagcaaattttaaatttggatcagccttttgtatgaaaatttctgaccgagctgtgttaagacaagtatagatctaatttgacgacatgttatgaagcttgaggagtatgaagtctttaatgaccaaagaggtacggggcacaggaaaaataaagatgaatttgatgtgctcccggtcagtcacctgagcacaaataacccacaaagcaatggaacaataaaagaattcacactattatggtatgaattattgactggaaattaagagcagaaattgaaagcaaatagagaaaagataatggtcctttcggaccaatgagtcaaagaatgttctctattctcgcatgaccccaaaaagcaaaaactaacaacaatatatcccccttttccaacaaactcagtaaagttcaaactactccttacaacatagtatacaaggcttatcagaattataaataattgaggtttggaggaattttcttccataatattctagctaccactgaaagctatctcacgtggttgggtgggtgattgtgtattagtggtctaagtttaaatctccattaatgtttgataaaaagacaaattctatatct

SEQ ID NO: 46641 - DNA, 1920 bp, Cannabis sativa
tttctatctctaattcatataattgttttgaccataagatgagtcctagctagaagaaaaaagaaaataaaaacattaccactttgaacattatcatttcagatgtatagtaattcatagccaaaatagtaaaactgaagtatagtccacgcatgcatataataatggaatatttagagacactagtactagtgttatgcatgaattttaacctccgaggtttgtaaagttggatcataggataggagagactaacttgtactagaattttagaaaaatgaaaatgtacctggttgactggcaagaacaagcaggaaatcttttcctttcaatgcgaagggcaccaagaagatcagaagtcaaatttaatgaccaaatatcctgccaaaagtctgttccatttataagatatcagaaaatgaaaaggtgggagtcatagaagcaaggtatcacatgcattcatacttggccgggcaagtaaagtatgaaaatggggccaaagtcatgaaagataatgtcaaataaaaaagctctttatcaagtggctgattcttcttcttctgcttcctctttctcttttagactaattaaatatgaggtgatactaagccttttcttgaaacaagagcaagaataaaatgtacctagagtttctaatttccacaatgcagatgagttagagtggtcccccaacactaataaggtcatttacctagagtttccaagctggaaaagagctttaattacatagagtggagttgatgctactctgagatggtagtcgaaatcaaaatccttctacactttttattttaaagtttggttccaacatttccatataataagatgagaaaaaattacaactaatgtgcagaatcaaatcactaaaacttaatcaacaaaaaattagcaaaggcaggaataacaatccataaacacgaaatagagataaaatagggatgaacagagtatctaaaatcaaaaaggataaaagcaataaaacaataaaatcaacaccaagatatatactggttcaagttctatagatcgatgtctatggctctactctatttatggaacaccaccaaatcttcttgattgattgagcaagaacaaaatacaatatagtcgagagcaattctctattagattctctcaaagtgttcatctctcacactcttaccgaagaatcttcttcatctatagaatattcttcatacaacacccaaacccaatatttctattttctctatacctttctctctctcttcttctcaatcttcctctcttcaaaatcacctctcaaaaaactcatatgtgaatcataccccctgaaaaagataagtgttggtggtatttataggttcaggacatagatcctaaagtcggtgattgcaagtgctaagttgttaagttagttaagacttaacaaactcctcgttatagtatctccttatcaggttggtgacccacgtgtcccaggttgagtcccgactaggatcatttcgctcgttctcacgagggatttcctattccctggtttttggtcgccttatgttctcatttctgtgagaaggctctggttgatcatttggttgttcattctcagggacaccctcagtttcccaaggttgttcttcctgagcgtttttaggattctccagagccgtttcttgcctcctagttcgtgagccacgaggtctgctcgtggtctcctcactccaggattaggttgattttgtgcattgttctcctgtgtcgccctggctgcggctgccttccgttccaactcagcattttgttagtttgcctcctccaggcggcgcctgagacggcgattctccaactcgacaattggcatgtatcttgtgggatcataggcaccatgtctcgactacatctctgttgggttttatgccc

SEQ ID NO: 46642 - DNA, 1066 bp, Cannabis sativa
taataataaagtgttgttgattttcacataactaaattacgtgattataaacagtaacaggaatgaaaagggaacttttttgttaaaagaagtaaaagaaaagtcccgcacgtcgtcccaggcttgctggaaaccaatacaattcaccttctcccaagagactgctccgacgtacttgtcgctctttccttccaaaaagaaacaacaaatccctattactcttttcatctaattccaacgtctttggttaattttaacaatatatatgatccttctctctccatcttagaatttagaagagtggttagaatatatagagtgagtgtttggtaatatatatatatatatatgggttacagatatatatcttaaaaccaaatattagcaatgataaattatatattaatttataaggattaatataaagtaaagagatactgctagatgagaagatgagttggaatatatatggtatgtgcttggatacgtacattaagaaaataatatggctttttatagactttatagtaatatttttcgcatttcgaaatatttggtcaaaaaagagtctctttttaacccaatttacacttcagataagtgaaataatactatcgaatagaaaacaaaagagggccacacgtcaggaaaagaaagtacgtacaggttatatatatttgatgacaaagattcacacacacattggatacttatgtacaataaaaatgagagtgtatattatgtacattaaaattttcagttttccccatatgtaaggtaagacagacactttgttcattgagttgaactttttatatcgaaaatgtacccaacaaattcctactataacttgagttttattggtctgtattgtaactcatggatttcgttttatcaaactaaaatcaattccaataatttattaaaactatagattttgtcaaaaagcaactaaatacataagaaattatttatgtatctgcaaataaaaggtttacgtaatatttagaaaaaaaagatcaagagttacaataaaatgaaaccaggcggagcaaaatgcactcca

SEQ ID NO: 46643 - DNA, 1372 bp, Cannabis sativa
cgagctcataatagttcaaattagtggtgaaaaaaatcgaacctcggtgtttttacaacatggtactttaagattttcgctttgctctgatcagctgctatttcatcaggaaagagcttagaaagctccttcatcgtagcatcgataatatctgagtcgctacgtgaaatccattcttctgctggtgcgaaaaccaactctagcatagactggtttggattgtaatattcctacaatatacaagtggaatataaacttaatattaaaaagtaaaaattatgattactaactcttattaattatgaatgaaagtgttataattttagcctcaaatgacattttaagaaagtagttattaccttacaagttaccgacatatcggcgtagacactcaagagaggacttctgcatggggaagaaataagttaatttaccgaatcaaacacagcaaaaagaagcatattgacgttaatttgaagtcggtacaagcattaataagaaacgatctttccctttttcattttcttttggcaaattaatatgcgatcccatttgcagcattagaagcactaaacacggaacatgtttgtaactaggatctgtgcctaaccctacaatacttttagatcgggaaactataacaattgctatgtagtactaggtactatggaatgatcggtaaatcacgcctgatcgggaaactacttgagtagaagatgtttgtaactattaattcgataaaatatgcatttaaagttagcataaaggttccatttttaaaatgaaattgggtaaaattaagaagtatcagaacctgctgaaaagaaggtgatcatatgtgttcttcaattttcggtcgaacctgcaacaaagaaaacatttttaccaccaaacaatagaaaacttgtttacaaaatattaatgatcatattattcacacatacacatgataaacataacttaatatgtaaatttatcaagaaaatattatataaaattgcttcaaacaaatggttaagataaaattgaatctttagaaattattaagatacctacttgaagaaaaatatcataaatttggtcaatccatgaatcaaagaccacctacctctatctaacttctgaatttttctatgcttgattaaggagagacagagagagagagagtctgttactaaccatatgtggacattaataacggggacgccaactaatttatccaatttcttgaaatacggaatctctttccagttttcgggcaatagaagcttgaggatatcaactgtttggaatgtaagttgttgatatcattagagatattatgattttgaactcaatacaaactttatatcggacgggaaaacaagggtcg

SEQ ID NO: 46644 - DNA, 785 bp, Cannabis sativa
ttttgataataaaagcttacaatcataaagtctgctttcattcatcattttggctacacctgcacggcatactaggccagggccacgactaaagagtggtggaaacttagctcttttatactaattcctgtatggtgagtcgtacaagaaccactactgaagattagtgtttttacaagttggttactggtagtactttttgagatgttctccattccagtatcttggcaggggaaccaattctctgctctcattgtacgtgtcaagcttgtacgcacctatacttgttatctctgtaacttggtgcataccttctcaatttggtctaaacactcctcccgcaagatctttggtattcaagaatattattcacaacactaagtctcttagaaagaatttcctttcctgacttatttattgaagtacctggaaactttttgttggtagacatacaactttaagttggcttggtctcttctttcttctatttctcaaggaattctgctagcaagatgtggtttgcttcttggtcatagtaggtcaaagtacccttgtctgagtatctttttggacaggctttgcccccagcatgattgttacataagccttcatgcacttctatcaacagtcattcaacttctttcttagtaacacatcttagaggtggcattgagaaaccacgtctgtacataaccctatacaggattagatgcctaacatctttctttctcatttttcttgcttcattcttactttttgtcaagaatcatgtctagaggtatgcc

SEQ ID NO: 46645 - DNA, 765 bp, Cannabis sativa
gtagagatgcactgcgagatccaccgacgaaacttctggggaattccattgcaatccaaaacatgatcagtgaatttctataagaaatagaggattactacgctaataattatactttggtaaagtaaaatcgtaaaaagtaaataagacaccaggatttatagtaatttatctctcatgtcatgatagtaatagagttacgtctactttatattttattgattttgtctaacacaccagagttatgttctcaaaagtgtgtggacgttatacaaaaagaatttctagacgaaatctatgttgcttatgaacagaggctcatgggagaccaactatgcataaactcaataataatggtggtgatgatcaatgttcttaggaacaatgaaaaacataagtcaaggataaagaatggtcctttatccttagtagaatcgtgtatatgtgtgatgaagctttatcaatagtgacttggcactactaaaaaaatgatctttaacctctatttttaactcaatttatcttcggtttttaaataatacactactgaagttatttcaggccaaaccgtaagttttgaaaataccgaagtcgtaaatgggacctgttaaagggatgaacgttttacaacattctttctaaaaacaacttcttgcgacatatcgtctggaatggaaaatgcactcctattttcgaaatcgcgtaacgctgatcgacattcctctttgacatgttcaggcgacatgtcaccactcattaggcgat

SEQ ID NO: 46646 - DNA, 620 bp, Cannabis sativa
acttgtgaatattgaatgtttatgcatcaaattactttcattcaagcattgagaaatcatttgttatgtgaaaactctttctcttgtgcacatgtttttctttatttttatttttcaataaatgtgccatttctaactatactggttgtgattcatgtttaggctcttccaatcaagtttgtaaaattgtatggagattcattggccagttttgcatcccttgttcttccatgtggccatacatggaagattggtttggttagacgtgataacaagatatttttacaaaaagagtggccaaaatttgttcaacattatgggataattaaaattaatagaatctactgatatttgattatagagggaattcaaagtttgatgtttctataacagatgaaacttcatgtgagatagattacactcactttcctttccattctgatgggaagaagattgacaaagcacctgtgattcgtttaacatcaagtgaggagtgttcttctaactcagattccgactcggtttctaactcggtttatgaaggtaagtaaaaacttgaaatatcttaatatgaaatataatgagaaatagagtgttaaaaaatttaggcaattttggaa

SEQ ID NO: 46647 - DNA, 984 bp, Cannabis sativa
gttatgtattttggactaaccaattctccagcaacttttatggatcttctgaatagggtattccaggattttcccaatatatatgttttagtatttatcgatgatatcgttgtgtactctcagtcaaaagaagagcatgagtagcatctacaaatggttttacagcgaaaatgagaacacaagctttatgccaagtttaaaaaatgtgaattctgggtatcctaagtgtcatcttaggacacattgtcagtatggatggaattatggttgatctgagaaagattgattctattagggattggccaaggccgaatgcagtcactgaagtcagacgttttttggatttaactgattattatcaacattttgttgaggaattttccaaaatgtcaacgcccttaacagagttattaactaaaaagaatgaaaagtttatatggatagacaactgtgaaggaagtttttaagagctgaagcagcatttgatcacatctccggtactagcattatcgttacattaggagaagtttgtggtttattgtgacgtgtccaaacaaggtctgggtgtattttaatgtaagctaataaggttatcacttatgtttcatgtcaattgaaggagtatgattagcgatacccaactcgtgacctagagcttgctatagttgtgtttgcattgaagatctagcgacactatctctatggagaaaagtatgaaatttatactgatcataagagcctcaaatatttattcactaaaaaaaattctatatgtgatagaggaggtagttagagttggttaaagattatgattgtgaaattctctatcatcccagaatggccaatgtagtggcagatgcttcgagtaggaaaacagccaggcaggtacaaaacatgattattattttgcctcagttgggagatgacatagtcagattgggtattgagtttgttgcgggcaaactaaataatttgacactgtaa

SEQ ID NO: 46648 - DNA, 1902 bp, Cannabis sativa
ggggttgagatcactggcgatcgggggtttgaatggtgcagcctgtgggtcatatatttgttgattattgcatattaattataacacatgatttccttttacacctttttgatgctattttacgttactttctttaaattttcaatatgtctcagatatatataaatttatatatatatatatatatattatgtaaaggcattgagccatttcctactatatgttttatattatatggtgtactgtcattatactcattatttggggtcctgataatattagcttttcttgaggtttgtcaaggagtgtttttgtgattctcttataaagttgctaattttataatgtatagctacaaaagatattgatattcatgatatataagttacatatatatatgcatacgtttgtgttaatgtataaggtacgatcgttgaccttcatatcaagaatcaacagcctatcatgaaacatcacaattatgtataacgtgttaatttaattttacctaatacatatatgtgttttgtaattaataaagttaaacaactaatattaaaacccatatgtataatcactcataaaacacataaaatagtcttaaagaaataatcaggaaaaaagtgggtgcactagaggatttggatccttaattttcaactttaggattgtcatctatctctcaattgatcgctgcaaaaaaattgtatgtgtttatataaatttaatcacacatatatatagttatactaattattacttgaaaaatatatattttttaaaaagtaattaaaagaaattataaattggatccatatttcttattattaattaatcaactattatttttagacaacgcgcgtcatggataggtagtggtatacaagccctccattactaaatgcttcttcttttttatttcttttttcatttttattgaaattgtttacttaaaaaacaaactaacatatttcgtttatatatcgataataatatttattgtttctaaaaactatattttaaaatatattgttatgattatataataaacaaaagggagtaatattccactacgcaatcatatggctgcaacttgccacgtcagaatggatagagacgtaaagtcaaagaaaccaactcccaccttatacttcattgttacattacatttcatatacacatatctaacaaacaaatacttaaaaatataagatccacattgtataattatacctaaacatgtaaatgtcatttgagaaaaaagaatataaacaatcgagacaaaattcaaacgctacaaacaaactataactataactctatatatatatatatatatatgtacgtagaaaaagaaaatcatagaacaagaattgataggccaaaatctttgtttagagcgcgaaatgcttcatatgtatactttcacttagaaaacaaaaataataatttacatgtcttaataatttatgccaaacaataaataattcaaacttaaaagaacgccatatatatagacgtgtcaaccactctaacaataaatatgtcttatatattattgtatatttcacaaacaaataaataataatgatcatatacaagtcgttgctacaaatataaaaccctcacatatatatacatcataaacttttccaccttctcatccaaacaaaaaaaaaacacatagattagaggtacatttataaataatctttgttctaaaatgagtgaccatgatcatgatcatacactagttgttcatcacaacaagattttgataaaatcagccttagtaagagtcccatttcgaataaccacaacaacattactaagcctcttacttccattatcttttctcctcttggctaggatcgcctgcgcccgtttcctcctcaaccagct

SEQ ID NO: 46649 - DNA, 4706 bp, Cannabis sativa
catgaaccaaatgacacactaaataagtgatgaaaaatacttctatctctttattgattattgaatgataaagattacattgaaatattatttagggcacacagcccaataattttttgttttaatattgtataaaaaatgttgataatcatttaaaatgcaaactaaaaaatagtaaaaattttatcataactatatataaaataaatattatataaaaaaaattaaaattcaggaataaaccaacattgttgtgtagttcaagctaaacaccaaaaaaacacataaaaatagtcatgagcaagaaactaaatttattttaagttctggctaaacaacataaacacaaacattaaaaaaaaacctacagtaacttaccaacatatgctattatattctggctaaacaacaaaagataaacataaagtattttgcttggttttaaatcacttgcttttgctttcgcttttcccttactcttctttggagacttaggtgggcttctggctcacttacaacattctcaacttgtttcattagtccaaacttgtacaacaacacagaatgtcttaggtgatactcttcaacatcaaagtcagcatgaatattctttccctcaatacaatactcagcaaaagcagcaataaacgccccataatcactagcaaaaacaaaaaacaagaagcaacataagacatagtaaataacaataaaactacaaaataaaaacattaaaaaaaaaaaatcatacttatccacttgttcaggaagtacttcagcattgacaattgggaaaggtgcaatagggttcacagatgctggtaaggaataagaaagctcattataaacactcaacagagagaaaaataatggcaacatgacagaataaagttccaaagaaagcaacgaagtagcctcgtacttcggggtccttagagaattatacaaataaataattatagacctcatgtcaagcctacccgtaacccaatgactaacaatctttatgtgcaccaataataacacatggtcagcctaactccaatgtgtaccacatcgaagacgttcaccctttatgaaatgagcaatttggtgctttggatggacaagggagatttattctttcaaacttataaacttttcatgcaaagacttgatgctactattgaaatagcaatttgtagttgtaatcttcatatttgttgcaccagaatacttagctttctttctcaaataataaaaaattacatccatatgttaaaacattaaaaagatgatttaacaaaaacttaactaacaatgaagcaacgagtgaaaccacatctttcgttcaacatattaacaaccaaaatcaaaatctggatcaagcttattaacagcaggaacaaaatacaacaattgaccatacttatccttcctataaacacaaacaaataaaaaaaattaatagaaaatcaaatatctaaaaaaaaaatgctatgcacaaataacatagaaaaaagtacaaaaacaacatgtgtgggtctcttcagcaaaccagatttaaaccaagaattaaaggttttctcatcatcatcactgacatggtcaacaataggttgttgcagagcacataaacctttaacattgtaactacagtagccttagatgatgaactcaactgctgagcataaagagattgcaaatgtaaactgggctttgagattctcctctcaatatgagaagtgacatgatcaatagtaccagcattctcgactacaacattagggtcagactcttctacattaacatcagatgccaaatcctacataaaaaaaagatacaaaaataaatacaattaaaaacaatagataaacataaacaaaataataagggaaaaaaatttactagattagcagaatgtgcggtttgtggatcatatggaactaaagtataagaattctataaaacaacaaataacaactatataataaaaaaaaacaataaacaaatatttaaagaaattgaatgaacaaaaaagaaaatacctaaaaaatttcaacatcttttaaaccagccgtaacaacatcatcatcctcaactggtagctggctatatcctttgaaaaaattatcatcaacaatttttttaacatcttttgatacctcaacataattatcaatatcccttttaccactattatcattatcatcctcctcattgttattatttttttgacgcggtgatcaaaatcacacatgattaacaaagcgacaatccataatcggcggcgacacctcctcgaaccaagatagctcatcgtctaaccgaagggcatgctttgccaaaacatgagctgtagaatttcatatcgcaagacacatgggacaaaactgccccaggaaatttagacaataaagctataacatcctcaaacagcacccctcagctcattaaaacaccctttctttattgatagctgaaaaaacaaacaacaccaagcgacaacagctattagaagagacaatccttgaattaaaactcaccgacaaagtctctttagtcgtagggtgccctccacaaaattaacctacaaaacaacaataaataaaactctattactacataatttaatgcaaaaattgcttaaagacaagatagtaaaataatccatattataatataaaaataattcataaatataaagacttgaaatacttatctgttaaaactgaaaggtcattgatgtagaagccaagagcacaaaatggattcttttgtccattgactgtactacaaaactactctaaataattaagggcaagccataaaaaatggcacgaaagccgtaaaaggcacaaaagtcataaaaggcacaaaaatgcccgtaaaaggcataaaaaccatcaaatcgttatgaagaatattgaatgagaaaccataaatataattaatatactttaatatataattttaaaataatttaaaatagataattaatccatatactttaaatatttttatttgatcttacttataactacgaaaaaacaaaagtgaaaatactatagatatacagaaagagggctcaaaaattgtataaactgtttttaaaaaagtatagtataaaaacaaaatattatataacttactaaaaattagtaataatactactaaagaatagactataaaagttaaaaactaattaataataaaataatactaatgaaccgtcaaataaacaataaaatatggaaaaaaaacattataaaagttgaaatataacatcacatgctaaaaaaccttaataaagaatcttgagaatgtttaatatacaaaatataaataacaaaaatttaaaaaacagatattaaaaccatagtaataaatgttaaataatataagaaggaaaaatcaaagtaatcaataaaataaattattaattctaaaattcttacatttatactcaaaaatttaaaggtaaataatcatcatagtcataaaactaattaatagatttagtacaccaaaataaattaaaagacgagaaaaactttctataataatttacaatactcttaaaaaattaattattaaataatgaatactagaattaaaataaatcaaattgattattgaaaaaagctaaacacaatctgctgacaaacagaagagaattaagtctttaaggatagaaaaataaaataaaataattattaaataaattaaagaaaaagaaataaatttatatagttttttgaaaacattaaattcataaagatatagaattaaatagaaaaaatctagtgtgtaaatagttaagtctcaagaaaaaataaaatttacttaccctaaacgatcaattacaatattaaaaattaaaattaagacctaagacacctcgaatcagaaaaatgaaaaaacaaccaaaattaaatttcagacatatcattaaaccgacagaacataataacggacaaatcaaaattaatataaaactgccattaatgaaaaaacatgtaattaatatatataattattgaccataaaaatagcacaacctttgaaagaaaacgcaaatcacacgtcggtttattgcggcaacaccttagtcaatgccccatcatgttcatccccttcggtggcttccgctatgagcgacactccaacgaattcatctttaagcggaccattgactatttgatctctagccatccttgcaattccctttgcgactgattcaccgccaccacaacccctttgctttgataaattctttaccgcaatcaccacaccaacacagccattgtattccaccacaatacagttattattaagtcttactattttaaccatactaaacgagaattcaaagagtgagatagaactttgactaaaataatcaaaaaagttaataataataataataagcatataaatttaaatatatacagggactcaatataaaaatatatatgtataatatggagcagagaatacatagagaaatttaagtatatcctatttagaagaggacatacctttcattattaacacacgaaagaaaattgaaataccctttggtggtgaacataactccaaaccttatatgtttgaaaccttttggcagagggagatgacggggttaccggaggcgttaaggagcaaacggtagtcgtggatactgaaaacagagcctttgtgaatattcattctttaggaagggt

SEQ ID NO: 46650 - DNA, 1758 bp, Cannabis sativa
tctatatttttgcaaacttggactttagaaactataaaaatgaaaattctccctttttttagtatatattgaaaaatacaattatttacataagaaaaggaccatttttttttcatagtttatattttattcagtaaaaaactcaaatttatatctcaaaaatataattttttattttttatatttaccacttcatattaaaaaaaaagtatatgtcaaggctcctaattagcttggcccatacctgtatttatgtatgaatgtttcaaatttataaactttatgtttttaaatttggtgaattttattttcttatttaaataaataaattatattaataaatattaaaatagaaattagattaaagattttataatgtaagttttctttctcccattaaaaaatgttcggtttaaagctatggtaatttgcttgtattgtcaattctaacaaacttgtaatgactttgtaatgaccttaggatgtaatttatgatctaatgaacactttatattaaaaaaaaaagaagaaaagaaaagatgttttcacttttttaaacacataaaattactttaaaaataatatggggtatttggccaaattctttaaaataattttttgaaaactgaattaaataaataaaaaattagaaaatatcaaaaaattttgaagaatacaccactactctgatattctcttttccaacaacagtacacgactcttcttgtcactgtcaacattactatgcaccgtacgacaatctgtttttaataattgggcctcacctaccaagtccaattagggggtaacaaaatgtatcatcgtgtcgtgttcgcattatattttatgtggctcacttttctattttgtgtcaggcgtgttgatctgtttttgacttgcgtctaattttctcaaccctaaacgtgtcgtgttcgtgttgacctgttttgctattactgaagcagaagttgtagaaaaataatagatttaagttccattagaaaactcatatacatttatatttatagttttttttttatatgtataataaaaattaaaattttaaaatattttcagtttctttttaaagataattaaatttaaaatttttgacttaagattaaatcatatattttttttacataattatattattaataataatttattatttaattttatttaaaaaattatgtcaaatgtgtcaaattcgtgttaagcgggtcgtgtcgtgtttgacctattttatttcgtgtcaagtcttgtcgatctgtttttgaccaacgtctaattttttcgatcataaattgtaaaattcgtgttgtgtttgtgtgctctgtcgaaatcttttttcccacccctaagtccaatagcttaaaatgtaatattaaacaatgtattttactccactagtgagaattgtaatactaaatttagtacaagatagattcgtctgactcattaagcataactaccaataaatatgacattataccctccattattcacaacctaaaaaggtacacactaaaacggtaaaaactcaattgcaaagcttattaaactgcctcgtgaactgagacttattaacgtctcaaccacgttaaatggtgtgtcaatttctgtaaattttattttctataactcattatttaaaaatatttagtttccaaaaaattcgataaataatttcagtcctctttcatgcaaaaattgagatttattttgttacaaacccaagtataaacccatttttta

SEQ ID NO: 46651 - DNA, 2009 bp, Cannabis sativa
atgcacgtggtatactcacctagtttaaataaaatataacatcaacatatcaacatgtatgccaaaaaaatgatttattatgaattttttacacattaacaatgtgagattctgtaactcttaaaataaaaattattctttttcaccattttggatagctcggtaacaactcactctttttctttttagttcactatccccaaatcatcacaagtaactcttttggctatacttttagattgtttttttttttttttacttttggtgactctttttgattcattatttttgaattacaagtgactctattgactctaatttttggatcaattttttagattattggtggttctttttggctcactgtccctcaaattacaggtgattctttttggatcattttttttttgtggctctttttcttagttgtacttttttttttctatcgactttttgtttttgactaagatattcgttagatgttttttttactctggtatcatgttcaaactgtaaaatacatgtggtacgttccatttccaaactaattgaaaaagaaaagaatagtttatggatcttatatattctattatcttttcaaacagtaacaaatgtgagagtactctctaacaagattgttttatttatctttatgatcttcttataacattattaatgtactcttatcatgaccagggccagtatgctctgtaatatgagtgagatccaatataaaatttgtttttattaattttttgtatataaaatagtatttttaaacaaattagaacttttttgcatgtaaaagaaaattacaatttcaaaaattagcgagaaccttattatgtaggaatcctaaacacgaacttaacccacctactcagacttaccctaatgacaactttaaatgtctataaaatattaaatttgaaatgtaccaatagtttacatattaggaacgattttttaattgaacgttgatgcaaccgtttttgttaagtcggggttaaaggttttggggctattgttcaaaacaagacgattactgcttcatgcagcaaatctctttctgttagtaaccactaacgggcggagctcacagctattttggttgctcttcaataataatggtgctacagggagaagtggctattgtcttagtattgttaatgttattaattgttggtgtgtgagataattttgtagatgcaaactttttatgtctctttgccaaattagtttatgttgttgtttaatttgttgcctgtgaagggaataaggtgactcattcattgaaaaaactttgtttatacagattgagttttctcatttttctttggatgtttgttgtattgctaactaaccaaattggtgaggatatgagaattttcttcctcatcctcttatatattattaatttatttaacattaaatatttcaaaacacaaaaaagtagtatgccattaatttttattattattacactataaatatagttatttttagtgataattttttaattacaacataaattttttgtgattaaatataatttttagtaggagtgttcatccaatctaattcgcactattttgctcatagtgtatcagatctgcactaagtgcggattttattttttagatctaatccaatccgtacaatgactcaaatccaattcaaaccgagtcgcaaaaatgcagattggattgattattttagattggttactttttaatattggattggattatgcacacaagtgtagatatctgcactttacgaattagattggattgatcggctattttatgagcacctctaataactttaattagtcataacaaaaaattacttgtgactaaaatatttagatataagctgttactaatttatttaatttagtcacaaccagtattgtgactaaaagcacatttagtcacaacaaattgtgatatttgtaactaatacctttagccacaaattttttatttataattagttacaatttt

SEQ ID NO: 46652 - DNA, 1922 bp, Cannabis sativa
  modified_base (26)..(72): a, c, t, g, unknown or other
ataagtgatgaaaatacttctgtctnnnnnnnnnnnnnnnnnnnnnnnnnnnnnnnnnnnnnnnnnnnnnnntttagggcataaagcccaacatattaaccatcaccttatcaccatgatgtttgaaattttgttgacattgtctgagcttggctgctcttgccccctaacattgatctcatagtaactggggtgaaaaactttgatgtttgtatattgaagctatctattgtgagtgagatagactactattgaggtgtagtgggtactgcttgtgtgcttggtgctcaacaataagttcactttatggtcataagtgagatgaataactgtcaaagagtagtgcggaaaaacatgctaaatcttctgtataggggcaaaatcataggttatttgaagagcctagtttaatgatttcaactcattgaaccttgttaaaggtttataaaaaaaactccaagggaggaaaaagagaaaagatagattggattaaaccctaatccgtgctaagtacaacgtcccataattaggaggagtttagccactgaaagaataccacaactggggcaacgtcccaatcccagaattaataagaaaatctcttctggatgcagcgtcctgcttccagagaggtttctgtaattgatgatacttttcttttcttttttatttttatgatccaagaaagaacacttgcactagcactttagatttataacagaggtcgttatattcttgtgtgaccccaagcacttatatcataaccgtgcttaactctgacgtacaaatagtttgtatgtgtagttgttcaacttaatgaacttacagagctcgcactagcactttaggattaagaaactcagttactagggataacattaacatttcattaaaccatagaaatactaactgaggtgtgcaaaattcttaaatgatactacaacccctggttcccgtataccagggtagaatctggcttccatataccaaagtgtatgtgacatacatggatctcgtgtaccattattttctatgcatgctcatgtaacatgcataggtcccgtaaaatatgtcttatttgtccccgagtgatcgaagaaataccttcattggtcacttgccacaccaaatcttgttgtgctttcttgatcatgggtctcattgagttgttacatgtgtgagcactcatccatttattcaaagattcgtgagttggtagtgtttaactcactaaagaaataatcatagttacctcaagaccaactctacaagctttgttctgtgcttgagaacatcgtcaggtctgtgagctacaaatgattaataccaatgaagtaccaacaagcattactcaacacttttattcattatatattaaattcaattacatcatcgtgagctaagttaaaagaaaaagaagtagtagttgcagaattttgtttttcatcaaagcttagctgaagtgatccccattacactaatgccatgttagaataatagtgtaggggccataccttggatatggatctcctaaagataaattttttgcatcttgttggtttaggaggcttcacttgcacaaggtaaagtgaatctcactgtgaagcgaactgtctaggggacaattggctttattgataatatcatctcagatgctctctgttccagtaccttggtaccagcactagattcaagtggtagtcatagcaaactccaacctgtttgtcccatgttctaatgcttctgtggcgatataaggccctccctctctcattaggagtcttcagtgctgctttctcggtcaatatcttcaggatactcatatgacacatcttcactgttgctagcctatcctgatcattgttgtaaatagagagagaatctttgtaactatctccactcttgagttgtttcgagaagta

SEQ ID NO: 46653 - DNA, 1501 bp, Cannabis sativa
tgcattaattcctctttagtttcaattcatcaagccatcaaagttgttgttgttcaatctgtctaacatggcattacatgtcctctttgaagaactaagtctctgttaaaaccctttattagtatatataaaaaccaatcaattataaaatagttgaaaatttatcactaatgatcaacaattcattttcaagtattgttttgtgtataataactttcgttttgataattctttgcaaagtagtcttcccgactcacatgacatctttttcaagaaagttatatgagatttgctatttacactagtagcgatatgacatcaaagaaggtgctacgcaccagtagtacttttttaacaattctcgtttaaaaagcaatgtcacgtcattgtaattaatattttggtacatattttaaaaagcttgtgttaaaactattattaattacacacagtgacgtgacactgtttttttaaaagaattttttcatgcatgtcactatgcaaatagatttggtttaaggttgttttatcatctctagtttatattcattttctttaagacaaaatgtgtcttcaaaaagccaaggaaaacaatgaattttagagatatctccattttaaccaagccttcttgttaaagaatcataaaagttctgattttgttatagggtcttaaggtcccttagggggttttcttagccgcgaagggagttggagatctttactttggaaaagtctattattaggtgttgtgatttgtgagtttactaaatttggtgaccaagacactaaagcaattgttatgtaggtactcagaaagaactcgaaactcgaactttgtaggaacaaaccgtatgcctgactatttgggctatccatgagagaaaagggttcactcacaagtatctttactttgcagaagtctattagggttgtgatttatgaaggtctataagctctctctttatgttttactaaactcggggaccaagacactaaggcaattgttatgtaagtacttagaaaggactcgaacctcagactttgtaggaacaaaccatatgtgtgactatttgagctatccaagagagaaaagggttcactcacaagtattttactttgtaaaagtctactagagttgtaatttatgaaggtttataagctctctctttcattttactaaactcgggaccaagacactacaacaattgttatgtaggtactcataaagaaatgactcgaacttcagacttcgaagtaacaaaccatatgcctagctatttgagctattatagataagggttcactcacaagtatagaaatatctataaatctaaagtacaaaagaggaacaaagaaaacaagaaaaaagcttacctttttttttcccttgaaaaacaacaatatgttagctaatggaggcttcttttgtcctgtaattatagctactactacttccaatagcagaactccactgtggatgtagttcttgacctattat

SEQ ID NO: 46654 - DNA, 1883 bp, Cannabis sativa
gaattctgtataaatgcaaaaaaactgttttgaagtgtaaaaataaaaaagcctatattttaaattgattattttttaatattaaatgatttaatatttattataatatatatttttcttgcatcactaaaattaattaaatgttaaaaattaaatattaattttaaatttaacaacaaaataaatcaaattattattgttctatatctttaataacaaattcaaatgtacagttctctatttaagaataatctctaatttgttataaaaaattaagtcctaatttagaccaattataaataagaataacctctaaattgtaattagttatacactttttaagtcttgtattaataaagtatacctctatataagaatgtaagagcatagggatgttcattctcaagatttttcatgccaagagcaatgtgatttgtagctcctatatcagcataccattcttgatcaatcgcatagtcagggagcatcgatgatgagtaagcttgatgttcttcagagtcatcaaattctgtcaagaaggcacgggaatcaccaatttttggggtaacaaaccctttgtcaaatctgtaatggcacacagcagcagtgtgaccaagtttatgacagacttgacagattaatcatggtgttgtggaggcacctctaccaaaggttctgggtggagcttgattattattgtattgttggtttgatcctcttcctgatgcaagataatgatttggaacaccatttccaggtcttgcagggccaacaacaagatttgctgagattttattgctggagtcaacaatagtgtaatatctttctaatctgctctcatgagttagtaacaaagattgaatagattcaaaggaaacatcatcaacaagagtatatgcacaactacaaggtcgaatttagggcctagcccattgagtatatgcatgattaaatcattttcgtccataggagtgccaacaacagaaagagaatcagcaagaatctttaccttgtcaaggtagtcagaaatggaaagattgccattctgaattgtggagagttgagatttaatctgtagaatgcgagctttcgattgactggcacatctctgtaccagtgcgcgccaagcagagtacgagctttgaaattgtgctagagatccaagaacagattctgacattgacgagcgaagccaactgagtaggagctgatctttacgcttccagatggtgaattcaagattggtttggccattaagcaatccctcaagtggagatacacctccaagaagtatatcatcgagaccatggctgattacggtgggtattacttgagatttccacgcaaagaaattggatcgatccaatttaacagtgagagacgagtgaagagagaattttttgtggaacggattccatggaggattggccggagcaggggcagcggtggtgggtgcttgagctgaagagcgtggtggatttttagggtgatggggatccatgagagacggtagtcaagggtaatccgataccatgtaaggcttatctatgctaaagaatctgacagaattcaatctatgagattgcaatttaagactagcaaaagctgctcagccttggaaaaagatttcatttatatagatggagatacaaagaagaagaagaagaacagagtaacagaaaaaactaaaatttgttacaaaaactgttacaacgatattaactaactgatcagttggatgtagagatagtgttggttgtatcaaagaataattatattttaacgaaatatatacatatattttgtaaatttatttacgtaaaattaataattttatttcaaattgtagtacatgtgtaaacattataattactctaaaataa

SEQ ID NO: 46655 - DNA, 2274 bp, Cannabis sativa
gggcataaaacccaacagaaggcccaaggcatcatcaaccttgaggatgcctacatataggctttcagagtccttctatctctaacccctttcaagactgctctataacttcaaactctaagttctagctctagccttgactcatccaggagctcagctttccccaactgtttacagacctactacttcttgtctcgcccctacgtagacccatttttctaggtacggggcgacacagattaaatggagtatagctcctgaataagcaaaaattgaggccccagagtatactataagccattccttgaacaagagagggggtaaaagccataatcacaatgactcttcaaataagccaaggaagaactatgatccaaaatacacctagtatacaagtttggtagacactcaagaaaacgtctataaagaaacctacaacatggtccattacaagaagtctttctaaatgtcacatggagaaagtaatagaagtgatcaaaacaaataacgtgagcatcacggggagaagggtcacaccacgaatgagtgaaattatttgaaagatgagattgaaacgttggtcggagcggaacatctgggacaatgggtccaaattctgatcatctatcctagacagggggttgtacacagacacatgatcgtttctagacagcagaatgttgtaaatcctccgtagggggtaggaaattctcaagctccaggaacatcattgccttcactccttgctctgctagcctcggctgggattgcattacttgcaccaggaccgggaaccccatatcctcccgaactctccacctctggtggacggacccgtgaccacaattttaggtggaacccatctccccaaactcagaaaaaagtacctaaaagatgtagaagaaagggaagtgtacgtgctggtgcaatctcctacacaacaccgcataatgatgaatttgcccatcacctgattaattagctcttttctaaaaaaaaaatcgctgagatcttatgttttttattattcattttatttcctttgagtaacaaaattatgaaataacatataaaaataaaaataaattgatttatttttgttttgaaatgcaaatgtatatatatttgtacataaaaaatttagtgagtagttttatgttacaattaaaacttgtaaaaaaaaattaagattttattttatttaaaaaatatacattaatttgatatataacatggaaataaatgaataatgaaaaagaagaaggtaagaaaagaaacacatgtgagtatatgtcatatattcaaattatatctaataaaaatctttaggcgtgaccattattggtgattatgttgcccctaaaagtcaaaaattgaaacttgacaaatttttttaaagatattaggggcaacattatcacctctaaaaataaaattcaaaaatttctgtattatttttaggaacgattttgtcgcctttaatttcagatgattttttgtcgtccttaatagtatatttaggtgcgaattattaaatgcgactttttaagagtgacatatcgtccctaatcagtattattggcaaaattctatagctttagagttacccccgaatactcataattgttgcaccactcacccactccaaacggtcagccttacatttttctttctccaacaaaaaagttaatgtatccagtcgacttcatttgagaggcccggtaactagtcatatacgaaataatatgttaaagcactaagaaatgagagggactaatcaagatcaagtactgttactactgtatattaatcaagtggcctttaaataaagggttgagtcccatacgacaatctaaatatatataggcacgtaatataaataaacgtgatatttatgtaggaaggaaataaaggagtgagtccaactttaagataaggtccaagagggatcggaagagagcatatgagagagcgatctaataagaataagcgcaggtcacataacacgtagtaggttagcatagaaagccatttttatatggcaaattaagggtcgtaagtggtcgtatagtatcaactagtaggagtactagagtactagagtactagagtactggtggtggatatatatattgatatacatatgtatgtatgtataagccatgacgtgagactaatcctcaaagatgccttaattggccttctatttgtagaaaatgaaagacctagctaggtagctaccattgtcctaacacaccatcccacttgtctcgt

SEQ ID NO: 46656 - DNA, 1507 bp, Cannabis sativa
tttccagagtcaagaatgctactactaacaatgtcatgatatacatcatcatcaccatcatcattgttgataatatcatgatcacccgcttctgcgttgttattattgttattatgtggtgattccatttggtgtatatgtagagggactcgaataagtggcatttttggctaccctcttgggtccttttataggcaacaacttaatctataacaattaaagtacttttatatgacacctctaaaagtaatccatactataagtgtcatttaatatgtagagtgttgttattgggcaccggtaacatattattttgcgattggttagcgatatctcttaaaagttattattacattaaattaattatatgaaatctgatatttagtttaactaataacaatattgacacataaaataatactagacactattaatgtaatgataattttcttttattaatcacaataaatataatttttatgcaattactaataaaaccacaaataatgatgatttaattttatattttaaatatataaatatatatttatataaattgttttttcatatgcccggcttctcaaacttttatcaaattaaaatttatcaaatagataatatttttttattatgtgaaatggtaaaattaattacatataatgtctctttaattacaaactcaagcattaaacttatagcaaagtgttaatgtagtttaaataaatatatcatgtccaatattctaaactttttaacaagtgaaacatacatgcatggaactagttgtgttttaacttcaaaaaacacttattaaaatgatccagtagggaataaaggcaactatgaaagaaaagaaaaacaaaatagaaggtgaaaattcttttcgatcgatatgtataaataccttgcttcggatgtggttagattattatgatctattatctctgccaagtttttcatctttttctttttctttttctaaattacaaacatttagaatattctatgcattgcttgatgttgggaattgggataatagataaaaacgaaaagcatgaattgatttgacggaaaatttggagaaaagaatatcaagttagtagtaaagcttatgctaggtgaaatagggatcttcgttttttatattctttaccacatttctttttagagagagaggagaatagaaatttctattaatagacaagctaaataataataataaaagaatactagatcttcaaacaattttattattcaaactagaataaaagggaaataatcaaacggccaatatagtgataacgtacgtataacaatcataacaaacaatcgcatcataaattatgaattcaataagaattcgagatacccctaatttgagtatgaacaaggatagtcatgctactaacacatacgtgctttgagctaattgagattccctcaacgctccaaaatgaaataagactaaaattccctaccatgaataaataaagccctactaccataa

SEQ ID NO: 46657 - DNA, 818 bp, Cannabis sativa
tttaagattagcacaaagccctgagaaattggagaagagcttgtaacatctacgtaaaagagttgttgagatatagtctcctttgcaaaatattaacggatgatctgcaaagcaaagatgagtaagattcaatcttttacatctcagatgatacctaaagttctatttgcttgcaagtttcttcaaaattcttgacaagtactccattcctacaacaaataaaagaggagacataggatccccttgcctcaaattcccttttagcctgaagataaccatgaagagctccattaatgctaaaaaaaatctcagagttgtcacacgactcattataagatcaataatttttttagagaaattaagagctcccatcatttctttaagaaaagtcacagtcaagagtgtcataggctttctaaatatcaatcttgaataagcaagctaactttgcactctttctatcatagccacgaaccatatcatgacaaatcatgatattttgagcaatttgtcttacttttacaaagtcactttagttctcaaaaagaatatcaggaagaacctcacttagtctattacaaatcattttagtgactattttatagaccacattgtagcaagcaatggatcaatagtcacaaacaggttttcggcaaatcgacttcgggatcaaagtaactatggtggagttgatctctttcaataacttgccagagttcaaaaaagataggatggtattttaaacttcagttcctgtaatctcccaagtatccttaaaagtggcactattaaaatcggctccgaggctttttcatctg

SEQ ID NO: 46658 - DNA, 2146 bp, Cannabis sativa
tttcaatactagaatcgaagacgaacaactttcacaactcaaaatttgcctctagagccacccaatgtttctatgcttccaagaagacaaccatgtatatgcaatccttattctaacaagatggaaagaattggacttcatccccttgaactaggtccaaggtagactcatcccaaacaaagccagcgtggtcagcatttccattccaagcatcccataaacccttcaacaacgaaagaaataaagcaggcactacaatacactgacatttgtacacctctaggaaaaagtgttgtcaccttcttatcaaataaaataccacatccatatgctacacaattcatacaaataatttagaataaggaaattcaaagattatagaaaataaaacaaaaaacagaagtaaacaatagtaaaataatacttagtttataaactttaattgtcagaaagccattccctcgtcataagcagcttctggaaccaagtcacgccgtgtagaccagagtagcactcccttggatacttattcccaatggtgcctaccaaccaattttggaagcttttgagtagcttcttatcaatggggcgaagtgggtaaacattcacatttgcaatcgatggcttcgtcttcttcttcatttcggtgtactcatcaaaccacctcggcctcttttttggtctcttctccattagtgatggagtagtgtctaaaacttgtacctccaaatcttgagtatctccaattgatgtgatctgcatattctgaggtgtatagagaacatcatctgcatcattaggtctataatcattcgatagaaagaaatcatctacatgagactcggggtgtgcctgtggctctgcctctgtatttggctttctgtgatcttccaagagttccattagggttttcaagtaactcataatctctttttatcctttcaaaatagtagtctggccttgcttcaaaacaatatgtgccctctcaacactctccaaccttgccaaaatgatagagcatactggttgctgagcctctgagatgctgtgaatagatgcagatggaggaacatgatgtttgtttggtggcggagctcgtggaggtggtgcatcatctctaaagattttggctgcctctacctgctattccaatgttgaggcaagcttttggacctagctacgcaaaacatcctaagtaggttacccatcatcacccaacaccagttcctccaaatccacaaataaaggtgcctcaccctcggtgatggtacttagaaactcttgttgattaggtcagggacacaacacgaagtacactatcaactgtaaataaaaacaaaaatattatacattgaaattaatgaaataaagatgaaaaaatgcaaagcataaaaagcttatatttatagcaaataatcttataactttctccttgctaagtgtcacattctccttactctcataattaacaattcttggaaagcgatgtaactttttgactgaaaattcattacccagatcaaatacggactcatatgcccaatattgtgccaagtacttcacatccttttaagaagttcccttttaagtcttcttatttatacgcttcttcacatctataaagtttttattgcaagtttctatcaattactgaacgaaatcttaccccacgggtactcataaaagaactcaacattgttagacattttaatcacaaaaggcagaacaatagtcttctcctttttaccaatgagaatgcccataataaataaggccacccccaacttgtacacatcattagcttctatgcaactctcaaaaagtctgcgcagtttaccaaagctaatggatggatcaccattgaagtactccataatcaatcagtttgaattttttttcttccatttctccctcagtaggcccaagtaacaagttcaacccagtcaccaaagcaaactcggtttggttgaatctgcatctcttctttgcaaaataaaaagtggacttcttcttccttctcaaattttatcttttgcatcaccaactgatgtaacaatgcacccaaaaactttaatggctgtctctcaaagaattgtttgaaaggagattccttcaccctatcccataatttgaattcctcaaattt

SEQ ID NO: 46659 - DNA, 1144 bp, Cannabis sativa
tactactctgatattcttttaccctctaacgacgcacgactcctattgtcactgtcaacaacaccacgcatcatatggtagacttcttttaggaattgagcctcaccttcctagcctaataactcaaaatgtaatattaaacaatatattttaccctagtagtggactttatacaataaaaccctagaacgacccaaatttgtctggtccaattaccatgattgcctataaatatgcactatcttctacatgtaaaggattcacaaccttgaaatatacatctaagttgtaaaaaactccatagctaaaagcttataaaagtaccttagggactaaggctcaataatgcccgaaccatataaaaatacatgtattctttatcttttattcaatttttctttagctttatttttctaaataattaatttttgaaattctcaataaacaccatgactaccaaacaaaattgaagtaatagagggaaaaaattcttcaactattacaataactaaattcaagctaatattgaccttatttgatcgagtaaaacaacatattacaaaagaaattagagaaacagtattatgaagtataactacatattaaaaataaataactatgtaaatatgacttttgaggaagctcaacactctaacatggtgagatgtcaatttagaaaattttcaagtccttatatattaagaaatataagatttgatcttatcgaatgtgtgtattatgtgatacttaaacatatcaataatacttagctaaatgaattgatgattacaagagaataagcatctttatataaaggagaagaactaaataaaccatctaataatattttaactcactaatacaaaaataagacgaatataagaaagcgtaattaacacaacctctaactcctaatattacaaaatgttatatgttaattgcagtgtttatgatcatatgtacctgctatttatgtattctattatattctatttgactaaggaatgtagaatgcactgtttatctaattaatgtcaagttttgaagaattttacaaaaatcgtatgaaaaaaagacaagaaaccatgctctcatagaggaccagccctgaaaattaatagaactaagatttttttaataaaat

SEQ ID NO: 46660 - DNA, 800 bp, Cannabis sativa
cttgggtggggtgctttatctatgctccccccaaaagaaatgagaaggattctttttgggaatcgatgtctacgagtattcatcttcatagtgcggcatggatggtcatgggggacatgaatgcggtgttgtgccaagaggagaaagtgggaggtaggcttatgtgtgatggagaaggaagaggcttgcgtaatttcatctttgacagtggagctgtcgagttggggggctcaagagtgttgtatacctggactaatgggcaagactggaacaatttaatttgggagaaatcggacagggtgttatgctccactaattggctctcttaacttcctaaagcagatacgaaaaagttgtaaaatgggatcccgactttgggtatgaatatatgtatatgtctataaaagtttaagttaaattaaaatttaaattagcctgatttttgaaaaaaaaaaatcctttgattagcaaagggatgcactgtaattagaaaattactatagtggacctaccattaaggcgttacaattttagtatcagagctgccaggttatctaccgaagaccgtcaagacatgtacaatcatcgtcagagataagcttaactcacggttcaataagcctttacttgtttagtaatttatttgaatataaaagtatgttagtaatatgttagtaatatgttagttatttaaatgcattgtctaaaaatctataagtgcgatatttagaacatatgtaatcgctgtctaacttacctgacttatgggttcgcaagctaagtcttattaaatggacgcc

SEQ ID NO: 46661 - DNA, 1093 bp, Cannabis sativa
tatattgctagagtggagacaagtttgtaatgaaagttaagtgttcaagaatttcagcagtgcgcttgtacttcgagaataacatcttcaagcttcccaatctacaggttataaatatttatttatatatatatatataaaaaaaacatatatatagaaaaaatgtgtgtgatttgagtgtgtctgaatctctatgatctattgcatttggtaggtgcatttgatatttattattctaaatttttcatatacacactttttaagtcagtaacaaactcgaacttttagaaagtttctaattcttattcattttattgattgataatgtactaaaaaattcataataatagtaagagaatattttgaataatttattggtggataatctattttgtcatatatgtatagaatatagttatatatttaaattttattttgaataaaatatataaaataagttatctaacaaaatttaaaaaattatgtagaattaatatttgttagggttattactattttgactcaatgttttgtaaaaattactaattagctagattttttattttgttaaatgacaaaataaaccatatattttttaaaattgtacaaataagatcataaactcaatttttgacaatttttttaatataaccaactcaaagatatttcttaatatgaacagatgcagaaaacaagttttgtcaaaatacttctaaattggatttttttttttttttttgatgaataagatgatttcattactccaaacaaccaaatatacacccaaagaacatcctcaaataaaaagagaggacctcacttctatactatgtacacattacaaggacacaaatcacacttttacaatgaatcgaaccacattttgtcacaattagagactttctttggccatatacatgatactctattcttagttacattttgcacttgttgaaaaatcaccctacaattattctctttatcctcccaaaacttaatgtttcggcagatccatagttggtagatcagggcagcaagagcagctgcgtgcacacctctcttgagcttactcatcctagcttttccaagccac

SEQ ID NO: 46662 - DNA, 1098 bp, Cannabis sativa
actttaaaatgtaaccaaacaaataaataaaataaaaattattttctttctattccaccttaattatattacttgttgaaggggcaagtttcatcctattcctcaccacatagtacacacacaattactcacatccaattaacattataaagtcactatagtaatgcttggtatcatatcacaaagcacaaataaaatagaaaaaaaatactttaatctccaatcaaatatgagtattgttattgggcactagtaatgtctagtaccttttatatgtatcctcttacgattgatacttttaaaagttattatattaaattatatagaactcaatatttagttggaatgtgtgacatgtcataaaatatacacataacaacatgctattttttatttttatttttatttttgtgtcattttcttgaaaaaaaaggcatcaagatagtaagatatgttatatatggtggtttcatttcccactcactcctaactttagccgtaaaaatgagcaacactttccaaatttaggatggtgatttggtgataggataaaaaacaaaaaaacaaaaaatcataaattaaattgatattacctaataatgcatactttttttttttttgaaaatctaataatgcatacttggaggacattttttcagttacactaatcaatttaaatgcttttatagtaaataattgttttggataaaattctctcatatattttttaaattttgttttgtgaaccaaatatgttaaagtaaagggaatatttagatgaaagtgagtgtatagtaaggtgaatgagtttctatattaaaattaatgaaaggagtagtagtttttgcattttatatgtatatgaattttttttaataatgtgatactatttttaaagtttgaacctaaaaatgcaaatataataattaatgaatgacctttaagaaattacgacgaggtaaaagtgatattttgaaagaatgtcacaaggcgcattgaggagtatacatgtcagaaaatttataattttttttttaaaaaaatcccaaatgaaggtcaaaggcggagacaccgattctaataccatgttagtttaag

SEQ ID NO: 46663 - DNA, 1682 bp, Cannabis sativa
aaagtgcccttgaatctagatattgttcagccattctattgggcttttaaggcccaatttgcagcccatgccttgtgtccacattttggattgtacatagagtcttgctaggtcaatcttggttgcctatagacctacaaggatgtctggttggccatggtcttgccaagtcaatcctggtcggccatggtcctaccaggacctagcaggacaaggcctataagatttggcaggacaaggcctacaggatctggcaggactttgcaagtcactatagctccaccaatagggagccagcctttgagtgtagaggccaatctctttcaagttgaggacagctttgtacaccatttccttgtagagaccacgttcccttggttgaacgaaagcttcctttgtccggaagtcacttcctggccgaccagcttgtgcacagatcctggccagcctgtaggctcaccctggcgggactataggcttctattggctggccaaggatgttggaacagctcctttagggctcacttcactccattcggttgttgcttgatggttttgcaataactttcctagatgccctgttctgctactagcatggatgtactccacttgtaccctatctttggcttacgtggatatgccacatcagaaggaaaattgtttggataacatctacagagagttctaatccttcacattgataccatcgcagttgaaagaccttgtcgaggtcaaacaatgacaaggagaacctttaaaggattacctccaaaagggtcatggtcgaggccaccaaggtcaaaggccgatatatggccatactagggggcatccttccattgagtggcttctggaaagatatctagaggatctcaaccaataacatgaaggattttcttgacagagctgacgactttatgaagttagacgaagctatctaacaagcctagacatggcaagttggcaataggcagtcttagggtgccccatagccccacaactttccaaatgcgcatgtaggaactaacacttctgtgcagacctctagtggcaagaacactaggggtaagcggaacaataacagctctggaagaaacagtggcaaaaaggggaagtacaacacttctcccacgacacgaaactaggaagataaggagaaaaggttcacctacttcaccctcataatggagaaacctgagaccatctacatgaccactaagggaactatcccatacatgaagccccctcctatcaaaaaggatatgagcaagtgggacatgtcaaagttctgccagtttcacaatgacttcagccacgacaccaacaagtgttagaatttaaagaaggagattgaattcctcataaggaaaaaaaatccccactttctttgttatgtgtggattgaccaatctcatgcacaaggtgcacaaaatggagaccctatgccaccttcagtggcggatcacttaggggtcattattggcgaaccccacattgcaggagagaccagcaagactagagattgctatgcttggacactgtttcatgagcctaaaagcgatatcctgtccataaaaaaggggctccaagcaacagaagctcggagaaaccactacctctttcacaaaagaagatgctgctcaagtcaatttcccacgcaatcactgttggaatttatttta

SEQ ID NO: 46664 - DNA, 1247 bp, Cannabis sativa
cctatccaaaggtatgaaccctacacctcctattctgatatctgcaactgttgtgagaaatttagagaattcttttaaaggttctcagcaaaataggagggtgaagatagaattagaatacatagaggatgaaatcaattgttggaagccttatttggtgtgttatgtccttggatccaatcaaccattacacatccttgaagggtttgccaaacgtaaatggagtgagaaagtggacaaagtcaagctattagcatatggtgtgttcttaatcagattcaattcaattgagcagagagatgaggtactgaatgggggctacattttctttaataacaaaccggttattatgaagccatgggacccgaattcaagcttagagaaagaagatgtgaaactggtgccaatttggatacaattagaggaattagagcttaagtactaggggagaagtctttgttcaaaattgttgggcaattaggcaaacctattatggtagatgaggttactagagaaagagaaaggcttacttaccctagggtgctaattgaggttagcattgatcaagaattgccaggattaattgaatttgagaatgagtatggaatgaacacctctggggtggttcagtacgaatggaagccaagtttgtgtcaacattgctttggaatgggtcatttgacagctgaatgcaaaaagaagacccatgccaagaaggaatggattgtgaagaatgattatagagtagacagcacaaaaaagcacttggatgcatatggctttcaaccggttactaaaggaaagaaaactagaaacctagaagttcttgcagaaaccgaaacacagaatgcatttagcatactaacaactacaggtgaagagcagcaggaagtacaggaggcattggttgggggcaaacaggacaacacaagagggggggatccctctcttggaaatggataaattcctttggtggaatgtccgaggagccaacaacactcaaaaacaaagagcaatcaagcaatttattcatactcagggtgttggttttgtggggctcctcgagacaagggtcaaggttcacaaattgggaaccttgtaccttaatgtgtttgatggatggtgtttctcaacaaacatagcttaggatcgacgtggaaggatcgtcattgcttggaatccggtaagatacattgtagatattattaaatgtacaagtcaactaatgcatttaaaaatttctacaa

SEQ ID NO: 46665 - DNA, 1421 bp, Cannabis sativa
ttatctataatttttaattttattctatgagaacaataaatattaattttgttttttatttatttttaattatgaattgattcatctctaaattaagtgcggttttgtatgtttttatatgcacaaacccaaaaggtgtcctaatatgagtttattcacttcctcttttaatgatacttctcacacttgactaaaatgataaatgaccaatgtaaatgaacaaattatacatcatatgtaaagaaattaactaatctaatcgtatataagagagatagaaaaaaaccttatgcctttcttattaatatattgcataaaataatatatatatatatataagttcatctttaggagaacaaattacaatgaatagtctcattaactttccatatttttgtaattactttatttgctgaaaaatgaatattaccatttatgaaaatataaagaaagttcatctcatttcttgcagacaactccttgtccatttattccactgccacaacgtaaacttggtagatctaaaccttccaaagtatcttcatcttcattgttgattccattaaaccttgcaacagcacaatcagtggcaaacaagtttgaagttttaaagtctctttctccacccattacaggcatttttgccccaacattcatacgactcgtgtagtctggcctatatgtttggcctaacacaccacttacttcgttacttaaagagaagaacttgaatctaagttcgagatgggcaaaagtatcatctttcgttataccataattgtgaatttttgagtcctccttagttataggcacaacatttgctgtaattctaaggactctatcaacctccaccatcacattgttagtgttaacacctcttgctacaaaaattcttgggacactattggattgccacttagcacctttagattctggtaggataattggctcaccatcgaaggtgatgaagagacggtcaactgagtcatcccatgtttctgttttaagtgcgccaatggagagttggtgcttaccaaagagaattccaattgattgaacccaagtgaaatctcttttcatattcgagttacgttttccaatgaaatgtgcatttatatggaggttagagtcagataataggcaaaagtcatgatctttcttgccatgaaagtagaaagtgatgccatccccacctatgaaacgaggatcttgacacactgctccaggttggtcacattctgtatttggcaaaaaggatataatattatcaattctatcttatatataccaaaacaaatacttttaataaaaagaaatattttggaaaacttactacaaactggcttgcaagtaacacaatcaacctcacatccaccagggcaagagttgggacatacatgttcagtattgtaacattgagg

SEQ ID NO: 46666 - DNA, 2947 bp, Cannabis sativa
aaaaaattacattttttatgtttaaagaattttttttacttttttacgatttttcatagaaacaacataaaaacaacaacaaaactacataaaagtaacgtaaaaataacatttaaataagaacaaaaaattaacaacaaattaataggaggacaacataaaaataacgtataatctataaataaaatcaaaaaaatcgtaaaaatatttaacaaaatttaaaaccgtatttttgtaatttttttgttgtttttgtctatttttaaaataatcctaaaaagaaattacattctatattcactttttatttcctattttaatttatacttttattttactactctttaatttatacccagttgtataaaattttaaacaattgtacagttttaaaattttatttacataaaatgcgacctttatttttttttattgtactcttattatttttttgttgattttttattatttgtatattagtttttatgttattttaatattgttttactattatttttatgtaatttttttgttctttttataaacaccataaaatgtaaaaaagaaaatctttaaactgtaacaaatttactaaaaataatagctcatgtaaatttcacaaaaaaaaaatcaacacaactcaaaactgtaaataagtgttttgtcggacctcgtattttaaaaagcccgcaaaaagtattttaaaaagcccgcaaaaatactagtcgtgttatcccaacaattttatagggtaagctcgacacgtccaatatttttgtataatattttactcgaatcggcttaaactcgtgctgttccatatttttacatttttattacaagctaactgtactaaactatttttgcaatttatagttttaatatttattatcaatttttttatatatatataacgaaaatgattattcttcaataatagctcttttatatgcttttcattccattaagaaaatttacataggaatcaaatgtgttgtttgatttgtgaaaattataatctaaaaaaatttacatgggaatcaaatgtgatgttgaattttgtgaaaattataatctaaaaagaaaaaaagcatcgaacctccatacacaatattggaattaaacaaaatccaatatatcatatcatatcatctttttcatatatagcaaaatccaattaaattggagaaatcccattgtggccaaattgaaacatttttcaagaatccaaagtagagataatttaagtaacaagaacaaaatccatgatgcatatgcataagagccaagaaattatatcttcgtacactgcaaattataaaattatcaaagggaagcacaaaaatttcatcttcatgttcaaagcatacaaaaactaactcaatagaaaaattatctaattaataaataaaacaaaacctctccaaaatgttcgacgaaattaacgattggccttggcaaccctttcgatctcgtcctttttctttatcgcatagctgtatacaacaaaatggacaaaaagaaaaatcaattagtaactacaatcgaaggagcttgttcaaggttaattgacacagcgtaagtcaccaaaagtagtcgattattacctgttggatgaacctttggcggcattaatgagttcatcagccaaacattcagcaatggtcttaacgtttctgaatgcagattcacgagcgccagtggtaagaagatagatagcttggttaacccttcgaagaggagaaatatcaacagcttgacgcctgaccacaccagcagatccaatacgagtggcatcttctctcggtccactggttttacaacaaacaaaccaatcaaacatcaagacaaaaaagtacaaaagaaacatttcaacacaaatgaaaagcattcaaatacctgttaacaactgcatcaactataacttgaattgggttcaagtcagttagcaagtggatgatttccatggcatgcctaataatcctcactgcaagaattttctttccattgttacggccgtgcatcatgagcgagtttgtaagcctctcgacgatagggcactgagccttcctgaaccttttaacagagtacctcccagcagtgtgaggaacataagttgcatgtttcgccggtacaactccaacataatcagcaagcgaaatgtcacttacctaaaggaaccaaagaaaataagttcagttaaacattttcaattgatgagaactaaagaaatttctatatgaacaccaataacagggcacttgggcattgaagaaacataaaactatggcttattaagcaatgtaagtaaattagatcaaaattcatgaaaacaaattacctattcaagtacaaatatatatataagagagactaaaataaacagggcaaagacttggaattaccaagaaaaaccataaacataaccgagaaagaagagttctataaatttcaagttatgtcatttattttgagttgattgttaaaacaaaaacaataatctgaaatttaaagcttatgtaaaggtgtacatgttcgcatttttgtgaatatattagatcaaaaatatacacatgtgagctaaaaaaacaatattgggcagaaatcataaacattaacgatgaaaagatcaataatgtcaaaatatctcagtgaattataatgattctagctttaaatctcttctaaacaaagacattctattagctataatggcttaagaatcattacttgaatacaaaaatgaaaatcggtattgaaaatcttctttcgtgaacttaagatccagaaaaaaaaaatctaagggaaagaacagaacggggtacctgaacatcctcgaagctccaacgattgaaaagcttcacttcgtgttgctcctgaacgatcgcttcagccattgttagagtacagtcgccgacaccgtacaggccagagagagagagagaga

SEQ ID NO: 46667 - DNA, 1057 bp, Cannabis sativa
  modified_base (48)..(73): a, c, t, g, unknown or other
aaggccaaacaaggcaaattgttttcaaaaaataattttctgtttttnnnnnnnnnnnnnnnnnnnnnnnnnntgatgccaaacatgcacttagtctttatggttttattttcttaattgttatttgttgagccaaatgcacatattaccttgtttttacttttattaattgctggaatatctgatagtatattttgtctttaaggttttttttttcttaattgttatttgttgagccaaatgcacaaatttccattatgatcgttttttttgtcaaagtttgatgattgaattattttatttaacattttctttgttttattgtgtaggtacttccgcctctttgtgcagagcttaggaatatggtaatgcaaccaatgattctgccaatggttctcactatagcggaggctcaggtattaattccttcagtattgattaacacaagaactaggaattctgtgttatgcacttattttgtacatttcatatcataattactctagtttgatataagcttggcagttaaatgttttcacatttcttattatgtcttaaactcactgtaggaaaaaaatgattttgagctatcaacactgccagctcttgttcctgtcctgagtactgcagtgggtgagacactgttgctgcttgttaagcatgcagatcttatagtaaacaaggtaaagcgagcaataagctggttttatgttcattgactgttcttgtattttatcgacacttattttccgttatcaattatgtagactagtcaggagcacttggtatcacatgtcctacccatgattgttcgggcttatgatgataatgatgctcgcattcaggaggaagttttaaaaaaatctgcttttcttgccaagcaacttgatgttcaggtaactgcgatttacattttactggaagtgttccttttctgacttaccagcataaacgagaggcctcatatttttcttttctgatatttttatttctctcctctctagctagtaaagcaagcacttttgcctcgtgtccatggcttggctcttaagacaac

SEQ ID NO: 46668 - DNA, 710 bp, Cannabis sativa
aatgtttttagctcaccattctttattttaaccctttaatttcattttttttttgggtatcttaggccaggaattgtttaaatcttactttgattttgcatcaaatgtaaatgtaatgtggacaaaataatgtaaaaaagagtgttagcaaaaatgagaaatatttggttaaatgtgcatgtgtgtgcataattgagatcttgttttggttacttgttattaaatgttattttgtatgtttagattagattttacaacctagaacaggttatgttcaacaagtaatccacacagctggattctatgttgtgtttcattattatatgtgtgcctttttctttttgtctagacatagtaaacctttaagctttttttttctttatagataataaaaagctagttattctctttatgctatgcctttatacatttttttataagtacattgtggacgtacctaaaagacaaaagagataaagaaatagatttatcatgttcatctttcatcaacaattaacagaagtttgacactgataatttttttttaaaaaaaatgttgactgagagttgatcgggtcaatctgttgaccccgccaacccaaacctgtggacccgcaagcttgaattctttgaatgggtgggtttgggtttcattttttagacccaaaacctacgaactcgaaatccgatcaatttgtttgatgttcaac

SEQ ID NO: 46669 - DNA, 3664 bp, Cannabis sativa
aggtcaccaaacaatactaaaaatgatgatggaaaatttagaatttaaaagttatggtaagcaaactaaaataaagttaatataaaaaatttgataagtgatgtcttttgacatagtccgctctgttccatagtaaatcgtccccgttttcaccctccgttccgttcacagcctccctcctctacctatctcctgtttctttgttccttgttagaacccttttgtcgtctcttttatccttttagcatggcttcttccagtcgcatacccaatgatattgaagacatctatgccaatctctgtcttgaagaagaggaagacgatattatcactcttggacaaagcatccagaaggttgatgaaggcgttgacactagatggtgccttgttggtacatttgttcaagatcatcaaatggattttgacaccatacaacaccaactagcatcattgtggaaaccaggtatgggtatgttttgtaaagaattgggccaaaatagatatttgttccagtttttccatgatgttgacataaacagagtcatcgaaggcaatccttggacatgcctccggaaacttctaatcttcaatcgtcttaccaaaaatgatgaccctcgtactattccgctcaataaactggacatttggatccaaatttttgatatgcaacctggatacatgtctgcaagagtggttcaagatgtggggaatagaattggagttttcattgaatctgatcctaacaacttcaaaggcttctggcgtaactatctccgcatacgggtcacaataaacattgaaaagccacttagaagaaagatgaaaatcagtcctgaaggagaagatagtttttgggttcatttcaaatacgagcgtgctcccacattttgttttatttgtggaatcattgggcacaccgagaacttctgtgctaagttgttccaaacaccacttgatcaaattgttaagccatatgggatttggatgaaagcaacgccgatacagcagaacaaatacattggctcgaaatggctccgtaatgtcggatgggaaccggggcttgcttctggtggctcaactttcaatcggaatgccagtgctacaaacatggtgacagattccgatgctgagctggatgaaaccagtaatgatcctagacttaattccaatcccattaatcaaggaggcaatcaagatatgattacggggatgagaattggtaatcacaatactgatttttctccttctcaacctccagctgcatcattcaatgccaacggtatgaaaaagcaaggcctaattattactgatatcaaacgaagacgcacagaggatatggttgatgctgaagtggaagttatttctgttgatgattctgtgggtcaggaaaatcaagtgggccaagaggctgggctggaccaaaaccataacgacaatgggcttccaaaaaacggtatattggcgagtttcacagatggaactcgccacacatcatgagtatcttaagttagagtgggcttgggaaccaacggactaagcagttcattatcgagcttcatgctcaaaagcggcccaatttcatattcttatgtgaaaccctttgcaagaaaaataaagttgaagagatcaaaaatgctataggctttgatggagcttttatagtcgaggcccaaggtcacagtggtgggcttgcacttttatggcaatctagtgatgaggttcgtatcattggatattctaacaatcatattgattgcatcatatctaaagatacttaccccgactatagacttactggtatctatggtgagcccaatagatctcttagaagaaatacttggcaacttattcgtacccttcatgaagacagtcgaactccctggtgcctcataggagatttcaacaatgtcaccagccaagctgataaaaaaggtggacatccttatccctcttggttaattgaaggctttcaaaaagtactatctgattgttccctcaatgatttacccctccttggttatcaattcacctgggaaagaggccatggatctcctaactggattgaagcccgcattgaccgcgcccttgcatctcattcttggttagacaattttcagcttgcaagacttctcaatatcgaagtatcgacttcagaccactgccctctcttgcttgatccctgtttcaagactcccactcctaaaattcacagttttcgcttcgaaaatgcgtggattggtgagcccatgtgtgagcagataattcgggacatttgggatacttcgaatcatcttgacattcaatccaaaatctctctctgtggagatcgccttctctgttggggtaaagacatcactggttcctttaaagaaagaattaatgattgtaaagctattatcaaaaaatacaaaggctgtcgtgatcttacaagtgttcaactctataaaaatgcacaacaaaatttgaatactgttctcgctcagaaggaggcctactggaagcaacgatctaagcagctatggcttacctctggtgatcaaaacactaaattcttccacaaagctgctacaactcgtcgtcgcacaaaccaaattcgcagcctcaaggataactcgggtgtaagtattgactgggataatggtcctgctaattttatacaagattatttttctaatctttttactgcctctgaatcttgctgggaacatgttgtgaattgtcttgagccaaaaatttctgcagagcaaaactcaattctactacagcccatttctgctgaagaaatcaagcacgcactattccaaatgcatcccgacaaatcaccaggtccggatggcatgagccctgccttctatcaaaaattctggcatattgttggtaatgatgtgatcaaaactgtccagaatttcttcactactggctgcctccctgttaatctcaatgatactaatgtggttctcatacccaagaaaaagaagcttgaacttattactgaaatgagacctatttctctatgcaatgtcctctacaaagtaatatcaaaggttctcaccaaccgtatgaaacacctcatggggagtattatttcagaaaatcaaagcgcgtttattccaggacgcctcatcacaaacaacatcatgatctcctttgaagtgcttcattatcttaaaagacggcaacaaggcaaagaaggagttatggcactcaagcttgacctcagcaaagcttttgatcgaatagaatgggcttatttaaatgctatgcttctaaagctcgggttcgatgagaaatgggtatctctcattcacaattgtttatcctctgtcaaatataaagtcatctgtggtaaccatgagactaatattttctgcccaacaagagggattagacaaggcgaccccctttctccctatttgttcctagtctgcgctgaaggcctctctgctctcattcgtaaatttgaagctagaggttggttacatggttgtaaagttgctagaggtgcccccattgtttcccacatgctctttgctgacgacagctacctttattgtcgagctaccacagctgaaatcgacaaagtcaaagagcttttgctttcttttgaaaaagcttctggacaacaagttaacttcaacaagtcttctgctttcttcagttccaa

SEQ ID NO: 46670 - DNA, 1286 bp, Cannabis sativa
ctattcaacaaaatacaaagtggtaacctacgtactaactatattttattttttaaggaaaaaaaatatataaaaaaaaaattcaagtcaattttgtttaaaagttcattattatgcaacatattatataataagtttctcaaaaaaaaaaaaaaacatattatataataataataataataattaaaaaattgcacatgaaggtgtggaaagtgatgtataaatatgaactcaaatgacaaagtaaattgaaagaaataaaccaattttttttaagaagaagaagatcactcaccacaatcaacacatctcaggttagttttatacaaactattatatatatttatgtaattaatattgagtattggtttatttttgttctgtttttttttttatatatatatatatcaaaataataataaaaaaaaagatttctgggttgagttttaaatgtatctgaatctgggttttcttgaagtatagattttataaattattacataatttaaattatgtatttttacttaatttttttttcactataaaaagcttattagttttttcatggttgattggcaggttcaaaatttaattaattattaaaattaataattaaaacatggccactttcttaataaattgttttagttcaaagaaatccatagttcctagactaagatttcatagctatgaagatccaactattcttgcctcagaaactgcttgtaagtacttaatttctcttaatatatataatatgtctcaattaattataattatctctttttaattaattaataattaattgtggattgaactggttattgatttaatgtatctgttttaaggaaattttaacattgaaatatttttagaatagtagtcaaaattagctgttattttaaggttattaaataaatattaattattaattttgaaatgatcaaatatgaatagaatgcagttttttttttttttttttcaaaaggaaaaaaatagtaactattgcattttaatttaacttaatatagtattacattttttttccaatatactaactttttttaaaatataaatatctgttaaaaataatttaagaatataccatacaaaaaatgtagttaattaattaactaattataatataattttgagacttttttttttgaattatttttattgacagttactgtgaatgaagtggaggccttatatgatttattcaagaaattaagcagttccttaattgatgatggtttaattcacaaggtatttctttaattaat

SEQ ID NO: 46671 - DNA, 1653 bp, Cannabis sativa
actcaagcagttccaaatccaccaactcgcagttttgtcaagtccccttgcccgaacacatccctctccttgacactagcaaacggcttgaagcaatgaatctcacctaccaaccgggtgttgcttttcctgcggactcaaaagcttcgaggaagagaaacaaacccgattcaaaggacaaattcaaacgacaagccgaaatggtgaatggagagctccgccagcaaatcaaacgctcccgctcggacaaatcacaagccacgggaaactcctcaagaagcgcaggccttgcccctgagcaggcctgcctgctgccatgaagattgtgagctggaatgcgcgtggaattgggagtgagcgtgcattccgtaacctctcccgtttagtgactgtttgtaaacctgatattttgttcattatggaatctaggcttgctaaacatgatgttgaaactcttagacttaaacttcattttgattcgggtctggaggtccctagaattggtagaagtgggggcctcattttgttatggacaaatgatgtaatcgttaacttactttcgcaatctataagtcattttgattgttatgtctcttgttcctcacaaagcaaatttttccactttacctgtttttatggctctccaatagagtcgaatagacgtcaaacgtggaaaattcttgatcggatcggcagaagcaatcctattgacccgtggcttatcattggggattttaatgcctttttgttctcaaatgacaaacaagggggtaaccctgatagaggaccttcaaccgacttcaggcaatttcttgaccttttcaatctcaccccccttgaccctaaaggcgcccccctcacgtggaacaataatgtggctgccccgagaaacattcaggagcgaatcgactgggggatcgtaaacaatgcttggatcaacaatttccctaatgttcttctctcccatcttggttttttcagctcggaccatcgtgccttagagttggctacctcaaacccccacatcacctctccgagtgctaataacaagcggtttctctttgaaaacgtttggctctcggacccgaattggacacaagtctttcagaaatcttgggctaatcttggaaaccttcaggcagccattcccaatttaattgccatccaaaaggagtgtgccagtactcttaacgcttggaaccacaagaaagattttcagttcaaaaagcacattctaaggttggaaaaggatcttgagaaagcccgtgagagcccagtttgggacgcccaaacaattgcaaaaatcaaagatgtccaatccaggttagacacccttctgtacaaagaagaaacctattggaagcagcgtgcgagaactcaatggttggcccagggcgacaaaaatacgaaattcttccatcgttttgcgtcgcatcggaaaaaaattaataaaatccacaatctcactttgtcaaatgggaccactgtttccaatgaggaagctatcattcgcgaaatggagtcgcatttccaatcgcttttcacttcctcggacccttccgcaacggacatgcaagagctttagaaggaatcgaccgctccctttcgattgatgacattcaccttttggaagttccttttacccacaccgaa

SEQ ID NO: 46672 - DNA, 1007 bp, Cannabis sativa
  modified_base (42)..(51): a, c, t, g, unknown or other
ttctgatctttattaataagtaactctgattatattgaaatnnnnnnnnnntagggcacaaaacccaacaagaggttgttggatatggtccccatatgtctaggtgaataagatcaaagatagccatagagaagttattgtttgattgaaaaggcaatttcttttatttttccaagtgacaagttggacaatgaaatggaacagaaaagtcatgaggaaattgtatttatttattgatcttattggaaatcattacataaggatgactgagacaattgtgccattggttgtgatctgtttctacattacaagaaattgaaatttgagaagccgagttgatgtcttgttgtatgtaatagagtttgctatctcttagcagtccaaatcctcaatgtccgagaaggtcactgaatgaagtattcattagaagtaaaatacatgtaattagaagtagattccaatagtgcagtaacatatagcaagttaaatttgaatacaggggcatctaaaacattaaagagtgtcaaatttgagttgattacaacagttccaacattttctatcttaactgaagtgccatttggcaaattgacagttttggcaaacgtggtgcctagcacccctgtcaatgatccaagaattgaaagaaagaggatcgattttaccagtaaagttgttgacacctggtgtgtcaactgatgtggaggcatcagttgtaggttgtaactgttgagccaacattgaaatgagttgttaacattgagaagtggtaagttgggactgggaaagatcaagattgggggtcaagacttgcatattctgaggattacgattagatgaaacagtatctatttttttggtgttgctcgattcaactggttttcaatttccataaccagagagaaaaccatggaggaaatagcattttgtctttgtaatagccaagtttttgacagtgagaacacatgggacgtgggtttttgttcttgaattctgatttgttgtag

SEQ ID NO: 46673 - DNA, 2045 bp, Cannabis sativa
cacaatcatttaataatgatccaataactaaaaaaatgtaacaatgatggttacaataaaaatgtaactattgaaacctccttcttaatatatacatatattattatatataagtaatatgaatatttttaaatatatattaaatataattggatcagatcaattttattattaaatttttagatttatatttaataaccaatctagtattaaattagaattctaacttctaacatcagatactattataattggatatttaattttttataattttttttgagaaaatttactgttatataaaggccggaataccctatatattatttatttttatttttttttcaaatttacagtttgggttgctctggtgattttttcagtggtttctatgaggattgctatacgaattttagttgcgatttaggttgctctgttagttgctgtagggatttttgtaagaaatttcgtaaaaatataaaagaaactattttaaagtgtataaataaaagaaaacatcaatttaaattagaaattatttacaataacaaagattttttttgtaattagattagttcaatttgattggattgtatcaaatccactcctaatatatagtacagtagaacctctattcaagaatacatttgggaccaagaaaattatattctaattgagagactataactaaatagggttacgtactagaaaaaaaaataccaaaaaatattaatgtaacaataataacaataaacaattattagtactatatcataatggaattattttagaataaatataatatttatacatgtattataatttggattaaaattattagttttacttaaataaatttataaaaataaatatatgtatatattttgttaagatgtaattatatttatataggtatactttgttatacggtttttaaaatgtatataattaattacaattttagaggttatttgtatgaataacccaacttgaaacttaatattttataacaaattaaaaattattcttaaataacaattttactctattgattaggcagtagggtttataaatatatgatccgggtctatatattggtaaaagaaaatagtatttgtatgacatcatctgaatctaaacaacatccaccaaggcattaaatgattggacaagattttacgggaatatatattttaatcacgaacaagttgacttgtctcgactttagaaacatttcaagagaaataatgcattgctcaaagtgtgtgttgctttctaaatttctaatataccgccctgcgtgagtttagttctaattaaatttgaccctactagtgcatataatgcaaattcttggactactgtgttaaattgaaatattaatttcattgtttagagcgttgatattatttataacatataattttctcaaacaaaaagtactggtataatttataatttcactcctcaattttaacctttaatttcacttttctctctttgttttcagtaaaacctgatatttaaatatttaattgaaaaacaccaatgaaattaactgctataagaaaaaaaaatagttacagaaaaagatttaaacaaaaaaaaattggttttttttttttacagctgaacaaaaatggactctttctttttttcctttttcttttttacaataccaattgtgtaaaataaaaataacaaaaaaaaaaatcattgtactatatatctgattgttcaaggaaacaaaatccataagcaattacgaaaacaaaatactatttgttgattgttgtagacgttaagcatattcgaagtctattaatgctaacagatgactagatcaatggttccttaatttgttaaatgtgactagctagacagagtactttaggacaagataataggacagattatctgaatccccaattacgcaaaataacaaaaacaaatcaacaaatatatatatatgcaagagtcttttgttaattaccaactcaaaaaaagttccatcattaaatatatccttattagggatataacca

SEQ ID NO: 46674 - DNA, 2532 bp, Cannabis sativa
  modified_base (2505)..(2506): a, c, t, g, unknown or other
tactcgggatcccgacccatatggttattaagctataatttattaaaattaactttcaagtttattaaatataaaatacgggcgttacaatcaatttcttctaccatggctaatgtcttgaattttttaactcattattggtcatttggttaattgtgaatctactactgaaatcatactttggcgcaacttttcaacactcgatcctaatgtagcatgatcacatgatgtccttattaggttttatgccttaaatataaaatctttattgtaatctcatcacttaataataaaaatcgaaaatcttttatatgattctgtcaattgcttagttcacacgttttgtttcagatgaatttgtgtttaatataaggactacaaaaaacatttttagtgtcaataaaacagacagttcaagttaaaaactaacagtatagagcactctaattttgaggcgtcaattgtgaaccaacgcctatgagtactcaatggcatcagtccactcacaaacacaatacacaatactgatgccaaaaaaacaaaaaatttgactcttaagtgtttgtttagaaccgacgctattgaacttataagtgtcgcttctaaactgacaccactgaggttatttaataaatatataaaaaataaataaaaggcccacatgaaaccatactacatatacatatttttttataacaaatcctacatttgagaaacacatttacctttctgtctctctatctctctcgaccacattctttgctctctctttattttttttatccaccacccccatttgcactaggtccagcctttaaccactgcccattcacatcagcaggtcccattggtcgtcacactgtcgtcattcgccataaagcccactagccttcctgtcagtgttcacatacttgactgagctggtctttctgtcgttgtttgcacatcaggcttagctactctttccatctctatttgcatatcaggacctgcatccacctctctctcatcacataaagagatgatgatttcaaaataaatcatctttgtctatgtctctctgtcaaaataaattaataaacaaatgttcttctcttcatatatacacatgtatatatatgtattattctatcacattttatattgagttttttgcggctaaagcctctcaattatcattctacttgcactttacctactaagttcaaattttgaccgtaaaaccctccaaactactgaacttcatgcaaatttgaggtgttatctattttttacacttaactaccaatatagactacttatgtgtacacttttgtatatatttaaaatatatattagtacacctaatattattattttaaaaacataaaaattatttcaaaaattttaatattttttatttttttaaatattttattttttattttttataattttattgaattttaaaatgaattttgaaagtaatttttaaataataatattaggtgtaccgatataatagtgctacgtgtacaagagtatacacataagcagcccacaaagatagttaaccgaatgacatcttaaattgtctatacttcaagagtttggagggttttactgctaaaatttgagattcgagggttaaatacaagtaaaactacagttgggagggttaagctgttgaactctatatatagtgtgatacccgaaattcggctatgctctcgaagctgacacgtttccaacagaaggaatatgaaaccactctaagggtataataatatcatatcagtaatagcatattaaataactcgttattactacataaaggtttgatcgataaatattcaaaatttattgactatatagtcttaagcgagacaaggataataactattgagctgagattaacgagacatatgcctacctctgaatatacaaataagaaaggagatattcatctactcgagtacaataatgtaaaatataattaccttgcattacacctagcgagaagatcacctcgcactattaatgccaataaaagaatatgacgagacgaactacttccaaacagttaacattttttttttattaagatgaacaaggaggataacacgtatcaaacgagatacaaccttccaagttagcaattaccgtctaagggataagagtaaaaagtgactgagtgtgtaacaccctactagtttaggcgtgttaacgtgatttttaacttaactgtgcagctcgttgttaatcaacgagtttattaaaaatcgtgaataattaaaactttatttaactaattataaatacaaaataacataattgtattaaccgagatcccattttataaaatatttacaaatgtttcatagtgcaagttacaaaagtttatcgcctagcgattatacaaaataagccctgctgtccgaaaaactgtatgctccaggcctaaccgcccgatatgtacaatctcaatctgctcgttctcacggctgctcaaccttagccttgccnntacctacacatgcaaacaatatatgt

SEQ ID NO: 46675 - DNA, 1638 bp, Cannabis sativa
tatatgctactttatggtatggagttgctctctattggcacattttgaaaagtgaaatatttggtaactttcactgtttttattcccttttaatatcaccatcttatcagttctttacaataaaaaatcaacttgtttgaacacaactacaatgacagaacctctaatttgtttcattagatttactgatacaagttttgtttttgctgttttaggatggaaatgaaatctttagaaatgaaaaagatagtggctacattgagggcgttagtagaggtcatggaggcacttagcaaagaagcagatcccaggggagttggtggacttataaaagaagaggtacatgttcttcaaataggctttccaatgtgcacctaaactatagagatactggttgtaattaaatacttgatgtattttgttgcctctaaattatatattaagaagtgctgtattcatattgtactggaaggttaattctgctatttttggttatatctattataatgtttaataattggctattgtggtaattataaaaaaattcgtaagtttgctaaaactatgggcattgctgtttttttttttttttttcaaaagaacatgagcatcaccttttgctttttaacttatgctattttcaaaggatctgtggctttggaaagaatattactacaattgtaatggttgacgtgtttattgaacttatgaccttatgttcttggggtttcagttgagaagaataaaatcatctgaggcaacattatctggggagttcacaccctataatatcgtaccattagaggcgccgtcattgaccaatgccattggaatattcccagaagtaggttgaatatattctgattgattgcattgtctagcttctatacaaagaacattcttccaattaaattcgtcacactccctgcaccttatgtcattttggctaatttaatcattgtggtcaaatttttgttatttgtgacatgaaatttcattttgggtaattttaatcaggtcagaggcgcaatatctgctattagatatactgaacactttcctagacttccagatgattatgtgatagttggcgaccgagatgctgacatgtttgatcttctggaaattgtgtttggctttcaggtttgtatatacttctaatttcttacatctaccttataactatctgaaatggaagattagtataacaaaggacaatgtacatgatgtagcttttgttaactatcttctctgtccatgattataatgtttttttatctgtattaaaactgtagattatatttttaatagagtgcagaggtcaaattggaatacacacacaagactcacacattatttctcgttgtgctatgctaaatattagtgctgctgtggcagtgtagatgcataaagtacataaatgagtagtagaacagatttctgcaacaatgaattcattaattatttttgaatgacggaatggctgcagtgtacagaaattcataatgctcgtcttatattagacatccacatctcttaatgtcattagatatttgaagtatcttcatagttttgctttaattttactatgtttgatctgaaacatttttaatttctaaaactgacaatgttcacctt

SEQ ID NO: 46676 - DNA, 1925 bp, Cannabis sativa
  modified_base (679)..(697): a, c, t, g, unknown or other
gtggtatatcacttagtggtactccgggtatggaacaaaccctaccaacattcgtataatgaggtatgtagtgtatgtgatatagtggctgtatcctagtatgaaacgttcttactcatctgttaatccttgaaaataggtgtatgggcgcctagataaaagtcagtattatatgatttgttatatgcttttaatactgagtctgtcgactcacatttttgcttccatgtgtaggtaaaggaaaggcaaaagttgaacaagagtgagcctgagctgggatgaggttgtacatgtcatggcggcgcgacttggagtgttcggtctcgggacaactagggttgttgttttgtagtcgttgtgcgacctgaatattgtattctttatattttgtataaaagttttaaaatgggatcccgatacttataatgagtatgtaaagttataaaatttaatatttaatataaaagttataatttgacataatttttgagaaagttttttgattagcaaagataacactgtaattgaaaaatcactatagcgtgccttagcattagggcgttacaaatttggtatcgtggccgccaggtttgtctaccgaagcttgccaggacatgtacaatcttcatcaaagaaagctcggctcacggttcagtaagcttgtacttgtttagtattnnnnnnnnnnnnnnnnnnntgttaggaagcatattagattatatttatttattttaattacgttgcctcaaaatccattagagcagtattaagattttatgatcgctgtctaatctgcctggcttatgggttcgcaggctaagtcctattatatggacgcccagtgaaatacaagaagtcagggtaatagggttcagactcgaggctgtcagggaaatcaaattccccagaatcctcgtggtcgcgaccgaggccgtggcagtgtacagggtggtcatcctgtgaatccaccacaagctcctcccaattgggagcaaaggttcatgcaagatcgtatccgccagtaagatgaagaaattctgagactatggaagcagggtcctcctgcagtgcctccaccacaagctcaggccgttgtatttcctgtggtgccaacataacaacctgttgatggcaactgtatggagtcgcttttttagagtttcattaagcaagcacctctagtgttcttaggaggtcctgatgtgatgaaggctgagcaatggctcactgtaatagagtaaattttgaatttcatgggggtagttggaaatgatagggtgacctgcaccacattccagttccaggaagatgctctagtatggtgggaattggtgtccctcacatgggacatcactgttatgacttgggaggatttcaagaattatttaatgctaagtactacaatgaagcagtccacagtgctaagcagaaaaaattcactgagttggtgcagactgagggtatgtcagttactgagtatacaacaaagtttgaccgtctgtccaagctagccttgggtattgtgcctacaaacttgaataagaaacagaaatatctggcaggtctgaatgtaaaaattagacatgatctggtgattactacaagtgaggcaacatcttatgtggagatggttgaaaaggctcttcgagctgaaggtgtagttaagtttcttcagaagtccagtgtgactccgagtgttggtatgacccccactcttcatacttctatttatggtagggatggtggttattccaccactaactagaagagaaaagttaccccagcatctggtggctcggggctgagcaagcattgtaagaaacatcatcttggagagtccaactagggtacatgctttcagtttggcatggtggggaatttcaagaaagattgccctcagccaaagaaagaagagcagaagccag

SEQ ID NO: 46677 - DNA, 3838 bp, Cannabis sativa
  modified_base (2164)..(2176): a, c, t, g, unknown or other
tggtggtatattaattttttttcaccgcgctttccttgagatatattgcttctatattggtttaaggtatagtgttcgtaaattactaccactttcatttgggagaatcagttgaattttttttgagaggttgactgtgggaggatttggttgaagaatcgggtgaataaatccgacaaggcaatgtaaaacgaatccaaaaaaatataggacagtttcattgcctgggagaaatggttgaagaaactagttggaaaaaaatggatgagagaataattttgttgttgtttgggaattgctgtattttggaggaatcgctgaagcaaacagtagaacaaatcgaaaaaaatagagttgagtttcatctatataactaagggcattttaggtattaacatttataaaaggccctttacttttttttaataaaatggacattaaccttcatcagtgtgagatttaaggccatttgttacaatttcccttaaatctttttccattattatccctcacagagttcttgctcatatgttgagacaaaaataagaactcaatatacaaattatattattagcccatactaatccttgtgtgtgatggacgatttggaagatcactgtgtgagtccttcatcaccattttaagggatccttgaggtgtaaataattcctttcgtcttttatttcagatttaatatgtatacatgtggtgatcttgagaatgtggtatgataataattagatttttttttctagcgcgtacctgatttagtagcacaaaaccaacacaaatatttaatacatctcacatctaatagaactaattaattttttcatttagtttgtatgagtaattagattttatgttgttataaataaaaatatatatatatatgaaaaataacattaatttttttttttattcgatggatccaatctaatccaataaatattggatctaaaatattgggtagatccgatccgatccaaaaaatactaggtttaaaatattggataaactcgaattaaatcaatagatatgcatgaaatatatctaattgatagatcgatccaattcaacatccaatggatgttggattgattggatgactgaaattaattggatcggatcagatggtaaaatctaacatccattatataattggatcggatctggataagcctaaaaatattagatgtggtccaataaataccctaactagacttttatatgatagaatttataaaatactcaaaaatattcatataattctagatttaatcatgtttctaaaattattttaatattgaaaaccataagaataaacatattctgctaaataaaaaaaaaagataaatttgagatgataagtaaaaacactaacatgaagtcattagtttcatattgggttatgatatttcattaatacaatatatattttttcgaatagaaaaggagagaatacaagaattttagtgtttattgaaaaccaatatatatttatagactcattataataatgtgtttttggtatttataattcattagcccatcaaatataaattaacttataatatctacacgtaattttcataataatttaatctcttgtgatactcataacatagtcactcttgtgatactcataacatagtcacttattacgatataatttaaattataatttataataacatataatacattactcatagatatgtacacataaataaaattttattccaacaatatataaataaataattaacataccaacaattaacacacattggtatgtgcttaataatcttattcttgaaaacgagattcaacggatcatattataattaaatttaaattcataatttttttttttatcacatggctgatggctatataatattaacacacattggtatgtgattaataatcttatatatatatatatatccttgaaaacgagattaaaaggatcattattaaatttaaattcaaattttttatcacatggctgatggctatatatacattatattatacattatcgtgattaactatgtccactatgcattattttccgtgcctatatattctctctatataaaaaggaaagaagatgaaaacaaatttacatgtaatgtatcaataataataataataatannnnnnnnnnnnntaataataataataataagtacacaaaatagagatgatcacgttacacacacacgttttcaaaaattttatatatattgaagattcgtattgattattacacaaaattaattgacaaatagttttcttcctattatatatgaaattattagcaagtggtaggtgcactaataatcacgtgctttgaccatatcatatattcatgcatataattatatacagttgtgtgcgttacacaaattatcagcaatatcaattgtagacataatagtataaatatggcttgttctactaagactatgaaacataaatagagcaaccaaagttgatcataatattgtagtttctctctaattattcattatgagttcatttttgcttcattttgtccatcgagactttcatggggtcgtttccaggatgtctttcattgatactcttctttttcttgtaaatatcttctctctctcttgcatttacatctatatagatatggtacataaattattaacaaataagaagaagtaaaactcatgttatgctttttgttttctttcaaacaagatttgcaaagttactaagcttttatgttttgacccttttttcctttattattagttttttttggcatatagatatagttataataaggagagatggaatagtaagacgttgattcttattttgtaggctgttatatatagatagatacatgatatatatatttagatcatgatgatacaataattaatatatataaatgtacaggtgatgcacaaggtagataaattgggaatatggcacaggttgccagtgattttagggctattgtacttagcgattcggcggcaccttcaccaaaactacaacttgttcaatgttggagaaaagcctaatggagatggccctcagtttgaccccaaagattatccttacagaacagccgacggtgaatataacgatcccttcaatgaagataccggtagtcaaggaactttcttcggccgaaacattctaccttttcctcagaaacataaggtatatctatatatatacactctaccaccttccaatattaattaatatcccaattaacatatatcacaatttagtttcattaattggttttccccttaatttagttagaaagcaaaaactactatatatatttatatattgatactttgtcatcagaattttaaataacatgtacatacatcgatcgaggtaagattgttattaatacttatatatgtaatatttgacaggtaattatattttcagacacctatactttctttatttagtaatattgacatatatactacatatctataaatataaagtagagatctttctattgatcatgcaggccatgtagtaaataataaataaataaactgttttagcattttaattaatgtagattacaaacatatgtacattttatactttgtaaaaataaggatagctacaagatgtgcttagcactattttcaatgtcatacaagcaattaaatatttaatcttatataacttgagaaaatagtttttagagaatatcgctaaccaatcaataatgccacctataaaaaatgatggagaccacactcaataacaatactcttgtaaaaataatttcatatagttattttatacatgt

SEQ ID NO: 46678 - DNA, 1457 bp, Cannabis sativa
attgtgccacgtgtacactgtgtccagtctaacatgacacttaacacctaaaatggacaaaatattaaattgctaacaaaacacgagtattaagagttttatcacacaaatttaagttttgggggttaaataaaaccaaaataaaacttttagaggttttgtcgctatttacccattattttattatatatttatgatatatatttaattatatatgatatattattttattattcgtctttatttttttgctaggaattatttattttttatttattattgtatttttttattttaatttaatttttttttaaaaaaaagaataaaaaagaaataaataaaatagttcagtctactcttaaaccaaatacagaattacgttcagcataatccaatcttgtccagtcctgtccaatcaagtcattttcagtccaatctcgtgtttcaaacagacccttcacactctatctttctcccattttactctctcgcacaatcgctcccttgctctttccctctttctcatgaaatctcagcccaactcgggttattagactttcctagtttacccttaagtcggttaagttagtttatgattacacttcagtcggttatgttagttagtcctgctgtgttttattaacttgtatataaaaggcattttctcatttgtaaccattcagttctaacaatcaataaaaaaacataattcttttttctctgctttctgctctaatatggtatcagatgaataacaaccctcatcttcaagcttcaacctgaatattcaatcaacaatggtgagaactcgtgctacatcttcggctactaccacagatcaagatcctgatcctgtgatcgatgcctccacagctccgccaccacaacaacaacctgcaactaatcccaatcgagttgacatcccagctccaagttcgaatcaagaactcaacaatcggcctgcatatgaagatattcgatccccatattttctcagcacagcagaccaccctggtcttgcacttgcaactccaatcctcactgacaagaattttcagccatggaaacgcgattttcgactctcaatcggtgccaggaacaaaactcccttccttgatggatcacttcctcaacctcctgctcaagatccattacacggttcttgggttcgttgtaaccaaatggtcatgtcctggattctccattcagtttccccagaaatcaagagcagcatcatgtatcttgatactgctgctgaaatgtggaatgttctaaataaccggttcaaccaaggaaatggtccaagaatattcgagctgaatgaaaatctcacatacctccatcaaggtgaagattctgtcagcacttacttcaccaaactcactgcaatatgggatgaaatcaaccagttaaggccaagattaccatgcacctgtgctgctgctgcacaagcacaa

SEQ ID NO: 46679 - DNA, 2784 bp, Cannabis sativa
cacacttctgcttcacctagactttacacacagatgctaagcccattaacaagtgatcaccaacccaagttttaatacaaaccaataaaagttaatgtaagcccaaataaaaagtctaacacgtaatagacatccaagactcacattatttttatttgatacactgaaacttctcgacaccttatttgaaggtaattatataaaaattataaagttaattgtgaaagtaccctcaatagttttacttagataacaatttactccaaagtccaaattttaatagcaaaaccacttaatatgtgtattatattaatattttattagttcacgtaaatattttttttattttttaaataacataaaaaagatagtatgtattttttctttctaacatatcctatttttcattcataattttcttcatcttcatacagtcaccaccaacaccatcaatagccaccgaaaccaccacccaccactattgaaacaacaacttgttttcataaccaaatcacacacaaaaaaattaaacgaatctctaactaaatttaaaacaatctaaatccaacaaaaatacactcagatgaaaatctcatccccaaacccatattcgaaaactctaaatttctttccccacaactattatcttttctcatatctaaatccaaagaacacaaaaatatcaacaacaaaagaatctaatatttagaccaccgcccaaatagagccactgtcgttctccctcagcttagacaaccagtatgatcccaagctccacctcaaactccacctcggtcctccaccgatgcacctcgaatctgatggcaaggtcattcccgtaaccattgacgcttcaagacagatctgaaagcatatttgaaattctgaacaaaataaaaaaaaaaaaaaataagaagatggacaattaagatgggacctctaggttccttcacagatttaaaggtgaggtgtggagaggcagggtgatagtggtgttggcagtttcagacctcttggttcaatttgagtggtcggcctacaatcaacatggggttgcagaggttaagcgtgagagacaatgatctgtgcaaaagagagaaagggtaaaggttgtcattttttatatttatttgtattaaaatgatttattttttgaaaataaaatttctactttttatagaattttttacgtgcacagatcattgtcattattgtgccacgtgtacatcgtgtccaagtggacaattcaaccttaaggctgagcatgggttggaaatgggttgatcaaaccggccaacccaacttgaaataggccgaaaaatggttatattgagtggacagaaactcacatgggttgaaaagagcccaacccgcaccaaatgggttgatttcgggctgaacgattttcaacccaatgaacccaaaccgggccggcctagcccaactaaaattaaaaaaaaaaaattaatatacatatagatttttttatctttattctttacatcagattttattttgaatgaaaaccctaaaccaaatacataatccttcctctctctcctttgtccaagtccaaaccctaacaaccactcttttttgttttgaaaaaaaaaaaactctgtcagtgctctcactctcagcttagttaggaggaggaatggaagatcaatcttcttagccagttagctatgccccttgccatgcccgtggttgtgcctcccatctagcagtcttctcccacccgcgtcgcgccagccagctgcactaggcaccataccattgttgagctctcagctgcgccagccagccaccaccgtccagctctccaaacataccagccgcacctactaacttcaacttgtaagaaatttttttaattttttttgtctttgctggatggaagtaaaagtttgtaggaattaggaaagattaatttcataaacttagtataaatttcttttttctccggatagatctcattatttttttttccttggaaatttcaggtcacctatggagttctcttgtcgtaatccatttggtggacatctctttgtgaatttttggttttaatcttgtgatatttgttaatcaattaaagattttgatatgtgaaagtttagaaattgggaattttttttgacatctctgacatctctgtggttgtaaatcttttcgatattgtatatttacttaatattatataacaatgtatgttcagatttatgtttgaacatttttcagaacttggtgatattgaaatctgaatatttttttgttatatgacataggggtcaatgggttataacccaatccaacccgaaccaacccaacccattaatgaaaaagtaggttgggttagaaaaaatttataagatgtcaatgggttaaaaaaaatctctaggccgatgtcattgggttgggtcattaaaataccctcaactctgccaacctaacccatgctcagccctattcaacatgacacttaataaccaaatattgatattaaatggcaaactgctaatatagtacgagttttgaggattttactgcaaaaatttagtttaaaaggattaattgctagcgagtgacaccattaaatattttgccgtaattttaaaagtattatcaatattttttttagtgaagcataatagtaccatttatttactaataatctacacgtctttagttcaaacctatactcttttttttctttaaaaatataacaaatttccttaaccactctaataaataattatatattttatcttatatataata

SEQ ID NO: 46680 - DNA, 2289 bp, Cannabis sativa
  modified_base (1830)..(1838): a, c, t, g, unknown or other
tcatctatggatttggattcatccatattgaacccatagaacctttgcttcagataaatttgattaggaagggtcttagacatgtacaattgttcgagcttaacacacattttatgagtagtcttctcattcatcactttcttccttaggacttgatcactcaacaaactaagaataatggtgttcttagctttcttcaacacttcttccttcttttctagttttctagaaatcttgttatcttctttcaaggcttcttcatggtcaagattttcaacgtgtgtcatcatctttgcttttcataaatagaaatcatactttctatcaaacctctccacctcaaattttgatgtcgacatcttgataagaacttgttcctagccagtaagtacaagttcttgatcatgaaagaacttcaaaatttcttgactcttggagatcttgatctttgaatccaatggaagtaactttgatgcagcaggtatcccaactcttatacaaatttgttagcattcatgacctgcaatacacacaaaacaagtagcaatctaatccaaaaatacaaaccagaaaaatacagcacaattcaaacacttggtgatcaaaaagtataaatgcaagaaaagtaaaaacagataagcacacaaccaattttacttagctcagatccaagtcagtgtgactgatcctactccaaggcactgccttaagtccaattcattatgtggaaatatgttacacactcatattagaaataatcttcctcactcaagctcccattatagatttctctctttgatacaagttccctctctgaacttgtctctagaaatctcactgtacaatcaatgtctcaactctaaattgatcaggtttaaagtctaatatatatagggtgagaaagagagaagacgagctaaagtaagttgtaacagaattcacagattctattacaaatcgttgagctgagtcttgagccttggacttagattggttgttgcaactagcaagtcttcagatgaaacaagagtccaaatagatgagtcaatcaaaggacaagagaaatacggaccaatcctccacaaatatgtgtagtgagtttaattttttttaaaaaaaaaaaaataaaacaacactttctattatttagccacatttaatataagatagagatatcattcaaattaatatcattttgaccttgtattttagaaaaagttaccgatcagatgctcagtttatttaaataaaaattggattttatattttccaaaataacataaaatagcaccatgaacttaattttttatattttctttcatataacttacttgaagtcaatttttagcatgaagagatgctttaacacagttagatcatattattaagttttatttttttaaaaaaaaaattaagacattttttttaccattttaaaaaatagtttaataaaacaaagaatctaattaataacatttacaaatacagataaaaatacatgtaaaataattacttttaatatcattgaaaaaattacgtaaaataactactaattagaatgataagcaacaatttgttttgtgccaaataataaactatgaataataatatatttactaaaatattacaccaaatgatttggtactgtttattaaaataataaattctaatttaaataaaaagaattaagtaaaaaaaaaacatgtcacgtatatttacttaattagtatttagttaaagttaattaataatataattaaactaaaaaatatttaagtaaaaaaaagatttattcatacatattggagttgtattattattattattatnnnnnnnnntattattattattattattttgagcatatatacttatagtattttttatattctaattataagtgcaatgtttatatatatatatataaaataaaataaaaagtaaaccatgtatttgactcctaattaatatttttcaattttaaaaatttattaatttgtataatactactagatttgtcaatttgtttttgttataaatatataaatttattttagtacttaaaggcttttccaaattactatttatatgtatattataaattcaaatttctatttaattatttagttacttggaggagaaatacaattaggatatgactattccacaaataagtcacacaagcttaaaatctagaaccaataaatatgccaaaacattagtctcacgaaccagacaagtgacaaaaataggaaaaaaaggaactttaaataccattaataacatcac

SEQ ID NO: 46681 - DNA, 2945 bp, Cannabis sativa
  modified_base (495)..(521): a, c, t, g, unknown or other
atatgagtagttattgaaaataaagctaaaggagcaataccaaacttctatcaagaagtttagtattgctcagacgatgagctatcctggttcgaggagattccatcgtcgtttgtggtttgttgcattgttaatcatgtgtgacatgttcaccgcgtcaaaaaaaaaatcacttatccacgaataaaatagacatcaatatattataagagttatgaaatctttgatcaatagttgctagtatggttcaccgatgcccgttattcggtgcaagcaatctcaatttggatggcttatgtagtatgatatttaagtgaaagtgttgtatataatagagattatatataacaaggaccgatatgtaattaaattgtctttatcaaacatatcgtttactataaaggcttaattcatatcataaagatgatcaatagtagattactttgaatcctgagtaatcatgaacttctgttgatattattattattattattnnnnnnnnnnnnnnnnnnnnnnnnnnnattattattattattaaataaaatcaaaagatttattaattaagaatttctttcaaaacaatggaacatacttcagcggaacaatcctcgaactgaagcacacaacctgtagagaaacaagagactcttgccaagcaatgagccaacttgtttgcagatcgtttaacaaaacacaactcgatatatgggaaaactaaaagtaaattacggacatcttgaacaagtaagccaaattgagaaaccataaaaaattattttggatagcttggtcattttcaaaataacgtggtcccatggatgatatgcaatccaacttaaagcttctttgatgcctattatttctgcaatttcaggttgaacacgaccaatcttccccttagtgaaagcttctagcatattaccatgatgatcccgagctacgcagcccacaccaaaccgaccctcctgatcaaacaaagccccatcaacattaactctgatcttatgtaacataggtgcattccaatgctcaaaataccgcccccttcattcaacggagacaaagaaagaccatttctaccttgagcacatttatactgatcaagcatgttttttgctaatgcaacccaactcttttgttgccaaacaaaatcattccgtgcacgccaaatagcccaactcaccatacccgcttcctccatctcgctagcacgtcccctgtcgaataacagcagtagccagctgctaaatgttgtagacccgcccccaacatccatcaaactacgattccaggcagctgtagcaaacccacattctaccaaggcgtgatgcacagtttctgcagcagcattacacaaaggacaggaagcattaacagggacatgacgtttttgaagctgaaaacacgtcggaaggacacccgatgcagttctccataagaagttattgacctttggaggaacatttaacgaccataaagtcttccaaaaacctgtattgtcgtccacactccaagctccttttgtttcctgcaagaatttataggcactttttactgaatactgaccacaagtctcaaacttccaactccatccatctttaatcgccgagtcgctaagctgaatgctaaattttctttgattctgttgttaaagtttcttagagaagatgatttttacaacttttgttttgggaatacaatactatggatgactgggaacatgatctacaattatgaaatcttgacttttctaatagattgaatgttggttcccttttaagtgttaattcttgaactaaaaaagttgtgcacaaatttagattggatctaaattatactttcactggtgaattaatggtactaaatgataaagaagtaattagaaaggtaaaatgataatttgacccaaactaattatgaaccaacacaaggaaggctagatgcaattgattatatcaatggacactgaagtaaaactcagtaaaataattctacatttactaagagttcaattccatatttatagtggagtaattatgaaattaatagacaagattatttgattgatgatattaaataaatgatctagtttattgtagcttactattataggtccatagtcccttgatcgccaccttaaaacactatcaaaggtatggataaaagttgtataatgatcaaaaaaatctattttggtttattaaaatagtgattatttattttcaaatttattaatgagtttttggcggctaaactcgccgaactctcaattcacttgcaattaagcctacaacctcaaattttggtaagagagcctccaaagtactgctatgtatgtatttttaaggtgtcgtctccccaaccccgttaactccttatttttcctatatggcaatgataaatcatccaaaacttggcaacgtggccacatttaccaaaatttaaaatataaaattaaaaactaaataattaaaataaataaaaaatcaaaattttaaaacagaaactaaaaccaaaagttaaactaattaatagcataaatcatcaattaaacttagaactaaaaatatagaaatgaaaatcacaactgaaactaatttagagaaacctaaatcagaaatcaaaataagaaaaccaaagtaagaaaaaagaagaagaagaagaacaaggaggagacgaaggaagaatagaagagagaagaagataaaggcaagaagatcacacagagtaggcagagatgagaagaagaaaaatagggaggattggagcttgaaatcgagaagggggatgaaagggtttacaataacatgaaagttgaagcttgaaatcacagaaaaggagaaaggaaaacttgagatttttgaggaatacataatcagagctgaaaaatggcatttcgaaggcaaaacgtagatgttgctccagaattcgcccaaaatacgtgg

SEQ ID NO: 46682 - DNA, 654 bp, Cannabis sativa
ttattagtaatattgtatattatacttattaaaaacatggttcaaattttaccaaaattttgaatatcttaatgttactaaagtatagggtccatacttgcatgcaaagaattaaatatcgatattttacgtttatatttctccaatattttcaaatttttgggataccaatttctttcttttaagcaatatatttttttcttaaaaaattggagatatatttccgaaatatgcatggatcttgatatttagtagcagagagaaggggccgcatatgggatcaattgcctttcttaactttttcttcatataaattttgtatataaatattttatattttgatctcataaataaacttttttatttatattcttacatatttttttatttgtcgctataaaatttttatttttataaaatttatatattgtattaatgctttaaaaaaaaatttgtccccaccaaaatattgggctgactacttaatatccatgaaatccatgaatattctttatttgttatagaaaaaagaggaaattatactctataccctttttatattgtcctcttttacttttacattcttttttaaaatttataatttttacctctttttttaaacattgtaccaattttgcccctgtcacttcaaga

SEQ ID NO: 46683 - DNA, 1554 bp, Cannabis sativa
ctgacgtggactaacactaaagtatgaactccagacaaaacactacgaatcccaaatgcaactggacataatactggttcttacattatggttgacgggcacgacagccacaaaggtgacaaagataggaggctttgttgacgagtactattttgttaaagggatggacaccgccacactagctttcagcaaattttgtcttactactccccccgttcatactggaacttagaaagagggcttagaagattcttcaactttcttctactgaacagaacatttctctcttggccaccgaggctaattttgtcatgtacaaactgtttccatttaatttcgtgccaaaggttccggcattagaagagattgtgtccgaacaggaggctctgagcaagaagaagaagaagaagagggaggcccctccaaaaagccaagtacctgttgagcgatctattaggattaaagaaaacctagaaagagtttctaggccatctgccccaatggctggaaagggaaaggtcatccttgtggagcaggaataggaggattcctcagatgatgatgatgcacattctctacttgttcgggaaaattctcctgcctacgtgcaggatactttaacttccatttaaattccatttgcatttacttaaattgtattcgtttttaaccttcttattttgttcatatgcagctatgtctaagtaggtacttcaagccttgaagaagaggtcaggagatggctctgaccagatatctccagttaaatggccaagggtggagggagttccgcccaaggagaagagtttcactaagtctccaatagagatttttgaggaggcagtgtctgaggtggatcttccactagctaagaagagctcaaagtctaaaagtgccaaggggggagcacgaacagatccggaccgcccaagtcttcaggttctactgttgtgctgaaccctgagaccaggaagggcaaagagatgctctaattttactaggatcggttactctccgaggtaaatgagtagctggtcggaggagatgagatgtccgtggagctactgatgggcgggctcctaaaggaggtaacccgagtaagtacttttcctttggtttttatctcattcttttgcccgtgcaggttttgacctttctttgtccagctcaacttgaagatggcctacacttactcctgagctaagtccatggccttaggaaccataaccaccaccaacaacttgcagaaggaggtggatgcaaccaaaaaggaggctgagtacacgagggcgaagctgggcgaggtgaacaaacaacttttggtcgccaataagtggcactactacaaaaaagagtattcccgacgattttaaaaacactttttttttgggaaaccgtcgctaaaaaaattaagtgagtgtttaaaactgtcgggaaaaataggatattcctgacgattttaaactgttggaaggtataggcgacgatttttaaacgtgccttataaactcccatgtatttgtgaaagggaattgctgtcgatttaaaaccgtc

SEQ ID NO: 46684 - DNA, 1529 bp, Cannabis sativa
gattcaacccaaaatcgtctctctgcccatactatttagccgcggccagaagtaattcactactacaaaaacctcattttaagtccattaaagttggactagataaatttaaagagtccattttgtgttggacataatagcctgggacataaaaggggtatttttctagtccaacaatattggactagaaaaatatttatagtcccactattttggactagaaaaaaggtctcacaataaaaatctctttgaaggccagctaagctggacgtggagtacatacagtaattttatttatttttaataaaattacgtttttatatttaattttaatattaaatataaatatttttaaaattaaaaatatatataaatattaattaaattaataaaaataatataattaagatttgaattttatattacatgcaatataatgtcagtaaaatataaatttttcatttccataaacctgttaaaacaccacccagattcaagcaaataaaaaatacaattctagcataaaaaagtacaattccagatttttttttaaaaaatacaatcccaaagatttctataaaaaagttttctctgtttcttgctctcgcagctcccgagctggcgccatggcaaaaacgcggtccaagaatcatggaaaactaagcatctacttcgaagaatcataaacctgtgaagaaacgaggtccatcctcatctggagatgtaaagaaaaccaagtcgatggatgcaattctgggaattgaacccatcgatttcactgacgaagaagacaataaacacgaaccagattttgaacagcttcaggctctttcaccacgatcttcgctttgtgaattgcagaggcaagatgacattcgcagtgacttcgctcacttcctggaagcaaaccatagctgcagcagggatgtctcgaaaggtaattcccctgttccccccattcttaggtcaggttctgttattaggtcgttagataattcttttcaagaggcttcgactgagaaacagaaacctgataatgagaaagtaattgtaaaggtcacaatggatgatattgagggggaaattgaatattggaattctgctattgtatgttatgtgttgggtgcaaaccctccattggatgttcttgaaggatttgctagaagaatatggaggagaaagtggataaggttgggctcctctcatatggcatttttctgattagattcacttcagttgagacaagggataacattcttaatggaggctatactttcttcaacaagaggccggtgataatgaaagcatgggatccagatactaatttcagaaaaggggatattcttaaggttccaatttggattcaaatcaaaaacttggaattgaaatattggatccaaaacactttgttcaagattacagggcagattggagagcctataatggtagatgaagtcactaaaatgaggcaaaaactcactttccctagaatacttgttgaagtttctatggaacaagaactaccatcg

SEQ ID NO: 46685 - DNA, 1221 bp, Cannabis sativa
atcaaacaaaatcaaatgttacacatgaacataacatgctaacgaaactaatttatcaaaagaactagtaacagaggttgtgagtgtatgaaccgtacaatctattgttgctcatgaaatagagcaacataactaaaacacatccaccgagtagagccttagaaacccaagttgtcacaaaaaaaaaataaataaataaataacactcaacctgaatttcatatgagaagagttcaaaaaaaaaagaaaaaatcatatgagaaacttacaaaaatatggtaaaaaaaataatgtcacaaaatatagcagttttctatataaaaaatgagagtccaacaaaatataaaaaataaacttaataattatcaatagaaaaattgtcaaagcagccattaccactaaaaaagagggtcgggccttgagacaatataggcctagctaagacaatttaaattttgaagccttcactttcggaattatataaaaaaaatattgaaaaagagtataataaaactcaaatttacgcaattgggtaatgtgtcatacactaatgaagttataaatatttattggttacaataaatttatttttatttaaataaaagtctaataaaaccttttattttttactttaggcccctagaatacatgagccggcacgaacttatcttgtctatacttaaaatctgtcatactaaaaagtagtcacagttgacatcaccagagaaaaagtcctcagaaatgaaagtcacagcctaaacctcggcccttagctcgaacctcgaataccatggccccagtctccagcccagacctcgaccctcggccccatcccgaactccagaccctaacgaccccaacccttcaaataattaaaaaacaaaagcattatcaaaatttgtaaaaaaaaaaattgtgaataacattacaaacctaataaattttatcatatcaacatttcaactttaaattgtgtacatacatgtagaactaggtagctacaattaataaaacttttctgtactatgtgtgtgcatgtatgtgtgagatgcattcattatttatttgtttatatatagctgcacttcttctgggttcaccatatattccatctctctctctctctctgctcttttctctatagtgtactatagctagaaccagctgtacctttctctctctaaattaggaaagagagagtatatatacatatatatatat

SEQ ID NO: 46686 - DNA, 1918 bp, Cannabis sativa
tggtggtggggttttggtttggtttggaatctcagatgcatgaattcaaagattcaattcaactttaattattaaatatgcttttattttcttctttgtcaacttatattataggcggaaaattagcggtgagtgcttgtctgtttctatttttgttaaaaattttaattttcgtctttgcttattttttattggacctaggacggaaaatctcctaatagagacgggaacagaacggaaaattcctcaataaaaaaatgtttataataaaaatttatatatataaaaaatattaattacataaaaattaaaacattacagattaattattatctaaaatacaacttaaaaattataaaaataatactaatatattaaaaaatacaaacataaattattattattagaaatataaaataaattattaaacgggtctgcgtcgagataatgagtgtgatccccatccccaaatctccatctcattccctatttaaacggggaatccctgcttcattaggagcgggttcccacagggtccatctccatagagaaaatatacattcctaattatatgtaatcaaatcatttatgttatacattttctaaagggatattggcggctaaactacttaaattttaaattttttaacacttaaccacaaaaattgatttttaggggcaaaactacctaaactcccatttcgttttgctctgtatccttccgtccaaaaatcacagttaagtaccgcggtggactgtccacgtgtacacacttttacacttggtaaacttttagtagttcacgtaatattaattttattaatatctcataaggggttttgtgttaaagattgggtgaggaagtcctatttatgagataagtggtagtggccacatagtcattccaataacacaaaggaatataggacaagaaagtaaggccctagccaacattaagtaagtgatggtgttttctttccacaacagaattctgttgtggtctttgaacacaagagtggtaatgcataataccaagttctttaaacaaaaggggaaactgaagctcttttgcattgtctaatcgtattcctttaacaatcgtgttaaactgagttttaatcatttgtaaaaaatgaggtataatccccattactctttgtaattgggatggaatatttgtcaagattgatggggaagattggggagaaggaaggcttttgttttcatgatagatgtgatgaacttaaactgaatcatctggcttttgcagatgatgttctattattttgtaaaggggaaaagaagagtgtgttatatatgctacaagctttaaagctgttctcggcaacatcaggcttgcaaccaaacccctcaaaaactgcaatttattgcagcaatatgcagaactcggatgtaaactagctggtgcagacctccgattctcaaaacaggacttaccattcacatacctggggattcctataaatgcaaagaaaatttctggcaaggattgtgagattctaactaaaaaaatgactgcaagaattaggagttggagctcgagaaacttatattttgcggctagaacagtcttgattagctcagttttgattacaatacaggcttactggagtcagattataatacttccaaagaagataatcaggggtatagaagccatctgtagagctttcctttggaaaggtcaagcaatgtatcatggggatggttcaattgattggagtatcatatgtactccaaaagcatctggtggataggaataaagagactagaagaatggaacaaagcagctatgtgtaagtacatttgggcaatagaaaatagacaagaaagtctatggatgaaatggatacatagtgtacctaaagaagggagattgggggagtcactctgcttc

SEQ ID NO: 46687 - DNA, 1365 bp, Cannabis sativa
ctgagtctagttcaggcgaggttcatacgcgaggagtctctcattgacatctcagctttcctcggggaaattgagtacatgtgtcctttgaataggagtctggtctcgagtttctaggtgagaaaaatctcactataatagatgacaaggaagaacaacgtcttgaaacatcttatgcaaaataataaggtaacaattgatctaaataaaatatatatttttctatttgtgacttttaaaaaaaatttatgccttaagtttttaatatacttactttgtattaattaggatgctattgaaattaacgtgaatgataaagttattaagccaagtatcggaataatgtttacttcgacttatgagctattataatattatagaaagtatggaaatcaatatggatttaaatttactataagaagttcgaacaaaggagatgatggagaggtgaaattaattatagtaataatcctttcaaattgtatgcatcaagtaatacagattgtaaagctagaattagagcaagaatatgtagcggaaagggtcgcaagtagtttcttttgtgcttgagcacaattatgaattgagtacacctaaaaaagttcgttatcataagatgaatagagttatccaacctttttttttaagatggaacaagccaaggaagttacaaagtaagtggatagaggtcgtttccattccaataccaagtgttatctagcccaatagccatttgtgctaaattatgtgcgcttgaattcccttgcctatggatatgtcggagggagacagtgggaacagaagataacacttctcgaacagaattgacgattgctccaaagccagataaaatactgttaggagcctaaatatcagagatgagattcagatagtctacttctacttggtgaatatcaatatgtttgtctctacaccaatgtaaagcttcaagtaacgcccatccttcagctatttttggtggcatctgtccctgacgactcatagctgtggcagcaatgacttgccccgagaagtttcaaaccaaagctcccatacctgttttgcctttttttcctagatactgcaccatcaacattgagttttaaagttcgaggagttgggggagaccattgcagttgcctatcttaactatgcatttggaaatgagtcttcttgcattgttgggattgctggtaatatgtcaaatactcctctgcctcttgtttgatcctgactggttgctcgtgctgattcctgaaaacaaatgagttcctgctatttcaacacttcgaaagcatgcatataagaaagttaaaaatttcagttgaaaaatgtgactgaatatataagagcatatctagaata

SEQ ID NO: 46688 - DNA, 1607 bp, Cannabis sativa
aaatgaaatcataaataatcaacttcctacctttatctatattttttttggattactctaattgatttcatatatactttcaaaatatcttatcagaataaagtttttcaccagatttttaggcatgctaacatgttttatgccataatgccaatcataaggttttatattaaacaatatctaaacatgctagaaaatccattttattcttcagaactttcacaggccacattttttgtttaatcaagtgataaacttatggacataatcagacagtaaaagcctctcaaacagacaaatcccatctttcctaactgttttacaatcatttcatcaaataatcaactctagtaacactgtcatttattagtaacctaaccatatgatgttttctaccaaagtaaaagcttttacaaatttctaatttgaacagaggacctccttccctaaaagcacctaagtctactcggaggaccaagagagccactgccaagtcagtagcagtgagtagcggcagggtgttaggtagttggtttatattagagcgtggcggtattagaattaataggggaagagagtttatttgtggggtgaggagattttagtagggttgtaaccctttctgggaggaaactaggctctcgaattcctcgaattccaagacattgaaaatcattgagtggaattttatcaaatccaattcaatccccgaaatcaagtttcaaacatttaattcaattcataataaaataagaagtaaaacaagctcacagaaattctaggcctataatgaagaatttgaattaactctagtcaatctctaacctttttacatgcccaattttggctagcttccattacattcctgaatggcgtcgctgctgctgtttaccgacgtttgaagcttctcattcagcatcagcttgtactgaccatctctgtcttccaaattacgcataaattcaacctacaaaacagtaacaagaattgcatttgcataaatcaaattacttctcatttatgttctcatgcccatgattagtagttctactattaaagacatcaatcgccacacacctgttgctgaaacaagtcgaattcatcagagctcaaagatccatcactattggaatcaaggagcttcatcatctcccgggcatcatccccaggagcaccaagctcttccataacttccataagttcctcaatgctgatcctgccatctccattcttgtccagaaggcgaaacaccctattctgttggtcattttcaatacctttatgattagtagatggaagacccttaagacgcaacgctgctagttcagccgcagccaccattatggccttgagccgctttgcctgcaaattaatctctaatttattcaataatcaaatcaactcaagactcaatattttctatatgataagcttctggtccgatgtgtctaacaaaggaggaaaagccataaacgccaagcataagttttattacagcagtttattcagttttaatttttgttttaattgctttaggctgagttgtttttgcttaattagaactcagtttcagttatgttgaaagagtttagaattgagagaaatct

SEQ ID NO: 46689 - DNA, 1913 bp, Cannabis sativa
ttttttttttaaaatatgtgtagattagattggatcggttacttttacttgtcaatcaacatccaatccacacaagtgtggattttaagtttttcaatccaatcaaatctgcacaagtgcagatatccgcactttgcggattggattggatcgtgcggattgaattggatcagctattttatgaacactcctatttttaagattggagttggcttaagagtctcagtactaagagattaaaagtttaaattttggtctcatcccaatttctaattacttctcacctagatcaaatctagtgagttatccgaactacatttttagaacagaatttttatttttatcctaaaattagaattaaacaccaaacttaaaataatatacgcgttttttatttttattttttaaatgtaatttaatgaacaatcacctcattaataaaattgaacaatagaaatctttcaatctaataatattaataattcaggaaaatttttatagcttaaaaaattcaagagacataatttattatatgataaaattaaggtaaaaatcttaatttgttttattattctgagaataattaaaagatattattggtgcctagtatgcttctagatgtcatactgctattgatataattaattatcaaattttatataattttaaaaaataacttttaaaaatatcgctaactaattataaaatagtacttaatatatgatagcaatgctctatttctttttgtaggaaaggaaatgaagtagtcaaggcatgggaaaagcaatacgtaattggaacacacaatgacaacaagctcaaactctaaagaattaaggtgccgccacctgtataccatcatgggctccactccattccattctttgataccccattttattatacgtaatcatattgtatggtaccatttccatacggttcccttcatttctttatctccttacaattaattacttcttaatactatttaaaaataaaattaaactccagccaccttaacttaaaataaaatcttttcgtgtaatttttgtttttttgtcttctctgttttaattaatgctcactcttatacctatccacaaatggttcacgcagccaaagattcttcaagttccgtaacagtaacacctcgaaacaaaaacctctcatttcccaaattgtccccacaagttcctcaattcattgacaactagtttaacttcaatttcttttggtcacttgttttaaaataggatagtataatcagttgtcgttttcgagtgttttggttgtcgtttgggattgagaaaagtcgcaaaacacaaaaaacagttacattgttgttgttgatactgatactgaataatacgacatcgtttctttggaattggattatgataatgctgatgatgacgaggattgattacttttcttcttcttcttcttcggtgtaatctcttatgaaaatcacgagggaaaagcctacgattaattaatttaaattaatcatcatcacttttcctttattaattaattaaactttttttttcttttcgagtttaaaacaacccctccaaaaaaaaaaaaaaacattggaagaacaaaagagaagaacatgtacaagaaaaaacagcttgttgttggacttggacatgatcatgaagacgaagcagactgcagcggttatgtcgaaaccgatcccactggtcggtacggtcgggtatgtcgttttgtttgttacatcagatgataattaacgttgactacttgtgttttgttctgtaatataatcccctcaaactattataattctgggaaattttttgtgttggtatacttatgtagttatgttatgtggttggagaaattaataattaattcgtctttttttttttgttctttgtttattgatt

SEQ ID NO: 46690 - DNA, 1047 bp, Cannabis sativa
tatgagtactgaattaacaagagtagctcttccagcataggataggttcctagaattgtaaattcaaattctttgaaccatcttttcaacaatcacctaacattgagcagttggtattctctttgcacaaatatgaatacctaggtacttaaaagggaggttggttctcttgaatccggacacatgtatcactcttcaaacctcttcttctttcttattacaacagtaaatggaggtttctacttcacttagttacaagccttaagtttgagaaaatattttcagactaagaaatttaaagacatatagcattttttcaataaaattttattttattgtgtcatatgctttcttcaagtcaacttgatcatacttgaatatgttttactcaaactaattagttgatatgtaatatttgtaaaaatttagatcttttcatgttagttaaattgaggaacattgatcattgaacacctgcagcaattttgtcgatttggtcaaatatttactttttcaaagttcatgaaagttctcagttttacatctcatttaaaatatttggccataaaaataaccaacatcaaatctaggacaagcttcttgtaaaaaaaaaataaaaaaaaataggatggtcttaggcagccagactatgatatgctacggttgaaatttatgtattggcaggcagtaatttcaaaatcatacgccattgaacatactatatagacttactatatatatagattatatagactatatagattgttttgattattttcttgaccatgactgcgtcctcaatggctttattgataaatttagtttgcgtttgattggaggtaggtaatgaaatgaaatggaatggaaaagaaacaatttacatttcattcttattaaagtgttggaatatcattttaatagaatgactttttcactattctagtggaatgacaattctattttgaaatggaaggaaactattctaacgcataatgagaaaaaatttaataatgttataaatattaataaggaagaggtttcaatggt

SEQ ID NO: 46691 - DNA, 1891 bp, Cannabis sativa
  modified_base (1120)..(1132): a, c, t, g, unknown or other
attataatgtcaataatttcaatatagtactatgaattaaaactcaccaaaagctgattctgaataaataaataaaatcatgtacaaggtaatttactataaattaaccatatgtttggtaggaaagcaattgggatgaaaagaaaatttaagaggggatagaaaattagaaagacagaaatggaaacatatttctttctttctttttttgtttgttatataagaagccagtactataaatttcagttttaggggcctttcagcgtcactttttggtaaaatttactatcaatactgatctaagcgacgctataggatcaaatataaccgacactatagtgtatcctatgacgtctcagttatttcatatggcgttggttttaaactaataaccgacgccatatgctgtaataaccaacaacgaaagcataataatcgatgccatattcttaacaattagtttatttttctagtaaactgtttataaatttaaaaatataattaaaattatacatttattaaattgaaataaatattatttaatttaaattaaatattattttttttgagagctaaattaaatattacttaaactaatttcataattagccaatatatatacttaaattagtttcatggaagcaattaaaaaaaattacaattatattacacaaatattttaaaattagtctaagtgttaacaagttaataatctaattacaagttaacctaaaaaaaataagctatatagggaagaaaaattcttatacatttagcatctatcgtccaagccttcgtgaatcacagccaacaatcgttctatttactgtcgttgtaatggtaacagcgatggtaaattttcataggttcgccacgaaacataagttgaaaatataatttacttttgtagtttataaaaaaaaaaataatattattatttaagcattttcaattattcttttattaaagttataataccacatactcataaatcaacaataaaatatactataaatactaaaatataaaaatgtgaggggttaaaattctctctagccattatatgtgtccgttagtatttattttttttcttattattaatgtatatgaatataataannnnnnnnnnnnnaatattaatattaatataataaataaaaaatattaatattataatttttctcaaagtattaaaattaaaaaaataaaattatttgaatttaacacaaaaatataaattaaagtaagtaaaataaataataaaaatatcaatatctaatagtggaaacttaatattgctaaagaaataaaagtttaggaattaatttaccaaaatataaagattatcaacttttcaaaacttatatatagttaatttggagactaatttaccaaaaaaataaaatttgaggacctacttgccaaaatatatataatttagagatttgcggtacaaataagccaaataaaaataaaacacttgtaatcattttcgtaatttaaaagatatttttttaagaaaaaaaatcataagggtgcaaaagcaaaattcaaaaatattaatgtttcggaataaaattattgattattctttataatctgttacatattttaaaattattttttgtaaatgacatgttttaaaactattaagttgttcgagaactataataaatttatatatctttttatccaaccccaaacacgtgttatatatttaacggcaataacttagctagggcttaagtacttcaataaaaataaataaacaattctcaattcattatgtataaaagtatatgaatataaattttgataaccaaatatattattatatatatataaaaataacacctggatgcttttgatttttaatttcaattttttaagg

SEQ ID NO: 46692 - DNA, 1568 bp, Cannabis sativa
  modified_base (100)..(106): a, c, t, g, unknown or other
acggtcggttttatacggttataatttctaaacggtcggttacggttttcgtaaaataaaaactgtaaccgaccggtcggttataaaattttaaaaaccnnnnnnnaccgaccgattttcacccctaagcaaaagtactcacaatctcattttctattaattccattagtacccattttaacatttctcttaagtgctctaaaatgccacatgtccattcccaattgatatagtttataattattattaaaaattaattaaataaaagaactaattaatttaaagaatatattttcttcgaatctctatctactgaatctcttcctcatgaattcattgaagatgaattaaacctataaaacctgccactaaatttttaaccaccgatcaaacttaaacgtttcaccaagctgccactaaaaaaattcattttttttcttttgtcaagatgaatcaacaagccttttcagaaaaaaaaaaaaaaatcaacaaaccagcttattcaattaaaaaaatacttacaaaacaaaaccatcagatttcaagtttcagaacttaattaaaaaatgaagtaaacaccaaatcgaattgacaaaccagcaagtgcattaatatcagttggtggaattgcttagataagagattgaaacctagactagagagataccagtaaaaaaaaattcttgaaacccacttcctgggcacttgaaaagtgaaacattcaaacagagttggagcttccttgttcttgctctgatctccgatcgagcttccttccagcccagactcgcaaattcggagcaaagctcgagcactaggtgaacggggccgatctgggcgatcgacaggtgaatcccatggacgccgacagaggtgatcaagagggtgaggctcggggttgggacatttaggaatcggagaagctcgaagtggcctccgtttgggttgtcggtggccggagtgagccctgggctggtcagaagttaggcgagaggaaaggcgagaaagagaagattgaagagacggagaagagagagaagaaagagagaaaaaatattttattttatttatttttcattttaaaattattttaataatttttaataataatataccaattggaaatcgacatgtgacattcttggaggacttaacagagccgttaaaatggccactaacggaaataatagaattttagatttgagtacttttgacgccattttcaaattttgggtatttaatagcaacaaattgaatgaaataagtatttattttacaaatttcacttatttttttgtattaaaattatgaaaatttttggtagaataattattcatactattataacttaaagggtaaatagctacataagtacccaaagttttgagtttgtaagtggcataaacccaatgatttttattagtggcataagtaccaatgtttgtaaaactgtaatttttctatatttttcatcagtataagctccgttttaaatttattaaaaaaagatttgaaagtgactgatactacatattttcgttcagactaaataatttagaatttgggtc

SEQ ID NO: 46693 - DNA, 1113 bp, Cannabis sativa
tgtagaagttaactctctctcccagaaaatagtagtgaataagaacaatgagtatgtatggaaaatagagttttgtaagtcaaaattggaatcaaaacttacttataagacttaagtccaaactgatggtggagaccctcctcaatgagaagccaaaggtggagaagatatagtcttggaagtcttgcatgtattgtatatgactagttgggcaaggcacacttgtgttgtatctctacaaccaatagaagccgaccttgtccttgtgagccctcatcagttgggattcgatctagtaaaagtacaagatctcttttggcgtcagcacaggtttgccttgtttaacacaaaaaaacataccatctcactagaagacaatatacttgggggatgaactggaagggtgctactccagacaaggtgcatcattcaacaaaatagaaccttaggggcaagtgtgcccccatcttgatatgggcccagctccatacgctgaagcctccttctgcgcaccagctaggcctctcaccaactatagagagcctattcagaaatagtcctagaacactttgaagcccccatggggtttcgtatttccttaagttgttgtacttcttgaacgagtttacatgctagtctatctcccacagactgtcattcagaaccacttggggagccctacgagtttcctttgtctcttcctctgagtcaacttcctttcgacaagaaggctttgtcatggtttctatacaggaagaaggaaatccaagcagttaactaccctaactacctagtatagaaagaaagatgagggtcctctctccataaactacttcgagaggtcccaactagacatactacttaaaaaaagattattccaaggggttgcttatttcaaatcagaagacaacacaaactagcagtcacccctgaatcttaaggattttgggcaaaaaatttgccagcgtatttaatgaaattcctaaacgaaaaatttgaggagagaagccatttataattcgtaagttttcctacggtgatattcacacagatgacaaaacccaaatttcatctcaaatagagggtgcgtatataaatcaaaataagcaaatt

SEQ ID NO: 46694 - DNA, 1546 bp, Cannabis sativa
cataatataatataaaaataattatttgtctgttaaaaaagtcatgtaatatattggggtttgagtacttaacatgcaaaaatatatattagtatttttccgtgattagcgatcgatcttatatatatgatagtctaaatttacttatactttttaattataactaattaaaaataaaaaaagttttgactataattaaatatatttttagttacaatatttgttatgactaaaattaaattagtaacaaattatatctaaatattatattttaatcacaattaattttttaaaagtcaaatttaatcagaaaaaaattagtactgtgactaaaaaattatagtattatcactataagtaagtttttttttataatatttcttttatttatttaatcatttatttatatatgtataattaaattaaactggccttgattggcgcttagttagtgcatatgtatagtataaatgttatatatgtactaatgaaaaaagaataataaagaaaaaaagaagtagtgaaaaacaactaattatatgtatatataaatcttgtcaattaatttgtggccaaaattggctaattttttgttgttctaataaagtatcctaaaccctacatattacaattattcacataatgtacacacttttctttattattagtcaatgcattcaccatattatgtttaatatgtttttatggagtactatataaagaagaaactacacttaatataggattttaattttttttttttaaatttaactttgtccattttttttatagcattttattttttattttgattttttttatgggcttaagtttgttatattattgtaaatgtctttttaaatctcatatttaatattttaaagtttatttctctttgtttgacataaaccagagaagccaaaggtatgttatttcataaactaatttttttcttcaaactaattttttcatcaaggaattggttttaattatgagtttttaagtttttatggtaatcgtttttatttataatgatttcatcaagaaatcagttttttttttttcaagaaattattttttttgtcaagaaattaattttttcataaaaaactgattttgattatattaaaagtataaattatatatgaggttttgagttttttatggtattaattctttcttatttgatgatttatctcattttttttaaatattatatttaatgtaattaagtagtttatatgcatgccatatatatatcaaaacttttttttattattataaaagacttggggatttttttatatatgtatattgttgttctctcttatcataacgaggttataattttttttttttttgaatggttataatttattaatataggctatatttgtacattataaattataatgatattaatacaatttatgaagtgataatacaatttaaagaggtggctataaccttaatctatatataatagagagagagaattaaacagatcatttatttaattatgtgttcatcacatggatggaaaaat

SEQ ID NO: 46695 - DNA, 1152 bp, Cannabis sativa
aaaaaaattccttaatcaggtcgatcaagctagtctgattcattggacagattagctttatttgtacaaacttacttctatatattatgcctcttgactcttattttcatcaggtttaaaatcacttaattaatccttttatattttagtaatattaaatcatcaaattaagatttaaaattaatttctaattaatctcaaacctttaatagccatatttaataactattaattactataattaatgacaatttagatctcatgataaatgtaaccattattcatgttatcgaaaggcagcacgtggcataaccaaaaagtagtcgccatctaaagttgggcctaagtcttccagcttatgaaagcccaacccaaaattggagtgggcccaagcccaacaaagattaagagcttcgcctccgagacatagctttcttccaaaacctgaaagtcttcctagttttttgggaaatggaaggaacaaagaccatcgaacaaggataagggcacacctagagaaagaccacacgagatgctcctagacgcctaccataagatgactctcagaagcctaccatagaccaggagtcgaatgcgtgccccagggtaaataccggatgtccactacaagataagaggccgatatctcctcttaactgacgtgttcacctctctgactcaggatcaggtattgtcccttatgtcaaaccatggtagtgcgcgcaccactacaacatttgcatataacccttttgttcgacggctcccctgacacctttgtctgccaagcttaacccccatccaaactacctaccatctgcaacaatggtggctacaaggaaaactgttgtcgaaaaacctctccctactggtcaagatgtcgtcatggatgatgttaatcttgctgattaacgtccaaaatgtgacttccactagcggtggttgtagtacagatcggacggtcgattccacaagaaggtgattatggacaaaagcgttagtagaaaaataaacacaaaaggttaataaatagtaacaaataagtgaccaaatgagtttgaggattttcattttggtaataaatattaaaataaagtaaataaaggtgtaatcaatagtaaaagaaagaaaggcttcaagaatcatccatat

SEQ ID NO: 46696 - DNA, 778 bp, Cannabis sativa
gacactaaacgaaaaaatgagtatgccaattatctccaatatcacacactaggccaaatgaaaagtaacagtgatacctcttgtcatcaggtgatgtcttattaacaagttattatggaaggcttgccaaatgataaatttatattttggcatggataagcgacaccaaattatttaacaattatcgaccttaacataaggagcgagaaaggtttaaagcttgcttacccgaaatctacactcttaattttttagcatctaggattaactctcgtgtgaaaacatctctatggttgaggagtttatgtcaataccaactcacatttcctttcttatcaacaacacaaaaatcttgattttttatatagatggtaatgatccatttaacccaaatagcatattgcttcatagaaagagccttaatatacaaagaaatcgatgctttattccacttggctccttcatggaaacctaaactgccatagttcttagatttgcaagcaagatcccacgatgctagatgcatcttactagtattacctttcgcatcccataaaaagttcatgtagagtttttcaatatccttgactaccttctacgggagcatacttatgctcattgaattgcaatagatgcccaacaaaactgaatgaatcaaatgcactctaccagcatacgagagatatcgacttgcccaattatgaagcttcatttgaatcttcttcagaaaatattacatccattactttttattttttggtcttattgtcacactgag

SEQ ID NO: 46697 - DNA, 4030 bp, Cannabis sativa
  modified_base (1362)..(1363): a, c, t, g, unknown or other
ttctttgcacttgcaagatgaggtaagttatatcatactggaaattgtcaaaacgcatctcatagttaagacgtgtttgaattactgcaaaggaactttcaggaattatccatgttttattgtttcttaatacgaactggaatttcattaagtggtctttacttttgtaattcaggacgagcaaacaatagattgtgtggtggcaggggaagtcaaggacgcagaacatgatcaccaagcaggtgaaagcagcgtacctatgactgaagatacgaatgacgatgatgaggtctctctatctttttccttctcaacatttatttatagaacgatcctgtttatgtgttcttttcttttcttgtcaaactcttaatggctgagaaggaaggtcttaagtgagctatatgttaatagtcaagggttagttaaaaaaacagttaggggtgagttagtataaaggaattgatttgtattgttaaggaagatccctattttctaattctttcaatattggaatggttttgaatatttcttctaaaagatcagttttctgttttttggttcttcaggaggatgagtcagcagatgaagaaggtgaggcgaaactagcaagaagcttaaacaagcagaggaagcacgcgatatcagcagtccataggggacgacggaaaactgtctcgagaaattcatacaaagataagggtggtaagaccacttacaactccaaaatccataaacaaatgtgtgtttggtaagagtaacattaaggatttgattagatggctcctgtttttggctacaaaaacatggttagttcaattttgattgtaaaatgagaatagtttctcatatttttgttttaaatcattgtgtaaatgttttaatacgcaaatcattacccattgtataatatgcttattaacttttttggccatattaatcctatgattagttaatatttagtgtatttgagcaactccaaaattgctctctattttattattttagattcctcccaataattttacttatgttagctaatgtaaaggtttttcttttcaatttcctactttaattagagagctcttcattgttctcaacttaatttttctcctaattagatatgtggctgtgttagaggagactgatataaaaattgtgctatatttggtaaaatttgatgtaaaatttaatgtttaattaatgtttttattaaaaaaatatataaaaaaaattataattttatcattaatctttattatgtaaaataatcaaaataaatataaaaggtttatgatttaattttattggtgggataagttgagaattacttttttattatacattaattaaatataattnnaaataattttaattgataaatattcttttataatgaaagtatcaaatataaccttatgatataacttatcaaaattagccgcatatagtggagatatgacttaaatgtataaattaaagggtaatgaaaaaagagtaaaaattaaaaagtagatatgaattggttattagatgttaattttaaaatttaattaaaagatatattactagttatttatatataataaaaaatatattttaattgcatttttactagtttttttttgaatttgtaatacttagttgttttgcgtatttattttcatgatgatttgttctattttataacttgatattgttgttttagttattttaaattttggttgtattaaacttgtaaggatgatatatttatatagtattaaacttaaataaatatttatatatagctttttattatttttatgtttttgaattaatattaaaaactgtgcttgtaattggggaggccccgagtcaaagctcagacgactaagaagcaaaaatcgacaatgaagaaggcaagattagcaactaaatcttcaattcataaggagaaaaaagggaatgagattcgaaagaaaagatgaccaacttcttctgaacgtgcatagaagactaaattgatggatcaagtgttgggggttctgattttgagtttgaagatgcaattggggattattttcctgatggaatgactgatgtagtgcaatcaataattggagatgttggagttaggatttgtcctcctaaatcatctgaaatggaattgctccaaaaattagagttgagagtcactttctctgaagttatgagtggtcatgcgaaatcaaaatgaggtgagtctcatccctaattctctgttcagcattttgaaaaagaaaggttgggtgaaataggcaaatgtgctaagatctttgatgaagatatagttgatgaaatacattactagaactcttttattgtgtgctatgttctgggttcaaatctgccaattaatgtaatggatggtttcttcagacatatttgggagaaatagggaatagatagagtgagtttgctaactcatgagggtttttctggttcgatttcacatagttaaggcaagagatgccattctgaatggaggatatcaattcgttgatagaaaatctttgattatgaaggctttggaccctgattcaaagttcactagagagaaagtgtgaaaatttcctttatgggttcaattgagacaacttgaactgaagtattcggcagaacagactatggtgaaaatagtcagtaagataggcaaaatgctaaagcaagatcaagcaactatgaactatataggcttcaattcgctcgggtcttggttgaaatggacatttccaaaggctttcataataatcttagctttgagaataaaaaaggaaagttggtgtacatgttgcttatgagtggaaaccaaataaatgtgaaacttgcaaaggaatagagcacataacggaggtttgtaggacaaagacaaagagaaaatctaaaaaaactttggcgcctaaagctttggttactaatgcaaacgaggagaatatgaaagtagatgaacaaggtttccaaacaattaaaggaagaaagtaagcattgaagctccttctaaagtggaaactaacaatgtgtttgaagcttcagaggagataacagtgaaagaggtacaagttgggaaggtgttatgtaacacactactaaaaaattggatttttcgacagttttaaatagtcggctaatgtattgtcgccggtctctatgactgtcgcctatttgactgtcacaaaattggtagactaggcaacagtggaaaaccctcgcctatactataggctatgattgaaagctgttgcctatagtatagacgacatttttaaaacatagggtgacttttttctctcatagttgaacactgcgaagttatgtttatcaactttctctatcacgggaattgatgatcatctatacctaagatttgtggtggagaatagattgttctgctaataacattaagttattcaaattcaaagtgaattcaaagctttcgttcacatataaacaatttttaacccaaaacaaaagttcaagagagcaaaggggaaactgccaagtaatagtagaaattctgtcaatacaagatatgcagtaaactataaatgtaaaccctaatttaagcccaaaaatagaatacataaactcagtaaataatatccatagcaaaatacaagaaattagaactactaatcattctatagttgaatcaaatataaaatcaaagaacaaaataaccttgaaagagatggatggaggagcagtcgatgacgacaatcattgatgggcggccacggggtagatgccgaccgtggtggtggagctcgaatggactgatggaagaggaaagtgtggccagttgaggagcttgaacgaactgagagagagagtgagagacaaagagggctccgaattaggggtgttcattggaccgcatctaatgtttttaggcctatccatatccgatccaattatatacatttaatggtttaatttgggtttattcaatattttaaacctagtattttttggatcagatcggatccatccaatattttaggtccaatat

SEQ ID NO: 46698 - DNA, 2774 bp, Cannabis sativa
atatatatatatatttagccaatattcataaaattaaatttcagtattttcagtaatatatatattgctcgtagggttataaagtggggtattgggcttgatagtgagttcctctggaatggctttttgcctttcagttagtcttgttttctggtgtctttgtttacaagattttatcttcaaaaaaaaaaaaaaaaaatttaaggtaggttcctttaaaaaaaatgggttaatatttaaaacatactaaaaatttatattaaatttaacgcaaaatatatcacgagttaaatttattttacaataagtattacattttttttaattatatttttgttaccacatattattgaattgataattttttacatttatttataagtttaacagaatagttttttaatatatacttttaacaaaaatttaaaacttttgttgagcataattataaaatttcgactaaatataatatttttattttattttgaggtaaatttaacacaaatatagagatgatcttatatatgtgtaataagaagaaatattaaaaagtaccagtgatatctagtactctaattctttaaagtgtcatattgatataattgtataattaagtattaagtgttatataatttaatataataatttttataaagtatcggtaactaatcgcaagatgtcatttatagattgtgttagatactgatgcctagtataattcgtataatgtggattaccactcatactgaagccccaccctaactatattgaggagctttggacccaaagtgaccacacctcatacaaggttaataaatgcataggttttttatttattattttgtggtacttaataaatgcatagttatttaggtatatttagtttttatgtacaatatatacagggtggtgttctatgaagtaatgtcttataaatgatttattttatgagaatttctttatatattattttttattttttatttttaaaatttacggtttgggttgtttcggtagtttctatgtagatttgctatacggatttcggttgcgatttaagttgttctgttagttactatataagtttctgtatgaaattccgtaaaaatgcaacaaatattgttttaaaatgtaaaaataaaaaaactcatttattttagcctttattttatttatattttttgaaaaaatattataataccttacagtagtactggacaccattaatacaccttaccccatattagtatttagtatggttagcaatgtagatatattaactaaatcaagattagtatcatttatttaatatatatatatttttttgacataatttatttaatacttatatgtgacactcataaattgaagagcattcaatctaataactttaatgtcggctaaaggacacattaagctagatgagttgcttgtaaacaaatgtcacattctcaaaaatttagataataaagttttgaaaactgaaatacctagaaaaaatgacatcttgaaacacacatagatatctttcaaacacaattctattcaaaattagcctagtccactaatgcattatttgaaagattatttctttgaataatatacatacatagaatgcttcttttactaggggtccctcctatttatataaaagattagatttcaaatttttcttaaaaaaagaaaaaaaaaaaaattcatttatatcaaaatcaactagggaaaaatatgtatttttgaacattgttatctaactatgtaatatatattaatgtgacacgttataagtggttaacagattcttatattatttatttccttttattaaataaaaatatgtgagatttgatattgaattcaattaataataatatgtcacaccttataatacatagtattttaaggtatcacttaacatttttctttcaaaaaaaaaaattaatgagaaaagacctctatggtaaaagtcaactcgtaattagttttaggataaaattacattgttggcaactaaatgagccacacaattgagtaatcaaattcctcattgctcatgggttctagctaacatttaatgatatgaacaataatagaagaatagaattgatgttgaataaaaaacaaacaaaaactactttgtcttttttttttttttaaaaaaaataatatgtttaattttttttattattactattacgtggtattttaagatgttcaatatcatactaatgttaataatgttaatgtagtacatatttataaattatttattaaattgaaatttttgaaaattaatattaaaatatactaataatagtatactgccttttgtaatacttaatactttatgtgaccattaatattttatttattaatatatatctttattaattttcatatatatatatgaatttaaaatatatacattcaaattaatatacatacatctgtatattgcttaaataaaatgacacacgaattttacaaaataaaacatgacacgataaagttattaaacttgcaggctgtgttcggcctaccttataaaattattacatggcacggtatgacacgatctatattttttatggtgcaataagacacgacccatatttttaaaaagtctgaaaaatataaattgagtgctaacacaacacgcacgtattaatagctatatttaggggtgggcatccaatccaatctaacctttttttcctcatccgatccaatacaattagtaattggatttggaaaatcatcatccgatccaatcc

SEQ ID NO: 46699 - DNA, 3421 bp, Cannabis sativa
taaggcagctcctcgtcttagctcagggccgaccctatttaacggcaaaactacttaaattttacgttttgtaatacttaactacataatcttattttttgacgataaaatcgactgaactctcattgttttgctttctacacttccatctaaaagtttaagttaagtaccacagtagattactcatgtttacacaagtgaacccgtcgtaaaattttagtggttcacgtataatattaattattaaaaataattcaaaagttataattaaaaaaaaaaattaaaagataaatttatttaaaagaaatcattaatttttttcaaggaaaaagaaaaagaaagaaaaattaaatataatattttttatataataattaaactattttttattattttaataattaatactatgggaaccactaaaaatttgctacgtgtgtaaacgtaaataatcaatgtggcacttaatttaagtttttaaatggaagtgtaaagagcaaaacgaaataggagttcaaaatgttttaccttcaaaaattaagtttatgtcattaagtattacaaaacgtaaaattcaagcgattttactttcaatattcttaatataatctatatataataaatataatattggttggtgtgtattttaaataaatcttctttgtgtcatttttcgtttaggcgtatcaatccaaaaagtgatttgtttagccgataatttaattgtgtcaactcgaaaatgattcaaacctatttaaagtaaattcaaacacgtttatattgtgtcttatatacatattttgctaccaaataatattctcaagttataataatttatggtctatttttttttcttttttgagtgcagcataataatatttttacaattaattaataacttatagcttaaagatcttggatttgaacccataatccttctcttttcctattcctcgctcaccacaaattttttcattattaataataagttatggtccgtacgttttaccctatgtacatattaaatttcaattaatattatttaatatttataattagtgtttgacatttttgagaaacgtacacgataattaaaatttaataatgaagaaatttaatcaaaatcatttaaacacacgtgtttttattttttattttataacatatgaaagtatctattaatgtaatatgtgatgatgtagatctcacatatgcaaacacattttttttaaaatgatgtacttaatttcacaaactttgttgttggttattgaacatacaaaatatagaaaatgactctagtacacccctttaaattaggaatgttctactagattttcttatcgtatctataaaaaaaaaaattagtttatcttttcatgatcacgtacgttgttgctattttttaaaattttttgaataatttatttacagtgccgaaaataaagtttaaatagttacttagtaaatgtataaaaaaaaatttgcgcgtacagtataatatttaaactttatttttgatatttaaattattttaaattttcaaaaatttactgtaattctaaataactataacgtacacaatcatgaaaacaaaatagagtgaaaaaattttgtggatactaaaacgtataaggaattaccaaagtatatgaaaatgaaatcaaacaaatattgctataacaaaattatgtaatttcgaatgtaaaaattaattgaaaaattataaaaagagattgaaattaccacacctcaaaatacaaatatatatatgtatatgaaataagtaaccttgtacctaattatttattaaaaaaaataataaataagacaacttattttatcacgccaacatataatagaaagagaaggaatgatctcagccctccatttaaatttcaaaatatctataaatagaaagaaaactgtcctctaataatccatacatgcataatatactcctatatattatctcatactccaaaaacccaaaaaaggcaacaatgaataaccctctaaactccgaagacctaagaaaacaaggccacatggtaatcgatttcatagccgattactacaaaaacatcgaaacatacccagttctaaccaaagtccaaccgggttacctccaaacccgtttacccgaatccgctccaaccgaccccgaaccacttaaagccattctcgatgatataacccgacacataatcccgggtttgacccattggcaaagtcctacccatttcgctctattcccaaacactgcctccacagccgggtttctcggcgaaatactcgccgctggcttcaatgtcgttggactcaactgggtctcgtctccggcagctacggagctcgaaactatactcatggattggctcggtgaaatgctgaaactccctaagtcttttctcttctctggcactggcggcggtgtgcttcaggggaccacgtgtgaggctgttatttgtacgttagtggcggcgagagatcggaaacttgcccaaattggaggagagaatattgggaagcttgttgtttatgggtcggatcaaactcatagtgcgtttcagaaagcttcgaaaatcgtcggaatcttgccggagaattgtcgcattatagagacgaataaaacgatgtcgttttcaatgtcgtctaagattctaaaacagaagatgtttgctgacgtggaagctgggttagtcccgcttttcgtttgcgctactgtggggaccactgcaactacagccgtcgatccacttggagctatagctgacgtggcgaaagaatatgatgtgtgggtccacgtggatgctgcttacgcgggaagcgcgtgtatttgtcctgagtttagacacttcatcgatggagttgagcgcgtgaactcgttcagtttcaacgcgcacaaatggctttttactactctagactgttgttgtctttgggtgaaagatcctaaagcgttgaccaagtcgttgactacaagtcctgagtttttgaataacaaagctacagagtcaaacaaagtggttgactataaagactggcagatcgctctgagtcgaagatttcgagcccttaagctgtggctcgtacttcgtagctacggcgtagaggggcttcgaaatttaattcgaagccatgtggagatggctaagcagtttgaagctcttttgggctcagacgacaggtttgaggttgtcgtttcgagaaacttttccttagtttgctttagaatttctccctttgctattactaaatttaatcgtcagaagattggaaacgacgtcgttcgtggtgatgttgttattaatggtgataaatatttaagggaaacgtgcataaatgaggtgaacaaagagttgttggaatctataaacgggtcgggtcggatttacttgagccattgtgtggtgggtgg

SEQ ID NO: 46700 - DNA, 1283 bp, Cannabis sativa
aaaattgtaaagctaaaaaaaaaattataggaagactttatggggtcggttattgtataataaccgacggcataggggccctatggcgtcggttattgtattataactgacgacataggagccctaaggcgtcggttattacaaaataaccgaccacataagacccctatgacgtcgtatgtttttacccctagctgcaacgtcacttggaacagcatccgtagcgaattttgccaaaaattgaaagttcttaaaaaccacctctaaattctaattttgtagtagtgtaaattgccgaattaacaattttttgtggttataattatttacaatttaaattattttgtagaattgaaagaataaaataataaattatgagagcttatgaagtgtaatttttcttttattttaaattttttttttttaatttttttttgctggaagcgtgtgaagtgtaattggtggagccatttttgttgttgctgtggatcgattaggtcatgccgtcttagttgaagcgatatgcatgcattgaacccattgaccactaattctttattttaggaggttgtgtggtgaagggcacaaaatctgccatatttcatagtatcacaactctaccttaataaattgaccaaatatgtacagtgaaagttatcaactagatctttttttgaaagactcattgtgagcacatacaataactaaaacacggtaccatatgaccggccaaagtgtgtttgcagcagtagtcccagacccagttaattcattcatttttaaaatatatctgcgtctgattaaaaaaaaaaaaaattatagctgcttggtcattggagatgtcgtgttggttttgttatttgctggtgaccagtttcgctcaaggtgacgtggcatttagaagtggcagctcaataattaatacacgtttgtgtttgtcttccttgtcttttttaatactttcttctctattattgttttgtttctttcgtcaacattattattgcacattgtcgttgatattaatgttcattattaatcgattatatatataatgatatctcttcgtttggtttcacctgatcatgaccaattgatctacatatccaagaaaggtataacaaaggaattaacgataattaccagaaaagtatgagctgctgctgtggtgatgattgccaatgcaggcctctgggctttttactgggcctaccctttgcctttgtgtctctcatcctctctatcatcggcgttatcatctggatcgtcgggtaatatataaa

SEQ ID NO: 46701 - DNA, 1295 bp, Cannabis sativa
tggtaaggtaaaaaaaattttaacctttttgctttgccaccagcgcagtacagtagagtagcgaactgtgccggtaaaagtgacatttcttgtagtgttccctaaacaacaagcaagacacaaatctgaacatccaatctcagttttattacttaaatgtatattacaagatttcaaggcatgttgtacaattttagcactaggatgacctagtctattatgccaaaaagagaattgggatttatgaacatgaatttggtgattgttacattctgctgtagatcctaaaattgcagggctaggaggggatggagtagttgtggacattgttggatatttggtgagatgggcaagttgaatggaatcaaagtggtataggcccttgtcaagcttcccaaccagcaaggttttcatggagtcttgttcttttacacaacaatattgaaaagggtaaaactcaaagaacacattattatcttgtgcatattgagaaacgcttagcgaagtctttgttatgtgaggaacatgaagtaagttttgtaaaacaagctgttgagaatataaaggggaattaaaaaaaggagtgaccaacattgttgatagccaaacctgatccatgtccccatgtggatttggtgatccccattataacaattgctgtaatgcaggttttgggcatgaggagtgatatggtgggtggctccagaatcagggtatactaagatgcatcatcaacagtttcagggctagcatagtggaggcatctcagctaagtgtgcattgccaaaaaagttctgaaatatagcaggtcatgtgaaagacttatcgattctgtaaaagcattgagtgacaatatggccaagtttatggcatagttggcactatactttttgaccccaagcagaatattggcctcaacctcgattgataggagattgtcctctacctggtgttaaagcacgaccattacttgaactaggataagagccaaatcctagtggagcattggttgcagagtatagggaaggatgttgggaactactactagcatttctggccatgacattagggtagttagtagaattttaaggaatatggggagaagaaaaagtacctcggctgccatggtatggtttggtgtgtgccagattggcttatggtttgttgatgtccaattccttggatcctttctccaatcgaacttcttgagtcaacaagagagcttcgattttagctacataatagacatcgatccaatcttgtgtttacacaggtgatgaaaacatcataatcac

SEQ ID NO: 46702 - DNA, 3116 bp, Cannabis sativa
  modified_base (159)..(162): a, c, t, g, unknown or other
  modified_base (2627)..(2643): a, c, t, g, unknown or other
  modified_base (2820)..(2820): a, c, t, g, unknown or other
ttggtacatgtcaaagtcaggggagtaaaaatcttaattagcccttttttttaaagtgatatactgatgtatttttatttatttcggtatatgacatatttgtttaatctcattataaaaaaatcttacttttggtcacaacaaaatttgtgactaaannnnaaaaaattgtgactaattataaaacatcattcttatgatgtgattaaaagatccgtagctaaaggtattagtcacaaatattacaattcgttgttactaaatgtgtttttagtcacaatacttattgtgactaaaactaagtgaagcaatagatactagttaataaatgaatacaaattaaatactttttactatgtagtagaataaaagacatattttttataataatttatatttggggaattactccatatactgttttttaacttctttttttcaaatttacagtttagatttctaaagtggttacagcgctagttgcaataggggtttccatacgattttttattgcagtttagattgtagtggtagttgcaataggggtttctatgtaaaatttcgtaaaaatgtaaaaaaagaaagaaaaaaaaaacgtattgaattaaattaaaaaagacgaaacgtattgaatttatattcatttatcaactattatttactgcgtcacttgtttctgataaaattgaatagaatatcataaaagaatcatatgtaaaagttatatttcaagaaatattattaatattaacaagtcctatatatggcaaaatattttcttatgattagtttaagttttaggaaacaatatcaattttttttgctccttaattttcatacgtaatttaaggtgattattattatttttccaaattcggacgtggggataacggtattgaatgggcattgaattctagctaagatgtcattttcaagtcaagtgaattgatatatcataataaaacaaaattaattagaagctttgaaatggtcatcaattagtcttttagttagttttaataatattcattataattggtatactcgtttattatcgagtcacctcttttgttaaaaataaattaaattcgacaatctaaaagatcgacggtattctcttattgaagtaggttgaggctcttgttgtttgaaatgtagcttctcaatgtctcacatttggtatctaacattcgattcgaatctgattgtaaaaacttagttcataaacttaataatccattattgttagatttatttttaagtttaattcttaatgatattaaaactttatgtaaatatatttcaatgttgtttgttttaattattacccgagaactgttaatatagtaattgattctcttattaatttggctttaactgttactgataatacactttttgtatcggtaattttgtctttactgataactttcggcccttttgtgtttttacttattggtagtattttttgaaattattttctcaaaataaataaataaataaactataaactaaattgaagcttcatatgattgagaagaagcagttgaatgtttactttattttcttttcttcaaccaatattgtcaaaatcaaaactcagtacttaaattaatatattatttatttaatgatttgtcatgaaaaaaaaaaaaaatcgttttaatttatgtttattctagatatttttttagttggactattatgcttacgttgtctttggttttaaatatttaatttttttttttactgttttcatttctagtttttttttttttgacaataatatttagattttagaatagattgactagttttaaacaacttttggtgtgtttgttttttttatgttagtgtattgatatttattgttgctcattttaatttgattttcttttaacaaaattaattaaaaaatattgagtttgctaatttttatttgttaagtgtaatttgaaatatatattattaattattataatttaaagaaaatatatggtgttttaataatgaaagtaccaaaggtccaaaggtatatatgaatagtttctttgtgatttatttgtttgagcacaattttatacatgtaaaaattaaaagtaaattacttgttaaccttatttgaattatacaaatcaaatgagtatttttattaaatgtacagtgagaaattgagtggaagtgttccttcatcctcaaacttcaagtgttccttcatcctcatttatgttaaaatatgaaaaatggtaatttgcggcttaaatacttaaatttaattcttagttgtagataaatatctaagtttaatttttgacagtgataatatctaagttatatttctaaaacttccataaatacatagtcattgagtgtttagtcattatccacatgcagagccagccctgagttaaaatgggtcatatgcaaaaaaaaaataaataaataaaaaaaattagactcttattataaagataaatgatatttttaaaaattatttaaaaaatatgtattttttttaaaatgtatttttttatttgggcccctaaattgagtgagccctagacgcgggcttagcccgcctatgcttagggtcagtcttgtccacatgtcatttttttattggtatnnnnnnnnnnnnnnnnnaataaaaataaaaatttaatgacatggaccaattaaagactattacatggtcattagcttgatatttaacagccagatacgtacgaaagtttttaaaatataactcaagtattattatcgttaaaagttaaacttaagtatttatctataatcgataattaaacttaagtatttatnccgcaaattactctataaaaaataaattagataaaaatatagtatactataatttaaaatactaaattatatcacccaaaaaaaaaaagaatctcttaaacatttttaccattatactcataaaaacacataaaaaaatttatccaacaacaagaaaaaagtttaaaaaatgaataaaaatatttaattattaaagaaggggatttattaataaatatattatttaatcaagctgaaatggttaatcttcattaatacgcggttttggggttgaattaatatgactagactatcta

SEQ ID NO: 46703 - DNA, 2743 bp, Cannabis sativa
  modified_base (181)..(194): a, c, t, g, unknown or other
aaaaaaaaaaaaaaaattctcattcttcgtcctggtatggaaactcgtaattaagctctccgtgatctccaaatcagtttcagaaaatacagattttgtagaatctaagccgaaccaaatctgtacaagttaaaatggaacagtgagcaaatgagctattatatgtatatatatatatatnnnnnnnnnnnnnnagagagagagagagagagtaaacctgaaaagtagtagaaagggaagagagagaaagggagataaatatatataatgaagaatggggatgaagaaagagacgcccgcatttaatgcttggtaagaagaggcaggcaggtaactgtatatgattcggaagagaagacacacttctaaacccagagaaagtgactacactcactctccctcttcttctcaattttttcttttcaaacaaattttttactatttatttatttgtaccgatatttcccttttgtgccatgaagattggggcaatggtttggttggcatttgggatggtggttgggtcgttaaataatgataataattccttcaaaaaaaacttaatagtaagaagaaggggaaatactaaagggagggccggttatgaaatttgaactgatgatcatgagtaatatgtcatccactctaattaactaaattataaatatttatggcttgcaatacacttaaattaaagcttaataaaaaattttatttttttattttttattttgggccccgaaaagtgtgggccctcgcctatgcctaagatcggccctgactaaagggtatcagtaatgcttagtatttttaatttatacggtaatgttggagttgctcttagaaaaatgcggccactataattctagcactttttggaggtgtaatatcattgtttgtgtaatttaatatcagatctcacccatattactttaataaataaaaaatcactaactaattataataccacaattcatggtggtactaagtactatgggtgcctcataaaaattataagaactggtaaactggtattttttttttttttttgtaataaaaaattaggtccagtcgtgtctggaatggctaatgtgaatcttcgttttgtactgttagtgatagtccatgttaacaatgagtttttagttgtttaatagtccaactagttacagccatctggaacccaattacaacaggtcttttctcagcctacctattagttattttggattttattatttagttgggtataaataccatttctagttattgttttgactaaccctcttagatcggagattgagattacgttttgcctttttctctctgttgttctttgattcttgcatgtcggtgcttgaaacttcgtgaatggtgatataaagttttgttgcaagacctgaagtcaagtagtgtgagcttaagggagttcaactgcatcttggcgagtagatctgaaggtgttcaaatctagagcttcgttgaagggattcaacgaacaagaagcaaggggatcttactgatcttaccaagggatttggtagttgggtaattttattactataagggaatttgtgaattgtacaagaactagatattgtatatttttaaattatatagttacttatcctcgttcggagagcccaacaatttctcggttgtcatgtatttctagtgcagaggaagctgtaaatttttggtgtagaatcttttattttatttttaatattcaagcataaattaagatgaaatcaattcaaatatgacaaagataggttagacaaaaatttgagattcgcaataggtatcatagcgggatttttctgttagaaagattgatcattaaggttcttgcaagctgtgttatactgaaatttattgttgctacaattcttgatatttctgcattttgtttcctttttgcaacgcccagttgggactaactctctccccaaaaacgactctagagtatactgctttcgatctttgttttgtttttccttgttcgtacatgaatggatatgttcagagaaggaggatccacatctcaaccctcaatgcttgaagggaaaaattacccttattggaagatgaaaatgcacgctttcttaagattcgtggatgaacgagtatggacggtagttgaggacggttggaattgtccaactattgtagaagatgagattatcaagcccaagcaaatgagtctgtggattttagaagaaatggaaagggcaaattttaaattaaaggccatgcatgctctctttaaagttgtatccaaaaatcagctaaaagttattgtaaattgtgaaatagcaaaggaatcatgggagaaattgataatcaagaatgagggcacatatattgttaaaaagtctagattgagatcactgggaaaagtatttaaaaatttgtcaatggaggaaaatgggactattgcagaattttatgtgaaactatgtgacatctcaaatgaatcatatgcactgggaaaaacctactcaaatgctaaactagtttgtaaagttctcaaagtcttgccttaaagatttaagtgaaaggttacctctatagaagaaataaagaatgtagaggaactcgatctggatgaattgataggatcattgtaaaactatgaaatgacactcactaggtggaagaaagagaagaaaaaggacttggagaaaggaaataatgatttttttttttttttgccttcttacataaagaagaaaagaaa

SEQ ID NO: 46704 - DNA, 1594 bp, Cannabis sativa
  modified_base (1244)..(1262): a, c, t, g, unknown or other
catgcctttctttgaaaaagtgttatatttgcatgtcaggatgcctgataaaaaccaaattttttgagttggagtaaccattcagattacccccaaggcacggtccagcctatctttgattaagtgctccaatcttgcccatttttccaaatgaagaaggcattgtctctttcaatatcaatggcccccgtattaaagatgaagtagcaaagccccaatccttctctattcatgacattgttgtcacctaacttatcttcttggcataagactacattttggatctcccataactacccaaggatcatctaggttagggatgtcctcagaaaaattttcccagaaggaatctctttgctcttagcgggggaacatagataaaggttcccactcaagctttagtaatgagatctatagtgaaaaagacaaaaattttattaaaatcacaattgagaacctagatattccaaagaagagcaacacccccaaaggcttctagagacgagtcagcaaaaattcccgcaaagcccagttgtctgctaaaaactaccatttcttcttttgatttttttttttttttttgtttccatcagaaagaccacatctgggttctcactacaaatcaggctatgtaatgagtttatctcctgaggctttctaagcccctgacaattccatgagagaactaacattgaggttggggcatgaaacgaccacctccttcacctcaaaaaaatcttgaacgttgcaatctaccatatttttctcaaccacctttgcattgttagcctcaacatcttgcacggtatcctcctctggtgaagtgaaatatggaaatccagaaagagtcgttggcttctgactattgttattattggagttgttatcacacaaagtttcttgtattcctctcttatgttgaatttaagaatcactaggccttccaaattgagacgtgacccactcatagtctaatctagtctcctcttttttctaatcgaaggcccatttgttcctttcgttcttggcccaaccaaagagataaagcattttccccctttagcatactttggcttggacagtttgtgtttaggtctaatatatgggtccagtacccctttgaagaccatcgccatgtggtccacttttcttttatccacatcagacttagcgcccatagtattccttggcccaaatgttggaacttatattaccaagatttaaatttactaacatgtatgttnnnnnnnnnnnnnnnnnnnaattctctaaaacaataaaattaaatacataagaatttagaaaatattacattaatgcaacagaatattaatgtctccttctgttctaacccttgttcctttttgtcatagagtaataacaagatctgagcctggatctccttctctctttcggtttggttaacaaccgtcctccgcactataattgagtacttgacttactatgtatgggcatggtactctatctctaagggcttgaatctgatggaagaacattaagggcccgtttggtacgcaggattggactggattggattgaaaaggattggactggactggacaagattggatta

SEQ ID NO: 46705 - DNA, 1340 bp, Cannabis sativa
ttcttttatttttaaagtatattctgttaaaccaagaattactgttagataggcacttttaatatataaagatattggaatatatacatttgtaagtatgtggcctctattttttcatagtagtctaattccactataataaagtaatttataatactttttgtctgtccaaattttaataagtaacgttataagtatgataactcataatatgaaattatgtgagactaaattaatgagaaatatgtaaactcattacccttatgggacatgttctatatgtatgcgggtgagatagtaactactcttagggaatatgtttaagcgaccagtccccgaaaataggtaaagtaactaatccccagtagttgtgataggtaactaccacctaaaatgggttagacaatcacctccccctcccgcaaagggtaggtcgtctatgcaagggtgatatcttagtctagggggttaaccccctacacgatcttggtatcccaccctacttatgtataacatgaataatacaatacttggtataggtatcaagatcacatactactaagcaataaagacaatcatgaggagcaagggggagatgtcccgggggtaccaccacgaggtgagtactactcctatagggtcggccaatcaggctacaccctagggggctacccccacatagtctgacacgtcaaacactcagcatcatccaatcccagataaaatttaaaggtggttataaacccacaaaaatagtgggatattaccgcaagaatcggacttgaaccacttttgaaaatcaagggagcatttgagatattttagcactaagtcacgtcttctaaagtgagatagaccaaccctttccctatataaggggtcccacctgatctgggaaggggatgcaaaaattatcacttagagagcagaagctttgccactttcacttcttgtgcattcaagagcttattcttaattttgtaacccatattataaataattcataaggagcactacaagaaatgtcacttttatcagcacagttcgctactgcactagtaacagtaacttttacaagcgcattttgcaaactacgctggcaaaaatgtcaaaattttaccagcgcacatttgtagtggctaaaatctaacttttaccagcgcagcgcataaatgcgctgggaaaagtcatttttgccagcgctgggaaaagtcattattgctagctatttcattttgtgctggcaaaaagttctaataccaacgttgatttgccaaccccttttatcaacacatcataagtaaatttcattttaccagcacaatactaaacttttgcca

SEQ ID NO: 46706 - DNA, 2530 bp, Cannabis sativa
aaatatataatcctcctgcttacgaccgattttaatcagcttctgagactgtggatcatccacatgaaatgaagtagaagaaaaaaaatactgaataactataatcacacaattgaatgggagtaccattagcactcatgacaggcacaaatgatatgtgactcaaataaataaaagatgcaaaatgcagagacatatagtgtgaagcaccagagtccaaaatccatgtggaagctgagtagcaagaaacttttgaaactattctgacagagtagcgaaattttaagagccagatgaaggaacagctgcagcagtactaaattgtggaggtcgaatttaaactgtgattggttacccacataaggaggcttggactaatatatttattttgttgcagagcacgattcacaagcttaggatattgagctttttaatgacctttctatttgtaaaagctacactcatcaataccaacctttgtgcgagaggttttttctcttgtggatgaaacagtgcagtaggaggaattgccaaaatataagaactgggggttgagagaatgcatttccatcactaagacttgagataaatttcatctactaacaatttactaactactgaatcaaccaaagaaagcgaagaatgatgtaatatagaaccacgaagtctctcaataaattactatgaagcgctattaaaaattgaaaaaatatttgttcctctctctacgagcaatatacaatgcaaaatcacgtaactgattcagtgagttccaatattgatcccaaagatctatcatcacaaaatagaactcttgaatgctcacatctttctattcaatatctataatatcagttttcaactgaaattgctttgtgaaattggactttgtatacaatctcgcaagatggtcccaaacttcgtttgctatctcatactttgctaactgagtaccaatagattgttcgacagagttatttatcctgataaaaattttcaaattgtctacttcccaattgtctaacaaatctacattatcatctgctagtttcctctttgttccagaaatataaccccacatttatttcatttcaaaaaaaaattcataacataattccaatacgaatgattctttccatccaatctcacactgatcacttgaagggaatcatctttattggtagtcaatgcacaaaaaagaacaaattgcaaaaaaaaaaaattctaaataaaaaactgatgaaaattcaaaattgtgctgcaaaaatcaataccaaaagaaaaaactcgaagaaatcaatactaaaaattagaatgtcgaactgtatggatgacgattgtacggacgcccgcaaaagctgtgattacacttaagaaatttactatcataaaccttgctctaatgccatgataaatatttgtgaagagaaataatctataaagaagagttgcagagaattaattagggtgtgattcaattgcaaaatcaaaagtataaaaatacaaccaataagaaaactttatataggcaactaatataaaaaactaaaataaaagaaaagattaaaataaccttaaataactatttaacaaattagtcattctatatcacatgtagcaaacaaaataatgacatgactgcttagctagttgacacatcagtgtcatgttaatgctacatatgtaattaatttgcaacaaaaaaataattttttgtaatttagttttacaaaattttattaatccttaattgatttttagtttaataatattttaaaaatgtataatttttattttatttaattttaaatgatacatgtatgtatcactgatgtgtcaatcgactaagcagctatatatcattattttatttggcacgtgtgataaaacttgatagaataactaatttacaatattgtgaatagcttaaggaccatttgtaatgagttaaaaagttcagaaaaatacagtaatacatataccataatttgagagaaaaagttctaaatactatagaattatttctaattataaaccatacaaaagctccacacaaaaatatattattctttttatatatttgtggtaaatattggaaaatgatattttacctagagggtagctctctttttgactaattaatttttatattaatatatattttactcaatttgagtatattatcatgtaacgcaagctatatacatttcacaatatataatattccatctatatatatatagataattaattaaccaaaagctctttcctttttttacccttaatgtaaaaaggtgccatttccaagagttttcgtgaccaaatatattatgtctttaaacaaaaacaatattatccaaatatattactcacttttataatttaataagctcatcaaaatatataataacttgagcaacaagattaattttcctctttattattttggccctagcatatatttatatatatatatgatgatcttttaatttgtcaacaaagttagctaacgtagcaacctatatatata

SEQ ID NO: 46707 - DNA, 1236 bp, Cannabis sativa
tgtgttagtgatgcctaacatagcgatgttctataaaaaaaaatattatactaaattatgtgagagagactttaatatttaattatactaataacgatatactattttgatgatattggcacattttaaaatctctcttattactattaaaaaaaaaagttaaaagacatcacttaagttgtcatattattattaatagagtaaagtattagtcttttctacataatttattataataatttttatgatgtaactttaattattcacaagacgtcatttcatgataatattaggcactactaataactaattctcttattgttagtctaataccattaagaggtgacatcatataattacaaagtaaatattcaaatatatttaatgcgatattaaattatattaataataatataatattttaatttattgatatgttatatatatattattttcttgacttttttgaataatattaaaagttatacttaagttacaaaaaataaaaagaatttttataataaaaattcactttatttatattgtagttctttttttgttcttgtagatattatcttttctgcacttaccaaaagatgacctatatatactcagtaatcaccctaatatggtgatgtagctaacttttgttgtcaaattactttgtgacttaacttctaactaatttaggagaactataacatgcaataatgagtttcatatcatttgcaatttgtagttctaataatttgattaatttagaccgtttacaatttttttttgttcggctacagttttaaaattttcagtaacaattcaaccaatctgtataattcatttatttatattttttagatggaatgtggatatttgtgactttatgtaaaatatttatattgacttaatattattttgagattattttttattgttacttatgaattataaagttattaaaagttaaaaaaaatagtaaaaaaataaacaattacttaaaaaaaaaaatagagtaactatgaaatacaaactatggttttaaactaataaattaatttgttcttaagtgattgatttaatttagtttgattatttaattgattcggttctattttgaatttttaaaaaatcgtaatactaattcagtttaaaaatattaaaaatttaaaccaaatcaatccgtaaatatactattatctaaaagttattcgagttagaaaattaatattataatttata

SEQ ID NO: 46708 - DNA, 1886 bp, Cannabis sativa
caaagaactatccaatcaacccaagttttaataaaaccaacaaaatttaatgtaagcccaaataaaaagtctaacattcgaatcaaaatttgagaagtgaaatttgaatatgctaaaattgaatatacatagatttcaatttagaatgggagtatcacattggtctatgtgatttagggttatgttcattgcttcctattgtttaaatttctcataaaaatataaagaatttacattaggttgaattttatatttcttaattttaatatttaacacttttgcatgtctttcatcttagtgagaagaattatatgtatgcttgcattaataaataataaagtagattgtaaaggagattaaaattcctaatttctcatttacatttattgttcttgtttttcattaaatttttttatttattatttttaacaatttcaattcgattgctggatagaaaataaaataagttattggtacttgataatcaattttcgtgagaacaatatcaatcttaatcgaattaaactacaaaagtaattacgtatacttgcatagctcgtaatttttgcaacaacccttaagcatttatttatttatttatttatttttggtttaagaacccttattaaccataatctaattcatttggggggtttggtacatggaaatatgattaagattaatcattgaaactattttaataatccattctctcaaaatagtccaatttgtgttggattatttatccccactattggattatttttccttggtggattccattgtagttctaatgttaataggtcaaaccataattacacacattccagtacacatagagctcgtttgataggtcgtatgaaagtcatattatattaaataacaaataacactatgtttagataaaatattttattatattaattattactactacaaattttaaaacaatgtgggtccggggtttggggtacgagtctgggtctagggtccaagtcggggtcgggatccaagattcagggtcaggtctgaggtttgggtattgagtttgaggccaagtccgaggtctgagtttgggtccggagtccggagttcgagtccacaagtcaatactaagcacattattatattatattgtataatatactattgtattgaattgtattgttgtgatattctagtacgcaaatctacgtaattgaattaagtaatataataatgaataaagtatcattttcacgaggattatagttaattatcaaacaattgaattcataattctatttagtgacaataataataagtttatattctattgaaaaagaaaacaaataattaaaatgaaattaacaatgattaaaacttagactgattaatttcaattaaatctactttatatagtttaatataatttaatttttaaattttaatttttcgagtttgagtctaagtgtgggtataagtctaagtctatgcccagatctaagatcggggttcaggctttggtttagtccgtattcttgggtttgggattcaagatcggattcgaattcaaatataatttattttgaatgataagatagaataattcattggagtgctatttgtaaaacaaaagacaaggcagagcaagaattgtaaagaatctaacagaaaattagcaaaatctaaattctgattatttatttatatcaagtcaccaatattacaaagctaataaaagaagttagttagagcatcaccaacgaggcttcaaatttggtgatgacgtggaaacgaccctccaacgtagttgcaaacattacactaaattgccgtgtgtgctacagtgcacgacatatatgctgtgcactgttcacacgacatatatattttttttttatata

SEQ ID NO: 46709 - DNA, 2544 bp, Cannabis sativa
ttcatctttattttcacaatgagagatcaaaactagttaatattgtatcttaactagtttggcttagctcttcaatttgtgatatttgtgagtgcatgttctcttcatctcttatatttatagcatttttcttttaaaaaaaataaaataaaaaactacttttcatatcatgaaaatcataaactaatattatattgatccccatgttacacaaacttcaatattaaatgtttcattaatttttaaatatcatttgtccaatcactaattccaatataatcatatattgtggagagcatgcatagggttaaactatataattaagaaaacctctagtttttttttttttttttccttttgttgcgactttttggagacagaaaattttattgaaagaatcttaaattaagaatgacataattatatagagtattacagttaggtatgaggtggtattttataatttaacagcattttttctcatttttatattttaaagtagtttttttatagaaattcacatagcaactagtagaacaatttaaatcgcaatcaaaagttacataacatcccacataaaaactactggagtaactaccgaagcaacccgaactgtgaatttaaaaaaaaaataaaaaatagtatataaagttattcttttgttttgtaattattattaaattaaaatatataaaatctaatattaaattacactaataacgactgacactttatgatacgtgttaggcactattaatatcttttaacctttcataaatagaacattgaattatttttaaaactttgtgtatgatttagttatatataatgtgttaatattaaaagttacttataattagattattgttaccaacatataaattgataatatttagcatatttatcatatgataagaaaattattctatagattatttttttaatattttttttaaatttatagtttgggttgcaccgataatttctatgtgggttgttatataaattttagttgctataaattgctatgtgggttgcaatatgtgaattttcgtaaaaatacaaaaaaaaaattattaattactttaaattgtaaaaataaaaaatatccctataaattaataaacttgtaaactatgttagcaaatttgggaaaatacttatttatcatatgttttttatactttaatattttaaaaggaaaactaaactttaaacaaaacaaatgggcaaaagtacataaactaattgaaaaattaagctaatttagatatatatataaaagaaatttcaagtagattatatctaatgccataacatgcatatggtataatatattataatatatgccctagctctttataataacaaatctatatcttattagaattagtctcacactattaatatgtataaatataatatcatatataagattcatgggctattttctttgctaattgattttgagatgaaactacatgcacgtccttaatcctaaattctaacatgatattagagtcaaacaaaaaacttccaatgtctcccctttaacctctatttgggacatttcggccaattttttaaaatgtcatgatgttcgaccatgtggtcttcaaaaggccgttcgtaatacccacaattttttaggcaaatatattagagttagtctcacattactaatgtgtggaaataaaatatcatatataaaattcatttgttcattaattttgatataaaacccaatcaaccttataaaattcttacatatcttaccaatggtttagaaatttaaagatattaatatatttgcattgttttttatctaattgacatttcatatttccaattaatttttaaagcgtgcagatcttttatgctgctcataagttaaaaaatatgctctattagtggatacaaaatatacttaattaaaaggagatcttaattatctcttcttctaatatttattaatatataataacattttgtaagttatttgaaacttgtgtattgtttagcggttgaacaagacttttgagttaacctagcttggccctaaccctagctacttataatgtccaatctctctattcatcaagttaacacaataatctttctaagttgttgaacaagaaagagttgtgtttagcgattatgattcagttttgtaagatatttatttagttttgtaataagtctaataattttaagtttttgttttgtaatcgttcagctaaacctgaccaaattgactctctctcttgataataagagagtttggtgactataattaccgaagttgatgtaagtactgttcgagttattttaacttaggctaattaatgagaagtttcattcagaaaaaaaaaacaataatctttgataatctcataattgaatcagagaaatattccaactcacatgcaatcttcatatatagtatttattcaatttatttgatgagtcctgcagagaaaatattatcattattattattattttaaaaaataaaaggaaatcttttagaaaaaaaaaaaaaaa

SEQ ID NO: 46710 - DNA, 1482 bp, Cannabis sativa
agacttccgcaacaagcacacccactatttttttccagcctcttcaaatcctttaggttgtttcattagagttctttcatttagatgtccatacaagaaggcagtcttgacatctaattgttctagtttgagctcttgacatgcaacaagtggcaacagaattctaatcgatctatgcttaataacatgagaaaaaacctcattataattgactccttcattttgagagattcccttcgcaaccaattttgctttataccgtgcttcttttactcctagaatgcattctttccatttgtacacccatttacatctgatgactttaccgtcttttggcatcggtattacacccgaattgaatgagcttgtaagtacaaccttaatttttttagtctaggagcaagcaataggtaaatttcttgatcagggggtataaaatttcaaaatcaatcaaccttttgctaacatagtaaactggatgttgggcgttattttcttatcggatcggcactgcacttatagcatattcggttactgcaaggtaaattcccaattcttctccgtctagaggttttgataggatgggaggttgtggaagttgcttttttagctctttaaaagctttttcacactcctcggtccattcaatttttttgcttcctcggaggatgttgaagaaaggaacacaattgtctgttgattttgacacgtgcgactatctgactagtaaaactttgcccttcattcacctttgttggtgacttcatatccagaagggcttgttctttctccgatcgatttctgctcctctctctggccaggttcatgccgatcctagcccaaatcaaagggatctcagcccgaattcaacagacctcatcccagattcgaccaatgcatgcccaaatccatctgcccttgtccaaaatttcactgcccctacaacagaaagaagaagaagaagaagaattacagaaatttaggaaatgttagggaaaaaataaggtgagaaataattctgattgaatatgataatttgtttaaatttttttttaatactattttaattgtagttttcttagttttaaattgtttttttttgttaattttataatattaaatatgttaatttatatggactaatataaatatatcacgtctccattttagtacaagtagaacaactcatgctgacacataacaattctgatagacaatttgaatttgtcaataaaagtagaaattggtaggttttgctaaaaaaaataattagaggactaattacaattaaaataaaaatttaaaaaatttaaccgcaaaaaacactaaaattaatccatttgcaaaacacaaatggagttagaactgaagaatcgtgtatcttctcattcacaaaaacgcattatttataaggccatccaccaaccacacacaaacatttggaagaaaaagaaaaaagagaacatctgagaaggaaaagta

SEQ ID NO: 46711 - DNA, 5245 bp, Cannabis sativa
  modified_base (5214)..(5215): a, c, t, g, unknown or other
ttttttttttttttgcaaaaatatgaacaattttattgccttcactatgaacaaataatcacactaataaacttattttgcaaagttacacgtacaaaatatattagttagttatctccatcaaaaataaatatgaaaataatatattattttagttactctaaaatctaaaatgttgtgatttaattttatgaaaatttgtcttattattattattagccaataaaatgagagactgcccggtcgctttccaattacaatcaaatttccttaatttttggtaaataattaaccaaaagatattacacaatctcaaatgataattatttaaacctagctaaaataaaaaaggaaaccacaacaaacaattagtcaattcatatggtaattatataataaaccgtgtctcaatattctttttcttcttcaaaaatgatggcatccattgatgatcagaaaatgaaaactaacaataagagaagtcaaggaagacaaaagatccaaataaagaaattggaaaacaagagtaacaaacatgtcactttctctaaacggcgctctggtctcttcaagaaagctggcgagctcagccttctttgtgggtccaaggtggcagtcatcgtcttctctcccactggcaaactcttctgcttcggtcatccatctgtggacgacgtcgttcgctcgtatctcgattataataaccaaacagtagtagtattacctggtagtaatgataacattactgctactactactactagtactagtacttttgtaaaagctatgactgagttggaagaggccgagaaaaagaagaagcaattggtgagacaagcgagattggcctcgattttagataataatagttgcgcgtggtgggaggaaccggtggaggatatgacgtatgaagagttggagaatcacttagctatgttgactaaccttcggaataagatctccgtctctgctggtggtactaataaggctcccgcagcttcggatttggacctccctatgacgatgtcgttttgtggcaattggagttcgggtttgaatgtttgattaattattattattattgctggttttatagattttctgtagtgatgcctaagactttcttatcgtcttacgtctcacatttagtactacccgtgcctaatactaatactcaataaaataaactattataatttatgtatttaatttagatcgttaagaactacacattgttttaataatttgttttattttctatttcctctcggttgtttattttagaatttctgttagcgttttccattatcactgtacggatttcagatcattattttttattttttttaaaaaaaaaatgaatacatatacactaattactaaagattaaaaacagaaaaaaaaaatcataagtagtatagcaagcaaagtctaattctgtgtcaagaatttaaatatgatgaacataaagctgattattattaagaatgagaatatgcaaaatcaaatttatgtttggtaccattttagtggaaggagtatagcaaatattacacttggcataactaattctttttattttattataaatccaaataataaaaaatttaaatctaatttaattctatcatattttatttttaaaatatattaaatctattttagattaaatttaaagttatatgttgtccaaaagaaatagacttatataaaaaaagtatttatcatattcttaaaaacatagccagaattagatatgatagcaggtcaatatccagcacactcttttctagtagtacatgtcaattgagaaaaatattataatattttaagtttcataaataatttaaacaataatctacaaaatgtagatgtggcaactaattttaatttaaagagtgatctaatttattaacttcactaattaatataaattaaaaattgcactaatttatatactttttaattaacattaattggtcaaaaaaataataatattggtcaaattatatattgaaaaattctaacccctaaaaaagggtacatggatagccctctttttaaattctatgtcaagaatttaaatatgatagacagtattattaggaatgagaatatgtaaaatcaaatttatatttggtaccattttagtaggagtatagaaaatattacacctggcataactatttctttttaatttattatttatctaaataataaaaaaaaaattaatttaattctatcatattttatttttaaaatatataaaatttatcttaaattaaatttagacatataaaaaaaatatttatcatattcttaaaaatatgaacgaagtcaaaattagatggtagggagtcaatatcgagcaaactcttttctagcagtgtatgtcaattacgaaaaatataaaaaaaaaaaaattaatttttataaatattttaaagctactgaataagtgtttattcggtgtcatataaaatgaacaccttgagtcaagaatccattcttggctagatactcgacttgaaacaacaagcacatcaagagagtcataccctcttataataaaacgcttctcttttttttttttttttttgaatttgtctctattgagtttagcttttaacagattgcattcatttttatagtgtccttcctttcttataatagtagcaattctttcgtgctttgaatgttgatttcaaaatggatctctggtaattggttttatgtttgaaatcattgtgattccttttatctgatatgcctttgacaaacagaccttcaccattggaatcatctccattttattctttcttctgaatttttttggagttaagagtagccttgaccgcagtgatgttcaaagtatctttattaccataaagaatcgtgttaacaaaatgttcataaacctttgccagagaactgagaagaattatagcttgattttcttcatctaactttgacaccaatattggtaagatctaagattattctattaaaatcatctaaattgttttttaggtacccatcgtgccccaatcggacccggtataacaaattttgggtttgggattctcctccgtgcggtagtcggtcagaatactcggttgactccgtgcggtaatcggtcggtctgaatggtgggtgggggtcagttagaatggtgctgtggggtgggcgttgtgtgggtcggtgtgttcttgcgatggggtatgcacaggcaaagagaggttagagggaaggagagagaaaagggggaggtgattatgagaggggtattttttgggtttaagtaaaatagtcttattttaacaattaccctaagttttttttacataaccaattatgctttaaaagatgcataaaaattcaaattttccaaagagtttatattttgattctccaaagactaaagtcattagaactagggctgcacatatttggacccgcacacccgaaaaacccgaacacctgccccgacccgctgccaaaaaaactgaccatcagaaaacccgtatagtcaggtcgggttacacccgaaaaagcctaaaatgggtttcaggttagggtgtggataagcagttttttttggtcaaattgaaacccgtaacccgaaacttttatttttttttaaaaaaaaaattagtattaataatacttaattatttattaatcaagtttcacattcaggaaaaaaaaagactattcattactaagtctaaaaactattggtcagcttaagtatccattaattaagttgttgtaaatttaatattattcattttttaatcagattcaaaaaaaaaaaaaagaaagaattaccaatagtcgtagagtgactcacagtctcacacacgacttctcactttctttctcactctcattctcagttcatacagtttcatacttcataatattcattttttttggttctgagtgagaacttctcacttctcacttctcaggtaacgtaaggcttaaccaattcttagaccaaaattttttcttctccaagggcggcgactatttatcttctccggcgggatcgcatccaagaacaagaatggtcggctttgttcggcgtcacatgtccacccacctgtgcggctgactgttcaccggtccgcccgtgactggcgagatttgaggtggtgactactggcgactggcgttctcatttctcagttaacgtaagtcgtaaggcttaatactgatatatatgttattattatatatattatttatttaaataattacttatctattatatatttattatatgtacttaaataattacttatttacttatatattatatatattgcttttgtatttgtttagaatagtatgtatgtatgaattatattgtatattgtatatattatatatagttatatactattagttgcttatatataattatattatatatattatatattgtaaatttgtaatgtagaaatgcagaaatttttacaataatattacaaatttacaataattaatatcatttacaataatacttggttaagttaaagtttaaaatgcaaaagattttataggaaaatttaaataaattagtttcttttaaatctatcaaagaatattaaaaaatattatatacatatatatatatatatatttttatatgatttttttagtcaatattgtatataaattaacattgtaaaattctttgttaatacagattacaaagagaagatttgaagatatctattttggactaaaagagcgaaagtgactaaaatttaagacaaaaaaatagtcaagacattatggtaaacctatgctctcatattttatttttaaattaagattaaacatattgcaattgatggctattagctaatacatttaatattttgttaatttgcataaatcttttaattttgtttggaaataaattttgtattgagtgatatcacgatttggtctttgtatatcgttataatctagtctttgtattaggtactaaatgatgataatggtgttaatgaggaacaacctcctcttgatgagaatcctacagataatggtatggataagggtaagggtaaaggtaagggtaagggtgctaaaaaaaggggtaaacctcctacagtgcctattcctaattctaagaagaagggaaagtctgatgtttggcttcatttcactaaggaagacaatcctccccgagctacnnaggatgatgatgaagaacctcaacaacctc

SEQ ID NO: 46712 - DNA, 2228 bp, Cannabis sativa
  modified_base (322)..(326): a, c, t, g, unknown or other
acgaaactaatattagatgatcattataactagttggaaaattaatatgaaaatcagagtggaaatcaatctatatataaatgttttttgttacaatttattttataaattttgttaggattaaactccttctatggtttctatgaaatatattccttaacaatgatcttttgtttcaaatattagtaaaaaaagctagtatattgatattagagtgataaagagtgtagcgtaatagtttttacaattgtatattagcttaatagcttaaaggtcctgggttcgaaccatgacctcttcctttttcccatccctccctcannnnnaagctagccttagtggctttaaattagagtgataaagagaacaaattatatattgagtattcgagagatccaactctctcccaaaagctaaaactcacttacctaaattcattcacactctcactttctaatactctattatatatactaccccaaaaccccattacaatgactcaattaccctctttatttaataatctcaggcctaacaataccagcctctcgaaatttaccttgtcttcaaggtgaagaaaataaaaaatccaagagtagatgtccttgcaaatagtttgcatcaagttcaacttgtctgattacctcaactaaacgaattggctctactactgtgtttttgaattctttgtttgcatttgggattgtttccttacttaaattaatataatttttagaagttaaatgaaaaatatccctcagttgaaaaagaagcccattcttgatgggccaccagttgagagagaaccatggatatataagaaagtttcacaattagtacagaaaaaataccaacaaatgagattaagtggtagataatttgttaaaaaactacctccagtatcacccttcaaccaaatggagaacattgatttatcaatataattaatcctatcccatgagaaatacttggagattaacaatgatcatagtaaagctaggccacataagaaaatcttaaaaggtgatttttcctcctctgtcaaaaaactaccgagaaaatacaagtttttccttctatttgaactcgctgctcgtaccataattcccccttttatggatccaaccttcctaaaacaaagaggaacaagagaaaaaattcttatgttgttttcctatgtcaaatacccattgacttacagaggcaacctccccaatacaccctggatttttcttctcccagtagagatgatatatgtctagaataatgagagaggtgggttctaggcaatgttttaagtaccatattagatgtgctactttaaatttgaaccatatgtgctttgcagataatttacttctcctttgtcatggagattttatttcaatcttattaatgctacaaaggttgaaattgtttgctgccacttggggtttagttccgaatgaagagaaaactgatgtatattgtagtggaatgaaggaaagtcaagttagtagggtgcttgagatgtctgatttttcaagagctcatttaccttgagatgtctgcttcggaatagcggcgggccgcagcatgctccttcctgggccacgacatgtgtgcaatcttcacacgaggatagaagaatttcagggtatgggtcgcggcatgcctttcctgggccgcgacctctgtgtaattttcccacgttttcaaggcgtgcaatctttttttcctaggcaggatcctaattttgtacggtgatattttatgtgatccctttatatttttttcatcttgtttctttgatattttttaaatcttcttctattttaaatctgcaaaaataaaagataacaagcataaaattactccaaacatgagtaaaactaaattaaaatcacactaaaattaatttaaaaataatattaaaaataacctaacattagagtttggagtacgaagaattcgtcatatatgttgagtaaaattcacttataaccagtccttatacacataaatatccacatcagcattttacaatagaaaacaagttggactcaatcctgggtggcttcgcctctactgtatcaaaaaataggagttagttacaactgttattgtaactaactcctagatcagtgataaaccgactcattataagtatttaaatacagattaaagcaaaaacaacataggacaacaaatagaatacagatcagagaaatatatacatatatatatat

SEQ ID NO: 46713 - DNA, 3860 bp, Cannabis sativa
ttttttttttttttatatattataagtttctcatattatctttttatagagtgaaaactagatttgtagatttttttattataaattttacttttatataattaaaggagaaatttggggtcaaacccctttatgtttatatttatagatacttaacccccttatattattttttagtggtaaaactatttgatgtttacttctcttggcaaatttatagtataaattaactttaacggttaaatcccacataagactgccactgtgtacatttatgtacacatgacatatatttattgctctaaataaatttaattatttaaatattataaaaactaattataaattatttataaataaaataacaaaataatctttttttctgtaatttaacaattttttttttattcttttcttcttctccgctcacccaccctcatcatcacaaatgccatcttcatcaccacccaccattgaccaccattaaatcaacccacaatcactacaatctattcctcaattacaaattaacacctaaacaaaaaacaaattcaagtttaagaaaaaaaatctcagtttcagatttcaatcaagaacaaaaaaaaataaagaaataaaatgtaaagtaggatatctgcctctcaacgccggatcccaacaacgaacttgaagctcctccaccatcagacgaacccatacaccgacggatcccaacgccatactcgaagctccgcatctcagcgtcgacatatccaaatgcaaagtcgaagctctgtcgctcaactccgacagacccaaatgcaaagtcgaagctctgccgctcaactccgacagacccaaacgaatggacgtaatcttgaggtggtcgataatttctgggtttgcgatttgaaccttgatttaagggtttgtattctgttagatttatcaatggaagaaaaatattttataccaaaaaagaatgaaaaaaagaagaatgaagatgagatgatgattttcttttaagttagtataaaaagatgattgaggaagagatatatttgggcttttttccaatcggagaagaagaagatggggagtgaaatatgaataaaattagtttttattttgttattttacttgaaaataatttataattagtttttataatgtttaaataattaaatttatttggaccaataaatatatgccacatataaataaatgtacacaatggcagtcttatgtgatatttaacagtcaaagttaacttatactttaaatttgccaacagaagtaaacataagatagtattaccaccaaaaaataacataagggggttagtaagtgtctacaaatataaacataagggggttttgcctcaaatttctctaattaaaacaagttttccgatgaaaaagctagtttcttaatgaaaaaactatttttttgatgaagaaatcaatttcttaatgaaaaataagtttcttaatgaaggatctttggtgattgattttgatcgcatgagaaactaagcaatttgaatcgtaggagagagaaaaaaaaatcttgtggctagagagagtagtttgatttttgtgctttttttagtacctctattttactataatggggttgtaaatttttttattgtgttttgtcttctttatctattataagtttgtcatattatctttttgtagggtcaaaaatggatttataggtaggtatttttttattataagtttttttacttttatataatcaaaaccagtttcttgatgaagaaactggtttcttaatgaaaaaatcagtttcttgatgaagaaactaattcctcgatgaaaaaatcagtttcttgatgaaggatctttggtgattgattttcattacatgagaaattaatcaatttgaattgtacgagagagaaaaaaatcttgtgtgactggagagagcgtgatcctattttgaaaaattaactatcttttttaatattttttatggcattttcgatttaaatacccatatatttagttagtttggttataaaatgtcatgtttagttgcattaactttacatgccatacacatatatatcaaaacttctatttatttttctatatttttgtaaatatccctatcactaatcaataagagttggcctgcaaagaagcactgatacaattgtagtagcgagaccgccaaacaaaataataatctaaaaaaagagttagttttaccaaagagtgagtcacactattagtaatcctaggactacaagagaaagaaaattactaaattagttacaatataactaaagatatctctaacaatacatcctcaataagagtgttcaacgaaataatttctaagagcactaatatcattgaggctatctaactccacaacatgataatagccaagacgagtgcagagcctaatattagagaaaattgccatagctccaaccattattgtagttatcatactaactaaaggacaagtgatcatggccaacaccaaacgtgccgaagccctcaaaaccatacctaaactagctttagcctttgaaatgtcaaaaccagcatcacaattcactttaatacatccatctggaggcttctcccacctatgacttataattggcctagagccactagtacctttataatcacacatgttatttggtattctggatagctaacttgtgtgccttcatgggtccaaaccaagtcgtgggctcattcattaggcccaaacaatccaatgggtcaacccataagcagagtcggactacggctttgagtttaactatatccctagagaaagttggtcctttttggtcatggaaggattaatgtcattcaaagatatgaagactcaaagaaatgcaatcggatacctttaggggtaatctctaaagagtagtcgaggaggcgtttgagatcaatcctacgtggcacctctctgacattgaattccacataattaggggtttacccttgtgtctaagctgggaaaggcacacaacacaaaaagcaacctatcttttgtccaacatccattattctaacatttactgtgtacggtcagcaacgcatggccacatgtaaacatcaggttgtatgaccttgtacaaacaaaggaaaaccctccaattgggcatgatatacctaaccaaaagtcaatattaaaatgtattttatcccatcaatttgcttattttaacatgcaaattgtaatgggtctgggctcacctgagaacctaacttccacctataaataggatttatcccttcatgtaaagggttatgatttttggctagacactataaaaatttggcaagaatattgactcgtggactacgactcgttaacactccaaccatgtaaaaatatttttcttcttcaccttttaataatttttcctcagtctaatcaattattaattcagttttcaaaaatttcagtaaatattttggtgctttcattgagatttgaggaaagtattctctactcttgtcatctacaatacttgttgtgattggaagcatgacaaaaaatccatcttctcacaatgacaatgaaaatgtcacagttgatgaaaaaaatgccccctctagtggagtttcaagtgaacattgtaggggatgatgaggcattgaaaatgtaacaccctaacatttaggcacgctacccaatatgattaaaaaaccctaatcccctaaacgggattactaataaaatatgcgtggaaattaaaatttaaacgaaaacgtaatgaaattaaacctgtaataattttaaccttacaaacaaaagttaaatattttaagatcccaaaaatcattttacaaaatattacaagtcttttctcctta

SEQ ID NO: 46714 - DNA, 764 bp, Cannabis sativa
tctctcaaatatcaattcagtgagaccagatttctgggtatccagtggctgctcaggcagaggggctctctcaaatagaaaggaaatttggaagcccaaataactaacacggaaaaatgatgggtaggatgaaatctttttactagactagtgactctcaagagatacaacaccgccagacaaatgccatcaggaaaacagtgcacggtgtcattgtcatgacaacttagccacaagacagtacttcacagttaccttctgaaacacatcattctagtatgaccttgtcacttaagtcgagtatcgtccacggtgtttgaagctgcctttgcatgcaacaaggaaccaaatgagtggatttgcagaactaaatattccttcactatttactagttaacaacagtcaagaagtttgaggcagccattattagttgaacagtaatgccgtgacttgtttccaatacaagatttaacagagtcccattctacattggatttaagtcaaaactatataaaagagagcaactatccatcattcttactctctatctcttaccaaacaaagtttaaggttccatgatttggaaacaagaaatagtcaatagaaagtatgttacaaggttgcaacaaagaacaaaattcataacattttagcaataaaaagtaaaaatcttagactatagactaaacaattctccacagaatagatttttgataaaatgaagaaaagaaagagaacaagaagaatatgtagggaggaagtg

SEQ ID NO: 46715 - DNA, 2012 bp, Cannabis sativa
ttatgcctaattccattgcattataatattatagaaatattggtgtaatcactaccagaaatgtgatttttgttagcacatatttatttgctggtaaaagtttcgtattgtgttgataaaatagaatttatttttgatgttggcaaaaagggttggtaaatcaatgttggtattagaatttttgccagcataaaataaaaagcacgggcaaaaataacttttcccaacacgtaaataggtaaaactttaacttttttgctagcacagtttgcgaaatgcacttgtaaaagtaatttattattaccaacgcaatagcgaactgtgctagtaaaagtaacccttcttgttgtgaattaaatatcaaaactcttcatgattatatattaatataatgtaataactctagtaaaattatgaactattatattattataaaaagttaataattataataaaaaaacttaattaactatttataaaacgctaccatataataatacaatgttagtcataataatatggcacctaatttagaattgttattatgatgatgatgatgatgcttgggtatggcataacaactggaccacattgtgtcatttaatgctcctatctttctatcccaaatctcagctgcttgctgtttcagattaaatgatgatatcactagctaattattatatatataattattgaaaacattaagagaagaacaaaagtaacaaacttttgtctttcgatctgctaattattgatgtgaaccttaaagtagtgtgtataaatatatagtcaaatgtacatgtaaattaattattattaaattgtatcatatatataatacagatataatatatatatatatatatacaccattttcttttttcttttttctgatcttttctctcaagataaaatatattttcataacgataccaaatatatcaagtttatgcttcctcccttaccctcttcacaaattattaatcattgtgatattttataagaggtaatatattagcacatttattagtccacaatacaaattaaagaagtaattaacaagaaggtagtccaaattaaacatgcatgatgtatatatgtgtaattatatatatttgtacatgcatgatcatctatatctatctatttacatatatatacaattttttttttattattaattttttaacaaaatgattcaaactaaattaattatttagaggtttataattataatattaagggacactaaatttgggcatggccattccaacctagtacttctactcttatcttatccacactaccactcagatataatctatcttatttttatagtttttgtattatttctatatatatatatattgtttttggttctttttttattaaaatacaaatttggactagcaaacttagtgctatacccttattggaatcttgttattaaattacaattttcggaatccaacaataatggttttatttaataatagcatattaaattgtataaatatattaatatatatttcttccatatccgctaggtaataataaacgctagtcattaattaatatgatcatgtcaataaaaagggcgatcataatggaattttccataaataggaaaaaagagtagaaaaaaatggtatgttctcaatataatttttaagtgtaattaatgtaactttacgataatatcatattaacatatcattatcttcttatataattaagatacattgagaaagtaattagcactaattaattttagtttaaacatatcttcacaatatataatatcaaatatatataagattaacttagaaacgtaagattaagtatatcttttggcaatcaaatagataacatcaatccctagcctcactttttattatgcaatattgctttaaaatacgtcacattataatgcaatccaccaattatataaatgtgtgcatgtattgctagctaggtgtacttttaacctttattttcatattcacactagc

SEQ ID NO: 46716 - DNA, 1238 bp, Cannabis sativa
  modified_base (349)..(370): a, c, t, g, unknown or other
tattgaaatgagttttatttcgggcataaaacccaacactaccttggtaaaaccctcctcatccacctgaatttcctttctatgatcagctttaacaatccactatgctttcccaacttttcctttcctgcagtcatctgctatatgccccagccccgaacaatgagtacaaatggaaggtttccattcatacttcacacctatagatgaattccaaccttgttcatcttcgaattccagcatctcggggagttttttatccatactcacttcaattagaattctaggataactcaaacgctccctctctttagtgattgcatcaaccataatcggtttccccatttgnnnnnnnnnnnnnnnnnnnnnnttctctccccagtattttagctctaacccttctaattgaatccatattggaactctggtcacatcttctttgctgaaagtatcattaggattccacggtttcataataaccgatctcctattgaagaaaatgaaccctccattaagcacttgatccctgaattcctcattattaaatctgatgatataaatgccatatgataatagtttcaccctatccagtttatcaccccacatccgtttcgcaaagccttccattatctgcaatgggggatttactcctaaaacatagcagacaatggatggcctccaaaacaacacctcatcctcaatatcctctaaggttattttcaccttaggtttctgttcttaacctttaaacgagttttctaaattaagcacaacagatccagaatgcagaacagggggtataggggttttaccttggcgtatggcactgttacattgctcgttcctcttgagaaaatacccaaagtcctttctgatatcctcctacctctgaataatcttcagtgaagctccaggtgacaagggctcctgaactccatcgatcaaaggcgtatcagtatcaatcatctcctcctccgacaataccagttcgttgacttctcctttttccaatcccgtaccagcacaagtatcttcagtctccaattgcacacccttcctctttcctttattactcggtctcgatttcatcttcccctgagctcttgatctcgttcttgccatagcgccagcttcacagctgcgagagaaaaacccagagaaaatcaatatgtaagtttattttattaattaatttaatacatttaattaaattgtaaattaaatatctaagttgattt

SEQ ID NO: 46717 - DNA, 1326 bp, Cannabis sativa
aaaaaaaaaccatgtacattaaaactacaattctattagttgattttttttttttttttaagattgcttttgcagtcattgtcatggaagaatatccaccccattcaatgacaggtcatccaaatgtatctgagctgtcatgttgtgattggttgatatgtaaaaagaatcaaacttgaaaatggcatgcacaaaaattctttgtaaaaaagaagaagtgtatagtagggtaatggaaggtgggtaagagagagaaaaaagaaagcttttttcaacttaataaatattattctttttttaacaagcatagagatctgactcagataattatttcactttgcttttttcccaaaaaataaaaatttaaaaaaaataaaaagtaggttcttttgatttttataatgaaagagcactaccaaacaatattgttggaataagattgattaatatatgtatatataaatatcatacaacttctatttacaccatttctcacttcatcatcatcatctaattctctttttctttctttctttcttgttattctagtttccaaacacaccccaattgaaaatggatgatcatgatcataatcaatatcccaaaatggaaactttcttaccaaaaggattaatgccctcttattttcaaggcatatcctcaaatgggtcaaattttttcaaagatccaaacttgttaagttctttaacaccaacttattatcttgatcatgaagatcatgataatgatgaaaaaaatgttatggtatctacttataataacacttatgctactacttatcataacacttcttcttcttcttcttcttctcttccttttgttcctctaaatctctctgatcatcacaatcaacaacaatcaaaagggttcaatggttataattggcttagcccaacaaagactcaaccaatgaaaaacactggatcatcagcatcgctacaaaatcaaagtcaaagtcaaaatcaaagacagaagtcaacattttcatcggttaagttatttagaggtgtgaggcagagacattggggaaaatgggtagctgagattagattaccaagaaacagaacaagggtatggcttggaacattcgagacggcggatgaagccgccatggcttatgacactgcagcttacatgttgagaggggattttgctcatttgaattttcctcacatgaaaaatcaactcaaggctaattctcttaatggagcaattgttactcttcttgaagctaaacttcaagccatttcaaatgctagtgttatttctaataataccaataatgaattatcatcatcatcatca

SEQ ID NO: 46718 - DNA, 1193 bp, Cannabis sativa
accctaagattgaaaaatcgttgcatctacatttatcttgacttgaaacgattaaggcgtaacctaagactctacacctgaaacccaactaggtagttaaaagaacaagatacaacaaccaatacaacacaatatcttctacatgagaactcaaattgttccacaccaaagcatttcgagacttccagagagaccaacacaacaaaacaacctcactcaatttcccggcctttactcaaccggattcaccaccaaatgacccacgatcatcgagttccaacgtagagcaaccaccctgcattccattaaaaaaaatatcttaaatttataacttttaatttttgctttttcctttacattttttttttgtgaaatcctttttatactatttttcatattttctagaaataataatctatttttatttttattttttattcaaaataatttatttatattaattaaaatacatctattaaaatatatcttacttcatatatatttttataatgtgagaatatatttaaaaaaagtgattctaaatctttcatgtatattaaaaataaaaacagggcatttttatatttttttaatactttcatataatttttagaattatatctttcatataattcattcaaataaaaaaaacaggtgcaaatatataatactctccttttaaatattatttactttgaccaatatttaccctcttgggaatttcactttcacccccatgtttgaaaacctacctaataccattttctttttcgaaaacagacctaataccatttagatagcattaatttatcaacaaaacacatgcacatacttatttaccatttattttgggattacaatatatttatgtatatatatgattagttgcactttttgactctcaaatttgctttatgtgaattctttgcacaatatatatatatatatatttatatatgatgtatttataaaaatagtactccaaaacacatatgtcttttttttcttctctctttttgctgctataaagtaaaatttgaccattaattagtctatgagctttgatcatccaaaatttattatatagcaactatatatgaaaaccaaaaaagtatagtgtgaatatctaggacctttttagaaaattgttaaaacaaaatgtatgaatcttttgtccattttagatttcttgt

SEQ ID NO: 46719 - DNA, 1022 bp, Cannabis sativa
ttgcacctaaaaataacctaaaaataataacactacaatcgttcaattaagtgaactcgtacacttgtttgagtatgccataaaaattgttaccatccaatgtttattccaagtatatgttaagcattcgttttttgtctgattgagaaataaatggtttggcaaacaattggctaataacatccactttgagaagtcttcaaaaagttgaatctttaattttttattggatcattatattcaatgtttttaatgtgtgttttctaagcagttggaaagtattcttgggatggttcaaggagtatggtatgattattcaattattgtacaattagaggcaactacttagtttagaaagctattatcgattggtagggaatctggtcataatctctaagcttgaaccatcaagagcatatccatttagttcttactttggtttgtattttatgcagagggttgccctccaattgatgaaattattaaagaaggcgtggtgcctcggtttgttgagtttcttggaaggaatgaagtgccccagttgcaagtaggagcgcctatttgtttttgtttagttttaatattccttgttccgtcagataaataataaaaggagatagatggatgcatgacataacactattataattccagtttgagactgcatgggctttgaccaatgtcgcatttggaacatcagagcatacaccgggttgttattgatcatagtgttgtccccatgtttgtgcaacttcttagttctggcagtgacgatgtcagagagcaggtacctttctattcacattacttacctacctattgcgaataggaatatttctttgtgaaaatttgaatagttttaaggatcatttacagtaataaaatgtgctggtccttgtttttgtagttataaaattagatgttttgtttggtgcttccttcccttgaaactaaatatatataccaggaattgtcttgaagcacacttttgagacaatactacttgtaagactcatttaatt

SEQ ID NO: 46720 - DNA, 1918 bp, Cannabis sativa
ccactattataaccatcactgagattgacattatgatagtcattctagttctttttgtgtttgtttgaatcttcttgatgatctgaattaggttccctccacttctcctgtagaagtagcattctattttgaaatttccaagttattcacagtgatagcacccattaggatcgttaggacttttagagtttgatcttcctttgttatgatggttgtttcctttgtaagagcccctactttggcttcttcctctatttttccaaggtttcttttgacttgatcttccccttcttaggttcaaagcttccttaaaaattgccaggtatttcccctttcatttccaaatccttaaatttcaatgttgagattacttcttcaagagtgatctctgttcttccatactttattgcattcttaacttccctgtcagttttggcaaagagttgagaattattattgcttgattctcattactcaaagcttcattttcccctgagttagccaactcaatgtgcaatcttaagaactcatctaagttctgttaagagtctttgaatgacttattttgaaatcaaagattctctccttcaaataaatcttgttgattagagacttcttttttaaagctgttcctccaatttcttccagatcttagcaagtgcgttctctttatcaaccaatacgattatagtatcagaaagattaaaaattattaaactagttattatgtcaagcaattcctcttggtgagcctttgtagtatctgctagccatgcaataggatcacttaggacttttggtaatttgttctatgcaagtaaggctctgattttcttcctccatattcgatagtccgctgaaccatctaatctgtcaatgtccattttaatagaacccatagttattgtgtaaagaattatatcaagaattataaagatttaggttctagaaatatcttgatattaatcttgtagatgtgtaaaaataaaatgttattcttgatgttctgaatttccctgttccttccttgattttcttccctgatttctgtcgtagctttcttgccaagaatggttctgatacatctataggaaatgacactgttgtccctacccacaggccacaactgttgtgaaactaaatcaagtttctaaggtcaatcttgacctttaacctttgagtcaaacacacctttgactccaatcaaaacacctttttgatctcttccaaaccctaacaaaaaaattgacatttatacaaaaccaaaacacacacaacacatagagaaaaccttagcagagctttgagtttcttctttagaaacttgaagtctcatcaacctgataaataggctaaacaactccacccaaatcaaaaatatccacacgcacacacacacaaacaatcgtgaattaaaaatgaataaagatcagagaaaaaaaccaccatagttatagagatttcccaaatgattttgatgggtacttcctcttttgagctctcctcagaagcaaggctcgtttccactattagatcttcaaagatcagctggttataacaatggattccaaatcacaggtatcgattggtaattcttagatttacaagtatttctttttccctctctctctgtgttaatctctttctcattgtgtttctcttcttttgcatgtatcacgtgggaatggatctccaagccttaaccctagtgctccaaagctaagcacagtaagcttttcctcttcctttctgatctcttagtctcctgattttagttccttgtatttatagcagtaatagctaggtgagcaagcataaaagctagttgcaacagtttaacaaacttggtaactaactttggttcgacttgagagttaagtgtgaaggccacttcctgatgtaaagtttctttatcttg

SEQ ID NO: 46721 - DNA, 909 bp, Cannabis sativa
gcgtgtatcatatatctcttatatattaacatttcaaaatgagcaattatgatactgaaatcatatgatcacagtttaataaatccaatggccaatacagccagatcatgagacaagagaggtgaattatatgcatgtatatacaaacattatatgtatattgacatgatgcagtaggcagtagcagactccataattaaacaaatatttgtgtgttcgttttctttccatctttctttccttctgattaattggcacattattttatattcgggaacataatttttttaagagttagtttgatctggcaattggatagtggaataatagaaaagaccatatatttttcttttagattagaataataattagaccataaaggtagtccgatgaattaaaaattaaactaattttttgcttaattaattgaatcatagaaaacttggtatattttcattgtatttaatagaaagagacaacaagatcgcataatagactttcaaaattatttttgtaggaaaccaatcgttacaatacagtaccagtcttgtacaataattatcctactccactagcattataatagtagtatttattaatttgaaaaatatgcaggtttcaaattaaatataactatatgtatataaattgagacattaatttgatgatttattaattgaggcacgtatttagcactcttttatctcaatagtgttattagtttaactaaatatctgattttatataatttaatataataatttttaaacatgttaatcccaaagtaatatatctaaaaatactaaacaccactaatactaaatagtaatacttttattatttatacttatttttaattccagtaataaataaataaatctagtcgcataatacatgaaacctgtacta

SEQ ID NO: 46722 - DNA, 1415 bp, Cannabis sativa
ataaatttttaacttttttttttcttcatcttttctagtgaaagctaaaatttcggaaattagaaatatcgaaataagaattacacttgatattattagaaatactcatgaagaacattatcataccccattaatttgaaaaatatactagattaatgaaattaatttcattcataattttgtttagtcacaataattattcattttgatcaatttgtttaatttttttttttcgaagtatatattttgttaatatatataattataggatatatgtatataaaaataaatgtatatatatgttaattatttgcaggaatgggcaaaaggatcattagaagagatagtacaaaatgctgtcaagtcatgggaaatggagctctcacacaagattcgtttgcaagatttcaagagtattaatcctcaaaaattcaagctctttgttaatggtaattatttaaatcttatttagaggtgtttgttggattacatttaatacttttaaatctagatctaattatatattgaatgttaaattttgacatctgatccggtccaattaattttagtcattcaatggatattagattgaattagttctatccattggatgtatttcatatatatttattggtttaatttagatttatcaaatattttagacctagtattcagtatatattggattagactaaacagtaaaattttatatatacatatatattttacgtataaccatataaatttaattattcacccaaactaaataaaaatattaattagttcgattgaatattgtatatattagatttttagacactccatttaatatctgatctgattcaattagatattcaaaaataacatcaaatctaatccaatcacaattagatatctaatatttaacgatcgattataattgaatcgatcaactatcatttaattggatcgatttatacactccaatatacatttctttgtttatttatttggggtacatgttgaaattgttagaaaaataaatttaaatatttttattaaagagatgatctccataaaacatatcgagtatattgatgagtactataaattctaatgttataatagttaatttaattttatgaaataacaaatcatagttaattacatatcgaaattactccaaaaacaactatagtctatagatctctagaaaaagataatcagcattaattttatgagcattgaagtaatcaaactttcgataataaattggttttaatgtctttaataataaatttctaacatgttcccattatttggttgaaaatagtgtttcctaaccaaacaataatgatcactttgattctttttgttcaattttttatgaactcaatttaaatgttttctttaaaaaaaaaaaaaaaactagaaaa

SEQ ID NO: 46723 - DNA, 1757 bp, Cannabis sativa
tattctattttctttccacatattttctttccacacattagcaatgtgggactctctaacaccatttgagtcacgaattaaagcaccaatgctcagcacattgttgctgacgtctacaacggcatcaacatttaatttaaaactaccatcaatcggcggtttccatggagcaggagcagggacgtctacactaattttacatataaaaagaaatattcttgttaaaaataaaataattaatacaataatacaatatatatatatgtgatgaccctaacgacaaagaagaaattatatagagatttaaaatgattcaaatttcttaagatcgtaaatttttttttatttatttctattttactttatttttcttatcaaagttgaaaagaaaaggaattaaggtgaaatatgaaaactgagtttatttaaaatgtgataatgattccaaatgaaaaaggagtaattatcatcaaagtaggaaagaggatgggtgggctggtctaaataatgggtgaaagagtccaaaaatgcggactgtgtcccacccacgcagttaaacgagcattcgcacgtggcagcgaacatgctttgacaatggaaacgcggcccaataatattttatgggcctacgaatgccgctactttgactcattgttcacatctgtattcggcaacacctctaaattttgaaaacatatttttttgaacaaaaaactataaaaaaaacccataaattttgtattttcctcatattttttacatttaatttaaaacaataatgttactaatattattgatgtgccatgtcagccaaacatgacgttttctatatttcttttttattttccttttttctcgaaagtaagttttttttactaatacggttgataagagaccaattagttacttttaagtaaaaaaaatttatgtacattttagttatcactaaatcttatttttataaatcttaataattaattagttattttttagttatattatagtagcttataatttaaaatatatttaggtaacttcaaaaattatttttgaaactaatgagttgttatttaatataacaagctactatttttatatattaattattttatatatatttttgttattttgaaagctaataagttattgtataatattacacaatttaattaacaaaattatagaatgaatgttaaatgaaattttaaaaaaaaaattataaaacattaattattcactatattagtaaacgaatagttatctttttttaaaattgtaaaaaaatatatgtttaccgcatcttgaaatgttcacattgaagagtaaattgcaatggtatattttttaggatcaaccaagtaacaacgtgacaatttattatttttaaaattaacaaaaagagagagaaagaggaaagaggaaaatataaaaaagaattttttttttttttttaaaaaaaaaaaaagagcaaatgaaagtttattaaatgctagaaaagagacaacgactgctagggtttgtgcccaaaaagtaagtatttattgttagcccaagatatgtttccaagaggggggtgaattggaaatgtaagctaatttcaaaaatttaaaaaccccaaagacatttcgtgcaaatattcaagtttaatgcaataacgaagataatcacaagattaaacaaataacaaactagaaatgtaaagagtttaaggatagaaattgcaaactctcgattttttacaaggttcggtagaacta

SEQ ID NO: 46724 - DNA, 1473 bp, Cannabis sativa
cactgctcagctccgtcacctggaataagaccaggacttgggaaaataacattagaactatgagcagttagccattgattaaggtaagttctagccgattacactatactttccacacttgacactttgttgttccaaaccttgtcattccttgcattccatattgaccaacaaagagcaaccaagaactttttctgatctgcatctaacaccagaaaatttgaagcacaccagtcaaaaaacctctcttactgcggtagcactgtaccgataccaactctgttcaagcagagttctgcagctggacagaccacgagagcatggtatattgtctctcctcctggctgttacaaacgaggcaagacagagacacatccacacgctttgctcttaattgactcatggttcgaagacacccttgacaagccctccacaccatgtttttcattttcggaggtagcttcaaagcccaaaacttcttccagaaattatcaacagtagcagagccttgatcattttacccattaatttcttgaacaagtcttatgcacttttaactgtatacaaccaagaaatctcaccattccatgtaatgttatctcgaccgtgaccatgatgcataggaattgtaaggatcagattttgatcacgctgatcaaacaaatcagcaactatatcttcgtcccaacccgacccatcaagagctggatgtgaagatgaaacaaaaggattttgagtgtcgggtagccaaggttcaccaaggaccgaaatagaaatgccatctccaatagaccaacaaacaccatgagtcagaaattgacgagcttcaagaacactacgccaaacatagctggggttattaccaatttcagcagtgaaaaaagtaccacgtggataataccttgctttaaaaattctcgagacaagcatttcaggttttgtgaggagtcgacaaccttgcttttccaaaagagccaaattaaaacttctcaaatttcgaaaacccatgcctcctttagatttatgtttgcaaagctttttccaagacatccaataaatacctttaggagagttgttcgaagattgccaccagaacttggacatcaagccttcaatatctcttgtaacctcttgcgggattaagaacacactcatggcaagcttggaagtgcttgtgcaaccgttttaatcaatatttctttacctgcccttgaaagaaactttgtaccatatcccaggagtctatttttcactttgtttttcaagaagcccagagcagccgatttatttcttcccacggagctagataaacccaagtacaaacttccttcagtagccgtggtcatacctaaggtggtattaattctatctttcatggaattcaaagtattagcactataaaagatagaagatttggagaggttcaccttctgacctgaggcaagttcgaacttggataacacttcaagaatc

SEQ ID NO: 46725 - DNA, 833 bp, Cannabis sativa
acctgaaatttggatttactactgttatatttgtttggtgtaatagaataatatagataaatatatatattattatatatatataccatcattatcagacaaagagcataaatatttggtcttttatgtatttcccagatcaattaattaagtacttgaacatataggttataatatgtatccattttttatttaagatttattatttgacataaatatgggaagatcatctttagacaagattaatcttattattcataaaatatttctcttatttcttgaaataaaacaaaagaaacagtggtgacagaaagcagagaagaaataatataatatgtcacaataaagtttaaggataataaaaaattaaagaaaaagacaaccacaaagattgagtttgcaactgaaagatatggaaatattagaggcatagttgatgtgagcattgcattatgatgagttgcaatagttattttgtatatttaactacttgaacacacatacatatatattttgggacatgactttgttatactttcatggaatgtattccgtaatgtacgacagccgttagatgagggagttatttgatctgagggctgagattgatctaggagtaattagggttaaaaaatagttatgtaccctgacactcatctaatgtaccctaagacccatctaatgtaccacgaaatacattccgtgaaagtacattacgtgacaaaatcgtgttcctatatatatttatgtttaatgtaaatgttatttaaaatgggactatataatagaaagtgttattttttttcaaaacaatacaatttaaatttaaactc

SEQ ID NO: 46726 - DNA, 1406 bp, Cannabis sativa
gaccttaaaagtttaagggacatgtcaaagttaaatgtacaaaaattctaattagcctattcatataattgtaattgaagcataaaaatggcatcatgtgcagtgtcaacattcacaaaagatgcaccttttcataaggttgagctatcaagtgctccttatttagacaataaactaaattattaaaggcacttaagtctattgacttgatctttttcggagctaagttggatcacacaaattgtaccattccaaatgcccacaaacagaatatataaataatggatgagagtaaatcatatttaaaaaagaaaaaaaaaaaaaaaaaaaggaggggagggggggcaccaataaaaaaattataaaataaaaaaagcaaaaaattatgttttactttagtgtttttacaagagtaatcccaatgggagctaccattattctccttcaataaatcaaccttcattgctatacaaaagggacaggtcaagcaaagagtaacatgaagaataacgacagcttttcacttttaaaaaagtgctgattcggattacttaattgattaattaaaggtgacccctataaatatacttaggaaaaggttaaaaagacaagttaattcattgtgttttaacatggtgattgaccaatcaaccgaaaaagaaatattcctagctttcaatagctttggcattttattttttttttctaaagggggaataggtttgccattttaaccataataaaaacatgacaactactgtggtttatgcttcatgttagaaaacattactgccacctacaactgtaatgttttttcttggtaatgtagcattatcgttgttgtaatttaattattacttcacaacaatcctaaaattaacaaaagcattagagtaaggtaagcaacaaaacctataattttttatttggatttgaatgaaacttaggtagcattaaaaggaatgaatatataagaatagcaatgagaatggagataagaatagaaaaaacaattgaatcaaatttaaaacgcataaaatattaataaaaaaactatttaatattttatcatattatattagaataattattcctcctattttaaaagttatatttgttcgaccaaaataatagaaaaattattccattaaaataaaattttaacactttaaaatataaccaaacaaataaataaaattaaaattttctttatcgccaccataatttattgtctttttttttagtggcctttgttttcaaaacttaatatagtaaaagcatttttagctgtcaattttcacatttgtttttttaatactgacattatgtaagattgttttgccaactccatccctgtaaacatctatttattgggccacaacgttatatataaaaaaaaaaaaaaa

SEQ ID NO: 46727 - DNA, 2574 bp, Cannabis sativa
atatggggtctacaaatgacgacccctaccaccgaaggtttgggctgagttgctagcacctgtctgtacacctcgcaagagatggaggccagcccttggactgctgactgtccctgatgggatgtctaggcatgatttgatttgggagttttggtaggagagtgaagcatgcacccttcccctccttcttccttgggcttcatggcataagggaattgttgaatttccttctttttccatcatgttggtcagagtcgtcgttgttgtgcttgcctccaccattctcattgtttgagaatcgacagaggtcatgtgtgctagtcggcattgcttggggcgctatgaggccttgtgtttattcgtcatcatcctgccctcttgtcagggcttttcggatagcttcttttaactttatgaaggcatcatctcgctgatgaaacttttccatattgttcattgagatcctcctgatatattacagaagtcagtaactggtaggatgcctccgagtacagtcgtatatcgaccttcttttgttaggcctttgaccttggtggcctcagccatgaacagttgaatgtagtccttcaaaggttcatcttgtttttgctttagttcgacaagatcctctattcgggcaggaatttatcttgaagtagagaattgaatacagaattctcgggagaattgttcccaagagttaagtcttcctggggccagcttgaaatacaattattgggctatttcagctagagttgctgggaagatttggcatcgcacatcttcaaatacatattatagatcaatttggatctcaaagtacttcaggtgtactaggggattttctttctccgtgtacatcttccaagttggcatcttgaatttgggcaaaggcaaggcattgatgtatgccgggaatggatatccccttgacctctctagctcaagttctgaaggtttttgaccagctaggcccttgatcatgtctcgtatttttatcaaactttgcttgcacagaaggatctattactgtaggggcctggttgattagccttctttgattgagttgtagcctcgaattggctagagctgggctggccataccttgggagagggtatactcaaggccaaccatccctgagtctgttacttgtacatggtcggctagccctaagctgggtagggtctggtcgcccatacttctctgcctagctggtggaatttgtgcgttgacatggggtagatcacaccaattgctggagcttggtggatcaaattgtcttcagtaattaatttcacttctcaaattgttatttaggtgtttccacccgctcccaatccttgttggtagaaaattgatcttctggtgactcgctcccctcagggagggagtgctcctctctggccggccatggggacttctggagatgtttggccggccacaggatggataccaggggatgttgttgagcctcaaatccctggccagccccccatgccgttggttgctaggatctggctattcttgtcgttaggcctttgaggcaaggtttgtcctccctctgaaaggggaagatttgtcttagcctctaaggggccaggttagttagcttgttgatagaccctccgtaatctatcaactagtcttccttgaagtggatctctgatgagattctggcctcttacactagttctctgattaaaccgtattatcagatctctagcctctttgttgcggagatctaactcacctgacgagatcaaagtatggactcttggtcatccatccatctcaggattccatgtctttgctaagctaatgcatcgtaatcagcagtgcgtgtttcttcaaggaattcgcgtctctactgagaaaatatattgcaattagcagtgggtgattcgtcaattagggtggcttggcagacggcctctataagtttggctaacttgagatcttctcctaagtccacgtggggctcgcgcattcttgatcttatctctcctgcataataccgaggacaaaacctggttgttgttcttggaggtgccccccaaggattcttcctttagttagaggcgcttgtggaaggccctcccttggaggcaaggttcgattgctcagatccactaggatgtttatgccatcctagccaatcgtagtggccaaatttgtggtgtctgctatggcggtaggattgataacatctgcggcgttcatggaaattctagttgtggctggaacatgaacattgagatttgcattctatgggtcttgagggagacccgaagatgtagatggtgtgactggggttctttcgtcttaaccatggcatttgatcagatatgatatccacgcccccaatgaaagcaccaaactgttgacctcaaaaagtgatcaaccgatagcggggtcgtatggatttgatgcttgccacgtgttaaacaaatagaataaaaaaaatattaaacacacatgtttgttatagaggttcggcccctttagtgagcgggtaatgagctactccccttttagttgtattgatactaagagataatactatttagatcact

SEQ ID NO: 46728 - DNA, 2633 bp, Cannabis sativa
  modified_base (480)..(494): a, c, t, g, unknown or other
ttttatttgggacacaaaacccaacaattttgaccttattagagttctcagaattcttgaaggaggtatctaggttcctcaacacattaccagaacgtgaaatgggaggagtaataggagtaccttgttgcacactggcaaaacattgccgattagcctgaagaaagtattcaaaatccttactcacttcttcttgcctcttaattgcctatagtgatgatttaggagataatggagctggaaacagatcagcatccttcgatcgcacagtcttctccatatcaccatcaccttctttctccgagaagtcaattggctcaacaccaaggactgagtccatcttcttcatctttcgaacatcagcagtagaggttggaccttgtttcttaggtttcttgagcttcgattttagcttcccctgcctcgccctagtcttcgccatagcatcagcccttgagctgcacgagagagagagagagnnnnnnnnnnnnnnngagagagagagagagaagaagtttctaatatttgcggttgttaatatctacaatattttaagtattttaaattaaaatttctatttctttatataaaatatatttctttatataaaatatctacataattttatttttcaatatatataataatattataaaattaataaataatattctattaaatgatagtatattctgttaaaattaacgtaggaaacaaaaacagatcgccaaaccaagaattctgctacatggttacattttatagatatatatatatgaaaaattatctcatatggaattttctaaatcactatgtataggttatataaggaaagaattaattatttaaaaaatattaattaaaattacctattattataggttattataacttttttttcttctttttcttataaaaaataatatataaaaataatgagaataagaacttgtctgtgagaataattttttcaaaaattttaaatttttataataatcttaaatttttagagtattactaatatgcaccacaccaacttataatgtgtcattctacttgacaatttttttttaattcatgtaaactaatgtcattaatctcttacaatcatattttttattttttcttcaactctaccgattaatttcaagggcataaatttcaagtgttattcattttcataactcctgacatataatatcattatctatgattttatatattcacattaggtttttctagaaagcaaaatcaaaactacctcctattactttttaataccactactcgaaatacaatcaaacttcaataatagaacacgatttcctgaacaataatctagttctataatatttgttaatatcccaggatttcgatccttactacttgaaaaactttacgtcttgccagtcataataaccccactattttgagttcttaatttcttttcgatttcttttgtatgaaatcgaaaactatttattaaatatcttttaaatcgaatgaaatattgtttggtcctttagccaaacaatatagaccttctgcctaatttgacaaataaattgtaataaatatgtgtttgtgaattcattaagttaataaaaaaattgtgaattgaaaataagcttaccttttgtgcaaaccaagaaaaaaatgttcgactgtgaatctcatctaaggtcattactctttgacaaggattttgttgtgcaatgatatacattgcgatgatccttacaaaattaataagcattagacattcttacttaatgtttcaatattttttttattattagatacataataaataatacttactcaataaacgagtctatgacattacattaaacaatacatatcgatgtgccttagttttggtatcctcatctaaagtctcagtatctatttttcccaaatttcaacccgtcgtttggaaaataggcagcctttctctatttaaatctagattactataatatctaggcctaggattagtttttttctctacacctttcatatatcttgaacaaaatatcaaacattcattagctaaatatcctttagaaatacaaccttcttgcttacttttgtttcgaacgcatgacttcaacttagataagtacctgcaattattcataggaacattaaaagcaatattgaaactttgtacaattaataaaataaaaatcaatatatatattaaaatattgcaaagagtaattgatgggggtacatgctaagtgtacatgtaacgataaactgatagtccagcaattctcgcctcatatgctaagtgtatcactaaataaaccattatatcaaaaaatgattggagaaacaatttttcaagattgtaaacagtaattgatatttgttgttcaagttacataaaatcttgtagtcgagcaacttttgaatacatcattcgaaaatagttgcttaaagtagttatatgttgacgaacatgcagacttgacattcccctcaatgctagtggtaataattgagtcataataatatgaaaattatgacttttgagcccatgaatttttagttgctttacattaacacatcttaaaatattggcagcatatttatttggaaccttaattttctttagaaatcgacaa

SEQ ID NO: 46729 - DNA, 925 bp, Cannabis sativa
tcaatatcactgaaaaaaaaaacttaaaaaaaaaaaaaaaaaaaaaccatggcatactgggacagtgtggacaattcccagcctacataattcggagaacgaaaatgaaaagatccccgtaataggtaataataaaaaggagagtatgtagcttattcaacatgtgtgattccagcttcaattattatacaggaaaaaacatataaaattaaccatgattttctccaatagttgcatacgtaaccaaacgaaattaaagctagaaccactttctagtcatatataatataacggacatgattaaaggttaaaatatttttatatatgtatttattatttatgaaacaatcaccatcatcaaatcaagtgattataaataacattttataggagaaaagctttgtatatagtgtcaaaatactttgctttgttggttactaaatcaggacatgtgttcaaatcaacttgagtctgtagattttgcatataattatatagattctttccgaccaaataaaaagaataaaattatcaaaaaaaaaaaagaataaaaaagatttattcaaaaataaataaataaaaaagattaattgtgttatacatttctactatagtaaaagtatcatatcatggaaccgatcctttattttattttatttttctatttggttttgtattggggttggtttgtaacgtcggtcgtattgtattatattaatttacataaaatataatttaatataatattatacaatactatacggtataatataatgtaccaaacgaacccttgatgtgctctatacgtatctggtgtcttttgtataattatttatatttatttattgtaaaataaaacttgtttagaatgcttatgcaaatttgtgttatatgtttattaagtgcatttgattcttaaatggta

SEQ ID NO: 46730 - DNA, 1209 bp, Cannabis sativa
tcacctcaagggttctcatcacacagatgcagcaagaaccaagccttttttttaatccatttcaaaagaggctagagtgggtttagaactcttgacccaagcaagagaggatgccaataaaggtaaccctaccactacaccacacaacacgtggtgagatcattattgttagggtttggatagttttgccggctaaaatggttaatggtcacatgcttagttctgttattgttatatagccacaaacttgacttggtacgaatgtttatttaactaactaaagtaaattgaaattgaatttattaatgttacatacattagttataagaatcatcttgtacatattatcaaaatttattattaaatattattatttatatatgcatttttttatttgaactctcaaattgctctatattaatatatactactaaaaaagttaaacaatataaaatagaactatagaagggacacatttttaataaatattgctatgtatagggattttaatttgctacacgcaaaaaaattcaagaggaaaataaattttatagatcaatataagagaaaataaattatttgtagtccttcatattttttttatcaacaaaaaaaattcattaatcaaccatcaaaactatagaacctccaaacacaaaagccacaacgaccataaaaccctcactctctacctatcatttaataagcgtgcaagtaaattttgcctaaagaccatctttagtaataataatttagtcgcaataaaaaaattgtgacttttagtcacaacaaaaaaattacttttgactaaacatagtatttagttataagttgctactaatttagttttagtcacaacaagtattgtgactaaaaacacatttagtcccaacgaattgtgatttttgtgacatacttttagccacggactttttagtcacaacgtaggaatgacaatttataattagtcacaagttttgttgtaactaaaagtaaaattttttgtagtgattattatatattctattttgaataactctctttatatttttcactatgtacataatagagtaacagttcaaccataggttgtacactgtagctgctattagtgttgttaattctatttttggcatatttaattgacaaaaatattttattatttaatgtatatttcggctggagtatttaatatggtttccctatttg

SEQ ID NO: 46731 - DNA, 1546 bp, Cannabis sativa
ttaatttgatcatttgtggaggaaacaagcttttaaagagaggtatgataagatattttagttagtttaatttctcctatcaaaaataaaatataaaaattaaaggcatgagtgatagtaaaacagacaaaatgtgtgctcctcaattacatttggaccacttcaatatgatcgagatcatctaaaaattgctttccctcaaaaagaaacacggtaagattttactcactactccagtaaaagttgtagcttacttttaagattcaacaagtaaataatcatttttggagaaggatccgtaatctctcacagtaagttagctaacagaaaataagttttgcctactgtcataaaacaaggtcctataatttcaagtatgcaagctgaattactactttttatattttccttggatgaagttaaagcagctattttctcaattcatgggaataaatccccggggctggatggttatagtagctccttttttcaggacaattgggatcttattagggcagatatctatgatgctattagttctttcctccacacatgtcagcttttgaaggaaatcaacaccacacagtcttgacacttatcccaaaaattaagtgtcccaatctggtgagtgattaccgacctattgcatattgcaatgtactttacaaggttgctacaaagctgatttgtgcaaggcttaaatcagtacttccagatttaattgctcaaaaccagggaggatttattcaaggcatattcattggtcgcaacattatgatctgtcaagacctcatatctgacactagcaaaaatagcactcatgatgaccttccttttgtcttgagagattttcttcttttttagtctcaaaatgctatttagatcataaagattcatttgccaacccaaccaccttccaatgtcatccttaaccttcctactatagcagcagatgaagaaaaaatgggaatggttttcaatattctcatcaaaacaatacaagcactattaaagtagatatttcaaagcgagcaagtctatctctagttgggagccgctgccatgaagcgagccaagtaataactctatgctttgggcatttgctgaaacttagaagaaagaccaacaatagaaaatttaaagagacaaaactctaccttagaaaaaatttacttaagcttgtctttagtttgcacgatgcgcttccaataccaactagcatcttccaggacctcatagtcccaccaatgagcttgttttaagtagattgaattcactcattttacccaaaaattatttttcttagttgagatagctcacacatatttttctattgtacaaaggttccaatgagcaatgtccttaaaaactaggccaccttccttcttaggtttacaatcctcagttcaagaaacattcctggagccattgaacatgtcaaaaactttccaaagataagctttttcttacacaacattatttttttcggaagaattaccacttgggaccaataagtgttaattaaacactacaaaaaatcttactt

SEQ ID NO: 46732 - DNA, 1488 bp, Cannabis sativa
cttaatttcttacagctctttaatcttttattattttattggttgccgaaaacctcggtcaacaacttgcaacagagcttcactcgcctccctgatctgaaaccctagaatctttgattggatcccttactcaagacctcccatcaattaaaaatgccatacacacaatctggttctagagatggtggcgccaaggacaacatggtggccacagtgggtttattgtcttcttcggcattatgctgagcttagaggtgccattaatgggaaaagaggggatcagtttgtgggctacgtttttttttgccggtgtggtttgtggaagataaaggatttttgaacagaagtataaatagcaaaactggatgaggattcaataggttttgtcactaaattttttatttatatagttaagtgttaaaagaaagggtaaatggcggcaaaacccccaaaacttttattttggtttcacttaaccctcaaaacccaaatttgagcggtaaaactcccaatactcgtattttgttagcaatttaacatttgcgtccattttaggtgttaagtgtcatgttggactggacacagtgtacacgtagcacaattttattggtccacgtaaaaaattatttaaaaaaaattagaataaaattattttgaaattaaaaaaaaattataaataaaaaaataatttttctttctttttgtctttcttttttttcctttctttctttttctttttctttctttttttttcttttctttcttggagttatttacacccccaattctcatcgtcgggaactgattcacatacaaagacctttcgttactagaagccatgttttgagttggtaaaggtggctttgactggctctggtaaaagcttagggaagcaaaagaatagctattcaaatttgtcggttgttccagcggcggttgtggtggaagacccctccagctggttcgttgctcatcgtcgttggagttacgaaatgggtattctcagacgacaacttttgagctgtcgtatcggctaaaccaacatcctcctcaccaactccttcaccgccgccatcgctattcataaaccgagtaaaaattcgctttatttcagggctagatggtcgattaaagaactgttggtttaaatgtggttgcatttttggcctagggtttaaatgtgatttttctgggtttagttttgggaagaacttgattttttctgggcttattattttgggtagaagaagaagagaaataaataaaaaaaaaaaaactctaatcctagaatcaagtggtgaggtctgggtcgtggtggcgatggctcagaaggaagggaatggcggtggatggtggttggcggctaggttagagagaggagtcgaggtggcttagggtggtcggagaactgccagggtagctgccgaggagagagagagagagagagagagagagagagagagagagagagagagagagagagagaga

SEQ ID NO: 46733 - DNA, 1208 bp, Cannabis sativa
ggcatgtaaaggcccgcctcctcggccacggtaaaatcctccttcttcttcccttccgtcgatgacattgtgttttgggtgaaggcctgctgagtaataggcacacccaaattttcctcactcccattgcaattttctgcaggatgatctgccgtcccaataccctctccatcgtctggaactccttgactccctgagtgaggctcttgagacttcaaagacttaagactgtcttctgggcaaatttttttattagatgattcctccccaggtaagaaggagcccaaactagagaaatcttcttcacaagaatcaaatctccttttttttccaatttgtaaaggccttatttccttccttgtaacactctttgcatttgagcccaaatccttcctggatctaagaggtctggagggtctatgggccggctttggattagagcccaaagaggctttgaaaaccatagctaaatgatccacgtgatgcttttccacctcagctatttcttttccttttccatttgacgtgtgggtagtgctgggaccaccaatttcatccgtatgattgcgcaccaccacctcccctcctgcagtggaatctttcccatgcacgttcgtaccaaaccctggacctttatgcccttcctccaacgttcgaatttccgaagacggcatactgccttccgccacagtaccctccaccggaactttcgaactatttccagtctccggttcggcttctttttgccttctagccgcctctatcactgcttccatgtgcaagtcagtgccaatctgcgctggctcaaagtttccttcccctggaataagattgtctctagcctcgacttgaaggcgaacatctctcaactcccgtgctagcctttcctgttcatacaattcatagtccgaaaaacaatcttttttccgggctcccagtctaatccaaggaccatacatggggaccgttctattaaaatcatcagcaatcattcttctgttacgtctgcatctagattcctcatgaccaacaaccccgcatttgtaacaaacacatggcaaattctcatacttgaaataactccataagcacaccccctcttccattgggagaaaaacacctaccataatcggtttattcagttgtatagtcacctggaatctaatgtattcattagttggaaaaccgttcctccatagtcggtctat

SEQ ID NO: 46734 - DNA, 1833 bp, Cannabis sativa
  modified_base (36)..(40): a, c, t, g, unknown or other
accatgtaacataaaatgatttatgatcttttattnnnnngtaaatctgattatattgaaattaattttatttagggcagaaaactcaacagattgatgatattcttaatgatttattcaatgtttatgatcgtcatcttattaaaagtattactttgaatcataactctggtcaagatcattagtaccggtttcaagagaattcagcttacgagtatcttcaagttttacagggaagatggtctaaagataataattttgatttttggaaagctttatggaatctcaaaatccctccaaaagttaaggatcttctatggagagcttgtcttgggtgtctaccaacattgactcagcttaagggtaggcatgtggatgttcctgttgtttgttcagtatgtcatgacatggctgaattaattcttcacatattggtcgattgtccattagcaaaggcatgttggtagcgggttgatgaggctttaaggctgcttttggctccagatttttatggctggttttatcaagttttgttgggttttctaagtcaaaagtgtgtcatgttgccataatttattggtctctttggcgggctcgaaatggtctggcgtggcaaagtaaaagttatgttactaatggtgtggtggctgcagcattgtcttacttatatcaatggaaggatgctcatagaaattcaacaaacacattggcttcttgctcatgtcttagtgtagagcattggttggttctgagtgttaataaaattaaagtcaatgtaggtgcctttgtcattcttggagtggacttttatgggattgggtggcttgctcgtgactatcatggttatgtcctctttcactctttgaaacagatgcctggtcgtgttcaccaggtcttgaccgatgcgattggattgaaggaaatgctaagttcaatcaaacaataaggatactctcaagttgtggttgagtcagcttgtaagagtattattgatgctctcattagttcaactcaaatgttatcctctttgagtttattatttcagattattgtactataatttctgaaatcaacaacttttgtgtctttattaaacgattggctaataagactgctaactgtttagccactgcaacttgtcgtgatacaggttgtacttatgatggggggcttgtccctactgctttaaaacaattattttagaatatttgtctatctaataaaattgcaactttttggtcaaataaaaaggaacaaaattatgaagagaagacttgttaagataaaactaaaataaaactaaatgaagagaggacttatcttatatatctttggaattgaggattgctatcttatactattctttaagatgatggacaattgtaaacaaactaccatacatatgggcctatttgaatagtttctataaggtttttttttttttttcaaattttagaatttaaaaaaaaaattaaggatgtttagataaaaaataaatagtcatttttaatttaaaaatctttttggaagatgttaagatttgtagcttctccgtaaaagtcttatagaagctgtttgcaaaattataataaacgggaccatacataggagtattcgcagtgtaggtggtgcagtttttgactattttttcaaaccaatccacacaagcagtttttctaattttccaaaccgcacctgcacctcaaaactaaaaatccgtaaaaatttcaccccaaaaaatggtgtggtgcggtgcggtttttgcagtttctacggtttggactatcaccaaataactaaactatcacaaatacaataaagcttgagcaacac

SEQ ID NO: 46735 - DNA, 1712 bp, Cannabis sativa
tgtcgagaaactatcaacaactaacaaaataaactattgataatcacgaaaaatgatacaaaataacatgtaagcaatcttcgagaaactattgacaaagtgttgatattttattgataaatatctaatacttacccaaaataaaccattaaaaacctatcgataacttgttgataactaacaaatttggtgagaacactgtaaaaaagatgaaaccatcaagaatttatcgataatctatcgataactaccaaatttggtaagaacattataaacaagacaaaaccatcgagaatatatcgatagcctaacgataatcacaatttgaccaaaaaataccataccaccatcatctctggtctcaaacaaagaaaaagaaaaaaaactcgtagaaatccaagaaatacagttcattacaatacatacaatgatcaatcaaactaaatcaaccaaaaaaactcttcatctaacaaaaaataaaaagaaaataagaaaaaatcaactaaccttttttgccaaccgattatggggctttgagggtgggtcttctatggggatggccttatctgtttggacgatgctcgcaggtgatctttgggggcatctggctgggtttcgttgccactctcgtagacggaggacctgtgtctctaggttttgtcgaatggcttgaatgcgtccaagggtatttggggactctaggttttgttggtaaatggggattttggggtttcgatacaatagaggttgaaaggaggcttttggtgatggcttggagcagagaaagatagagaaaagggagtgagataaagagttttgattttttaattgattgggatagaatttgaataggtaaataattttaggcatatattagtataaaattattgaaaaactagaatttgatatggagtaaaagtttggtttatgaaattatttttagtaaatcgagtgggttgtaattataaaaaatagtgtctaattgggataaacttagtaaaagagtataactataacttgccggtgtaaatataattatttggggcacgtgccaaaaattagcaataataataaaaagatggggaaaacaaagagaaggtgaaatggaacaaaacaaatatatcataggagttaagagtatgatgaatttatacgcaacttgctcaaaataaaaacagcaattaaaataagaagttgtctgagagagagagagagagagagagagagagagagaggtgtgcctaggtgaggtgggaaacaacagaagcgaggtggtttgatctgaggaaaagaaaaaacttcaattacctccatcttcttcgtcttcgtcttcgccttctccttcgccattctccatcttcaattcaacttctctttcttcaattcaagaatttatatattacataattgtgattccgatcgccattgatatttcaaaattgaaatcaatatgtctttgaacatgaaatccatacaacaagccctagccaagaccgctgccgtcattgagaagaccgttcagaccaccgtccaagaggtcaccggacctaagccactccaggactacgaactcctcgatcagatcggttctgccgggccagccctcgcatggaagctctactcggccaaggcggcgcgcgactctaatcgtccacaacagtatcccactgtgtgcgtatgggtacttgacaagaaagctctctctgaggcac

SEQ ID NO: 46736 - DNA, 2055 bp, Cannabis sativa
  modified_base (2008)..(2008): a, c, t, g, unknown or other
gtccttaaattattgttttattttattggtcttgaaaaatttaaatatataaaaatattaaattacataaaaattaaaaaatattacacattatcttttatttaatatactaattattacacaaaacataacttaaaatatattaatatactacaaaaatacaaacacacaatgtcaaatatgaaatattaataaaaagaaacttaatatataaacacttagattaatgtaaatgtgtatttatttaacttttcaatttaatttttatttatgcttattatatataatttatacttaatttaattatattaataataaaataatatgtatatatataaattatgctaatagatgaaattgtaaagatggaaaataccaagaccctatggcgtcggttttttcataacaacctacgccaaagggtacctatggcgtctgttttttcataataactgactccatgggtaccctttggcgtcggttattatgaaaaaattgactccataggtaccctttggcgtcggttgttatgaaccctacatcgtcacctggaatagcgtcggtggtgaatttcgccagaactgacgccaaaacctcttaaaaatcgcatctaaagcccaatttttgtagtagtgaagactttcctttattgtaaaagaaaaattacacttactactcacgattctaaaggtacagaaacgaaaattcatgggcttattgaagatctaatttaggtaattgtctagtgagttgtggtcttattcagaccgtgtgtgagctatcactacaatatattttgattataaatatgccttatagcagctaggtcatgtatgtgtttcatacactttgtattgtattcatatcttaagaaaagagtgtctttgttctgtagagaatagactgttcgtctcttactctgtttatatgtatattgtattgtcttgagtttgtattcaagtttgcaaaagaagaagaagaacagtgcatgctaccttcgggagaaggttttacaagctttcaggagattgctttttaaatcttgcctcaggaggaagcaagtactcttcaaggagatcgaaaggagttcgagcacttgaagtttcagcaagattcgattagaaggtagaatacatcaagcttgcgccatacaataagagggagtctatttatgcataagtcagttacattgtattcttgagatttatctaatgaatcttatctctggttgtggcctcgtggattagtaataatctgaaaggattgttaaaaccacgtacaaaaaccttgtgtgtttttacttttctacattgtttgtttttctggagttacagagttctcttctgtagctatagaaaaactattttagtactagttttattattctacatttaattaaaaaataaactagaatatttaaatacagaattttaaatgacttacgaagtaattatacaagagcacaaacacaaaatcaaaaacaatactccaaagaatcacaaagaagaaggtaacgaattaaagcagtaaagcaaaaaagataacactaggtttaacgggttcgagccttttgcaatgctctccgttacggtcgaaacaacagtggtcatatctttattgataatattgttttcaaagatacaagaatcctttaaaactagaaattacaagatgaactttctctctctagtttaaactctctctaaccttacacaaacacgattttctcttaagctttcaatggactaatttaccatagatttcaaatgtgatagctatgtatagaattttcatatagttgcaaaaatttgctgtaattctgtcgtggctaattaatgttgtcttaaattctctgagtgagtgccaacaacatattgttggaatatatatatatatatatatatgatgttagattttgtgccctaaacaaaactcattttaatataattttttcactaattaataaaagatcagaaataattctttgttgcatggttcacatgatttntttcatgattatgtttaatgtagagattatatttgttggaaattatt

SEQ ID NO: 46737 - DNA, 1499 bp, Cannabis sativa
attaattaaggcccataaaatacaatagaatagaaaattggtaattaattaagagcattgatattggacattagtaatacccagtacttcttgtaagtgacgcctcacgatttgttaacgatattagtatgatactgaaaaaaaatactagacaccaatattacaattctcattagttaattataacaatggttgatataataacgtggctaagtatgtgcatgcttttcttaatcataataatgataataaaaaattatgtgcatggttttagaaaaatactaatgggcattgctaaataccacaataaatattatatcattattggttcatgtgttaaggtataacaatatactcctgcttttattattgagtcaaacaatatatatgcatgcaaatagcttatttgcattcaaacgtttgaccttattttcaagtggtattcattataatatatacgtttatttattagtgtaattaattaacagttttttttctttttaatttgaagatatgtagaccaatgcttttcaagaggtcaatgaggagattcaacattgcatggtgggcatactcattcccaatgaccgtactagctttggcttcatttgagtacgcagaagaggtgaaaggagggattgctcatgtcctaatgctgttactctttggcctctctgttttggtgtcactcactttggtcgcactcactgtcataaacacaaaaatgctcttacccgataatgatcctattacaaccactctttttcatagtactagaaataatttattacctttagtatccaccaccaccacgtctcctcactaatgtctttgattactttccaatgggatataaattaatgtaagtttaattaataaatacatagataaaatttgaattaagttttccatgatgatatcatgattatgagtaatgatgtggtctatcattaaatatattttatcttctatattaatgcatttttgtataatgtttgattaattgatcagtattgctatattatatgtgcaccaaatttttttgaagcaatcataattttctgaaataagatttttttttttttagaaaaaaaacagagcacctgttattacattactacctatatatgcatgcacttaaattttacatgacaatttttttcaaccgcaatcataattttgaaggttcattagtttagaaagtagcctaactttctacaaaattttatacaaagctccatcaattaaaaaaaataaagatatatagtagcctaactttgcaatatatattttgatattaggaaattattactacatttaggtacgtcatggggagaattgaaccttatcaaattttgtcttgaccatttgatcaattgatcttatatataaatatatattaaattaattaattttgtatactagctagctaatattgttgaaaatgatctgtgtacaaatataaatatatatcatgtatagatcaagataaacataat

SEQ ID NO: 46738 - DNA, 2111 bp, Cannabis sativa
tattaaagtaaaataagtgggattcaataataaattacactaatagctagcgatattacacctcacaaaaatactaaacaatatgtgtgtgttgattttcatagtccaaataagagtagaaagtagaagtaattttagaaaaatatttttatagaattctaaactcaatcataagcctcaagatctcaatatatttatatagattacttttaaactactttaaaagaaagttttatctcttgaaacctatcagggccttaatcttacactctcaattttatcataaataaaattatttatttattttagaataaattatagttgattaattctcaataatttcttatttaattctaaattaaatatatagtattttcaattaaaataatatatctctatcataatattatacaatttttgttttaaaaaaactaatatttagttttaagtgaataaaattaaatggttaaataaatttaatgattcactttataattgaataatcatacaaaataataattcattcaaaattattattttgccctcgaaaataattttctataaaaattaattctttctcaaaataagtatttctcaaattaaacattttcctatacagtatggtacagaggtgatcttagagtcgtatggatctaaattttgaagctgcaagaaattctagataattattgaactcatcaataaaataatctcgttgattaattctattattacctcactataatatagaattacactctttgacaatatataattatatttacaaaattcattttagtagttcattgatataatcaatataaatagttcgtcctttaatttattagttcatataattagagctggtcaaaattatcattttacccttctaattatatatttaattccttatatatcattaattcaatatgaactattaatttataattccaattttaaatttggatccaactataatcactcccataattaatactataagggaactaatatttgatcatttcgaaaggcttggattccacttattattatataatacatatatatatatgttcccagtcattcatgctattcagtttttaaaataaaagctgtaagaattattttctctaagaaactttaatgtgaaagcaataaccttatgttatggtcactatgaacataaacagaagttcatgaatacttgagatttagattgatctactaatgatcatcattgtgatatgaataactattttatgataaatgacacgttgatagagatgttagttcatatcggttcagtcgtgcataatcaaattatacatagtaccttcactaaatgtttatctacatatgtgactgaatcaaaatcacatgccactaaagtatagtgcttagtaaactgtactaggtaattccatattaaaaattacatactttagtacaataccaacttatgctattcgtatagtatgatcataattctctttcacttccttacaagatcatacattctctatgaaatatgaaattttctgatatttattaattatatctctataattaatatattcatttatattatatttgtattttatataatctccaatataaaatccattaattatctgcttttagggcataaccctaacagggagccctttattatttatcaaaagagaaatgctaaaaaatactagtggtgcctaacatccttctcgatgttatatcgctataggtgaaatcaagtatgagaacgtcacatataacttaagataataatttttaaggcatatcgctaatcaatcgtagagtaccacctttaggtggtgccaccaatggtactcaatagcaatgctcttatcaaaatgagcattgttataagacaccaaggtatcgaggaccactattaggtggcgccctataaatagttagcgattttctataattttaattaaagtaaaataagttataacactatctgcatggttaaccaacaacaccacttgaattgggaacaaataccaaaatatatatatacatacacatatatttacaaagtggtatagggtttatttagaaactttacttagtttaaaatcgtttat

SEQ ID NO: 46739 - DNA, 2156 bp, Cannabis sativa
cagagattggtagacccccctttttaatgtcattattattctgtgttccagctttattgagaagatcagaggattggatatgttgactatcccttgtgttaattgccgaatgagtgccttgatttcctccaataatgttgggattggcattaactttgccaatattctccacgctggcttcctcgatttcagcatcagaatctgtcatcatttttgctgagctggtagatcaccggcctgagggatgaagaccaacttgctccggttgccatccaacgttgcgtagccacttggaaccaatgaacttggattgacgggttggttgagctctcatccaattactgtaaggcttaacaattttttcaggaggagtatggaagagttggctgcagaagttttcagtgtggcctatgatgccgcaaatgaaacaaaacgtgggggcacgttcatatttgaagttgatccaaaagctatcttctccttctgggctaatcttcattttccttcgaagtggtttcccaatatgaagagtaacccgaatcctgagaaattctttccagtctccagtgaaattgttcgggtcagattcaatgtaagctcccatcctatttccaacatctttaaccacatgttctgacataaaacctggttgtagattgaatatttgaacccaaatgtcaagtttagacaaagggattgatctgggatcatcaccggctttgagtctgtcgaatatgatgagcttacgaaggcatctccaggggctgccatctatgactctattgatgtcaacatcatgatagaattgaaagagaaaacgatttgatcccaattccttacaaaacatacccattcctggtttccacagagaagcaagttgatgttggatagtgtcaaaatccatttggtgatgttggatgaaagttcctactaagcaccatctcgtatccactcctgtatcaatgctgccagtattgcgtataataacatcctcctcttcttcttcaagattgaggttggcacatagatcattgatttcttgaaaattgtgacttgaggaggccattaggacaaccgaaggggacaacaaaagggacaacaggatcagtaatagaaaaaagggggagataagtcaatggattagaaggtcagggcttacaacataagcaaacaggggaaacaaaacagagaaaactatgtcatcagacatcactggtgtgtacccaattagttgtttgattacaaatattgttaaatctagtttgaaggtaaaaagaagtgactgaatgaattgcccattaaaaaaattcgtacggctttttttttcttttttcttttaaaaaaaaatatggattgcccctacaaacaaacttttgaaccaaaatcttaacttggaacctattctttattcttgaatgtacccttttgtttggtacttattcttttatctatatttttttaaaggggaattcgacattaaaatgtattcacctattgtaacacctaattagggtcccccattagtagccaaccaaccccaactaaaccaactcccccataaaaaagaaaaattttaaaaaacacaatatggagccagtactacattctgtgcacagatttacgattttccatatttcctagtatgggaggacacaaagcttagatagtcatcatgtctgattttaaggaggtttgctggtaagaggcaaaaaaactacaagaaagattttgagaatatggtaatttagtattaaatttatcaaagtaaatattttacagttaaaagaacgcaacatcattattggttatagtatcatcattctccagcaataattgactagaatgttgccatggcaagaaaataggtcccatcaagtttctgtatgtatgtatgtatttatgactagcgtttaaccacggagcactaaaatggtataaaaaatataacatctcacccaagaagccaataataacgagaataagaaaactcacattcacatttgggttaaggcttaagccagaaagctattattttttagaacattcatttgaagaacaaagcattttgttgctttcattgacaagtttgaagtacaccactacaacaaatcttattaagaaagaggctggaaaacataaattcaaaccaagtaaat

SEQ ID NO: 46740 - DNA, 2812 bp, Cannabis sativa
ttttcaaatttgtaggaaggagccacgtgtctttccttgaaatagaaaattgtagtaaaagcatggcacgtgcgtttcacgtgctgtgtaatacacttaaagtggttaattttttagtttaattttgtttgacaattgtttacattgtagcagtttaaaacattttacaaaattttaaaaattttgaaaaaatttaacatactgaaaataggatttaaaattcaaataatctattttgctttacgagcaatcttcttgacgttcggcattttgttctcttctttttcagttgaacactacacaaccacaacaaaattccccttttcttctctcttattaaaatatgtccaatgccacaccaataatctagcaacacctcaattgatccaaaaaaaacacaacaataattccaatgataattcaatctgcccgaaactaccaatcttcctaaatcacaccaaaaattccaacacttcaccaatgattcgactaacaatccaattctttccaagccaccctaaatcaaattcaaagctttcacacaaacaaacaacacaccaattgaccacgtcacccttcaatcaaaccaaaatctcatccaaaaatttccaaagttactccaataattcatacctctaccaacaattctaaaatatcaacattgcccaaattaatttacccccaaaaattcaactaattggcatctatttgaacatgttgaattggtgaagttgcacatttgggtttcaagtgacagtgacagtgaatacagtaagtaatctttcttaggccatgcagcccagtatgagaagcccaataagagaagcccaataacaaacccaagtgtgtttcattttcatcctttgcaaacactcatacgaattcttcttcttcttctttctctatcggcgactaaaccctagaaatatcaacctccttcactaactgatcgctgatcggagatcggagaggaagaattccgtttctcttatttgccgtcggattagcaattgcttcactcgcaacaggtacgctgtacttacggatttgaggctgctaatgaggattaaatacagagagagagagagagagagacgatggagactttgtttgattgtttgagttttctttaagtgattctctttgttctgttgcatagagttgttctacattagcattttataggattatgatttagctattaattttcagacgagattttgtttctgatctgtatggttccgagattttttctcaaaactttttcatttgaaatgtaagggttagggccaaagaaagtttcagaatttttttagtttggttcagtaaaagaatttctgtttctttcatgtgaatcttttttgtatggcatttgttcctacattcattttatttcagtactgtgttcctaggcaatttgaattgtaattcatagtgacaaataagttacctggaacagtgttgttgattggagagataattgtagatgtttcaaaatttatttggatttttaataggagaagcgaaataagaaaatactttattgaatgattaccattgcaattattattaatgacctgtttagagaagttttgaaccaaaatgtacaatacttcaatgattaggtaccaactaataacctgtttagagaagttgtgaacaattatggtttattcatttgcatctcttcagcattgttgttagtatgtgacgtgtttctgttaaaattgtcacaaaaattcttagataggcatttattatgtaggtaagggataagatacaccatctttattgaaccaataaaaagagtttacttggcctgcccatcaacgtgagtggggtagtacacagctgcagacatggcaaaatgtttatttatttttctcctttcttaactttgtttttgaagtttggctttggtattgatgttattggctacgagttatctttgcggtgcgttgggcatttgaattttatcatgaatagtttttgttggcacaacaaaatctgcaaccacaccactttaacatgttagagacatgcattgacctcttccatcttatgagcatgaaaatctgatgctacagattttgttttgagtctttgctagcttcttggtctaggtttcattgctttttctgtagacagtaatgttgagacaatgattcttgctgctttttctcaccattctatttatacccgtggattttttctccttaagattagtggtagctcatagtctatcctttgaagtatatctctgatacatgtgttgtgtttttataacaatgttgctcatggactacgtctgcctatgcactttcggtttattataacttataagtatacatggttggaagtgtttccactttgtgttatgacctctgtactacatgattcgtatatcaatatcaatgatgggtagttctaaccttttaatagaaagaagctaaaatgtagtattgtatcatttttcttttcctactactgtagaattgtggctgattgagtcaaaatatatatgtattttttcattaaaaaccatttgcgtgcaactaacggtgaagcttgtggttttttgggaattaggattggggctttttgaatttcttgtccaagaatggcgaaggaggagttaaggatttacaattccatgactcagcagaaggagatcttcaagcctaaggtttcaggaaaggttgggatgtatgtctgtggagttactgcctacgatcttagccatctcggccatgcccgagctgccattaattttgatgtcctctacaggtctcatatatgtaaatattttgtt

SEQ ID NO: 46741 - DNA, 1383 bp, Cannabis sativa
ttatttaaaaacagaaaatataccttaagattgttgaaaatttcagaaataaagtcagcatataaaccagtcattttcttgtgtgaactctcccaattcaacatacgagaatatgatttgtcaatccttttgcagcattttggactcaaacttgggagaatttcataaaggcaaacaagacaagcaaatgggaaacctttttttttttttgaatgcatgaattttatctttatcctccttagccttctcaatcttgtaaaaaaatttatcattctcccgaaaagctaaattcataaagcggaatgttctatcccacaacttcccaaaaataatatttttaaagtcagataattcacaatcaataaaagaaaacacaaaattgtccacttcttaccaaactcataaccatacaaataatttctcaacaaataaactattcctattttaacagcatcaacatcatcctcaaagctacattccaaaaatctttgcattacatctttttgttccaccttaatgcttacataagggaacatcttaaacttcaacgaactcttcttaggtaaagtagtagaacctttcgggctcaaaacggtaaccaacacaaactcctccaaaccaaatcgaacaatacggtctctgataagaaaccacttttcaaactcacccctttcttgatggacctctctcactagagcaaggtagggagatcattaatcctttcaatacctgccatcttcaagaaagtgaaaaatgatgccgtttgaaataaaataatttgggagtctgtcaagttagcattgagttcttgaatatctttaggatagttttaaatttgcaattaacttagaaatcgatgctgggctttaatctttaggtaagccatttgaaaaaaatcggttataaacaaagttagttaaacaacaaattagaataagaaatataaaagaaaaaaattggttccacaaaaattataacacaaacaaacaaatacaaaagaaaaaccatttaaaagaaatatttaaatacctaccacattaaaatagctagtactcttcttaggagaagctactggagtagaaggagacttggccttagaagcaatacacttaacgccataacgtgtaaccctactattatactgatatttaaggcagcaataagaagctgacacatgtatcaaagctagaatatgaaccaactttaactacgcattatcaaatgcactttaaatgacttgccttgagaaatacagttactaaaaatactcaaattcattgccatatagacaataacgagacgtgagtaataactattgactgatgagatcagtgatgtaaacgggtccttctcgagataagagtacacaatggaactatttgg

SEQ ID NO: 46742 - DNA, 882 bp, Cannabis sativa
taatataaaataaggcaaccagatttttatgttgagttgtgtaaatcactataatgcagtgtttcttcaagttaaattttgttatggtggaaaatagtcaaaagagattacaactaagtaaaaacacctagcatgaagataataagatcatgaagtttcacataatcaaaattaaggatacctgaactgcagctctgtaaaaaagctcctctcccactgagcttgcagcaacaactagtataaactgcaagttaaaacaccagttaactaatttgtttcttggtctcctcaagaaactatgaaatgtttaataagtacatgatcacaagatcattacctgccatggagacatgccatagaaaaagttacgaagctcctcgtcttccacatctctgatggcgcgagcatgaggagatagcttcacaacttcatcctaaaaccatttcagtttgtttaattgcaaacccaattatgcaagatgactaatagaatcatcagaactaaactatgacaagaagaaatgtcatttcaaaacatgagaagccaacttacatctagtataaatagaagagccataattggaggggctgcatatcctaggccatctaaaatggcatctaatgatgggtgaaaacctcccaagcaatcaattccagtgattgagcaaataaatcttcctgctaaagccatggcaccatatattcctgattgtgcatattaagaaaagaagtcatataatggaaattgaaaacaaatatagtttgtttcaatacactaaagatagaaatatgaaagtctatatacattaagaaaatttacatgagacattaaattggcttatgttgaaggagtttttttagaactaaaagctgaaattcaatg

SEQ ID NO: 46743 - DNA, 3102 bp, Cannabis sativa
  modified_base (2506)..(2509): a, c, t, g, unknown or other
  modified_base (3063)..(3063): a, c, t, g, unknown or other
ggtgttgctgtgttgctgattttgttcacacacaatgggtaccgtgtgaaatcagtctctttgcttaatagctttatgtaaaacaacaaacttttgtcatcctttatatgtagtggttggcatccttctttcagttggtatttcagttgtatttgtgttgttttagggttgcatttgagttcttccatcattattttcactagttcatcaaaagtgcaattgctggaaattaattctccacttgattcatattcaacatagtttttcttgtcatcccaatgtccattgctctgtaccaaaatttgtagaggttccatgtcttgaaataatgttcatttaatattttttttttaagtttcagaagttgcaaataactattttaatctaacaaaaaaaactaataaacaactcttttgaatgataatagttgcaaataacatttcaatgtgaattactatttttatctatcaaatcaactattaaacaactattttgaagcatgcaatcggtaataagaataaattcaacaattcttgttagcagatacttaaacaacaattatattactggaaaacaacttataaacaattgtttacagattaaaaccctgtcgcttctaattatgtgcattactattttttagatgcaatcccttcttgattttttgttcagatttaccaaatttccttatcctttcaatttgttcatgatttcctcaatttataacacattttcaattatgtagaatcaaaaattaggaagagattcacgaagaaattgttgaaccttcaattatttctctgattcgattatgggtgaggttcaatgtttttccgatgtccttctcttcgaatcctctcctttgtacgcggtgagtttttgattctaggttgtttttgcattttttgttcagcaatggaggttgattactcttttttttttctccttttcgtatttggatttttcgggatttgattgctttttccttgagatctacatcttgttttgagttgattttcctggtttttgaaagaaaatggtggagatttggttgtttggggtggttcagctaggtcacgaaaaaggaggactctcctccgtttattttgggttggtcggtatttttgtaaatagaaatttttgttttctatttatgtttattttttttaggttatatatgtaaattgccttcctttttagtttattatagaaaaaattctaaaaaaaactcataaagactgctacttcttagagcaagaataaaattattttaaatttattttagtgaataaaataatatttaaattatagaatattaaaataatatatgtaaaatatatgttatttatttttatttttatatattattttaatgaaataattcgcgattcacacatatttttacaataatataaaaattttatattgctaaatctttgtgtaagcttatgtactaatctatcctactataagtgtgccttttagctgcttttgttctctttatgttgcatatatcattcatgatataattagttccaaacttctcaccccaaaattttttcttcttgccatatatatgtctcaaagtatttatattttttatgtccccatctcttctatatctatatatttatataattctcttactaagcaaggggatgtgtcatattaaaatttctcagtcttttaatgcatagaaacatgaaaatgttaatatttatttgattgcattaaaaattaattatatgtgagttaagaaaattaggttcctaacatggtaacttgccacatcaccatccctcacaacaacattatatatatagatttagaacaaatgctctaaatacgagatgacccttctactactactcctcctctctctctctctctctctccatctctccacacacttgtaaatgaaggagttgcatatcgaaatgggttgctcttcctcccttctaagtaaatatccccaacaatctcattctagttttaatctatttcgagattgataggcataggagattactagcgaagagtcttcaagtgaaaggttccttcaattatgtacaaaacaagttgaaacactcgagtttgaggttgctttattttctaggggagcttgactttattttttaaaccctggtttggttttttaagaaaatgactccttataaaaaaaaatgatggagtttagcctttttttttagaaaacacattcaacatatttcacttttttacttattaaatatttaaataaacaaaactaaaatattaagtgtaataattttaaattaaagttataggtataataaaattttaattatgaaattatatgtgtataactttaaattatgaagagttttggtataaaaattttattaatataaggacaaaaaaaattgttaaaagattcttaattaataataaattaggaaaaactaattaatagttataattaaccttcaataaagttttataaggaaataaattattaggtgactannnngttataagctaattattatttatttttatttaattttcaaattaatcataatcattcaatagtaatttagtggttaaaaaaaatgtaaccatgatggttacatatttaatgtaactattgaaacgtcctccttatatttttatatattaagataaaataaaaaagaagattagtgtcagaaaaaaaataccgattgagagagaaataagaaagaaaaaaaagttaccagaaaaaaaaaaaagttaatgtgaaaaaaaaaagaaaaaaatacaattttttttttggtttttttcagttttcaccaaaaaaaaagtaacaatattacaaaaatactttcagttggccaaataaacaaatatatatcccaactaaaaaaaattacacaaataccacttacacacacctttaatccaggatctatgcttcctgggcaactatcacgcaaccatcgtgcaaatacgcagcaacccaacgcaaccgaaacgaaaattcaatcaaaaagagaaccaccattaactctggcaacttcaccttgttggaaatattttaccagnatctagatttactatcaagtatgtttcattaacatccta

SEQ ID NO: 46744 - DNA, 813 bp, Cannabis sativa
atataaaggctcatgtcgtctttatatcctatgcttgcgcagttaattaagtatgaaatatgtttttgagactgatatgagtgatcacaacttctttctctcaaaaactagaacctcatgaaaacatgtatagatttaaaattactaaaataaatattcttgagagtttgttgatataaaattactaaaataaataatgttttaaatatttggaaagcactgtaattagaatgagaggtcaagtttaataaaatattaagttttgatatattttgcgtctatattatatatactaaaatattgcaagatatatctttacttgcatttgcgtctagagggtgagcttgaagccgtgcgatttgggctcgatatggctacgttgttggaggttgatgttgacacccttttctcggatagtagaggaaagagctcctacttggtatttgcatttctcttttcttaacgttttaaggtctgttgtgtcaagaaatgttgctttttgttgggtctcgcggatgaataatatggcagcctatgctcttgttagatggggtttgtctcatagttgtaatgatttgcttagtttttgggaagtgagtccccatgtgctcactaaacttttggctcctctttaatgaaatttatttctttaacaaaaaaaaaatggtacaaaaataactgaatccatttgatttatttcataaaacttaagttttgatcagccgttcaccaacacaaaaacaaacatggaactcttctttcatttttttttttttttctggattgaactcatattagttagcgtgaaaaata

SEQ ID NO: 46745 - DNA, 852 bp, Cannabis sativa
tgggttagtttcagcttctcatatgatcaatatgcatgtgaaccccctttctttatttcctcaagtcttaatttttagccaataaaaaaaaaatactagttgatcgtgttgcttgcttctgtttgtttttcactattttaattcattggatcaaaaacgacaatgttataattaattagatatagcagggcagggacactactcttgtcattagtagggacatttatatttttcggcatttaaaaaaattataaccaatgtacactgaattttgaactctattttcgccattatatataattataactacaatgtatatagtcatatataaataattgaattataattttttaaaaataaaaatgtcatcttttggtactgcagtgaccgtaatattgctgactgtgccaatgctttatgagaactttgaagacaatgtggacagctttgccgagaaggcactacttgagataagaaataagtacgcgcagttggatcaaagtgttttccaaaaacttaaaaatggtattaaaaactgctgaaactctttactagtatctcagtatttgttttctctttgctcatttacttgttcaaccaatttttgtcattaattttcttttatggctataaactgtaaactctttgatggaggttattatgaaaatacatgtcatatgaaatgagtttcctttttcttttttggctgtagaaatgagtttatagtttgcgttgttgtaacaatgttgctcacgaatttgtagaacaatattctgtcgtgtatgattcttggctgatttacttaacaattttatctataaacattagacatttgtcaaaaaaaaaaaaaaa

SEQ ID NO: 46746 - DNA, 2462 bp, Cannabis sativa
  modified_base (1404)..(1424): a, c, t, g, unknown or other
tctcttgaatctctggaatgacaaaagtagcatttaaaagcctgaatatgatgatcagatcacagatctgaaaaattaacaaaaatttaattaactccaagtaaaaattgtcttacagatgacttacacattaattaaacaaaattaaaccacaaaatatttttgcataaatgaaaccggtactttgtttatttggtactgtaaaacaaagaaaacaatcaattagctaaattctctaatagtcttccctttatccaacacagcaagaaaatattttcaactgaattccagaatgacacaaccagaactgattcagtatcattgaaaatccttaaatatttgatgtaagatagaatcctaaatcaacaaataaaaagggtgatataaacaaaaaagaaataagatatttgaaaagtaacatacacaaatacatgtgtatattaactctttaaaatttacatgcataagaaacaattgaatcaaacaaaagtttcttcttaatggatagaatcaaccaaagtagtttacaatccatcctatgagaaaatcttaccaaaccatgacaattgacctctcgggaaaggcatactctcaaaaaaataatgttctagaatacatttaatagtatgttcatggattcattaaacaaaaaagctgtcaatgcattggactgtactcgatactcataggagattcaattcaattgggataaacttaatcattatacatgatatataaattgtatcatgctaaatcgtacaatacgcaggaaacaaaaaattttgacaataatacttgcaaaagacttgtcaccatatttactgtataattaaggataataattctcagactaggcaacttattcaattattttttctttaaacaataataataactaattcatgacaacagtaccaaattcttacctacgtagttgtttctagggttggcataaggctgcaaggatttcagtggcttcacaacaccccagagtttcttatttcgatatttctgtttcaatgtatcaaacattcccataaacttatatacacaagaaaaagaccagaatttgaacccatacaagctagttgaaattcattgtaaatcatcatttgcatacctgtcttctacggataaaagcaaaatcatcacgaaacctggctagggcactgtaatgaaccaagtcgacaaaggaagaccttgcgatggagagatggggaatcaaagacacaaaagacaagaccacaacaaacaatgaattcgtactggtagtggctaaccaattgtcattttggttaaaagggaaacctggtcggtgttttgatgttctcttccattcttggcttagggaccggtgacgttctcagggtacagttggcgacgagagacagagagagagagagnnnnnnnnnnnnnnnnnnnnngagagagagagatagatagagagggagacagatgcggatgtacctgtgaagaacctaacgagagagacagtgagaggggggcttcgagagaggtgggcggaggagaagacacaatcgccagaggtgggttttgaagattaatcgaaggtgaagtgtgaatagtgggcttcgatttgggggtaaatatgcgtggatccccttgtcaattaaaatatgcgtcgtttataaaatgtcaaatagaaagtattcgactttttataaatgacgctaatcgtctattacatattttaaaattattctatttttttcgtcagttgtcttttacgcgtctgtgttactaatgacgcaaattatgtatttttactgtcttttgaaaaccgacggttcaactaattgggacactattcacgtcggtcaacaccgtgaatagtagtgttgaccgacgtgaatagtgttttttttagtagtgatcacacaaggcttcaatttttttaagaggaaattatattgtatacccattttactttatttgttttaatttttacttctatttgtatatattgttttaaatatacccacttttatggatgatgtccccattagactccttaagttatgtaaattatatgctagacttaagtacagagtgagggtatattaggcaatccactcaaaaaagtgggtatattttaataaaaaaataatataagggtatttttgattaatgaatacaaaaaagaggtatttttcaacttattcctttttttaatgtccaattttttttttctttttaaagaaaataaaacattttaatagatagttcaagaacaaatcttattaagaaaataattggtaataaaattgtgattttaatgtacacaattctttttttctttttaaatggctcaatttaaaatttttgtactctcaaaatacgggaattactctatatactatttttttattttttatttttaaaaaaatttacagtttgggtttctaaagtagttgcatcgctagttgcaataggggtttcta

SEQ ID NO: 46747 - DNA, 2511 bp, Cannabis sativa
tcctagtaaaataattccaacaaactttgtctgtgttttggtcatattgtgcaagattgttctttttcattttgacagatctttctcaggaccctccttaagatcaggtggcactagcacacaggctcaaactcgtccttcagcacaggccaatctttccaccagcaacaactcaagtgacaccaactagtatcctgactcaggtgcaacgaatcaatgcacatctcaggctcagaatcttgccagttcttttgactatggaagtctagatcagctatacatgggtaatgtcacaggtttgtcaataaagtacattagtcaatcctctttctttccataaaattattcttatcctcttgttcttaacaaccttttacatgttcctgaaattacaaagaatcttattagtgtgtcaaaatttgcctgtgataataaatgtattctttgaatttcatgctgacatgtgttatgttaaggacaattcaagtcatattattttgctgaaggggtttcacaagaatggcttgtattcgtttgactcaagccaagttcaacttcttcctttttgccccgaacagcctatcaatactcatgtctctcaattcagtagcagccatgaccaaagttccccacctgtcaaaactaccttcgtggtctctctcaacaatgccatagtctctgtatccaaatgtatcaaatgtaattcgaatgttgaaaatgattttactttgtggcacaatagactaggacattctttttaaaagaattgtacaaactgtcctacagtcttataatatacacattagcaataaaatctcacatgactctgtttgctcaacttgttaccttggaaagattcataagttccccttccccaaagcttccaacactgtcatatctgagcctttgcaacttgttgtttcagatctttggggactctcccacactctctccataataactataagtactacatccactttgtagatgtgtactcacggtttacatggctatacttattgaaaaacaagtttgatgcccctttaaagtgttcctaaactttaaatctgagactgaattacaattagggaagaaatgcctacaaacagattggggtgaattcaagtctttctctaagtacctaatagacaatggaatccaacatagacacccttgcctaaccacacatcaacaaaatagtttagctgaacgaaaacacatgcatatagttgagaatggccttgcccttctctctcaagcctccctacccctcaaattttgggatgaagcctttagaattgccgtgtacattaacaacagacttcccacaccaattctaggcaactattgtgtacatatacaaatatcattcatacatatactaacacgcttcaaacaatccaggaatctcatatatacatatcaaatctaacaccgtatacatatatacttatcaaatccaacaccataagcatattatatacacatcaaatcttgtgagatcaagtcacattttgcccatctattcttttcagaaaccaaaatctaaaccagaaaaattcaataaatctcatatttgtacaatcaaagagagtctctttcccaagtttttttcaaataatttaaaatattaaatttttcctttttcttcttcttcttcgtcaactcagaaaatcctccctctttctcaagcttcgtccccataaacccagaaaattcccctcacgaactcccacttcctcaatctttctcatttttttttcttcaatctcaataaaaaaacaaaatacctataagagcaatggtggtggctaagacaaatcaagaagaacctcccaaatcattgtggtctgtggccagagctaatggcgtaatgtgctctgacgaaaccccaaatctgggctacaggttttgaatctcatcaccgtcgaatgccataaatatttccatcccatccccgtcgaccacaattagactcgaagccaaattgaagccgactttggcgtcgcaccaagcaaagaggaggcatcgtggaaagagaagaagaaaagaaaaggaaagaaaaaagaggaaaaaaagaattttttatttttattctagttttttaatttaaattttttttttaatatttatattattaatactaggtggaccaataaaaatttgtcacttgtacacttgtatacactgtgacagtctactttgacacttaataaattaaagtagacgaaaggagtacatagcaaaacgattgtggaggttagggagtttagccataatttttccagtatagaggtttgatcgtgccaaacttcaaagttaagggagtttagtcgcaaattacccaaataattattaatcataatattagaatattttatattgacttacctaattaaataatgctcacacagtatcgatattagtatatataaataactatatgtatggtataatgttgattatgtaattatgattataatgagataatcgattttattagggaaattt

SEQ ID NO: 46748 - DNA, 1064 bp, Cannabis sativa
aaaactaaaataattattgattttaatgaaaaataatgtgaaaaataaaatttttagaaaaatattagtaatgatttttaaaattaatttaaggttttttaaatattgccctatagttttgggatgcaaataaaactcacacacatagtatttctccaatcaccaaaataatttttcgtatttggtattaaattttttgttgaattaatttttttccttaccaatttttttttttttattatatatttttcttcctcaataaaattaagataatgtttgcaacttaaacatttaatctagtctcgagtaatattagtgtagctaaacttttttttagttgtgttaggactcaaaaagaataaaaaggcaaaatttatttggaagaactagattaaaggtttaaggttcaaatattatgttaattttgtttgtttgctttttaaatttattcttagtatatatgaataacaatattcaatttggattccaggttgtatagcatagaaataaatataatatttgtgatcatgattcatgatagaaatgttggtctcactctcacctaatgttcaaaattaatacatgagcttaagaaacaatatctactatctacacatgtgtctcacattgttgtttagaataatttcacaactcaataatgatgtgtaaataaagttatatttgttaaaaaaaaaaaaaaagaaattgcaaattaaaacaacatggatcgtaagtagtcatatatatcaaattaaaaatcaaaattgaactaagaatgagtagaatttttccattcaaactattattcttatagaattttatcccatgatttattattattattatgcaaaaatctcagaactatacaaattctttcctgatacattttgtttatttatttatttatttatttttatatatagtgagagagtatgagagtatatttgacttattaaactatttcaaatctttttttttttttttgtgagaaaaatagaaattttaatgagacaatagtctatacatgatgatatatcactcaaataacataatcaacaaaaaaa

SEQ ID NO: 46749 - DNA, 2455 bp, Cannabis sativa
agttgaatctcaatattttctgaaaatgaagaagatgcttgaaagttttctcaaaaaactccatttaaaatagcccaagttgtcagaatgtcaatctggtcacaaggctagccccatgtgtcaacttgggcgttgggccctacttttggcacctaaaaattgttgtttcttctttagaaggacctatttccctatttttgatgaagacgacaaagatgcaaaagttggatcttcaatcggatacttggaaggcacccaaattgacagattgtcaacctagtcacagtgtgctcgaggattctaattctgatgcctcaaatatgtctgtggcatgtctaattgatgtctcaataaagttttaacccttttgcgttaagacggtcctaaaaattgaaatcttagttggaaaccactctttactaattagtaaaactcattttggacgagttagaaaattaaatcccatttttttttttttaatttttggaaccccaacaacctttctctctataaacctttcttgacaaattctaatttttgcagttggattgtggcttgaattaagggggttgatgttagagcttggaggaaaaattgaggtagtgggtttcatcttttattgttcttgatttctgagttaatttcttggattgagttgcatgagttctttggttgtgttttgataaaggaatttgaggtgttaatttggtagaatgaattagtatgtatcgagtccatggtttaagtcaaatcttattgctatatgttgatcttatggatgcaattgtatattattgttgtgataattggagtaagtttgtagtgaatgacatctttcttttagttggtattttagttgtatttgtgttgtatcagaattgtattgtagtttcatttattattattttcactagttaatcaaaagtgcaatctcttgatagtaattctccactttatttgtaattaacatagtacttgttgtcattctaatggacattgctctgtatcaaaaatttacagttccatgtcttaaaatctttgtatttgttatgagtttttagtatcaataattacaaataactattttaatctaataaaaaaaacttataaataactgttttctttaaataaacattaaataacacctaatgcaattgtagttgctatattttgtaaactactgattatgttttttcaaattgtgtaaatagttctaaataaaaatttttctgtaatgcaacaataaatgagatgtaatgcaacaataattgttcatttgtaaacaaatcaatttgttttctgtaatttatttctcttgtctcaaacaaccattttaatcttcgaaaacaacatacaattgtttataaataaaaaacagtatatcatatttgtatgcatcaatattttttttagttgtaatctaatttcatctgtttattcatatcgactaattttctctatgattaatgatttatctaatttctaaaatctaaaaatcatttataactatgaagaaaactttgtaaaacaacttaattaggaagaaaatcattaaaattttattaccttgtatttgttctctgattcgtttttgggtaagcttcgaattctacctgatcttattgtatttaaattatctactcaatacgattcgaattattaattttaggttgtttttgtgtttttttgaatcaatggaggtaagaatctttgttttttttctttctttcttttttccattttaccttttgaatttagatttgtcgggatcagattattttttgattgagatgtacattttgccctcagtttttcccaccttggtctatttttgttggagttgaattgcttgggttgaaaatgaaaatcgtggagatggagatgggtgtggttcggctgggtaacgaagaaggaggagcttcacacagactagttgtttagtccgtatttttaacaataaaaagttttgatttttatctttgtttaattttcctttctagggtaaaaatgtaaattggtatcctaaaatgcctattatagaaaaaattcctaaaataaacagcttattaaaaattcttcctaaaatataacaatcacataattatgccttttctgttaggtttcgtttcttttatcgtaaaaaaatagtatttttaccttttgaactttgacctatacaaaattttgcccacttttattaaaaaaaaaataattttaaaacttataatgttctattaattaagaaaaaattaataaaagttattaaataaacctgatgaaaatattaaattaaataaaaaaagtattaagtttacttaaaaaaattattcctaaaaaaatattttcaaatttatttataagcaagtatcgaaaagatcaaaccaaaattattgaaaacccaataaataatttaaacaaactaaaatctttcgaaaaaaaaaatcaaacttattta

SEQ ID NO: 46750 - DNA, 1029 bp, Cannabis sativa
taataagaatgacaattagtgttttagtgttgacacatgtgaaaacgaacacgatatcatcattaatcgtatcgatccaattttgacacataaattaaatatgtcacctaaatttatttattttgtattattttcgagttgtaccgtcttatgccaaaaccaaaaatatgttgttaactatacaaaagagaaaatattgttttctcaatttgaatacttcagaaaagaaatccaattcaactaaataattttcataataataaaaactaattcaattaaaagaagatttgtaaattagttttcattattatgaatagactcgattctgaaaaatacaaatactaattaatttttcattacttttgatctctttaaactttttttttattttttattagcttcaaattcaattacagtaaaatgataagcaaatgataatttgctaatttcatttcatttgcaaatccatccctttcgtacccagggttcagacttgagatttaaaccatatatatatacaacaatcaaaacatgcatttcattatatgcagacattcataaattcaagattcactaataactaatgttagtattattttacacaccatggtcatgtggatcttaccaaaccatagccatatactatataaatataataatacaattataattataattattgtattgaatagaatagaatataatagctcacgttttctttgcatacaaatacggatgggatatatattagttaattagaatagaacagaataaatcaattacactacctgtttttctaaatgataaattaaattttatattttctaaaataatataaaacaatatgtacattaaaatacaagagttcgaattatcattcaataaaataaataataattctataatttttacaaaatacaaaatagacaataatatttccccaatcacttttatgttatgcataaatataaatattaactataagaaacattcaaataatcaaggaaaatatatttatatggcgtgggt

SEQ ID NO: 46751 - DNA, 1601 bp, Cannabis sativa
cagtttacttgggtaagcactaaagtaatagcaagttatttcttcatcaaaatatcagtaagtttttatttgtttcttgttcatgatcttatctctcttttaaatttatataaaacaggtggttatgacaaggaagaaaaggcagctagagcttatgatcttgcagcattgaaatattggggtaccacaaccactaccaattttcctgtgagtaataatacataaaaagaaaaaagaaaaaaaaaggcacgttgttttttccatacataaatagctcatcatatatgcaattatgcgttatatagaagtgttaactaattccttaattataatataattgatgtgatgagaaacatgtttaatggttctacacattttcctcactaaaaaaaaaaaaataccaagttcgaatcccctcccaaatatgaaacgaaaaaaaattataatttaagtttaagtcatatacagtactatatatattggctatttggtgtgaggaaattagagggttgaattacaaaaaactcatgttaacagttaacgagatatcctatttagtgtatatttggattattgtagtctgtactattctgtattgtattaaatttcatttgcattatatgtttagtgcttctaaaaagtatcctcaattaagggaaatgtgtcaaataataatactgtttaactatatatttatatatttgtagtgtttatgaacatgtatatcctaatttgctgataatgacgatcactttcttatttcgcaatgaaattatcagatcagcaattacgaaaaagaagtggaagaaatgaagcacatgacaaggcaggaatatgtagcatctttgcgaaggtatatacatattacatatatataacatatatgatcatcattatcactaaaaaaaacataattaaatgatcacattttattaaaaattaacaacattggtacatatatatgttggtgtaggaagagtagtgggttctctcgtggagcgtccatttatcgaggggtaacaaggtattgtaatataattatataattatcagttaatctgtagttttgaatcattaattgattaataaaacaaatgtactttatcttaatagtgtttgatattgtgtaattattaattaaacagacaccatcagcacgggagatggcaagcaagaattggacgagttgcgggaaacaaagacctgtatttgggcacatttagtaagtaatagtatatgcatagtagccaaattagtgtttgtgaaaaggcgaagctgacaattattactacctcctcttaataaggtacacaagaggaagcagcagaagcatacgacatcgcagctataaaattccgaggactaaacgcagtaaccaacttcgacatgagcagatacgacgtcaaatccatattagagagcagcacactccccataggaggagcagccaagagactaaaagacgccgaacaagccgagataatgacagcggtcgagtgccagcaaagaaccagtaacaatattattgtcgaaccagacaacatgacctcaccgctcacagacgcaatcaccaattacaatgcagccgcagtggctgcggc

SEQ ID NO: 46752 - DNA, 2883 bp, Cannabis sativa
ataatcttggatgggtcgaacgtaaattaataaactcttatgctataaattcagcataggtgaaattgtgttctgcatttatttttaatattctaaatgtgaaatttttacttaacaacactataatgtcacatagtaatattgtgagaccaaaaggattacaaatcctcttgaatccaccccttagagtcttattaatggaaatatttattagtctcattttccttttatcaattaatttgtaaaatatactactacatttctccatttctcttctcaattcttccttaaaattagtgagtgaaatgattaattagagtagcatgaaggcaaaagtaaaggagtagttatgctcatggtgttttttctttctttttttaattgaggtgcctaaactaaatttaccttcattgtaaaatattgagtcaagattatcggttagagaaatggaaaaagtgaaaaccacaaacaataggcgtgttttccaacaattggatatggatggatttgtagcttgggtggataacagtataaacaaattgaatatcaaatggatgtgtcatgtaggcaactagtgatattagtgactcctcacctcaacattaatatctccaataccaaacattaaatatctcaaatatcaaacattaatatttcaaatatcaggattaattagtgacagcataacagggtggagccagggattcaaatttgaataatgtatctttttgccttgtctatttctttattgggaaaatatctccacattatattataaatttattatttttgtagaaaagtatttcataattatttttgcaggaaaaatatctccaatttctcaggagctatgaaaattatccatagagatatttagaccataacaatatgccaaaaatgaagttgtatgtagtccaaaatactataaagacttatttataatattttttttaataagaaaagaaaattttattaaaatagaatagtcaaattaaccgttacagtattgttaatagtaagaggaagattgctgataacaaaattacaatttgaccaataacaagtatagcgaccaagacaatgagcgacattattagcaaatcgtttaacataataaacttaaacatgaacaatagaattaagttttgacaaagtgaaatattagaacaaaaaacagacgacatgtcaacattgctcgcaattgcttggatcaccacaagtgagtctatttcaacaacagtattcttccattctttctttttgatctaactcagtgcctccttaacaccgataacctccgccaaacatagttgaacacaaccagttttgaacaaacaaaaagcctcaatcaaacgaccatcatctcctcgagcaaggcaacctacaccaaaagcttgacttgcagcaaataaagctctgtctacgttcacctagatagtacctatttttggtgcaatccaatgctcgactctactgttaaaactcgaaggaatcaatagcgactcaaaacgatgagaacgagcatatctccatcgatcaaggactcaatgagcaaagacaacaacatcgacaatattatgagcttttttgttccataatatcattcttggtattccaaatggaccaagaaactattaacgcttcttcaaacatagcagagtggccacaactcaacacctccagcaaccaatcactaaactctagaatagacacatttccaaaatcaacaccttattctagtaggaatggacaaaagggcaagaaactaggacatgaaggatcaattcctcctccttaagaaagaaaacacagttcagctccactggcacatgcttagaaaaaagctgcgttcaagttggtagagaactagtaatgactttccaagcaaaatgagtgactttaggtggaactttggctttccacaacctatgccacaggtctgactccatatcagcagactagcttcctttggaggcttgcaacctctggtagtttctcttcactttataaatccccgagtttttatgtaaccagaaccacttgtcttccaaagtagaagaattaagaggaatacttaggataagatcacaatctttagcttcaaatatattattttacaactttcgaatctcattgagaaccatccaaaattattagttgattaacatttttctcaacaagactttgatgagaagtaatgataaaagggttatgtatatcaagaagccaaggaaaattaatgatagggacattcataccagcaccaatacgaatatgggcttctactgaaataatgtcttgagtttcaaaatgcttctccatataaagctaggattttggctcaacacaattgagtgaaagttcccatggggatagtacctggctttgtaaatacgacctacaagggatgactcatgaagcagcaaccaccaagcttgtttacccaaagagatggctttgtaaatacgacctacaaggggtgactttgtaaattataatcattaagatttctaaaactaacaccacccgagcttttgtgtttacacagacgattccagctcatccaactagttcctctagattttttagagttaccccacgaatacttagacataagcctttcttattcactgcaagtctccaaagaaataagaaaaacagacatcgcatagctaggaagagcttgagcaactattttaatcagcacttctcgatttgcctttgggagaaatttgccttcccaactcaaaattattttctccattttctccttaagaaagcctaaaatatctttctttttacagccaattgtgcaaggtaattcaagataaaaattcttctcatctgcaacaaccatacctaaacatgtacagagcctcacac

SEQ ID NO: 46753 - DNA, 1615 bp, Cannabis sativa
gcggatgaagacactgaagataccggctttttcgaggattttggtgacgtctgttggtgtgtaaagggctttgtggggtggcgcttggacgagtggcacttgagatggcggctccaccgcgggcactggcaaagctgttggcgctttcgttggggttaaggccttagctttagttggggctgcagcagcaacatgttttgagggaggttgggctggagagtgagctaatattgtggctcctttgcagtggtaaaagaaacacaaaaacaagaatgagaagtaaatgattgcttgcttgttcattttttcttttttttttactatatatgagaatggaattctagctaaggctacttagtattaattagctaaagtttatgaagaagtggattatatttgatgatttgtgttggagtattagatgttcatatatataggctatagacacgtaaagcaattaattgtatgaaaataataatttttaaagctaaaaattatgtattatgtcattgttaagaaaggtggagtgaactaagttgtggtagacgttattagatcgattaatggatatatatggttggttgatttgaaagaaattatattagatcatgatcatgatcatgataaagtgggataataaaaacgatcgacgtacctgatgatttgcctatatatatatatatgcttttataatatatttatataatagacatgtcatccaattaagtgtttatcatgataggggagcgtaaaccttattgattgagatgctaattttttaagaataatttatgatttaaatatttaaatttaattttcggttgcaaataaatatttaagtttaatttttagtggtaataatatttatattataattctaaaactttctaagtatttagcccgtaaatattaagttattattaaaatgtcatttttttgttggtatatttaaacatttttgtaaattataatttaataacttggatcaatcaagaattaacacgtgccaattgccaatttacttaatacttcacaatcaggtacttacaaaaattttagaattataatttaagtattattattactgccaaaaattaaatttacatatttatttattaaacttaaaaatttgtgttgcaaattactcattttttaatattttacaacttagattacaatttacatatattagagtccaaaaaagatgtcaccttgcctaaaatatggactggttgctctaaatcatttgagaattatccctaaataaatttttttcggcttttatacaaatactgataaaatattataaaataattatattatttagtgtagtggtgaaaatatttttaaaatttaatgaggtcacaagtttaaaattctccgtacttataatattttatttttcatagataaaatattttcattagagtactattgagatttgaatcttaataaataatataaaatgtgattacaatactaaaacttattttaatataattatgtattattttatattttattataatcatttctatcctttttattaaaattttgaagtcccaaataatataaaataagccttaaatttccagttaagttttggttgatattg

SEQ ID NO: 46754 - DNA, 2583 bp, Cannabis sativa
  modified_base (903)..(922): a, c, t, g, unknown or other
agttctctattattctacgcatcatgattgaatcggaatggcctaactggtcatgccaaacaataaatgaatttttctggtgtgtgcacttctcgttcacaattacatgggttcctattgtacttatacatgtaacatacaaacttgaacacaaactaggtaatttttctaatatatacttttttcgtgaaaagataaatgtaatgtaaatatactcaaaattattttcatctattgtctcaatatgatatttattacgacgtatatctttgaaacttaacaaattcctatttgatttagtggataggcattatctataataatttttgttcctccaggcatcaatataatggcttttctggagccttcaattaaacttgcaatgcctattaatattttccttcattctttataaatttgaaaagtatttatcacttcaaagtattgtagaatgatgtatccttaccattatttatagaatcatgtataagatgacaaatattcattacttcgctaaccaaaaataaagaaaagcataaacatcacaaataaaataaatacctcaaagtaaataaataataataataaaaattaaaaaaaaaacataacaaagaaaagtgactaattgtggacattcctatctccattatcgatattcatgttactattaatggaatctttaataaaaaaatttgtaacatctaagtgcgtaatatccaaggattctttgaaaaaaccgtcatcttgataggcaaaatttacttctattttctccttttttttcacaaatgctagataaagatcaacaaggtgttttgccgtacgacaggtacgtgcctagtgtccttttatttcacatctgaaacataagtttttagaatttatacattaaatataatcatnnnnnnnnnnnnnnnnnnnntgcaacataaaatgcagtttctgatctttattaattagtaaatgtgattatattgaaatgagttttatttagggtacaaaacccaacagaaataccacgtgtaaataatcaaaccaagtaaataaagacaaaataattgtatagaggttagactcccttagttaacggtaatgacctactccccttttagttgtattgattcgagagataataccactcagatcacaagtttttaccctgtaatttctagagtggctcttaatgaattacaatagtgagaacaaccttaggcacatcttgaatgagtgagataataaatagacttagtgtattgcatatatcatgatgcatatgagagaaggagagctagggtttcgagataaagcatagcactcaagagcttaggaagtagaacttaaattttttgtttagcctagtgctctttatataaattagagcttacataaagtctaaacaaaaatatgttaatatctgaagttgaacatttatactaaatgtacatactaaataataggtaaattaaatatgtgaagttgaacatttacataggttttgtacatactaaacgtacaaaaaaaactaattaattattcctaaataataggtaaatatctgaagttgaacaattattttaaattcatatttattgaattagaatcattatattacttcataatcacatttatatccttaaaatatagatattcttaaaaatgctcaaaccattctatatcttttttttttcatattttttggtaaaattgttgttattattgttttcacttcctatttgattgtatacactataatggggaatgtattcatgcattctttccacaaaacatctttcttgcttcgctatatatgataaactcccagctattagagttttagcatacacctgttactagaactttgtaattcttgccctttttatcgcccttaataattagaggagttgcgtacttactatcctccagccaagccaagcactagttgctgtatttgcaatcaaattataaatctcctccaaacatgtttaaaatagccagtcattcaatgaatctatgattaggggttataaatcgccccaaaacctcaccataccatgttttcggatccttttaattaaattgttacatattattcttgcttaattcattattttatcagcactatttcaagctagtaccaactgctcaaagtattggatttatagtcccattaattgtctttctttattatatacacattgcatacccacctaataatattttgttaattaaattatataatattatataataactaattaatttcataaatagtttgaaatatcacaagaaaaaaaaaatgaacagatagcttttaaagtaagaaaaatgtatacaaaataattggcatataaaaataatattttgctatattacatgtcaattttattgattttaaaaataatttttaagataagtttgatgttctttaattataaactaccataatataacttaaaagtaaataattaattactaaaatgtacataaatatgttgtgttggtcactaataggagaatgacacatcacctaagtctaaatcctactcaactaaactaactgttttacctaactgtctgttatga

SEQ ID NO: 46755 - DNA, 1396 bp, Cannabis sativa
atattttatttatatattaatattttttttttcacaatttcggggccctgagcgtttgggggcccgaggcgcacgcctagcccgtctaccctcaggactggccctgactagcaccaatgatacccttcagcatttctctatttaaaaatacatcgaaaacataaatgtgtatgacatatatgtatggaaccaaaatgatacacctcatgaatatatatacctattataggctatagtggaatacaactcaccttatgtctccaatattattattagtagtgtctatgtctcttcacgtgctaaaattggattttaaagaactacatcaaataatatgaagactttatttctaaattcatttcattggccttttgcaataataataaaaataatactcttatatatcctagttataattacaacatttgcatattatatgctaaaataaaattagtcataataactcacatatgtaagtgttattatatagggaggtaaaaccacatgaattttatatttttaatacttaatcaaaaaaattaaaattttgacggtaaaatttattgaatctctatttcattttactcattacattttcatttaaaaactttagttaaatgtcacagtaaactgtctatgtatacactttatacacatggtaaattttaatgatcaacatgatataaattattaaaatattacaaaaaataatttgaaaattataaaaataaataaattatataaaaaaatattttttcttttcttttattttatttttcttgaaaccctaattctttctctccaccctaacttatgttccttccccttcttcttcttctccattcaccgccaccatagtcactaccaccaaaaccaccaccactttaacctaaatctaaaattataaacaaaatcaggaccccaaaatactcaatcaggatctaaaacttttcaatgaggggaaaacaaaactgagctttgattggctgaataggacccgaagatagctcaatctgagtcgtagtgctttcaacttcagtgaggtccaccacgaagagagagaagggacaagagagagaaagagagggaaaaatctacattaaaaagggaaaaatacaaaaacgtttctttttgtggtaaaaataaacttgaaataataaaattactacatggaaaaaataaattgatactatatttataaaaatatctctataaggtgtggacaacatttatactttttatgtgcttttaattatcaaactacctcttacactatcacttacactatcatttacacaatcagacgatagttgctggttgttaggtggttggtcgaaggtttcaatcagacaaaagttgttgggtgattggccgaaggttacattagacgaaggtt

SEQ ID NO: 46756 - DNA, 4648 bp, Cannabis sativa
ttttaaacattcccttcctccctctcctgcccttctgctctttgaataatatgctgatgatagtattgtagtgtgctgtacatgacagtggccaatgatcgttgtcactgttatgtaccttagaagaaatacttatgcaaacaactgaaataaacatgtataagatgttatactttgatttagtgtgaggcgaatgttttatgttttggcctggagttcaacattattcaatggccttaacaatgcttgttttttacgtgtaatctttcatttgttctgctttaattttgtttctatcatttggcagcccagatgattgggaatgtttcatacattatctaggctgtttgttggaggatgacagctactggtccaatcaagccttgaatgatcaaattcatccatcaaaatctgttgattacaagattttacatttggaagatgaagcagtgtgtatttaaatccagatgtcatttactatttctgtttttgtgttttcatttattttaaagcgttgccttggtgcaataactcgatttctctttcgcaattgaatgtgcagtttgactctcaaatatcaaaggcatcagcttttgtacaaaagttacaggcagatagtgatgagaatattgtaaggtgtccttacctggcaaatattgaaattgaaaggagaaagcacttgcagggaaagggggacaatgacaagttaatagagcttttgatgcaatattttgttaggtactatataaatttgacatcttatttgcattttatactaatttacgaaatcttgtaatggacctcccttgttgtacattattgtattgatcatgcttcatttaatgcattactaacattaacatattattataactttataagaaaaccacgacaggactatgatttttattctggcatatggtttttgttgtcgtctaaactcaggtttggtcacttagcctgctcccctacagatgttgaaagtttcctagatgttttaagccctgataagaagatggagttcctgaacaagttgaaaagaagctttgactgcattactagtgtaccaaccaaaatgcttgggcagtcaattactcttttcaaaattcaagaattggctggaaatatgtttgatctttctgtaccaggtgcgttgtataaaaaaaattcaaaaattgctttttttcttcctttaattttattattaatatgatttgttttttttacttaattccttagtgctatcacccttataatttctgctgttattgctttgtggtgattatgtgcggcagaactgttttcaaataaaatctggttcttggtgaatttttgtcaccaattgtaacaagatatcatcctcatgatgttcagtaccctacactagcttatttttgggtttatatttgcatttttatttccctagtttatttttaaagttcttttattgcgacttctgttacttagttgtctatccaatccctcttcaattattcttctgtagaacttgattctgtgttaccacgggtttcctcctcacttattccataagtgaggctcttactttttccataagtgaggctcaattaaatttgggaggtcagtctaagcatatgacctgtctctttttcaaaaaaattcttctgcagaacttgagtgtcatgctgtacaaatggtaaagatatattatcaaaaccttccactatcaaaggacttggattcacaagagagtatgtatggtgaagagctgctatccatggtgtgcaatgtattgattcaggtatcatgttcacatcgcatctacaatttttcaatgaagaatttacaaattccaaattttgcatgcttctactatcgaagggagtctcatacaatgcttttgtagttattctggcgtactaggaatgttggttactttatagaggcaattatggtcttggagtttggcttgaatatccgaaggtgagaccttgttttcgctttgttattactggttgtcggtttaatattgttaatttcaatatttgattgtatgtgcagatatgtatggcaatacaagatcttattattgcacttatattcccactggggtgctatttcattagcacatgaacggtcagttatttgtacttacatttattgcttcaacataagcagcatttggaattattatgctgcagcatgtttacctattaagaggagcttctttttgttaggtacaaattgctggatgtcaaaaacatcctgacggaaactgtttctcaccacattttaccccagatgttggtttctcccctttgggtagatttaagtaatctgttacaagactatcttaagtttatggatgactacttcagagaatctgctgatctgacatttcttgcttatcgtcatagaaattactctaaggtctgtatggttttctgttagtgtgttattttatatttattttatgtcggaaggtcggatgttatttcaaagcatgcaaggatacaaatcaaacctgattttaggatgcatgcatatttgcacttccaatatatcaaggtcaatagtgtttagacctaattacttggtaggcgtttcataaaaaatacatataataggtgtaagaattcgtgtggtagtggcccgaggccgactagcatgcctcgtggcaaagggtgtaatgatttgtattggggtgttttggtttcgtttagagaattggcaaaggtgtataggaagtatgagggcagtagacgagggcatcaagtcattttgtatgagctgtgaacttttggagagaatcgggtttctcaattacgtaggaagttctactcttaccctgaatttcaatacacattccttttatttcttcttactgctctatcacattactatttgagtacatttacacttatcaaataataccttaatgtattgggattgtgagtgtatagttgctgaatcatacttttgtattttacaggtaattgagtttgtccagttcaaagaacgacttcagcactctaatcagtatttagttgcaagggttgaagcatcaattctgcagctgaagcagaacgcagataatctcgacgaagaagaggtaattacttgctttgcaacttctgccgtagaacatgcctactgaaaacggtctcatttgcatttgtgactgtttgtctatcatatttaggttgtgcttgaaagcttgcaatgtggagctcacttccttgaactatctaatgaaattggatccaaatctttgacctttaatgaagatatgcaggcacgcccgtggtgggtgccgacaacagaaaaaaattatcttctaggtcagtactgtctgtgattctaaggttttgtcatagttgaagggacatatatactttttttttaattcaaaattatgtctcagaaaatatttgggattcattatttcttatttagcatgtcctttattcaaatagttgaaagctatcttttgtttcaggcccttacgaaggagtttcatactgccccaaagaaaactcggtatgcataataatttttcgtagttaaagaaatcatattttttgcacatagtttttcgtagtctaaaacttgtttataacatttcttctcttgctctaggaagttaaatttatgacaacaatccatgtgtttaataattggtcccttttttcttattatttattttattaattgcaaattatcttctgtatgctggcgccaaaactagactaaagaaagggaaggaagtgttcgaagagctgttgagaggaaatctcttcttcctcggatgatttatctgtctattcgcagtgcttcggcatcactcaaggataatattgaggtcaacggttcaatttccggcagtaaaagctcatcagaactgaagattttgcttgagcgttatgcaaaaatgttgggattttctctcggtgatgcaatagaagttgttttgggtgtttctggtggccaaaagtcttttgaggtatgattgcatcaatcttacttcatgcttgttgtacattgtactatcatttaatattatgcaaccggtagagtacaatgtactatcattataaactgtgtgtacagagtacagtgtactatcattataaactatatgcatgtagtgtactatcaacaaaatctttccttagtgtactatcagtcaactctatgcttgctgtacaatgaactaccaaatctacacatggatttttttcaagtctgttacagaggtgtcagtttcctggtccatgaaactattatttagcttgactaggatccatagtcctgtatgaaatagttagctcatatttaggtgggcattgaaagaagttccttaaattgaggagtgattcaatttatcactttgtttacatttagaagaaatcttgcgaagaaatttgcaatattatgtctagtctcgctttaccagaatgcagatttatatgatttgttggtgctatatcacccatatcataagaaattgtattatgttaaatgaatttgccatagaaagacttgaatcgggcacatatttggtggcagatattataggcaagtttattttctgtcacatatactaatgactgatacgcttgtcgtatatgatttctgtagaaatggtagtagttgtctgggtactggg

SEQ ID NO: 46757 - DNA, 1689 bp, Cannabis sativa
ggcgggtacccgaacccgcgggtacgtataattgtcatccctatgaaaaatagatgacaccctaaatttattaacaatttagtagtttggaaggttttactgttaaagttctagcttagagagttaactgcaagtagagtgatagttgagagagtttaacagtaagatattctattattttatttagaaaggctatggcactcatggtgcttaacactcttataaggtataatattgtcgttgatgatagtgagtcttacttattttactttaataaatattatagaaagtcgataactaattataggacgatactttattgtggtgctagacaccatgagtgcctcatagcaatgctcttattttttaaagcattgctacagattactaaggtgtccagcaccacaataaggtagtactttataaatagttaattgttttttataatttttattaaagtaaaataagtaagacttgatattaaattgtatcaatagcgatattatactacacaagtgtcacagcaccataaatgagacgatgtaaaattgtatcaatgtttttttaatatagtgtattaagatcatatttcaaaataatttgaccctcgattataatttttttgtaaattacaatgtccaaaatatattttttttctaaagtatagagtttaaattaattactcatcagaaatacataacaaaaaatggtgtaaaccctatttttggttaaattgagaaaaaaaattgaaaaatattgcacttaagtcaaataaaagttttatttcaaaaaaaaaaagaacaaagaaaaaagagtcaaatattagttagaagacaattgtacattcctcatgaaaacaaaataaaatatatttacaaacacccaaaatagaaaaattaagtcttgtctcttaattagggtatatttaactctaattatagcatatatattaccaaccatcaaattaaaaacaaattattagaaaaacaaataaattaatattaagtactatatagcctattgccttttttacaaaacaaaataattttgaatctgatgatcctcctaatattttaaggatcatcagattaattgattaatttaataattaatcaaaaaaattaaagatgagatcattaaaaaatttgtcaagaattgcaattactttgcttgcttgttgttttttcttggagaataaaggtttggtttattttatttttaatcattatttatttatatttattactttagtgtgttaaaaaaattatgattttatgattaatgattttttttataaaaaaataaattttaacatgctttgaaatatcatacacccctaaatatttttacactatatataatgaattaaaataaatgagtttaaaaaataaaaataaaaaattacagaacccattgacttaattaacatgaacaattttattttattctttgtattttaattttggtgaatttttattgtttttgattaaaaattaaaatgtataattgcatgcagtgtatggagaaaattacagttttgatttgaatgtgcatttgaaaaatgcatcaaaacctgaagaattaacgattaaaaagtctgattttccaagtgattttgtttttggggttgctactgcagctgcacaggtatgtaaaaataattatatctatcatatttgtaatgaaaat

SEQ ID NO: 46758 - DNA, 774 bp, Cannabis sativa
taaaataatttccaacaataatttagtttgaattttgagtaaaatttattttattataatcccccatacaatccaaatcgatagtcaaagtgaactcttcaatactaaaacgaatgcaacgactagcaatgttcgtccaaaattccttcacattagactgttgcacctctctcacttggggtagaatttatacggaggaatgtctaaaaatttaccaaactgaatagcacgaaacaatgccttgacattccccgaaagagcgacattaagcttctcaatgtcacagtaagtgcaagggcatgccattttcgatttatagtgatcaaattcagggtatttgtattcttattctagaaatcaaataacaaaaatgtcaaaatgaaagcaaatggtaaacttactataaaaagaaaattacaatactactattagcacactgttaacaaacaacaccataccaaacctaaatctaaaacaatacaaatactcattacaaaataaagtctaaaatgaatagaaaaaaacacagcaagaaactatttatgtcaaaaaaattaaaaaacaacctaaatctaacaatattctagatcaataaacctaccactaatataacaacaaaacaaataaaatatataaaaccctagaaccaaaatcacttgtaagaacgctaaaaagaacagagacaaaatttctaaattaaggaaaaataggaaaaaaaaactgaaacgaaactttaggcatttcatcgacatttttcttacccttcttaacttg

SEQ ID NO: 46759 - DNA, 1358 bp, Cannabis sativa
tatatttaattgaaacatacctcttttttaatgtattgtccccaaaataccctagcataagagagtcacatggagaatatcttgaagtgacacggacaaaattagtataatgttttaaaaaaagaagtaaaaatgatagactttaaaaaagagagtaaaaataaaagaggacaacataaaaagggtataaagtgtaatttcctcttcatatttccttacgctaagcaccctctaaatcaggtccggccttaagtataggtgggctaagcctgtatatagaactcagctagtttaggattcaaaaaaaaaaaaatcttctaaaattatacttttttttttactgattaacaaaaaaaatcacatttttttaaataaaaattcaaaatattttttttattacgacaaactatattttagagtcggtcctaatcctactctaactttattcccttcaagcccaacttacataaaacattaagtgtgatctaatgataaaggaaagactcttctattgccaaaagactttctcgtaggagagccatcatgcactgtactgtgagtaagcatcaagtgtttataaaaggggagtttacaatactacacatgtatgacaagataattatagatatgttacccaacaaaaaatatacccaaatcaaataagttattgttatctatgaccatatttattaaattaaaaaattactacttttgctcctatattattgacaatatgacaatacagttatatttttcgtttctatactttccttttatatatattttattttatataaatactataaatacctaccataaatactctaatatacgttatattttgtagtcaaatgttatttccctattatatactattttgataactgtttaatttttctaataattttagtttgtatatgcaattttattaaaataaggtaatatgccaccattcttttatttttaaactcttatattctcatagttgtttatatgatattatttctaatcactgtctattttatgcttgctattcctaattcatagttgtatgagatgagatatttagtataatgtatatatagtgctttttgatatatgaaaactaaacataatatgtttttttatactattaagtattaaatgatttttggatacttaatgtatgtatgttgaactatactaatattcgtattttagagttacaattaatacttaatattaagtataaaacatatacttaataatagtataatttttttatactattaagtattaaatgacttttggattcttaatgtatatatgttgaactattctaatattcgtatttgagagttacaattgaaattaaaaag

SEQ ID NO: 46760 - DNA, 800 bp, Cannabis sativa
aatattaattaattaatattaataaatgaaaaaattgaagtacactggtcactctttgtaaggtttggttttgccacatatattttgttatataattagcttagcttataaatcacagagtatctcattccccattttcactatcatctctctctcttctcttctcttctcttcaaccaagctacaacaatggtgttgttcaatgtttccagagttcagaccaagccttttgatggccagaagcctggaacctctggtctccgcaagaaagtaacgttctttctttttctctgcatttcatttccgtatcttcattttttcactctgctttcgttaaatttcccttcattttgattcgatcgtgcttctttgtttgcgtttgcgatttttagatcagtgatttgaaatcgaaattgcttcattggatcaggctgatccgtatgggtggttgattttggttttggatttggatttatatgaaattgtaattgaatgggatcttatctgcttgttctttgatatatgatgtgtcaattatttgtttttgttgatttttttcttcggttctattcactcattgttggaactctgtttattctacaaaaatacttccacttcccattgttgaatatatttatttattatctctgaatgtcagtatgtatttgaggaagtaaagactggaaagtattgaactttgttcgataatattcttgaaaatatgtgggtcgtccaaactttttcatttgtaggtgtatgaggcagggtggggatggccattaatattaaagatctaagat

SEQ ID NO: 46761 - DNA, 1652 bp, Cannabis sativa
aaaagtcttaccaaaacaccacttaaattttatcatcaaatttaaaacccaattattttagtgtggctacaacaccgtgtgtttcatagagatattaattctaaacaataacgaagtgataattgtaacttagtatatttttttgtccatctctctctctatataagatataaataggaaaaaagagaaagtgagaatacaacaatctgatccttgtaattgcacccattcagcaagccgatacatacagatttgttcacagaaacctcaattaacagtcaactggttccttgctgttatattcctcccttgcttcaaggacatcaaaagaatatcgcttcgatagaacttcaacttgttcagagaatggcttgttcacatggtcaccaatatgtttcaccatttgatgccatcgctttcgacaaatatcccctgtcctatgctcaagcaaattatcccagtccacatcttcgatgcaggcagcatccaagtcgctgagactatcaaccaggcggtggtcatcggtgtcatcccacaacccttcaaccaccattggtgatgttaattgtttgtaccattttgagcagcatccaacatggtgcctggtggacaacttcttactaattatttcccaacaaatattatcccgcaacatgccatgcttgactctcttttgttcagacgccctcaaacgtaggtccatgttgactaaatcaaatagttttgagtactcgtcttggctccaacgccctttgttcactccagtgaatttgattcttcgaaaagtatctttgacatgtagtctatgtttgtttaactgtttcgacagcttcttccaatctgctccatgttctttgtgaaaatttaaaacacactcgtactcttcgggagtccatttgtgaatatcactcctttcaaagatcatgtgggctcgataatacacgctatagcgtggcctccaaggtagagctaaggctattgtcttccagcaatttttcacttcacgatgtgatttgcaattgagaaccatgtctaaacccgcatcacctaaaccgcgctcttctatgtatgccaaaactgccgctttgaccaactcatcttcttctggtgtgaagcgcttaccttgtactaggcctcccacttgcttactctggacacttggactatcagatggtgaaaaaacctccacatgatcagaaaaagtaactctcttagatttaccttgtggtgaatgattctcagatgtctcggtagtcttgctatctttttttgttcttaccttttgcttgttaccttttccatctgaaacttgctttcttgctttggctttcttcttcttgtctttcttggaatcatcttccttactatctccttcaccacgtttggttgacttgaccttcttcttgccctcatcactagcacgaacaacttcatccaatttatcttcagtacccagattgtcagcaagagcttcctctatgggcacattctccctctttcttttcttttttgggaggttttgtacatctgtctcgctgttctttactgcattatcaccatcatccttttccctctttcttttctttttcctttcagcatgttctacattcatatccactacagaagtgtcttggcaattcttgttgtatcct

SEQ ID NO: 46762 - DNA, 3070 bp, Cannabis sativa
aattcaaattggagaccacacaattcaagtacttgaaataagggacattcattaattatataataaaccaactatatatatatagctagctggttatacagagaattaaagcaaatatataaggcagtaattttataattattattattattattataacaatattatcacttaaatgtttcaaaacgaagtacgctgaagccacctactttgaattccgaaacttgtttattattatttttatgcgtggaagcagaagcagaagcactagtgatcatggcttgttgattattcttagacgatgaagaagatgatttatgttcatgatgatgtttggagctcgaatgattgatcgacttttgttgatcatgatgatgatgttgtgtactatttttggaggagtagtgattttgtgaacttattgctatagctttttgtttcacaatttgttgttgttgatgatgatgatggtgctgtacaccgctactagaagccctagtagcaccactactactacttacacttattgccttattattattataagacgacaaattatgatgatgtgatgacgatgatcgtgatgtagaagaatgattactaggtcgtgaagtagaagaagaagaagaagaagatgatgatgatattttataccgatcttcaacgacagtttgaacttgtatggttcgacgatgaatcacttccacaactttgtggtctgatgatgatgatgatttcttttgatcacgatgatgatgatgatcgataacagcactactacttcttctcgaagtaagtcttctatcagccattattatttgttggatgtagtattaaaatatgaattattgtatggataaatctttgctcaatatatgatatgtatttatatatatattgattagataataaatgtggttagaagtgagtttcatgaacactttcattccacaccataagttgtagaagtagttgtcttgggaagtttctacgttggctcttaaagtctttagtctttgattaatatgttggttcttaaagtctttcgtcaatttaatatatatttacattcttatctagctacagccaatatatagttgttgactcttgttttgtattcttataatctataatatcttttaatttaagcttaattattacaaaaaaaataaaaataaaaaactatgagccaggcaaaagtaaggggtagtcgctcctctaaaaaaaatagaaaaaaaatatatattttaattaattccaatatatatttataataaaaaaattatatttataaccataatattaattttgttacaataattaattaagctacattgcatatatataatagaggtgacattcaaatcccatattcaattttcttttaaacttgcttaaaaatatatcatatcactttaattagaatgacaaatttgtttaataaatattaataacgaccgacctaattaatcagatatataactacttctctaaaaaattaattaatattaatatgacgtatgtcattatacttttatattataattttttttgaaggatacttttatattataattaatttaataaacatatgttctaattataaaatcgtcaccattgaaacaataattaattattaattaagattagtgggtatttgctggtgaacgatagccaccaaaacctttattaattagcttggaactaacctaaaaatttccaagcattttacttaacaaaaacaagtatattatagttaatgaattaatgaattaaataataatataacaacaacctaataccttataattttgagcaatattgacataatgtatcaatacctaacaccacttaaaaatagtatatattaattttataattaattaacgatattttataataatatttttgttgtaagtcgaaatttatattttataataattattaaattaaactatataaaatttagtatacttagttgtacaattgcaacatgacacctctaattctcttatgatctctctcaatcgctagctaatataataatatgaatactaacgctttatatttctttaccataagtaggtttgaccaaatattgcattttttccacaaaaagtatattttagctaatttataaaacaaaaccacactatattcctttctatatgtgtttgaacacgaaattattatattggcagcccaattaaagtttaattaaagctattatacgttaattaaatgagattttcaatgtatatatatagatcttatttttatgcttgttcctacctaaatgcttatcatttacctagctaatagaatcaaattaaacatttacacaattatattcataatggcgagtggcgactcatcgatccggccaaccataagagaagtttcggcttgtgaaagccttcgaaaggctactcacaagaactcattggtagataataatatccctcaacccgactcgtcctcctcatcaattcggccaagcataagaagagtttttgtcggtaaaaccctacaaaagactactcacaagaactcattggtagatgatagtacccggcctcaactcgactcgtcctcctcatcatcaattcgaccaagcataagaagagtttctgccggtgaaagtctccgaactactcacaaggattcgttgatcctcgaagaagataataatgttcgaggaaaacaacatccttttccttctaaccctaactcatcatcttcatcatcaattcggccaagcatacgaagagtttcggctagtgatcaaacccatcacaagataaataatactactactcattataatcatattgaaaatagtggtccacaacatcaagatatattttatttctataatgatgatgatgattatggatctaagttatcatcatcatcatcatctcattccaaacataactcttcactttcttctcatcatcattcattgccaggaaaagaaaggcacataagagaaaatttggtggacataaaaatagccggatatagtttattgcgcatagataaacattagttgtaatttatatatata

SEQ ID NO: 46763 - DNA, 2224 bp, Cannabis sativa
atatacgatatagatatttgtaaaattttagcgtttaaatattttgttgcataacgaatggtaagtagctgttaaattttatttttaacactgtaaattatttgaaatttttaaaaaaaattacacgtgattttaaataaattaaaataatgttatggatgccgaaccagaaattctcgagctatgatcattattgttaatttatatattttttattataatattagatttgtaaataattttttttcttcacaaagtcttgaatatgtacaataatatattgtgtttatctcacatttttaaggattgtttcatacgatttttattttttaatagagttttttttatttaaaattatgttattttaattgttttttcattgaaaccttatccaaaatttataaattagggtaaccttgagttatgggaaaatttaataataattagaataagtgaatcaacatttatatattattacatatatattaattctccattaatatctctctcttttttttgttatctttgtcctaaagtaattataataaaagatggattggacattacattcgatcaaattgaaattgttcgttcgtcaataaaagaccattattatttccaaaacaaataatactacgtatatatatatatatatattaaaaatttgaggataaatatcatcatccattcaactttgtatttttacaaaaattattaattagattctttattttcttaaataataaaatagactttttactttttaaaattatacaaatagaacaatgctttaattttttatcaaaataaaacttaataataatccaatctatagatgttatgataaaactggttacattttttgtatcaaaattatcctatagttggttatattaaaaaataaatttattaaaaattaagctcaagatcttatttttaccattttgaaaaatataaagtttattttgtcatttaataaaataaagggttcaattagtagtaggctcctcttatctgtttcagcatacgtaaaaaagagtttcttagttaattttttttatgatcgtgtacgtaataataattatttaggaccacttattataaattttcaaaaaacttcaaataatttatcatgcagaaaatataattcatatattttgttacactcacgattattttttcttatacgcgtgctaaattaacttttttttttgaaatatatataacaataatgataaattagtatagcttttagagtatatactggcaatatttaattaattgtatatagaaattaaatgaatattatatacaacaaacttatttaattaatcatgtacgatatataattaagtttgttaggtacacaaactactaatttaatttgagcggctttcaaagctattatttatttattttttttaaaaaaaaaataattttattcaattgatcaaagattaaccaaacaagttgaataaacatcttgtaaatagtagactccaaaaaattacgatcatcataattagaacataaatctcaagctaaataataatgagtgatacatactattagcagactattttacaaaatacaaagaaaacattttaccaaaaagttgctagatcttctaaaaaagaccaaacatataatatgttattatgaatatttgaattttgaaacaatagttgaattcaagtttaatacataaataaataataaaaaaggtagatattgatcaagctctattaccaaaaaaaaggatcgaaatgtagaaattaatgacagtaattaattatatatcccttcttttatatattaattgtttttaacctttggggtaaataacttataaatccaagggagccttaaaaatttataattatttctttttagctttaatcatgaagaatttaaacagaggagcctttctgtctctctctaactatatatgatttatttttattttttacattttgataaaaaaaaaaaataaagaaaaattataaagcattgatctgatcacatgcatgcatgtctataatggacatatatacgtataattataattaattaatagtaatttatagtgtaaatatcttaatttaattttcaattgtagataatgtatttaattaagggctaattagcaatttttcctaaactttgacatataccaaatcatacccttgaacttttttggccttaaaaattccccttgaactat

SEQ ID NO: 46764 - DNA, 2025 bp, Cannabis sativa
atgctagataatcacatcttatcaggtggaaaaatagaggctggtcttttgactgaagctagcattgctgggggaaaatctcggacaacttcagcttctttcttaagagattgctggatccaagcttccaatgagttgggattagctactcttcaagttgaaatggaagaatcgagagaactactgaaagatcaattttatggcagtataagcgatcgggaaactaaaatcgttttggtatccgaaccttcatgtttgtcttcattgcgaattgcaaatcatattctgagaggtaggacgggtaatggatcaggcgttgttgtggttaccggatctttgcatattgtgtcgtctgtattagctactcttcatggctgatttagttacatcttgtctctatttttacaccaccatctttcaaatatacattggctacagaaaccacattttgctatttagttatcatttggccgcttcacttgaagatgttgggaactcttcttcttccacctcatcagttacatggtggaaatatttctggtctttaaagttgccacaaaaagtaaaaaaaaattcttggggagtagttcatgatgtccttccagttgctactaatttagttgttcaagttgtcatctcttttgagggatccaaccttattttgtgaattttattacatagccacacttaatataaaaaaattataaacttcattaaaaatgttacattagagaaaaattatttatataattagagaaatgtttaaatattttttttttattttattttttattaaaaatgtttaagaaaaaaaagagagaaaatatataaatcctactggagaaattttagaatgtggaataggttttttattttgatgatgtttttcttttcattgataggtagatatttgttttttttttcattaatttaggtaaaatataagaacaataatatgatcaagttaattaatgcttaattaataattatatgttgggttaccaaccaaaatttataaaacaaaatgttagtttcaaagaatatgtcaacttcagttatgatcatgatatttaaattatatatttttttaggcaaattccatttatcatgccaaatgaaggttaaaaaattagtaagactgtataaatacaattatgagaaaagaaattatgagcaccaaatcagtatgcatgtaaagaaagaagggtcttccaatggcttctaagcagataaagaagaagtgaattgaatgaatctttgagcctcttcagtgcgaccaaaacgggtaagaagtccaatcattaaagagtaatgctcttcagaagccttgacttcatacttgtgagtcattaagttgaaaatccggcaagcatcatcaacaaatccaccatcttcacatatagaaagaaccacttggaaagtaaaatggtttggagtaaaacctttggctatcatcaaatcaaacagaccaatagcttctctatacaaaccattatatctataggcctctataactgcagtccaagtcattgaaccctttacctggattgtgtcgaaaaccaaatcagcataatgtattgatccacaaatcccatatgttctcacaatttctgcagaaacaaaatggactgactcgaaatttttcttcaaaacttgggcatgaatctcctttccaagcttcaagtttttcagttcaccacaaatacttagcatccttcctattgctactgaatccggtctgtgcttggataacagcattgatctaatcacaccaagtgcctcatctagacaatggttttcaacatatgaatcgatcatagctgtccataagatcacatttctctgctccataccatcaaacaatcttgcagaatagtccaagacaccacaccgcgaatacatcatcatcaacgatgaaactatagatatattaggcatgaaacaatttttgacagcataagcatgaatctctttaccttggttcaaagctctcaactctgtgcaaaccggaactatagtggaaac

SEQ ID NO: 46765 - DNA, 1411 bp, Cannabis sativa
  modified_base (216)..(218): a, c, t, g, unknown or other
aaaaatacgttttaaaaaaaatcatatttttacaaagttgcaccttaaaaaccataaaaatatattctttcccaaaaaacactactacgacaacaatgttttagtacgacattaattttttggtgcatatttatgttcacgtatcaattactcatgatgattttggacaagaaaaatctctacaaattaaaaatataaattaataataataataannntaataataataataaaattataaacgcatgaatttttttcgaattagatcttatgttaaaaatagaaatttatttttttgtgtttttactttaattcctatactatgaagtgaaagtaatcactattttttcaccataaaactaatggaccaaataaacgtacagtttaataattaattgagtattaatttacactatttctaatcgaaattattaattaatggagtattaattatcaatgttaaattgaaattgaataaagataaatatatgtacttataaataccttaggaggaagaaaatttgggatagtaatggaagatcctttgtgatgttgattattatggacttggtcaagaacctcacgcattctttcttcttggttcaacatggtttcaagtacagaaacctgtgtaattatttataacatatatatataaataataaaaaaaatgcacgagctaaaaatcacttacaaccgagtcggactaaacattttgagagttttgtgcaaaagtttacaattaagtcatttttaaaggagaaaaaaaagtcctagaaaataaaagttttgtgcaatagttcaagttgttagattttttttttaaactattaagattgttagatttaatgatttttgtttaatttcactaacagacgtctaatatagatggaatagttcaggaaatacaatttgttacatgtcaaagttcaagagatacgaacgttcgagaggagtaatttggtacgatcatattagtaaaattgaactaaattaaataaaaattcttaaatcaaacaatctcaatagtttagataagttcggaaagttgacctaagtatagtccaaaatctttatattgttcctttccttacctctatctttgctcatgtcttatctttcatagttttgaaattgaatgtaattactatattctatatatatacaataaatatttctggaaaattaatatatttacaaaactatgtgcacatacctctctttcaagctcttctctctttcgttgcccattttgcttcttctttcgctatatataatatgattaaaaatcaataaacaaaattaaatattaaataatttgacaaaaacatattacttacaatatatatttagcatagatatgatacatattatcatcaccactatttgagatttttctcaaatcaaatca

SEQ ID NO: 46766 - DNA, 1399 bp, Cannabis sativa
  modified_base (50)..(71): a, c, t, g, unknown or other
  modified_base (634)..(637): a, c, t, g, unknown or other
  modified_base (697)..(698): a, c, t, g, unknown or other
atgcaacataaaatgttatttctggtctttattaataagtaaatctgatnnnnnnnnnnnnnnnnnnnnnngggcataaaacccaacatgttgttccatctatccaaccgcactacaatatattacagaacttacttcactatggataaatatttaagatattcaaactcttctaagcattcataattaattaatagaaaaagttaataaatgtatacctctagctagctaaaaacgatcaataccaaataagtcgaattcttacaaattagcagcctcacaacctacaatttaaagaaatactataaaattaagattttaattaattaattaactacttactagttatataatttatgagtcattagttaccaactagttaatttattactaagttactaatgagtaacaaggcattaataaaaatacacaaaaattagtaactagttaagtaactgtaacaaaaatcactacaaaagatcttacttttagttacaacaaaatttgtgactaattataaattatcattcctatattgtgactaaaaggtttgtggctaacaatattagttacaaaaattacaatttgttatcactaaatgtatttttagttacaatatttgttgtgactaaannnnaattagtgacaacttatatctaaagactatgtttcagtcacaagtaaatttttgttgtgnntaaaagtcacatttagtcacaacaaatttatgttgtgactaaaaactgtcacaaaaaatagtaatttgttgtagtgactattagtttaaaatattatatatacatatacaatacatcaaaacatataatataattaaaatatttttatacatacagtgcatttacaaaatacataaacatataatacatatccaatacaacacaaaatacaaatatatatactattagaatttaaatttttatcttattaccaaaattcagtcaccaataccgatcaaaacccgctcaccactcatatccacaaaaacacaatcttaacaatttaggaaaatcccaaaaataatttacaatacttaatgccaatgagagggttggaaaaagagtagggagtaatctgtcgcagagatttagggactgcatcgatttttgtggcttgagtgatttgaaattctcaggtaatttttatacctgcaataataaacaaaaaccagatgacagtgtattttctaaaattgacagggcattggtgaactcagattggatagaatcctttgaggaatctgaagcagtgtttttgcttgaaggtgtttttgacaacagtccgatccttgtatccatttacatggaaagccaccttggaaaaaaaccctttagatactttaacatgtggaaaacgacacctggatatgaagataaagtgg

SEQ ID NO: 46767 - DNA, 6051 bp, Cannabis sativa
aacagtataaactaactattatatatataatatatgaatatatatactagtcaaggagcccaaaacaaatatttttttagtaatttgtgaaaatattagataatttttaaataaaggaggtaataattttttttttaaggcccacccaatctcagaatcggcctcgatattagtaaatatatctatatatatatgagagaatacaaactaaaaaaacaatacctcaagtgtccaacttcttggaacccaaattgtgtaatgatatctgttgtgacattatccaaattggcctttgtagcaccgatgggaggtgggccaccctttgtcaattgtggagcaactctgtccaaaccataacccaatgctccatacaagaagaactcagcttccaaaaactcaagattcaaaggaaattccaagagatcaacatcagaatttaggacaatcccaatattattattaactgctagatattttgggaggaggaggactagcataaaagcaacaattgaactggccattgaccccatatgtgaactcatacgcatactcatgtaaatatattatatattatatatattgtattccttagttttggtgatgatgatattaatgtaagcatacgtatatatatagatggaaatgccatcatggataattgaaaatattagtaatattttgtagtggtggacgttagggtgggcagatagtgtacttaattatttgactttctcctttgatttgtaggggtgataatgtcaagttttaatttattgagttcttaaaaaataacttttcaataataggcttaatggaatacttatcttgataattttttttttggttagaatcacttaaaccattgtgctaaaatataggcttcttcacaccaatcatgagctgtcattagataattctagatgttgtgccaattattatcaaaggattgttctattctagaataccaaaatgcttgggattctttttttgaattagccaatgaggtggcaaaggaatattttcttgttagaatttttaatcacttttgatgtacaataaataaactgtaaaaattattatttatacactgagaaaaatcaatacaaaagatatatcaaaaagaatttctttctctcttttatctacttttcttttcctccgatccttttctttttgatttggtatcaaagccaatggcttctcaaggtgattcctcagtcaacaatcctaggtctcaagctgtcgatgctcctattccagcttcaacacctgtgccgcctgcaccagccgcaccagtgttacctgcgcccttgcttcaaccgttagttccaattactattcacctagacgatgacaactacccctattggcgctcataagttgtcccaaccgtgcatgctcatgacctagatggattcctttttggcacaagaccctgtccacctcagtttcttgatgctcctcctgagttaaatccagacatacagcagtaagaaaatcctcagttcactgtgtggattcgcacagaccaagctatattaagctggattctaaattctatttctgaggctatgctaggccatgttcttcaatgtcgtatgtcccatgaactttggtctcttctcaaaaatcttttgaccactcaatctcgtgctcgcatacttcaactcaagttccaacttcaatctttcaaaaaagggtccatgaccattcatgactatattcttaaaatgaaatccatagcagatggacttaactctgtaggtcaagcattcaatgatgattattttatattaaatactgggaggttttggttctgaatatgactatgttgtcattaaccttacatctagagcagatcaactaacactttttgaagtgcaatttctcttacaaagccacgagatgcgtattgagcaactcaactctgttgctgcactaaagctggctgctccttcagctaatttttctgctcgaggcaaaaaaccctttattccttctaactctggtaggtcctctggttttcgtggctttggtcatggcagaggtcgaggaaatcaaggccgaattgtttgtcagctttgcaacaaacctggtcatcctgatggcaagtgctacttttgttttgacaccaacttcataccttccgataattagaatcctcctcaaaacaacactgctcaacaacatggcaacaaccagcaggcttttgtagttgcctcaggctagcacccttaacctgatgataccaattggtatgttgacagtggagccacaattcatatcacagacaatgccaacaacattcaagctcctgctgaatacaagggtaagactcgacttatagttggtaatggataatctcttgctatttctcatgttggtaactcagacattaaatcctttggtggatcaaaacatgtcaagttaaacaaaatattatgtgtacccaaaataggaaaaaacctcttaagtgtttcccaactaactagagataataatgcctatgccaaattttatgctatttcttgtgttttggacatggatttgaagagggttcttcttcaagggacgcttaacaatggtctctatcaatccacaacaccagcaacaagctctacaagtcatagttccacttctgcttcaaaatcctttaccaatagccctagttttaagtcaactaagtcttgttttttaatttctctcaatgaattaagtttgtggcatcataggctaggtcatccttcctctaatgtactcagacttatttttatcaatgaaaagaagtttttaccttccaatttatagttttgttaaagttgtcctcttggaaaagctcatcataaggcttatcctgctgctataaaagattcaaaactacctcttgagctgatccactcagacatatagggtttgacacctactatgtctaggtatagttatcactattacatccactttaggatgattttagtcgatacacctggatttttcctctcaaaacaaaagatgaggcctcggtcttcacaaccttccaaatccaagtagaaaaacaattgaataccaccataaaaattgtccaaacagattggggaggtgagtaccgcaagtttaagctatatcttaaatcaataggtgtaaagtttaggcatcattgtcctcacactcaccaacaaaatggaaaagtcgagcgaaaacatcggcacatagtcaaaactggccttactcttcttgctcactctagcatgcgttaaaggttttggtgggaagcctttaaaactgcaacatttcttattaatcatcttgccacacctgtgctaaactataagtgtcctattcaaaagctctttggtctctctcccaactataagttcttgaaggtttttggttgtgcttgctatccatatcttaggccatattctaccaataagctacaatttcgttctaccaagtgtgttttcatagggtatagcccaagtcacaagggttatttatgccttcatacctctggttgtgtctatgttgctagtagtgtgtatttgatgaaattgttttcctttttgctagtggctttacttatcctactgttcatacaaatccaccattgctacccagccattaccgtcaatggctgccttatttgtctactgtgacttcagatcatgctactgatgttatgattgatgatggagctccttgttctacctcccaacaagacaatttttcttcacattctcctatcactcaacatcacaactcacctggtctagcaaatcaagccactcctggctctgtcaactcctactccaccatacctttacatgtagattttgatccactgtcacctttatctcagtccaaacagccacaccaaacctaaccctcctagctgcaacataatgcagcacctaaccctccacccaacccaaacgcaccttctcgtcccatgataactaaagccaaagctagtatacataaacctcgagtctttcatgccttctctcttaccattggccttaatgactgagttagaaccatatagtgcaagtgcaaccttgaaaaattctcgctggaagttagcaatggacactgagttttatgctttgctcaaaaacaaaacatggatccttgtgccaaggagacatggtatcaaaatttttgataatcgatgggtttttcgtgtcaaattgaatcaagaagggacagttcaatgccttaatgcgcgtcttgtgttgtgggtaaaggttttcaacaaaaaccaggcatcgatttctttgaaactcttactcctgttgtttaaatttcaacctgtaatactttctttgacaacatcaaacaattgagatattcaacaagtattgacaatgcctttcttaatggtgtcctctctgaagatgtttatatggaacaaccaatcgactatcttcacaagacacatccagactatatgtgcaagttgcacaaggcattgtatggcattcgacaagcgccgcgtgctttgtttgatcgacttaataaacaagtcatattctcacttggtttcaaaattctgtcttagattcatcattactttcttacaaaaatggaggtgctgaattatatcttcctgtatacgttgatgatatccttttaataggcaacaataaccacaaagtttgtggtatcattgctcagttacagtaggtcttctccctaaaaaagcttgactttcgttaattactttcttggtttcgatctcacttgcgacagccatggaattcaccactcacaagtaaaatatactactgatttactcaccaaaactcatatgttacactcaaactcaagcccaactcctatctctcaaggtgacaaacttagtatcaatgacagtaagcgctttgatcaacctaccttcttttgaagtgtcttgggaggacttctatatttaactcttagtcgcccaaacattgcttttacagtaaacaaattaagtcaatttatgcacagtcccactcaacatcattggaatgtatgtaaaaggctcttgagatatctaaaaggcacaattgggcagggcattgtgttcaaaccgtctaaagattggaccattgagtgttttagcgatgccgattgggctggttccattgatgatagaaaatcaacaactggttactgtgtttttttgggaggaaacctcataacctggtgctcaaagaatcaaaaggtagttgcaaaatcgtcgatagaagtagagtatagagctctttcgcaaactgccatggaagttgcttgacttcactctctgtttaaagaacttgacatacaacatcaactacctgtaattatttggtgcgacaatgttggcgctaacaacctctcttccaatcccatatttcacaatagaacaaaacacattgaagttgacatgcactacatcagagacctcattaaacagggactaattgaggtcaggtacattcctacaacagagtaaactgcagacattttcataaaaagccatttcaattaatcaattttcctacctgaaggacaagcttgccgtggttagtcatttaagtcaagctggagggagcatgttataaaatagccttcctcacgccagattatttcccaatcatgagttgtcattagatcattctagatattgtgccaattatgagctatcagagattgttgtagaatttccaaaatgctaatgattctttttttttttgaattagccaatgttggttaaatttccctcataaccagtcccttaacacaaatatccacatcagcaacttaacaattgaaataaacaagttggactcaatcctaggtggcttcgcctctactggatcaagaaataggagttagttacaactgttattgtaactaactcctagatctgtgatcaatcgactcattacaagtaaagcaattataggcagacaatacagatcagagaagataaagagaaagagagaaggagtaaaccctagtgttgaagacctcagctccaagatccagaaacgagaatggagctctcgtggtgaggaaacagaggga

SEQ ID NO: 46768 - DNA, 1305 bp, Cannabis sativa
tggccatgttgtgcactgtgaatctgctgctactatctaggaaacattggagcaacttttcaacactcaatccaaggccagaataattcatctcatgtcactccttcagaacaccaagaaaggctcacaatcaattgataagtacatgctcaagatgacaagctatgtcaatggtcttcaagctgcaggaaattctatctctgaagaacaacagatcatttatgttcttattggtgttggcagcgattacgaatctgtagtagtgaatttgacttcaaaggacaagctcactcttcaggaagtccagtttatgcttcgaaaccatgagatgcgacttcaacttacacattcaagtattctcttggatctaaattcccctcaagctaagaagaatcaatcctcttgattttcatagtctggtcaactcccaactttaggaccctccaacaatgccttcgttgtagaggcaaaggcaatggttcctatcaagcacgtggaaattcaaatggctccagagtgatctatccattttgtgggagagctagacatactgctcaacggtgctataggagatttgatgtgagcttcactagagttgaaaaatctgctccaacctctagtgaaactgctccacatgccaacattgctttttccttagcaccacctgatgatggttggaatctggatagtggtgcttccaaccatgtgatactagatgctaacaacttgatgcaaaggacttcctacaaaggcatggaaaaaatggttgtaggtaatggttccaaatactcgatttctcacattggtaatagttctttcactgctgatagaatattatacctgaaaatataatacatgtgccatccatttccaaaaatctcattagcatctctcaattcaccaaagacaatgatgttactatcaaatttacccctgatctttttttgtcaaggacaaggattcaaagaagcctcttctttagggcactcttaaagatggtctgtaccaacttgagtctcatcaatccaatgtcaaattcccagtctaaagatccaagaactactcctctgctcaaatctcaatgacaccacttgtggacattatttctttttcaaattcttataataaagattcaaccattgtaaatctttggcaccaaaaacttggccatccaaataaaaatgttttgaataaaattcttaaacaatttcaaagtccctgctctaaagatgagttctgtcatccatgtcaacttagaaaattgcatcaatttacttttctctcatctaaaaacatggccaaagc

SEQ ID NO: 46769 - DNA, 1240 bp, Cannabis sativa
tttttatgttattggagtaaactggaaagtttaagaaggttgggaggagctcgggattggtttcggggtgtaataccagaattatcccaaaacagccaaaactagtcaaccagtttacaaggtactggtaaactagtcaatcggttggcctgcaggggaaattctagggtttttgcctcgaatctgattttgactcaaggtgtttttcggaacctaatttagggtattgtagtgatattttagctactttagaatcagtagggagttagattgtccgattatggaattaggattttttttttgaaattttgaataagttatttattaagctttgctgtcgtgacataggacccgggattgtcgagcatagttccattcaggtcggcctgcacgcttgatattggattgaggtaaaaaaaggctttatgcactgctgagcatgttagataagaaacgattataatcgttggtgccttgattatgatcgagttaatgattgttattgttgtcactcgattatgatcgagggatagatacaatcattactgttatgaataattacttaattgaaactgtagaaaggtttcttacttatcatttgttttgtcgggcaacgatgatgacatatgtagctcgtggataacgagtggtaatggtgctttatgaggcatcaagattggtacgtcttataaaacgtataattgtttatgcaatgcttgattatgctttagattaatgaatttgtgtaatatgtcatgttgtaattttttgtattgaacactatttgaattttaatagtttttcttgttgattctctctgactcacgggtgctttgtggtgcaggtaaagggaagggtaaagtggaccaaccatgagttagaggtttttcagcagtgttcatatgaaacgcggtgcctcggttttcagtggacaagatcaatccttttgataatattttgaatggaatcttattttgtaacataatttttggaacagaatgtaaaagttttaaacagaggatccccgtacttaacagtggttttgctatttaaagaaattatgtttttgtttgattaaaaattttcaattaaattacacttttcttaaattaataaaatttttaaaagcacacacgtggcgtccctgtgggatagggcattgcaagttactagttagttacaaattaaaaaaatagtaatcggttgtgagaaaccagttagttacaaagtatataactag

SEQ ID NO: 46770 - DNA, 1701 bp, Cannabis sativa
tatgcctagggccggccctgcttttgacagaccaccttaattagatttggctgcttattcactcacaaaatggttccatttaatatgaaagttttacttttggacaaagacaaagttgtctaacactatgtgtatattataattgattagtaaatttttatattatttattaaattaaatttaactgaaatacatcaataataaatttagtattttaagattatctccaatgcatgtaaaatttatactaaatttagtataaaaaatgattttatattatatttagctcactatttataattatgcttcagtgtacaagatggaaaataagtaacaaataattaattatattaatagtcatttgataatttattgagaatatacaaaatttattattttttattgtttaaataatattaatatggtaaagaaaaatgtaaagtttagtaaaaatcataaattataataataagtggtattataataaataaaaaaaattagcatttattttttattaaaaaatattcctttcattaaccaaaaaagctaactcctcctagctgaagaaaaccaaataaagtcttagatgacaacaaaaaatgctaactcctcctagctgaagaaaacaaacaaacaaaaaaactccttgtaacagaaactatttattgaaattaaatttgacataatgttatattttatgttaaatttaatataatttttaacatgtgttaaatttaatacaatttaaaacacgaagtaataattttggttaagtctactaaaataaaactataaaccacctttttagtgctgccccttcttatttaaacactcaaattacatgaagaaaaaaaaaaaaaaaaaattaaacccacatgttttcttattattggttgtgaaaaccttaacaagaacttaaaaggccaatcaattcaagccaagtcaagtaaaaaagagataacaacttgaaaagaaattaagaaaaaaagacactctttttccatttttttttttctaaagctcatattttgagttggtaggaggtgggttgtccatcattttggggggtcagcatctcattttctatatcacaaaaaaaaaaaaaaagattaattaatcacacactaaatatctggtaatcttcttgttgaaatatttggctatttatagatcctttaaaacaaaaaacagaacagtgagagcccaagttctcttttttcttgtttttttggttgataatggcggctttgaagatgtcatctcttctgtttcgctcactcagggctgcttctggctctggtttgctttctaaaggtatgttcttggtagttcttgcttttggtgatgaaaatatctttggtttaagttaagttgtgtaaaaatatacactttaaatcagttataatttctaatgagtttttcaacacagttccaaagttttgtcaaaagttgaccaaaagggtccaagaaaatagttatgatctttcatgaacaattttttattttttgttttcttctttttttgtatttgactttcaatacagccccatataaatcctaatatggaacatggcagttgatataacagttcagagatttttgtatctggagatgcaaatcagatgatttcactaccccacatttatatcttacctacctgggacatggttggctgtgtctcactcttctgccttttcttca

SEQ ID NO: 46771 - DNA, 1351 bp, Cannabis sativa
gatggaatcaggggaatttcttaccaatcccatgctgtctgtgataatcgtacatcaaagtctcagcaactcgctttccctcatcatagcaactcctaactcctgttatgcataagtgcaagcacatgaataaatagtgacacatttgggtcttataaataacgttttgccttgaaaaggctaccaaaacccaaaaacaatactccttacaaaaagcaataacattcatattaccagttgtagattaaatatatcagatgtagagtgagtacataccaattgggttgacatttccccagtaagtttcatcctgaggatgcataagaggatctccgtacacttcagaagttgatgtaagcaaaatcctgttcagcattgtcatataattagtagaataatacgtacatatcaccaacttaaataaaaacggagcatagatcccaacctggcaccaacacgcttggcaagtcccaacatattcaatgtaccgatcacatttgtctttatagtctgccacagaaaatatgttagttagatcagcactcagtaccatcaaaactgaccatggaagtcaatgcttttaagagaaggatcatgagataaagagagaaaacaatgggatgggtgtcagttagagccagttctgcaaaacatgaaaagaaaagacaaagaactctgggagacagacgcatctctcctgttctgaaacagaaatgaattacagatatgtgccacctttacagggttgtatttgtagaagatcggggaagcaggacaagcaagatggtatatttgatcaacctcaaccagcaatgtctctgtcacatctgcaccgggaaaaggaaaacaattaaacaagtcaaagaaaagagaacatggtctcactgagggaaaaaaatggttttacaagatcactgcaataatatagatagataacattattacacaaactggggtaagaaattcacaatgaaaaaattagggaataaacacaccatgacggataagctcaaatcttggatgaccaatccatttcttcagattgtcctttgagccagtgaaataattatccgcaacaatcacctgagatgcagaaaacaggaatccatttcaactgagaattctagaagatagtttacttctcaaagttctcttctcactagagacagtgtaagatatcctttgaaccctcttaggttatgccagattctctaaaacacagaaatatgaatgatgaatacttcaaatgaactactttcttgtcttgtgttttattatttatattggtttatcagtacaggcacttatgtcatatgcacaccatgccaccattaaataaatctaatataat

SEQ ID NO: 46772 - DNA, 2531 bp, Cannabis sativa
ccacacttgcattgggtagggtttagccacccattgctctttcatggccggccagacctacaaagggcaaggtctggccgcccttaactcctcagttgactgatgttggttgtgcgttgataagaggtagatcacaccaattgctggagtttggtggatctaggtgtttgaagtgatcaatttcacttcttaaattgttgttttgggtgtttccacccgctcgcgatccttttcggttgaagattgacctttggggcgcctcgctcccctttgggaggaagtgttatcctctggccgactaaggagtcttctatagatggttggccagccaaaggctatatgatgggggatgctgttgagccagagatccctggcaggccacctatgccattggttgccgagatttggttgttgttgccgttagacctttgaggaaaagtatgtcctccctctgtcaagggaagatctatcctagttcccaaggaactaggttggtcagaatgtcaatagaccctccctgatctatcaatcagtcttccttaaagtggatctctgatgagatcctggctcttccatcgattctctggttgaaccgtcttatcagatcgctagcctctcagttgtggcgatccaatttttcttggtgagatcaaagaatgtactcttggtcattcatccatctcaagaattcacgtctctattgagctaatacattgcaatcagcagggcgtggttcttaagttaggtcaccctggcctacagcttctttgagtctaactaactcaagatcttctcccaagtccacatggggctcaccaatcgcaagctcaccaactcctggtcttgtctctccaacgcaataccagagacgagatccggttgttgttcttgagggttgtcgcccatgagtccttccttcaatggaaggcgccaatggtgggtcttcccttagaggcaaaggcttcctatttggatccactaggatgcttgtatcaatttggccagctgtagtggccaggcttgtggtgcctgttgtggtgataggatttaccacatctgcagtgttcataggaattctagatatggctggaacctgagcatttagatctgtagtctgtgggtcttgagggacacccaaagatgcaaacagagcaactggggttcttctcgtgttaaccattacgtttgatcagatacgatatctacgctctcaatgaaagtactaaattgttaacctcaaaaagtgatcaaccgacaacagggttgtatagatctgatgcttgccatgtgttacacaaacagaatgaaaaggtaaggaacacatggatttgttataaaggttcaaccccttttgatagcgggtaatgacctaattcccttttcgttgtattaataccgagggttaatactattctaatcactataggtgggatctgatagcacctttaaggatacaaagtaggaatcggaattggcaaatatcaagtgatgagagtgcttctatgggcatgtgagagagagtgaagaagatttatcagacttaggcttagagcttggaggctaatattagacttagattagagcttggaggctagtattagacttagagacttagagcttggaggctagtataaggcttaagatgaacttatgtttctatgttagagttaaggcctttatataggaagcctaaaaccctaatttacacttaaaaccctaaatatttgtatatttaattaattaattacaaaagattaaaatgcccttgtacatagatattatttagctttatattgggcttttagggccaaatttgtagcccaaactacgcagtccacgtgtaaaagtgcacaggaaaccctacagagcttctcttggtcggccagacacctgtagggattaggctggccggccatagggtcaaccaagagtggtcgaccagcttctgtgaggaagctggtctgtcatttgttatccgtttgagtgccagggtcctcgtttgtttaggtactaacttggtcttcttattggtgagttgtactgccacgtgacattgattttatccacgtaagcactactacgtcaggtggacaaaaatcaggataacaaattgcatgcttcgtaagtctattgcttagtaaaaagatttaagtatttagcgttttgctgtaattaattataataatgagatctgagaaaagtgattatctgcggagttaatagtttaattttaaaataaaatataatagaaaattttacattatgacacattaataacaatttatttacttaaatcttgtggtccaatataatataaaatattttatttttattatattgtttggattttaattgttttgcttttaatacagcatgtgctgacatcatcatgtatgttaaaactttgatggcttttatttatttattttttatttttaagtaggaattatataatatagtcttacttgagataattttctctaattgaatctttaaaagataattttggccacaccgtaagtcgtttgggc

SEQ ID NO: 46773 - DNA, 1841 bp, Cannabis sativa
acaggtgtgataaggtctcttgttagcagtttgacaaagtaaagaagaatctaacagtaattctagatcaacgggaagctctttagtgccagagatcaaagcaattgtggctcaaagacgaagatcgaaacacgaagtattttcactctaaggccacgactagataaaagaataatacaattcaccaactgaaaaattccatgggtcaatggattgactgggagcatggcttaggggaggtcatggtagtttttttttttcaatatttgttcatcatctccagttcagtggcaggagattgttgattgcattccttcgggtattacgactgatcataacttggtcttattgaaagttgtttcagataaagaggttaaaggggcgttgtttcaaatgcatcctgacaaatctctagggcgttattgatcagttgtgggaacaaatatcattttattggttaggaattttttcacctcttgtgtgatgccagataagttgaatgatacaaacttggtccttatttcgaagaagaagaatttgacggtcatgggagatcttcgtcctattgctctttataatgttctttgtaaggtcatcacaaaagttttggctaatcgtattgggttttcatcggtattgggtgaaattgattatgggatgtgtttcaattgttcaatactggattagccacggtggttaaagtcttggtcctattatccctacatgtggttttcgacaaggagatcctctctctccgtatctttttatattgtgtgctagaggtttttttgggcttatcaagaagtgtgaaacaaataagtggctttatgggtgtaatgtggctaggtgacagttatctttattgtcgagtcaatgaaagagaggcggccaagattatggagctcctgacaaagtttgaacaagcttcaggacagcaggcgaatattgctaaatcttttatcctttttaacagtaatacctcagagataaactgtgctcgagtttaggaaattttagtgatgtgggttacaggtgataaaagtttgtatttgggtcttcctaatactatggacaggaatacaattattactttgggtttccttaacaaaaaaaatgcataagcaagtggaaagttgggacgaaaagtggctctctaagtcgggaaaggaagtccttttgaaatttgtcgctcaatctctctctagttatgctatgagtatttttctgcttccgtttaagctttgttctgaaatggagcaaatcgtgtgtaagtattggtggcgggcaagtagtaatggcctaggtattaattggttgttgtgggagaagctagcggttcataaagataagccgatatgtacacttgttggagaagattcttttctcataattgtccaaatgtttctacctattacctgcaccacataatactcgtgagtcacaaggactcagcaagaaaagtaataaaaacaatcatataattcaccacacaatattagcaagtaaactcacatcagaatcaaatagtcatacattactcatatatttaaatttgggtcagtacatatattcaaacataatgaatgtcaatataaagatatacggttatacacaattaccagtcaataataataactatatctgttacttcatataattattctcaccactttcctaacaaagtaattttaatacctcacctggtatactaatgtacttgtcgttgtttaataaaatcaccttgatattcaaaattgataatcaaatgttactgacgttgttaaattaggcaacctaaaaattattccctagtattcataaatctcattacttaataaggt

SEQ ID NO: 46774 - DNA, 2074 bp, Cannabis sativa
  modified_base (2019)..(2031): a, c, t, g, unknown or other
accattaagtgaaattccaattttgcccttttgagactataaattagcaataataaaaagtaattaatagttactaacaataaaatatataattgttcgaatccattcttcctcaatattatagaaaattattttgataaatatttgtactttgtatttggttcgataaaggtgaactgcagctgcatgagcaagaagttgattgtgggcaaccaaataaggctctgtgctcgagtcgccaccgctgcagttgttagcaacgtacaacggcgaacatcttcccggcgcaaaagtcccagaatcatacccgtgagttgtgaaagaaaatggttcgtttagtgtaatccaattcttcactctatcgccaaactctttaaaacataagtctgaatagtctttaaaatcatcgttgtacataaattttagtcgttacatctttattcaaaaattatgataacataatatttaaaattagtaatataattataattcttgaaaatatttctatatattttttttaatttgttatgatgcgattttgttgagaaaacttacacaattttatggctcaaaaaacctccatatgcatcttctagtccttggggaaggtcccaatgaaataaagtcacaaatggttgcaatcctgaattttattaaactttattttgattaattaatgatgattaattcaatatatagtaatttgagaaataagagtaaaagaattaaattaattaattcaaattaataattaacctttggagatgacttggttaataagatcattgtaatacttaatcccaactttgttcactcctccctttaatgttccatctatttaacaattttaacaaaaacaaatatttatagtccaaacttttatttatgtaaagtaaatatatattatacataagtaattaaatttatatatattaatatgtcttacttggtaaaaccctagaccaagagatggaaaatctgtatgcatcaaatccaatatccttcataataccaatatcttcctgtctcattcaaaatttagtgcaaagtaattaatttaataaatatatttttaattagagtaattgaaactaattacattaattagttgaaattctaaaaatattaaaaaagaaaataataaaaaatattaataataccttgtaacgatgatatgaatctacggctctcatgccactgcttttgtcatcaattttctctaaatgcaattcaatacaccaaattgaattgattaacaataataatattagtatttgataaatgagaaatgttaaaatattatgatagttttgaaaattattaaaaatatatgtatattttcaaaataagaatatttttttttttaggatttttgccttccgaattttgccatgtaccaaatcatgtttcataaacttttctagtcgttaaaaatcctcctgaactattgagattgttggatttaaggacttttgtccaattttagtaaagaataacattgatgaaagttcaggggtataatttggcacatgtcaaaatttgagatgcgtgatttggtaacattaagtctggaaagcatgatttggtatataaacaatcactaaattagtataattgaatgaaattagacaaaagttttttaaattcgataatctcaatagtttatgggaaatttttaacggtccaaaaaatttaagacagtatatattaaagtttaaggagtaaaaattctaattagcctattttttttttctggtcctagatttggtgggtgctaatttcagatttagtcagtcttagcccatgtgtaatattggtagcatctgtatatcaatgatacttaaacaatttaaataagtgtaatatcatcattgtatacatttaaatattagatttgaatttaataataaaaggtattctatatctatacctcttattaatattactattagttgtttagtacaattaaatatcttatttatataatttaatataattttagggctcgtttggaacgcnnnnnnnnnnnnnattgtattgtattatattgaattgcattttatgcaatattttt

SEQ ID NO: 46775 - DNA, 961 bp, Cannabis sativa
ttaaagaagcattgagttggattgtaactcattcgtgggataaagtcatgttagaaacagatagcttggtgtgtgtccaagcgattcagagcgggtattttatatgccttcacaatttggtcttattgtttaagatattcgaaatttagttttggctttatcttttgttgatttttattttgtaaaatgatctgcaaataagttggctcattccttagtaagagactcttgattctctacaaatcacgtgcttcagttggaggactgttcctcttaattgcgttctaaaaaaaatatttaaatatttaccaattataccaataagttataattatttttaactttattgtaacttataagtttattaaatagatttaaaagtaataacgtaaaagtattttaaaaaaaataatataatgtaaaaataaatacataaatttcaaagtaagaaaaaagtccataaaataattggtaaataaaagtagtaacttattatattatgtgacaattagtttcgaaaataaattttaaaattattcaaatgtaatttatataatataatatcataatataacttttaagtaactaatttattataagatatttagaaataagttttaaagttaataaaatcttatctcaaattatataatctaaaagttaagttttttttgacaagtaatttattagtttcttattaacattataaaactcaaaatgttacttttgaaaatccaaatattttttaacgagtcaatatattattgtaattaaaatttattaaagtaattttattaaaaatatgtcataaaataaactcttaattctttccgataatttatataatttctactcttttttttcccaatttagtgtttacatttaatagtatagtatgattctaatctccatacaaggacaaataacatttattcaaaactattattcattaaaagatttc

SEQ ID NO: 46776 - DNA, 1230 bp, Cannabis sativa
  modified_base (1015)..(1023): a, c, t, g, unknown or other
tttttttgttctattcataagagttatttctcactacaagaatgtacatttttgccggcacaattaataaattgcgccagcaaaaggagtcaacaaaatggatccagctccctgttttgccgacaccttttctcgtcggtaatagtaagttttgctggcgaagtaccctaaattcgtcggcaaatgttggcaatccaactgccaaaaagtgagaacttttggcggttcgagtcaccttttgccggcaaacttatacatgtgccggaaaaaggtaataaatattttttttatttttgtcggcgcgtaaatgcgccagcaaaagtgttgaaaaaaaaggcggttaaattttctcgcagtgaaaaaacgtacgcgcaaaagtaggtgaaaacttttaccgacggatttaattgcgccggcaaaagtattgaccatttgaccagtcgacgccttgcattagggtttggcttttaccgacgcataaatgcgctggtaaaagctctaaaaaaaattggcggtcaacttctcgcccaaatgaaaacgtgggtgaaaattttggtggaaacttttgccgttgtacttagatatgcgctggcaaaagttaccacattaatgaaacgctgtgtttcatgtttatttgttcagcttcgacttttgtcggcgcgcctaagagtgccagcaaaagtctaggctgaattctcaatacatgagaaagaactattctatagtaattatggtgaaaagagattaatcagattaatccttttcaagtttatacgatatatttaaattgaaaccaataaaaattttatgtaattaattaattaataaatttaaattatttattaaatataatttaattatttaaataaataatgtaattgaattctgtcatagatgtttatttcttataaccgattgaaagaatctcttaaccacttgaggaaaatcttaactatcttaagagaatatctcaacaaaaaaaatatcattaactactttttaaattcaaatttannnnnnnnntatcttttgaattaattaattaacccaaacataaattcagtggggataactctttcttatatgcgccacttatgtctcaacaagacattggtggtgtcttttgtctagaaaatttttatctcttttctaatttattacctcatatactacttttttaactttttttttttaaatttacggtttgggtttctaaagtggttacagcgc

SEQ ID NO: 46777 - DNA, 2130 bp, Cannabis sativa
aacataaatcatcataaaaaaaaaaaaaaaatgaataaaaacttttttttgatgccaacaccaggaggacgctttaaggagtactattatccttgtatatcaattcaatgataattcatcatattcatgaaaaatacttttaacacgatttatatcctaaaattttaaattttatgttgaactccaatcatatttatggaactttttcgtgttgtttttctgagatataattagagttcaatacggaaaaagttttatttttattttttgagcttttttatttacaaaaatatttttttaataaaaataataaattattgttttagttattttataatttatttatagttgtactatagttgtcataagatattttttcttgttattttgcttatttatagtttatttataattgatttatagttgacgggagatttattttttattattttttagttattttttattttttgctgagaaaattatatttgtgtaattttaaaattttacaaatgtattttagtaattaaaaattttagattgtaaattcgaccattaatatgcttgttttgttttttttgaaaaaaagtcatttttaagtgtacgaaatttattttcaagaaaaaaagtgtacgaaatgcaacggatggaggtattttatttccgtcctttcacgttataaatactaatgtattttcaacataagcattattttgtggggataaataataggaataatttttcttgtttccaccaaattcattaccatattccatataactttatttatttatctagctttcaaaaaaaataacttaatttctttaagtgggagaatattacacttcaaaaaagaaaaaaaaagtgggagaatattttgaaattatagacgtagagtatcatatgctgtttattttttcaagaaagacggaatatgttatttttcctgtttttttttttttttctgaagaaagagagtacacgttctagtttcttgtgtttaccatatttacaagccaagtggttactaagtcttcgaataatggtggctctagataagacaagctagtgctgaaaattgagaaacaagttttagacattaatatattcgttagaaaacaagtggtacacatattgacaatattgtatttataaataaattatttaatttcatagtagttagtgtattgcatgccaacatatatatttcataaaaatttgcgtttacagttcatagtcatataatatatttttatcttaattattttttctatttattttaacttacacgttttgtttttcctcaatccttttggaaaacattggtttaaagacaaaaaaataaaaatgggagtaaataaagaggtggatagaagagtgaccacagaagcaaaagatgatgaatgtgaaatcaaaattaaaatagtcacacaagacggaagagttcccacggaagagcacactgtcacttcagatcaacatcgtattaataaacccctactctgtctttttgatggttccagtgagtttctcttctctctcttggttatacatatcattttatttatttatttatttgcttaatatatatacatattttatttgattgacacgtgcattatgcatgtattgtaaattataatttctctttatttttttattattaattttttatttcttaaatatactgcattttttttttaaagctagtgtatttctggataaatagatttccaagtaaaattttaaacttgaataagactatgtaaataaacactacggaatagtcttacattatagatattatttattaccaatttaaaattgctataattaaacaaggaagaactcaaattatagacattatttgattaacagtattatttagtatggacttgtattaataactcatgtaaaattataatatatttttaataaactcaatctcaatatattctattaaattattgatcgtaataattaatgactcttgtatatttaccaaactatgaaaggagccctaataaaataataaaacaagaaacgaatttccaacccctttctcttccaacaccatatcaaaaataaaataatataagaaatttgaaaaataacgtcctaaacacaata

SEQ ID NO: 46778 - DNA, 860 bp, Cannabis sativa
gagacataatgaccaaaattattgaaattgtagcacttgatgtgtgatttatcactccttgaccatgagtttcttattccgcaacctcttggttcttgtgaatttcgagtttgttcttcattattgaagtcgttattaaagtcactcctttcttctcttcgttgtccttgactacgtccatgttcgcttccttggtcatgccatcttcttttttgatctttactattgtcataattctcttctttcaaattaagttgtagtaattgctctattttctcttttttgcttctttttccttttttgtttctcttcataggcttgtaaagaacctatgagttgctcaacaatcatagattctaaatttttattgtgttcaattattgtaacaatgtactcaaaggttggactcacagtacgaagaatttttttctataatctttacttcactaatttcttcactatttcttcttaattggttgacaattgataatgttgtagcaaaataatcagaaattgattcagcatcttccataaataaagtttcaaactcacctctaagagcttgaagatgaatcttttgtcacttgctccactcctttgttgcaagtttgaagcttctcccacgcttctttggtcgttgttgcatttgagatcttctcgaatgcatcttcatcccccacttgatagatgaggtagagagctttcttatccctcttacttgaatcccttaaggcatctcatttagtttgggaaagagcaacatcgtcttgctccttatgacctttcccaataatattctatacatcttaagctcctactagcgccttcatcttaatactccaattgtcatagttgctctt

SEQ ID NO: 46779 - DNA, 1231 bp, Cannabis sativa
ctcagatcacatgtgtattgcagttgttgctcgaaatcacccgggtgaggtgatttgggtgacctcaacaaaattggagtactctgatgctctttgcgctgaagcggcggctgtttgtttggctttagaggtggtgttggaacaaagttaaaaatttattattgttgagagtgactccaaggcagtagtcaattccattactagggtggatcctaggtgggaaattgaaaactactcctctttttgtactagagtcatgtcctcttttgctagttgctttgtttgtaatatttctagaacttgtaatgccatggcccataatgtggctaggtgggcgtttacccacaatcggtttggttgtatccctatcgactctgctactcctaaaaatattttatgtaatgactgagaggtctaatttttctttataatgagcgatcactttttcaaaaatttataatttgaatggtttatgataatacttttgtcgtttttttttttttttcaaaagagtaaatttgtatatatataaataaaattagaagatagaggtgagaaaatcagcttcaaaattaggtcaatcaaatagttatgtattgttttatatataaatatttatactaattattctatttaaaagttatgtattgtttttatttctaattttatataatttgttttaaaattttgagagtgggattgagccctctacgagctctatgtaagtttgcctatgactactacaaaaaataattattatactattagtgatagaaaatctacttcaaaatatagagccaacaattgccgtatcttttttgttaaaccgaccgattttatatatgattatgtgaacgctccctcagaattttgttataactaaaaaatgtcagaatgtctccttcgttatattgattcaataattgttctattgattagaaaagaaaataataatagtaattctattgtattatcttaaaaaacttatttatagaaaactgaattcttactatttttaataattaatattatattttgtgtggttttataaacaaaaaatatatattcttactattttgttttaccagttattttagtactatttattagacaaaacaagctgtcatattattattttcttaggaggtatgtattcgacattgagtctattgacccctaatactttctcgtttgtcttaaatgtctctcttaaaaaaataaaaaataaaaa

SEQ ID NO: 46780 - DNA, 2110 bp, Cannabis sativa
tgggatcaacctaactctttgtgactttactacttgttacaatatgtgcacttgcgtgttgaaattatcataacatatatccaagactctctaaattgtaagacaagaactctcatttgaaagaagagaagactatcattagcaaaaaatagatgggacattggtggagtatgtctagtaataagtttaaacccacttagatgaccattattctattctagctgtaacattcttgataaacctttagagaaaataagaaataagtatggagataatgggcaatcatgttgaagacctctagtaggaattagtgagcctgtgacctctccattaaagagaaatgagaagctgtttgtagtcaagcaacccataataagagatatccatctatcatctaaacccattttctgcatgatgttttcaatgaaatgccattcaatgcgatcgaaagcttgctcaaatccagttttaaagaagcaattcctttttgggctgctttttttttttatggcattgatcaactcaaaggcaacaaggacattgtccgtgatcaaacgatttggcaagaaagcactttgtgtatttgagataaccattgggagaacttctttaaatcaaatatgacagccctgcatatgtagattctcccagatgaatttaagcacttaaaccctttgtgattaatgttgtatccaagaaaggtgcatggtgaggatcgaattgaagtttgtgtttattatatggcctaatgttgggaaagcaatgacatccaaaggttttgaaagtggtcaggtttaatattgaacaaggcttctattggaaacctattttgtaggacaagtgttggaagcctgttatggatacaaacaacagttttaaatgccctatctcaaaatttttaagggcatagaaacatgtgctagaagtgttagaccattttctactatgtgcctatgttttctttcagctaggccatttttttcatgtgttgttggacatggatgtctatgaactatgccatgttggttgagatatggtgtgaaagatctatactcacccccagtaactttgtaatactttgattttgttgcctaattggagctcagcctcagccttgaaaagctaaaaggtgtttagggcatcaaatttatttttgagcaaatagatccatgtaaacctagtgtaggcatctaggaaatatatgtagtacttgtatccattagtggatgttatgtaagatggaccccaaagatcagtgacaacaagttgcaggggttcattatacacagtattagaagatttgggaaaagggaacttgtgaatttttcctagacaacaagcattacaaggagaaaattgacctttattgtcaataggtatgttacaagagttaaggaaagattttacaactttttcactaggatgactagtctattatgccacatttggaactgagatttgttgattgaatgactatctttattttttgaggtagagacataggcttgagcaggaacaggttggttttggcttcagtttttgagttgggattgacacttgggacaacttggtagactaaaattggacttgtgattcatcaaaagaatacagtccattcttgtgaacaccagccaggagtgtgttgtgggtgatcacttgatccttaacatgacaaacatcagagtaaaaaataaagtagacattgttgtctctgccaaacttagagacactaagcaggtttttagtgatttttggaacatgaagaaaattattcaagatgagagggtgattagtattgaacagaaactaagattgaccaatgtgtgccatagacaaacatgtgccatctcaaacatatagattgtctgtcccattgtaattggttcgagtcatcaggttctgagcatctggagtatagtgatttgtagctctaaagtcaggataccagtttgagtacttgattttgtcgagttatgagctgtgttagtctgagcttgtgtctgttgagtaaaattggatccaacaccagtgaagctcttgtcaaatctgtaatagctgtcaagaacactgtgtccaagacaatgatagagttggaactgaactcttgtag

SEQ ID NO: 46781 - DNA, 3003 bp, Cannabis sativa
tacctaggaacaatcttatgtggtgctttactgacactagatcccacaaaattaggattttgtcctctaagttagactcgggaaatgcgcacatcacctaaaaatatgccttttatccaacgttcataattccagcggatactatacacgatcggcagtgcaagccacctgtcactatcagatactccctttccatatggacaaccgttgtctcataaactgagtgtaatgaccacatacttagaatatagattaaagatgtgattagcactaaatatttatagagcatgatattatgtgattattatatactaagagtcctactttgaaaaaataagtattaggattacaatttttcaattcttaagattttttaaactttaagtttattgaatgtgatatatgtgaaaaataatatttttgtaatctttgctcggtaacgatagaaatgtgacggttggtcgttagagtcacatgggttagtttagaacattttatgtagcgaagaatatgtatgttgataattggaatgttgagagtcggcaggattatggtatgagaccattttacccctaagcctaaggattgcttaagctttaagtaaagggcaaataaggaattttgcctaaattgaattttagtttattttgatgatttatgtagaatttattagtaaattttgattttcaatagaatagtttagtagatatatgttaagacttatctcattttattaaattaagaattaaggataagtttgaaaccaaaaacatcttcacccccttctctctcttagcttcggctgaagcaaacgagaagaaaaccaaagatttcttcaaccattgttgactaattctaactgaaatccaatggtgaatataaaaggtaagatcctagtcctttttcttaagctttgtggaggttttctttaggttgaaacatgcaatattattgagaataggttttttctgaattattgagtttggaaatagatttctaggttaattttgagttgattgaagcttttttatgttggttttggtagatagttgagttgttgagcaagtttgagttcaagacttcaaacttgggtcaataatagtggattaggtttctgtgtgttctagctgctactattgcttgaaatatatttattgatgtttaattaggcattatggagagtttataaaatttagggttgatttaggttgcaaatgataattggtatgtttccgtagtagaatacggccgatcgtttccatctaccgtttgtttttattggcaaggcaaaggctaagaaataattaatgagtgagtgagtctagggagggcttgaggatgattgtacatatcatgatgattagacctgaagtatttagtctcgggacgacttaagcctttattttgtactcgcggagcaacacttttataaaatgtatcttgaatattgttgttaacttttaagaagggatctcgaattttatgtatggttgtatatttataaaaacttaatgtttaattaaaagtttaaattacacaaattttttttagaaaatctttaattagcaaaagcgtgcacaacaattaggcaatcattgtagatataatatcctaaggttaagaaactgaattagtaatcctaactagtttaattatttactaatgtggaattatatgattatataatttaatatgtgaaactatgttgatatattgcattttacgaccccattggtgtactaggggtatttttgtaattttcacccaagaagggtaaaattgtaacttacatgatataccatgcttatggacaatattattatatagtatgtttaatctgtctatctgtaggtgtttattgacaagtcggggcggtatagtcacaactgagtattttgggccaaattgggttcagggctcgaaataaattttcaggatttaatttggcattaatgtaataattttgaaaatctaaaattatgtgttatatatgggtgagatgaaatgacttgtttgcccttgattgtacagatatatttattttggccatggagggtattttggtcatttgaccaattgttttattttcaacaaaagccaaatttaagaaaattgaaagtcattttctggtttattccagccctaggtcgaacccccctctccctcttcctttgtcatatttttcttgaaatcttgatcatttggatttgaagcttcaattggtgtggttttgcacttaaagcttaagagaacttgtggtaagcttctaatctttctattgttatgtttaatttctgagtttaagggctgaattttgtgatgtttataagtgttcatgatgctcttgagctatggatgcatgttgtggtatttgttgtggattttggtgatatcttgataattatgtgtgcttgagctagtggaatgagtttaatgcatataggttgttttgggttgagatttgggattccatttctgggtatgtgctctaaattttttgggttgctctagagggtttgaatgcttgaagattgagtttaggtttgaattttgtgtgatagtgtgaattgtattttgtgcttgctttttgatcagcttggtttattattttgagcttaatggtacacttttgagtttcaaattgttgatatcttgatgttggattaaaaattaagattatgcatcatttgttttgatttggtttgaaattttggtaagaatttaaaatcatgaaaaatggcatttttggggttatagggcccctcgccgcggcgaggccctttttttggggagtttcaggtttttattttcgccataacttttgactcaggactctgtttgggacattctttatatcgttggaaagctcgttttgagctttatatgataatttgtatttgaaatgtaatttatgtaaaatttggaattaaattttgagattaaccctatattgtgaaattccaaaaattgtgactaggattatcggtgcttgctcaggaacac

SEQ ID NO: 46782 - DNA, 2209 bp, Cannabis sativa
tttttcttcaatagatttttggacgtggcgtgaaggtcttccttgtaaccaaaaacaggagcaacaacaaaattgttgcatctcattaggtaatgatcaaacttgttgtaagtatgatcaagagtgccacagaagtagcaaaaattttgtagtccctcatacttgaatgcaatccatttagttttagtgattcttctaaaacagatattcatacctctacggagaggtttggtgacatccagaacacagagacgaaggtaaggaccgaaactttccgtaagggataatgggtggatctccaagaggttgctaagttcattggcgatgaactaagcaagctgaagggatttttgaccaaaagggatgtagttagcttggacccagaacgggacgaagtaaaactgctcgggtgacagagtgtcaagaccctcagggtttgtgaagatcattaagcatttatcaaagtgccatggttgatcttctaggacacgtcgtctcttaccttcgcattggaatgtggcaaggaagagccctgagtgataatccgtgatttccatagggaaacagggtgtccaggcttcactcatagattttttaatccagaggggtttaggtgctttggtggtgagaatattgaagacaagacaataggaagagttggaatcgcccgagtgcagagaaacatggtcgaaatcgtgaattaagttttcttcctcaatgagttggagagtgttacatgggttgtgagaagaagaagaagccataggagaagggtacgattcaagacaagtgatgatctgggtgggtttggtagatgacttgaggtaccaggactttaaatagcaagaaaaatgaaggagagaaaaatacctggagatggagagccaccttgagaagcggaagaacatgaggtcagcctgttgggatttcgcacaggcttgggtggccatcattagattcgcaatgatggtgctaggaggtttgtgggagtagaaaatggcggttaagggtgggggtggaggcgtttgggcggaggatcaccattagtattctaaacccataataaatatgataaaacatgagtcgtcagtattaaatgggtaacagggcgattaattgagatttggctaattgggattttgatttttttttttttttttttttgaataagtgttctttattaagatgagcaatcgctctccaagatagagataaggttcaaaggaacactgttaatggaaaacacacgtttagctaaagaaacagagtgtcgggcaacatagtgtgcagcacggttcgcacaggttagtaatcaactacaggttaaaatttaatgtaggggaaaataaggttgtagcaataaatgtggagaggagtaggtggagggaatggaaccctagcaagcccatagctaagcctggtggagagcgagcttcacacagaagaaacagttcaactacaaaaactacaaagttgtttaaagttgtttttttgttttttttttttcaaaaaaataaaataaaattatggtgttttctgttatgtaattatgttaattgaataatctcttttatgtttagaaatattacgagtacatagttactaattagagatgactattattttgtaaatatatacatttgggtatgtgtatatttatttatacaatatatgcatgatgcagatctatttactttttctttaattctctccttccttggatactgtaatagaaccaaaaaaagacttatcgtatagaaccccataaaaactggaataaagttattgaaaaaaagaaaagtatttttggttgaaagagtgcgattgtggggaatatgtaacttgcaagtttcgtagaataaggggataaagtggtaaaaactttacacaagacactataataaattaaaaccctaattaatacacatatatagagagagtgatctatagtatgtatatatatatatgtgtgtgtaatactgtgggttgggtttggttggttcgaatcacattcacattcacatgggcaaagatattagtctttaatggcacttgatggcccttttgaggaagtttctttgatgatgatgatgatgatgatgaagtgtgcaaaactgtaaagccaaaaccttttagagattcgcaaacaaagctgtgaaagcaacttttcccattttggctgttaaaaacatgtatgtatatatatata

SEQ ID NO: 46783 - DNA, 858 bp, Cannabis sativa
tatattgttattatggctatgtaggattttccaaaattttgagatctaccaaattatttctcttgtatatttcggttgttaaaattgttttttgaattatttagattattaaatgtaaagatttgtatctaattttactaatagaaggtcgacgtgggtaaaggttcagatgacacgatttggtatatcaaagttcgtgagtataatttagaagacatcaaaatttgaggataaagataatcgtgacattagtaaaattgaacagaacttgatataagtcatccattgaattcaacaatctaatagttcgggaagattttttaataaactgaaaagtttaagatttgtgatttagtacgtatcaaaaattatagggcaaaaatcgtattagcccgttattatttttttaaacaatgataacacataaaattcaacttgaacttcaagttaacactgtttggtagagtggatggagaatgatgaaggaaaggaggtaaaggagaagaggaatcatttgtttggcgaagaggaaaaaaggaaaggcgaagagagttggatagagagaaataaggctaaacttttgggcaagcgagcaggttttgggcttcgtgggacagggtttcgagttttgagtgtgggaaaactctatccaaattcgctcttgtactgagtttttttggatttaggtttggaattggactaagtatgcttgatcgagtttgtgcgggcactggtgtaagtgtcaggtatgggtcgattcatggcttgtcaagagagtcatggatacttgaacttcgacattcttttttgaagaaaaaaaatatcaccgatatgtttttgagagggtcatatactgat

SEQ ID NO: 46784 - DNA, 1558 bp, Cannabis sativa
ccacatagttcaagaaattaaaaaagaaagaaatttacctagtggtgaattaggcgatataactttggactcgagtagaaatacggcctgggagagcacacactgacatcaaaaggcagttctatggaaactctcttaattggaggagctttgagtcgatcaaacctctcaacaatggcgttggcctggtcaataagggagtcgatttcaaaactaatatccagatttgcaacttcccctggcgatgtagtcaagatcactaagggtggttaggaattctcaagctttgattcgaagaaaaagttgaatggataaatcaatatcacgcttcacagtgattcaatttgtttttgattctggttcttactttcgaaaggtttgggtttgaaataagaaattttgaaaacttagataaaaatgcgaaaagttggtaatttatacccataagaaataatctgtgtaaagccaagatcaaatattaaatttcatcttctaaaaatgcaaaatagatctaacatctcggaaacccatcagtcaagcatttaatactatatttggaactagggaagattaaatgatgaaattcccctcgagattcgcgtcaaagtgaatagtcgtcaatttttttgcctctctacacgcgctttgttaggtgaacatatgcttcatgaactaataaaataattccacgtagaacctaaggtttgagaaatggaaagatgtattccattcacagaaaatatttagaatttataaaggtttcacctttagcttgaacttgtccacctatacagactgaagcaagccttcgcaatccatagcattccagaagcttgaggagtaaatgttacctgtgtttccggaaagggacatgtgggttccaaatagaagttaaggtccattaatgggcccaaacaacatgaactaggccaagcccaacatcaacgtggccttttgggaaagaaatcatacttcttgctcaagcaagtattcgttaaggttagttattatcccgaaggatcatagctttgtgtagctagaagaaccctctagtatgtgcctagaagctagctgtagtttcctatttactatttcatgcaaaataaagaaatcactttcctaagatctcaaacagagaataatatcaagataaaatagaaaactacataatttaagatcaagtaattaatattgcattaattatccacaattaatcagtgaacatggtaacaatagatgtgaccgtgattaacatgccaagtcagcatacagtcactatctgataggctgggcttcacttgataagctcaaagtaatgaattatctgtaaatatcccattagagggaaatagtaactaagtataacatctatactctataaatacacactgcatccttcatgcaaatggttggattttcttggttcacaagttcaaaaaagagaatagagagatcatattcattgtaatggcccttaggcttttctaggctatctgataataatattgactcgtggactaagactccttaacaccccaaccacgtaaaaactctcagt

SEQ ID NO: 46785 - DNA, 960 bp, Cannabis sativa
caattttagtacatatgcttgttaaggatgaaaattgagtgagtaataaacgagtaatgcacctcctaaccttgtccccattttttatttatgtctctcatcccacctctgtcacgcttaatccccgatggatttggagtaggggaatccccatttggtatggagacccattaggtacccactaaaattaaaacaataataataataagaaaatagtgtaatataattaaaagtaaaaataaaaaacaagatattgattttaaaataaacaaacattctatctattaaaaagtttttattacacagtaagttaaggaagattaatagtcaacttggtaagtataaccaatataactttaatacgtaataattagaagaaaattatatgaaaagtttggaaactatatatttggagtggataatattaccccttacccgctccgaactcactttgggtacataaaattgcaccccaccccgcctcgttacccattaaagagcacaaagaggagcctcaaagtgaaaggtaccacttctaatgcccaacacactagcaaaccacacctgcctagccaaaggataaccaaagaaaagagatgccaaaatgaatcaacattctcattacaaatagaacagttaacaccattaccatagcggctaccacatggtaagatgtctctttcatgtttctaaaggaaaattttggtgcgctcatggagaggggctttccaaaaatccttccaaccaaacatcgttacatactccaagttacattctccaatacaagctttagtacaagtgtgataaggtcatctccaatgggactttaaaaacctaaatatgatgtaatttttttcaccaaagcctccaacccaacagtaaaagtaaacctattttggtgggagtctacagtgtcccactaataatagtgggcacttgtagacaactgcatttttactt

SEQ ID NO: 46786 - DNA, 2266 bp, Cannabis sativa
ctatgttagatttagtattttttataacatatcttgtaattattgtatttggtgattcattgacatattttacactcattaaataatattagaaagaacacaaaagtaactaaaaaaaggggaaaaaatggctccagtggtagagtctgcttactgcatgtaagttttaaagttattttaatttagttttggctagtccgtcaaagagattgctttcttccgtttttgttgtttgtgtgagttttttgttcgaaggttgcatctgtgtttttgctcgcaagtgaagttctttctggttccgatatggatgagaaggggaaagagatccaggtggactttattgatactgagaaggaggaggtgatgaagagagatagtgctcttgagatggaaatgttggagctttttgaagatattactctggaagatgttgtagctagcaaggcctgtgtgggtaaggttgtaggctgtaaggatatgccggcttctgttgtaaaaaagattttaggaggagtttggagaaggctgggcttctggagaatgaagaagtgtgaagagggtgttctcggttttttctttgatgatgaggatgatttccatttcgtcatggagaagagaccttggattatcaatggggttctcctaaatcttaaaccctggccggttgaaggagaagtaagggttggtgagtttgaagtggcacagttttgggttcaattccatgggttacctaccaggttcctttcaaatgataatgtgccaatcttggcaaaaaaggtaggaaaccttgtgagaatggaggagaagcgtaaggatgatctggtaaggaggggatatttgaggtgtttgattgatgtttggctagcccatccttttccttctggtttttttctcaaagcggatggcaaacctgagtcttgggtccaattcaagtatgaaaagcttcctcacttgtgctttaactgtgggaaacttgcccattgggataaaatatgttctgttcagacaactctggtgtatcctaccaatggtgtagcggttccaatgtatggaacttggatcaaaagtgagacaggaagattgaattgttttaattcaggagggaagggaactactcgatcactagtcgtaagagaggaaatcccagaatgggacttgtcaaaaacatctcggaggaagacttggaaacgtaataacaacccagtggaggcttcagaccaaagggcgatggcggcgatgtcggagtctcagacggtggtggagaaggggactgttggtacaaaggacaaggagagtgggcaaaaacgtaaaggggttcatggtggcacgtccactacatccatggctgatttgcagtgtacgggaaaaggtattgcaaaggtgacagatggcattccgttactacccaatttgcctgtgcaaagtgtggaaaacgtgggcaatagacagctgggagtggtttctaatgtaattgggcctaactatttgaatattcctactccggacttctcgttggggcctgaaggtagtgattcgattctggatattgggcctactattgcccaaactttggatataccccactcgtggttgtgtagatcccaaaggcctcatgacttcccagagcccactcctattagatggcccaatgatgatcttgaagcccaaaagatgttctttcaactttatggaccggatgctactgatttatataaggcccagccctctcttatttgcaaccccccagatttatcaatgatgataattcatttattgggaaccaagaaaagaaagccccatacatggtatcatccctatcctgctgtcactagtttccaattacctgcttgtcctgtttcggaggagaagaacgatggagagagcctctcacaagttgaacctatggatccgaagaagttcagtatgggtgttcaagataattcagggaatcgtaccaggaaaagtcttagaaggagctcttggaggtctaattcgggggctacgacttcaagcagagggtcaggggtcaagactcgacgaggaaggcgaatggccgagaatcagaacactgagattaatggtgggggaactcaaatggctcaatttttgggtaatttggaggtggtgctacaaggaagtattgttggtgaaactcattcggtccaaaattttggcaagggcgaggaggcggcctcaagcatgcccccaccatcatcatgaggtgtctttcctggaattttcgtgggattcgtaggcccacgacgga

SEQ ID NO: 46787 - DNA, 1320 bp, Cannabis sativa
aacaaaaaataaacaaaaacttcaaaatgttgatattgttttctattttaaaaataaatttattttttatctaacatttttttttacatactcgggtttgggattggggtctgattccaatttcggggccctaggctagattcgggtcaaggtctaagatcaggtctaagttagagtcgaatataagtttaaaatttgggttcgctcataggtctaagtctaaagtctaaatctgtagaagagatcgagtttgaaagctaggaatattttttaagcaaacgatgacaaccaattgaaaaataatgttaccactattaaatcaatcataaataaaagcccaaatgagagcctttataagcttcatttatgttcttctttcctcctttaatgaagtgtaaggtgttagctttaaagtaaaagtaggtgattttttttgttgttgttggaattagatggagcttttcttttttgttggaataaaagcaaatggtgttagttgtcactattattaacttccggttaaaccattggcctatagaaaattctttcacaattatagagaatatacttaattaaatttcactctctttgactatagtccataataatgtcaaataatgtggttttgcactcacttgtttgaatgaatccacatttgtggattatttaaaatacatatttttgttttcttttttacataagaatggaaaaaaaaaaaaaaaaccttttaagtacaatattgaccctatcaagcacatttttgtccccttgtcaatgaattaagatataaaaaaaagaaattaagatagcttctccttctccggaaagttgaaattaactatttgaaaaagataagaaacacaatactattcacacaaattattgtagattatatatcaaagaaaataaaatcaataaaaggataattgaaggcttttgggctaagatggaagtcaataaaatagtgcaaaagtattagaaaattaattagttacctttaactaaataggttattttggtcaatgttttatagtgctatatagtgacatgaatgtcctttatatattagaaatttagttttggctgaactcattaatgaataaatttcaatctcactcttttttttttagtgtttagcgttctaaaaagtaatgtatttcgtagatttttctaaaaaaaaataaacaaattagtgcaaaatggtctaatatttaattttaagttttttatttatttttaactaattttcttttaaaaggtataagttagagagagaccatatcaaataattaacgaaaaaaagaagatggtcactttaaa

SEQ ID NO: 46788 - DNA, 1558 bp, Cannabis sativa
gacgagcgcctaagttgaggggttcctttaagtgttattccttttaattgtattatattccctaatttttttgtgcaactggtaattaataaagtaaacctataaatagaagaggagggggttctctggtaagggtagctaacaaatcaagaagagattagtctcattggagagaacagccttctcgaaaggctgccttggagagtttgagcctctcgaaagctcattgtaactattgctactatgatcaataaaatcattcattgaggaatttcttcctggtttgtctcgtctatgatagtgatttctgtcctaagagatttctatcaatagtttcttttaaaattttaggacctgattagtgattagcagtctctttctcaattaaactgctttattttgaagattcatctatattcatgtggaccggatttgatgaatattggtctcattcaaaatagttgtattagaaataaaagttgaattcaatttatgagtcgtcccaataatgcatagctagattaagcagttgtgttcatactgactaatttttggctgcaggatactcagttacttcaatcatagctgacagaaaactggagaagcttttttgctcaaatcttcagttacatgtcgaatacagatgctaagccatattcaatgagaaatattataccaatctaagtgaccagtaaacgagggcaggtttgaatttgaaattagttttttcttttatgatgatattaccattttgatggcattattttgtatatggtggcttgtttgtcgggccaggcttagtcatttgttactattgcaaagtgataataaagaatactaattgttttagccaaaacattgtgatgctaatttcttttatttatggcatctttgtgtgagtggcagatcagaggcttggaatctaatcttattatgtgctctgctttatagacatgaactgacaagcaaacacataggggtcttctctttaaatgcagtgttggcacacaaacatattggctttgttagtgaagttacttgagaattttaattttctgataatctaatctataatctttcaaatagagatccaaacaaatgggaccctttgattctgatctctaatcatgtactcccatcaagatgggccaaattcctttaaaacagtggggtattcatactagtaggatgaatatacatcttctccagtaggttatcaaatgttacatatttatcctgaccaaaaaaaaaaattatatattcattttcttccctcgcgtagaaataaaataaatgatgttttataaccaagagtaatttaagtcgtccctctcttgagagagagagaatataacttcaaacattgtaaaactagagctgattctgatttgttgtttgaagcaccttttaataatataaataaataaaaggggtgcacaaaatgcgagttagccgaccaacttggtcaactcggcccttcgaataatattataaataagaaaaatagtaaaggatactcatggtgtttagtattattttaaagtataatattgctatt

SEQ ID NO: 46789 - DNA, 1333 bp, Cannabis sativa
ccctggtaaagtgtacatacataatggatttcccatttaatatttgaataaattatgtgattgaaacaaactagtttctattgcctaaaaagaactatgcgaattacaaacattatttatgttttcgtatcatttttattactatgttatattgttgctggtggagctcattggtaagttggctcggttagaggggagaacatttttttattattattatggttgtttctagggaaaatgatacatgcttgatcctacaagttaccctaatttaatagtacaatattatcaattaagtcttccttcttactgagcaatccttggccggccatgatgttgtccctagtttggccggcccactggtctgtcatttgattcctctttgaatgtcggggtctttgcctgctaagatgctgacttggcctttcttttagtgagctatactacgacgtggcacaggttctgtccacgtaagcatgtcacgtcatgaggacaaaaaatgggataacaagtttcatcaacatcatattgaaaaaaaataatgcaaaaagttataatttgaaaatgatacaaactttaaaaatgaatttcatcaccattaaaagaaactaataattttattaaaagaagtaaaaaaaaaagtttcattatcaagataataaaaaaaaaaattataatctaaaaacgatactaactttaaaaactattttcatcaatattaaaagaaactaattatttcattaaaagaggcaaaaaaaaaacagtttcatcaacaacataataaaatatatacaatgcctaataaccaaactttaaaaataatactaattttaaaattcagtttcaaacatataaattctatatcaatacctaataaccaaacttctaaattcattctctattttggttaattttttatttgcttgctcaaaaatcaaaattgatttgagtatataatatgaagcaaaaataacaaagagaatcagaaactaaaactagagagagaaataaaacaaagaaaattaaagaaacaaaaacccaataaaaactataaaataataacaaaaaaaaaacagaggaaggagagaaatcatatataaaaaacaacaaaaatggaggtgagctgctaatatagcacactctaataattaaataataccacaaacaaacacaaaatctactacactaacagaaaaagataaaaccaattgggctggaaaaaataagagatttttataccacatactgaaatttctattttttttttctttttttactgcggggtggaatttttttcaaaaatattatgtacgttttatactgtgtactgtgt

SEQ ID NO: 46790 - DNA, 1619 bp, Cannabis sativa
  modified_base (281)..(297): a, c, t, g, unknown or other
  modified_base (473)..(481): a, c, t, g, unknown or other
  modified_base (1142)..(1150): a, c, t, g, unknown or other
ttacatttgtttttgtgttgttttagtagtttttttgttctgattttttaagattaagcttgcaaatataactactattgtattggatattgaggctgagcaaaatattttttaattttttttaatcatgttttcctttcttttgtttgatttgttttagtattattttacagttgttttatcatgattatttatttgacgtcgatttcatttttttttctcaatctcaccggaattaatggttgtaatctgattgttctggtgttcctgtggtggttctnnnnnnnnnnnnnnnnnatggaggcctcatttttttttttgtgtttacagtataaaagaaaaaaaaattggccaagacagtataaaaataatttctgctgtgtggcagtatttttgtaaagatttgggccaaaagtcaatattttttgtaagttttctattattattattattattattatcatcatcatcannnnnnnnntcatcatcatcatcatcaaattataagaatttttaacgaattactgaatgaagattttatctgagtcgcggactatgttgttttctttaagatgtttcgcagctttacttgaagtgtgcacgataattcagcaaccacgacgtccccaagataaaacattctctgtacaaatcgttctgcaccgaactatatcgctctattataccctaataaaattgctctgagaaattcgacactagtttttgaagaggcgaaatttttcaatgttgaagagatgcaatccttcaaaacggaagacttgttaatatcgttagtagcagaattagaaaaaccatcggtagtggccataacagaacacaacttcttaaaattattatttcgaattaaaaaaaaaaaaaaacctggaatgaattaccggatgaaaattctgcttgagtcgtagactatgtcgttttctttaagacgtttcgcagctttacttgaagtgtgcacagcagtctagcagccgcgacgtccccaggataaaaaaacacgtatgtacgaatcgtttagcactaaatgctattgctgatctattactatccaataaaattgcttcgagaaattcgataaaagtttttaaagagaatttttttttttttttttgtgttgaagagatgtnnnnnnnnnttattctgatacgacttatatagataaatcgatttaaaataaaattgtaatgtgatcacgggaaatattatttcatggtagaaaaaagatgaattattgattgattatttttactccttcaacgttataaaaaataaattattaattaattaataaataatatttattttattaaataatttttattcttagttaaaaaataacacttcacccatacattcgcgtggtgatttagtgtatgagtctttatctatgcgcacaaaattcagtgatgcttagagcccaaagctaaatctcaagattacacttgatatatacccctctaaataaatatttctatcacgtgttccatgttgaactcaaaatattagggaaatttgattttttatacttaaaaattttaatttttttttaaaccaatacattttaaactacaaaaaatatatcacttttttcaaaaccccaaaaa

SEQ ID NO: 46791 - DNA, 1037 bp, Cannabis sativa
tatttataaattaaatgtgtttctagacatcagtggtattaaacaataccataataaatagcaattattttgggacgacctatacttaattagacactaagaaaataagtatatatgataccttgtagttgtaataatgtcctttaccatttttcattaagtaaagtatgatatttctcttaattaaattagtgcattgaaagctacacaagatttagttcaaattttttctcatatttcgaaatattaataacactaataataaaagtagcattatgtacatttatagtatcatgacaaataacaatgtcatatcattgtattatttttaccattggctagaagctcgttgatcagatcattgtagtatttaacgcctagtggattgacgcctcctctgagtgttccctctgatgatatcataagatgatgccattaatgattaaaatgattgtacatatatatacatggaaaaaattgttgaatttatttggtatctgttattttcatcattttagctattttttattggaagggacaaaaatgatgcgcattttgtatcttgtataatgattaaaatatatttttttaattagaaatcaaaagagagattttatttttataatcaaataaccaataattattatttttatattgatcaaatataggtaaatttacaaaaatataaaataagagtatatttcaatacaaaaaaaaaagcatataaaatagctgaattgtaaaattaaattaaggtctagagactgctaataagatactattttgaaccaaaaacatgttttatgtgggtagggacagagcaaccaagcaggggcccctgtgttaatgagtgtagacttatggctggtgattcaccattcatgcatttacttttggtacacgtcacaagttatcgttgcctaataatatgaaatgtgttatactttaagaccttgattgagattacattttaaacgctgtttagaaatactgaacgtatgatccatgtttgtccattttaggtttttctttctgta

SEQ ID NO: 46792 - DNA, 1049 bp, Cannabis sativa
gtgaaatcgtatttttgttgtttttgtgcatttgtgaaattatccctttttaattatagttaaatgatgcagtattagattagggaaataatttaataaactaaaaaattgaagttataagtagtaataatagataaaaacaaaaacaaaaattttaaataacctacttttataaacaactttttaataaattaattaaattattggataaattagtaatctattgttcaaatataattcatcatgtaagaatttttctttaataatgtaaaaagttaatttaaatttacaacataacaaaaattaatctaaatataaaatttgtatcataatatattatttttgtattcacttcaatactattttgtagtgttttattattattaatttttttttttgaaaaagaggatgctttataacttgagaaaaagaatacaacccaacaagaaacctcaggaaagcaaggaaggcaaacagccattccaactatactcaccatctaatcctaaacctgccctagcacaattgtgagccaatttatttaactcacgaggtacaaaagaaagtatacaggtaggactgaatgatagcaagtgtcgaatacgaactacaaaatcactcataacagaataattactaaaagacccattaactttatccactaaactcttacaatctgactccacaacatcaacaggaagattaacactttgagcccattctaatgctagaagaagagccttggcttctgcaatgtcagggggcacatgccctatcaccggagcaataacgccagccaccacctgatcttgagcatctcttaccaccacaccaagactatgtttcttcagattaagatcaattgcagcatcagtattgatcctgtatctagaaggagccactaaggaagtatgactgattgaagaccgctgcacattacatataccttcagctttaaggttggcagactcaaaatcctgcaaataagcaactgcatgatcaaatatgaacattggagacaagcatctatgatggtgcaaataattgtt

SEQ ID NO: 46793 - DNA, 1893 bp, Cannabis sativa
agttgagtactgtacatagctattatgcatctaatgacctctagacacggaatgagagctaggattattcgaattaggaaaatagggagaagaaaaggtacctctaccacgagtgaatggtttgatgtgagcaagatttgtttcaggctttgagatatctaattcttaagccgacttttctattcaaacttcctgagccatgagtaaagcttccattttagggaaaatataatgatctgttcatgtattcacggaggggatgaacacattgtaatcactggtgaaaccattaaagattgctttaatgtgttcagctggagagatctcatgaccaatggaagcaagtagatcgaccaatcttttgatcttgagtaagtaatcaccaagtgatccttgcattttggcattgcgaagcaaagtttgatactgccaatattggctttgtttaatgttgtgtagtactccttgatccagatctaagaagttgtatcacaaccaaccattcctgtgaaaattttctcagacattgatgatagcaaccatgaaacaaggatgttttcctgctactcccaatcttcaaactcaagactgactgtgttggagattcgattagcttcagtgaggaactttggaggagtgagtagtggatcaagaaatagttgtagttgacttcctttaattgatgcaaacacttgatgttttcaaggtagataattgtgttcatcaagtcgaaccgagagagagtgagaaaaagtaacaagagatgatttcgggagattatgagtggatccaccggcctgagacgagcctccattgctgctgggaaaaacagttgccattgaagctagattgaagaagaagaagaagaagaagaagaagaagctctgataccatgacaagacaaagaagaaagagagaaagagagagaaaaagatcttgtatattcaaccattaatcaaagttgttacatgattatatacacaatgaatcagctatgaatgctaaataggaaacttgttatacgactcacctaacgaactaactgaataattaactctaactaccaaactaactaacttttcttaataacacatatatgggaccctttaacctcaatcctagcggcaatttttctttccgatataaagaaattgtatataatttttttatataacaacttatattatagttataatttataatagacattttaactgtttcatttttttaataattaataatgttaaaaataaaattcaaataatgagtatcgaaggttttatttatttatttttcttaaaaaaaaaaacacaacatatgcaagagatttggtatggagggatacaaaaataacttgaaattagtataatatttgtttaattttttttagatgaaatatcaacttcattgaatataagttcccagaaataaaaatatcaaaaatgttacgatcagattgatatcaagaatgtctagcaagaatataaatataatatttgtttaatttagttttaaagaagtttgataataatctaattggtgaagagagttgacactatgttggtgtgtggtaggattaggaaagtgtggtggtagccgacaatagagaagagtaataagggtcttgtcttgcctttcttttcttacgaaaacgcgacgaatataaatacacgtctgctgtctctgtctccatttcatacacacacacaaactaataactataaaatatcttcttcttaaattaattaaacctaaaactttaaacaaaaacaaatacgacaaagtcaacaaacacatcaaacacatacccaattctctctataaatacatatcaaactccttcattcaaccactcaactcgatctttaaatttaattctctctctctctctct

SEQ ID NO: 46794 - DNA, 2438 bp, Cannabis sativa
cgtcacttaataataatctaattttacacagaattagaaaaaattaacacagatttttgttaaataataaataaaatttaaagtaataaatgaactttaaaattaaataaataacaatagtaataaatggcaagaaaatttttaatgtagttttgaaattaatttttcatactccacgagtctatcttattatggtttctataaactaaagcgtatacaaaatacaaaaaagatttgtatgattcttactctttttcaaattggacgtctcatgttctctatgttctgtctctatttataggagttttaaggtgatagttatttccttgagttcttatccttgtaatcgttcatgaaacgtggaaaaatttcacgtttcatatttacatcgcatgggataataatataataactgcataatcggttcttgtcttcatccataaatagttattttgactgtgcttcttcatctcgcaatgtaaacgatcttcttaagttgttttattttgaaggtggccctctgcgcttatgtattgtttggatagtacccctcgcgtccttctataaatgagagaagaaaacgcgagatactatcatagtgtgacaattccgagataaatcatactgggagtgcttcccttagtctttcaatatactcacgagtatgtgagtcaatgagctgcaagatttttaaagaattcattatctaccattttcaaacatactttttgttgggtattatgtgtatctcgagatagaccttctacattgattatttatctcgctggtctcataaaccaatagttattattcatggcttgcttatctttaaaagaatgagttcaaatatttttaataattgtattttctgagacaagtttattaaacgcatttattgctctataagatgagctggtcaactttttaatacgtgtgattaccatattaattgctcaaaatatgcatattacaagaatcaatcaaattagaattttttatatatatatacatattaataaaaaaactctaaaaaagcaaaaaaatattcgttcaattttttatctaaaaaaaaacaaacaaagatatatcttctaatattatagtaaataaaattttaaaaaattgaagaatccttacataaattatagagatctaaaaaaataattgataaatttatggaaaagttatcacttgattctaaaaccgttcttatcaccgtatctcacttgtaattgtcattacattaaaagttgttatcattatcgtaagttacttatagttttctatcctaattaagtctgcagtgtacataaaacaaatcaaaaaataattattaactactcaattttatacataatcgttctcttataaattcattatttatttattttcaagtactttaacataatgaataactaaataataaataaacattagaaaaaaaaaagtattttattagctcataaaaaattaatatcataagtacatatacatacatattggtccaatcagtaaaaaaaatattaacttgaggtctcatagtttcttcaacaaaaatttaaattcattaattataaatatataatatacacccagaaaaataaaatattgttggaagaacaccagataatgagagtatttaagcacaacaagaacactcactagcagttataatagtactcacctagaatagcaagtactcaaagtataacctacgaaatagacaaaaaagaaaacaaaatatagagaagacaagagaattatagtggttcagttaggtttttgtttgcttagtccacttttgataatagtttcaacttaatttatttgatcacccctttatatagaaagcttgtgtcctttggaattacactcccggtcaagttggatcgatattacaataaattacagaattaaattaagataaatgtttaaagaataaataaagaacaattttatccgttcttagcttaattgcaacaacgtatgcgacttgagaaatcgcggcttgtggcaattgtggcaaagttgccaccaacttggaagagctataagaaaagaattttccataaaaatgagaattatttgttggaagagattcaaaaacatatatgaatcgaagaggaatcgagattgagagataagagaaatatgaaggaacctaaagatgagatttctaaggccaatacagtctcaaataagcatcataaaggcaaacacaatgataagagtggtgaaaaatatttgggtccaagaaaagacataaccaatttaaataagtgagaggtcattgttttgtgtgtggaaaatctgggcactacacaagagattgtaggcagggacggacccaagtgtattagtttgggggctatagcccccactagcaaaaatattgccttttaaaagattaaatgtaattttttaaatttgataattat

SEQ ID NO: 46795 - DNA, 3006 bp, Cannabis sativa
  modified_base (600)..(609): a, c, t, g, unknown or other
  modified_base (2590)..(2599): a, c, t, g, unknown or other
gaaccagaatttaggtagtttagccgccaaaaatttagtttttgtggttaagtgttacaaaccgtaaagttcaagtgatttaaccaccaatatcccttttaattaaaaaaaaacacataaattaataaggcataatagaatccctcaaaaattaaagggaattactatgtatactgcattttttaattttttctctccatttttacgtctttttttttttatttttataaaaactatttttctattttgaggttaagctgtttttattttgagattattttgtttctattttaaaaaagttgttttcattttgaggttatgatatttctatttttataaatgaataaaaaatcaagtatgaaagtataaagggtctttttcatttttacacttcaaaccagtttttttttgtaattttacagaattttacatagaaacccttattgtaactagcgttgcaacttaaattgcaacaaaaaatcgtatagaaatccctattgcaactagcgctacaacttaaattgcaacataaaatcgtatagaaaccctattgcaactagcgctgcatccattttacaaacccaaaccgtaaatttgaannnnnnnnnntatatatatatatatagtatatggggtaattctccaaatataaataaaaaagaccaaaaaaattaataaacaactaataaaaattaaatataaaaattaatttattatatataaataatataatatatatttttatataattatatgtagttagatcaatttttaattaattttaaatgtataatctaataactcattcaatttaattagaatccagcaatctaattgtaattgaatatcattttttataataggattagattgatttagatcttgtccactcataattattacaaggttgactcatttaatgcttgaagctaaattctttgtccaaacagttgttccaccaatctaaagtttagcatattaataaaaaataccatctaaacaaacttcattctctctcacacaagaaatgtctttttattattattgttgttttatagacttcgcgcataactaagatccagatctctaaatatgtgcataccgtattagtctaactcgtattttgaaacctgaaaaatatgagtcgtgctatactgagtcatgaaaagatatggcacatgtcatattgtgcaaataattttataggataggtttgatacgattcgtagcctagtattttcatgtcctgttatacttgagctaatatattttcttgtatagctcgaattcgtgcttcacatttttacatttttattacaattaatgacttaaatactaaactatttgtgttttttataatttcaattacttttgtttaccgagattttcgacagtaaaattaagtaagaggttaagaaattaaatagtgattaagtaaaagagaaggggaatttttacgtggttcgaccgttaaatatccctagtccaggagtcagtgtattgacttgttaagctttgaaatgtattacaaatgagttttgcaatgtgaaactctaaaccttgctataaggtagtttctttaggtcttttttatagaagaagagatcttagaataaaagctagcagaggtttagcctaagttccatcccatttgcatgaagggatagtgagatttatataggctagagtttgggtccgggcatacctgtggcccattcgagttttatttgtaaaaataagcccactattaaggtaaattacataaacacatgactatgagacccactaaagatatttagctcgtgggggatgacgatttcgtactgatgaggagacagtttggtgcagggcatgtcacggagattacgcctagtagacaaaggtgttagaggagttgttggacaaaatgggtacatgtagtgcattcactaccatgatctgacataatggacaatatccaatcatctgtcagagatatggacacgtctttataggggagacgtccgccttgcatgtgctggtaagagtcagaactgaactgaaaatgagtttagagctgcatgaagattgtacaaatcaaaactgttatacctggagtgttagagtctttgggacaatttaggctaacattttgttagtagttgggcaacaaattttctataaagcatactaaataattgtaagcttttaatgggatctccaaattatataaattatgtttaattattaaaggttaagtttatttaagaaaatataattaaatatatttttcaataaaccctttgattagtaaaagagtgcacagtaattagaaaaacgttgtagcgtgcctaaactagtagggcattacaatttggtgttagagctaccaagttgttctccgaagattatcaatattaaagttaagctcgactcatggttcagtaaacttttacgtgttttagtaattttaattattatacatgattagaaaaacacgataggaagtattttagcatattgatatataggagcatattaagttcccgtgtaagtaagtgttgagaatattttatcaggatctacatttactaacaagtatgttgattannnnnnnnnntatgaatatctctaaaacaatgaaattaaacacataagaatttagaaaatcttacattggttgcagcggaatataatgaatccttccgctcaaatctctaacccttattcctttctgtcgcaaagtattaccaagatttgagtttggatctctttctctccttcgggtttgattatccaccgtctttctcactatgaatgagtactccatcgtctttctctcctaaactacatacacttatacacttgaatcacttatatatttttagatttctttttttttttttttgagtttttttcctcagcctccatcaattttttctcaccatatatattttggtatttgttcttttttacttcagatctcaacccattatattaaaggtgtttcctctttctactcttaat

SEQ ID NO: 46796 - DNA, 607 bp, Cannabis sativa
tcaagactacttacatatacaatgcattattttttggtgttacataaaaacaaatattcctaaaagaagggtataataattttagataattgagaattaatattaattattgttaatatataaattaatgcagttgctgatgtgttgttatggaggaacaagaaagtatctggtgcaatattagctgggttaacaattatatggtttcttttcgaagtagctgagttccatttagttactcttctctcttatattcttcttttcacaatggtaaccatatgcctttggtttcgagcagcatggctattcaataggtattattatataaatacatacatcttttctttacatattagttaaaaaatattacaattaatgtaacatttaagaatatttaattcaagaataaatccggtttaaaatttagtgggttataaaagaaaatatttagaaaaaaatatagtatttttaaaaattagtaaaaaaaaattatgtaattttaaaagattatttttttaggtaggccctagacacaagtctagcccgcctatgctcaaggccgagtctgttcaagaataatttataatttgttatataaaaaaaatta

SEQ ID NO: 46797 - DNA, 2951 bp, Cannabis sativa
ttacatttttgtccctttactttctttacaatatgtttgttactctatagttggagaataaaagtgatagtaaaatttggagattattcttcaatagagtatttttaaatagaggttctactattttaaatgcaaccaaacaaaagaatagaataaaaattattttatttccattccattctatttcattacctccaactaaacaccacctagtatctccaaatttcactatcacttttttttttttaatgaagggggggtacccaaggacacccattcattaaacaaggcataaaaaacgcccaagagtctaaaacagagtacaaaacagagcaaattaaagatgcaagaaaaataaaaactggaaacagcaaaagaaactaaaactacagcagaaaactccatcagctcagatacttgacaattggtctggaggtcccaggtcccattctcttaaatcatccaagactcccgaatccatatcatgaggcacaaaggctccagattttctccccactgctgcccacttggctacattgtgtgctgcgaaatttcacattcgagatatatgagtgatttcccactcttcgaattttgagcaatattgcacaaacctcatctttgccacttcaattctaaaatccacattgcattgtgttgtggctataaaggaattcaccacacagagattatcacattggaaaacaatttttttcacacctgcctcgactgctaccttcgctgcaaaacaaaccgcctttgcttcagcaactaaagggtctgtatcattggcttcctgggttgtaatggataatatcgatcccgaatcatcccttattaccgcagccagcatactaccattggggagaactgcaacgtctgagttgcagcaggcccactgaggcggaggtggcgcccaggacaggatgttaaccaccttctgatttgctaccaataaatgttctttcacctttagtcgaattagtcttaaaatctggatcaagtcagtctctttttccccatggactcttctattcctttcactccacaccacttcaatgatacacaaggttgtgaccataagatcattaaaaggaatattgagaggacgatttgccgcttgtctaaaccaaccgaaccaattcttccaatcacttatagcataattttcagtacgaataccccagccattgcagaaccaaatttctttcacgaagctacaagaccaaaagagatgaaatgtagtctcggtcgctgccatacagagcggacagatatcacttatgtctttgagaatggatgctaatttccctctcgtaggaagaatgtcccgatagacctgccaccagagaaacttccaccgaggatgaattggggaattcctcatgagcttccaaacgtcttcctcgttagttctcgaaactgttgacttaataggtctatacgccgatttgatggaaaacaaaccattatactctcccacccactgccacgagtcatctgtgttaacctctgggagatcaatgtttagtatagcattggcatcttcttttccaaaccactctcttaccatttgggtgttccaggtgttattgttgttcaagaattggtgtacccaagctacaccatgggtcgcatcctttaggggcgtgggggtgcgattggaggatgggacccaaggatcgaaccagattgacgtcgaatgcccattctcgattttcctgcagagccctttccccagcacactcctagcatccaaaatagctttccacaggcccgattcactcccttttttttcaagatcaaggaagtttttgtcttttatgtacttggcattcactaccatactccatatgcttgttttgtctgtcaatgctttccaagcccattttgccataaaggcttgattaatgacttcaatcctcctaaaccccaggcctcctctgaatttagattgacagatggagtcccacgccagcaggtgtatctttcgcttctcatctgtgtcgccccaccaaaagtctctaaggcatctatcaactttctttgcaatgttcaggggaattggttccgaagccgcgacataagttgccagagaagagccaaccgattggataaggcaagttttcccaacttttgagagtagtctcgttttccaactcttgactcgttgaagcgctctatccaccaagaagtgcatatcccttgacctatttaaggatatgaataaagggaggcctaaatacgttgcatcatttctcatccttctcatattcaacaactccgcaatctctccggcaagtcttgatgggactccctttgaaaaaaagactgtggacttttgatagtttacggcttgacccgaccacaaacaataatcctcaaggcactttcggaaaccctttgcttctttcactgaggctttgccaaataagataacgtcgtctgcaaacatgaggtgtgttataggcgggccatttctggacactttgaatccgtggatggagccctcattcatccttgtagtgatcaatctccataaaatatctgctgcaatgatgaagagggccggggataaagggtctccctggcgaagcccacatgttggtttgatcgagccttgcacggatccattgattagtaaccccatctgacgaatagtgatacacttttctacccatttgacaaaattttgatggaaacccaatcctttgagtgtagctaatatgaatccccaatccattttatcatatgctttttccatatccagctttatcatcatataccctttatttccttttttctgcttcatggagtgtacaatctctctagagacagctgtgttctccgcgataagcctgccgtgaacaaaagccgactgggccggagagattatgttgggcagtaaaggcttgagcctgagagccaatatctttgatatgcacttatac

SEQ ID NO: 46798 - DNA, 1421 bp, Cannabis sativa
ttctgcgctattttaattagtaatcccgattaggggattaggatttcataagcattttgggtagcgtgcctaattatttagggcgttacacctagactacttacatgctgacgtatggggaccagaaaaaatacctacacatggaggtaaatcataccttctctcaattgttgatgatttttctagaaaagtttaagtatttttattaaaaactaaaaattaagctttagaaaaattcaaacaatgaaaactgttaatagaaaacttaacagaaagaaaaattaaaaacatactacctaaagtatgttcatttctcctatttctcacatactacctaaagtatcctcgtgaaatgagacttccaatctcatatttgagttgtcgacactcctcagttatatggtcaatatctttgtgaaagcgacaatatctattgtgatcccgtttattcctcgcatttctcataagttctattttgcaaaaagtgaccctattctcatttgcaaggaatatttttcacatgtctgattcaactctatgtaaattgtaatatcttgaaaaatataactatatttaattagacatattctattaaatatgtagtaatatgaatatttagagtaagattataatcttacacaagctaattatgaaataattcgcgaattttgagaaaataattaaataagcgtaatttattaattacgaaaattttattagaatatataggtattatatatgtcatttttgaaataaaatattttcagatttggcgaccgtggaagcacgattatttggccaaggatatcacgatggtaatagattgagttttggttgtacttaaatattttagtagatatttttattgataggatatttcgggatagttagttttgaccaaaatacccctaaattagaaatttgcataagtggttagttaagggtaaaatagtaactttactaaattttttatttgttttatatgggattctagtatgtcctaggctgtaatatagtattttaagttagtttattttcataagtctaattaagagataaatcaaataagaatatcacaaaaaaaaaaaaaagaaaaatcactctctctctctctcttttcggctcaagaaaactcaagagaaaaccagagttttcccatcccaattcattcatttccttgttgttaataacctataggggttgatcaagcttgaggtaagctttctttggtgttcttgaagatttaagggtttcaaagttaggttaggttttgatgaatttggttctatttatgtctatattgctagagcttgttcttaggtttaaattagagtttttatgttttaatttcatgcttggatgattgttttagcttgagttgagagagttagagtttaagaactcaaaactcactcaacaat

SEQ ID NO: 46799 - DNA, 1998 bp, Cannabis sativa
attgttatttgacaccagtggtgtctagcaccatctagaggtggcgttctacaatcagttagcgatattatttagataatattatcttaagttatatgagaatatatacttaattgcactaatagcaatatgacactgaggaatgtgttaaacaccactaatatctttaagtatttctctttattttacccctagctaatcaaatatagcattgattttttgagctaaatttagtataaaatttacatcatccattagagatagtctaaaagttatgacaaatttaatacaaaatgtagcatatatgagttaaatttcataccacaataaatattactttttatttactcatttgccactcattgtaattaatgacatttatatttttatttatatagttaatataatttttatatatttccaatgaaattttgacaattttgtaaactctttttatacttttctattgaaatatagattactttacctttatgcatttggaacataattgtaaaatttaagttaaatataacattcatttattttttagctaaatttagcactaaaattttcattattcattggagattgtcatatatgagggttattacaccaaaaaattattatttttgagccaaatttaaccaaatagttttattaacggaaatttataatttaaaaaaaaaaatgccacatcatttggtattagctagactatcccaataaatggtataaaatttgtgctaaatgtgctcacaaaatgagaaaatattatatttgcactaaatttacaaacttgctccaatatattaaggggaaaattattattataggtgtaaaaagttaacaaaagtattaagtttttattaaaaatataatcaggcaggtgtgagtgaattggagaaggttgctatgataatgtggtctatttggctggtgcgaaatgatgtagtttagaatgaaaaaactttctctgcaaatgttgtagttcagttagctagaaactctcttgatcagtattcttgagctcaaaatcgtaaagggttgtcattattttttggtattgcaattaatatggcttaagagcactggaattcaccttctcttaatctggtcaaagctaatgtcaacagggaaatttttcaataggaaaggaagtttggggttgggtgcttagctcgagttcatgatgggttggtcattgaggcttttcgaatgatagagttggtgttgttaatccagagattgaaataaaggaagtgttaagtttgaatgatgaataagcatgattctagaaaccaattcattattgtgtgtctgttcaagcaatttagagtgatatttttatgccttctgagtttggacttttagtttaggactcttgaagtttcttgtggaacactaataatattattttacattttgttaaatgatctgcaaataaaattatttgttatcttctacttagttcttgttttatatatttcaagtggcctattttagtgttttgtttttgtccctcaattacaatcctttggctaatttgctttgattaatgaaagttgatttttaaaagagaaatgcattttttttaattagccattattttttaaatatatatttaatttattgattatcattaataataattattttttatttttatgttaatttgaatcttaatttgatattatgtattgaagcacaattgcaaaaacaaaatgtgctaaatatattattttattatattttgtgtcaaattttatacattttttactcatgtattggagatgtgtcatattattattagtattatttatattttctaaaaaaattaaatttaaaattaaaataatgttaaatttcacatacagtagaacttctacccaagaatacacttgggaccaaataaaatattttctaattaagaggttataactaaatagagttacactagaaaaaaaaaaattaaaaaacaaaaaaaatatcaatgtaaca

SEQ ID NO: 46800 - DNA, 1233 bp, Cannabis sativa
ggaagctgagttttttgttttgttataagaccgaaaatgaaggaacaaaacacgttgttcctcatgtattgggggaaacgatattattgttttaggatgttataataattagattaattaattagtgattaatacttgtaggttactccattatactttcattatatataagataaaaataaataaatacattattagtgtttaataaaacaacgttacggatgattagggtggcgagtaggatcggagtaatagctacataaatatatcacgccgtcgtatattttgtttattttttagtaacttttgtaatacataaattgctatttacatgttacatacatgtattattcgaaatacatcaacaaaataataaactaatttttcttttttaaaacaaaaaaaagagccacgtataccaaaaccacttactaaaactcatgattaataaattggccagtaccaaaaactcaccaatcttgagataacggatcacctttttgtgcttgtttatttttgattttatttaaatctacttcaccaatcttgaatcatctcattatttttatgagcttgcttatttattttgattttgtttccatactttcatggatcaaatgcatgcgctaagaatatgactaatcattataacatgacatggagtcattgagtctcatctcaaaattaattgataatgagtggtgttgtccgtattttcgaatggataatacgtggccttctcgtgaaggtcaatgattatcgggcctatcatcaagctcaagaggactagacatatagtggtaccaccaaacacaagctgaagtcggacctcatttccaaatattaggtctagggatccgactaggtaaatagttcccagagacgtgtaatagcactcccatggtcaatagaatattctttccaatcagacaggaacgccctcaagagccatccgggaagggaagccaaagaggtgcccaagttggtttttgtcgtcccaaaagatgcttaagtggcacacctctaacgcaatcctacaaaatatgggaaaatgtcccctttaccaactcgtggaaaggctaacagtgtgtaaacttttttaggattgcaacactactctgacatgtcattttctcatactatctaatgacctaccatgcccaataaattcaatcatgcatatgctaaaaatattgtattttccccctaataggccactttctacatgaaaaa

SEQ ID NO: 46801 - DNA, 1613 bp, Cannabis sativa
atttcaatataacgataaatgcaggccgaactcacgaaaatttattcttcaatatatgaaacaaaaagtaatagagagattttgagtttgaataaaaaaatttaataaattatgattacaatttttcaaaacaattaagaattattctctaacaatcaatcaacaacaacgatgataaatattatttcttattcataatttgaactattaattaaccctacagatattcacttatcataatttttcaattacaattaattacgacaaaacgcttaatacaattaaattttttttactaagtaatagattcatgaaacatgcaatctatttaatttaaaaaaatcattacattttatgaagacattaggtttagatcaataaaatatataattcatttaatttaaggtgtattcttcatcacaattaacatagtctatcataataccattaaaagtaatttctcacttgaacatatgatcctaaactattaggtgaataaaatcttaagaataataatctagaataataaaaatctaatttagtaatttttaacatattatatcatgtagaaaataaatacgcctcttccgagtctgttgttggttatgggtaatatctattaaatgtgcaaagatatagatatacggaggtcaccagtgacaaatgctacattggatcccaccactttacgttggttgagaaaagatcagaggcagagcagataccactaaaagcatttctaataggggtttcccacaaagtgatctttttcacatgtgcattttgatcaacatttcaaactaattttatgaatattattgtaatatatattatttttttattatttttgaagaaagttactgatcactaattaattttttgagataatatatataattataaaatttaattaaaaaaattgtatataggaccatgaaccattggagtaatttttgtaggaaaatatatcaaattttatgtggatgagggagaaaaataaaagaaaaatattttaaaatgatgtgtgtattttgagaactatagttatgggtgttgtccaccaggatatgctccaacttgtgtctaaatttccggggacatgcaaaaaatgataatagatctcgtcgttagttaatatttagttaataaataataataataaaatgaaatataaatgatgtgaaagcgcctctctctatataagaacggtgcgcttcgagctgtgaagtgggagagaagggatttcataattggggttttgaataagacgaccctttcatttttcatttttttttttcatagttaaaaaagaaagtaataaatgagagtttctcttttttattttattatttcgatattaaataaaaataaagatttcaatctcttttatcttgtctaaaattgaaatatattcaaataaactaaaaaaattttgtttaatatttatgaattcagtaaaaaaaaaagaaaaaaatatgatccttccaaatgggataagaggtcccctactattatttcctattcttttttttttttaattgaagaaataattggaaaataaaacagcaagtacaaaaatgagtaataaccccccagtagagattggtacgatt

SEQ ID NO: 46802 - DNA, 1367 bp, Cannabis sativa
  modified_base (1171)..(1174): a, c, t, g, unknown or other
tggaggtatattgatcctttcattgcatatattatagatatgattacagttgtttttccgcatttcatatcatttgtatatgctatattgcatacactatattatagtctaacagagacaccctgatgcattaaacaaaaacaagaataaaagtctaaagtacaataacaaacaacagactttgcatatcaacaggagcaaaccatcaaaagggaaaaaaataactgacaagctacaaaaattcacagaagagtaccatttgtatggattgaaaaagaaacacacacacatatatatatttatataaatgcttatggaattgagataatacccattagttaaagaaggaagtgagcatgattttggaggtggagcaagaagaaataaagtggacgagtttggagaaataataatattggattgctgatccaagtttctgatgtcaaattttccaaacccagaaaagattgattccatcacgttttccatttgatcctgatcacgttagtaactgaaaatgaagaaaaagatatactaatggaaataaacaaggagaaaaagagtttgtaaagtttagaaagaaaaatactatagtttacatggtatgaatagagttgttttcaattgttcacctgctaaataatagccataacaaaagatttctcattgtacattttttatatggatcgtctatattgttcacctaagaaagcacaaagagagtatcagaaagaggcaattcaagttaagtaccgtaaataaatataaaataagagaaacttccaattcattaataggttagattaaattgaatcaccccacaagtgtagcctatatgcaatggaaaagactcaatattagtagaaatttataccttcagatatttcacaagatcacttgaaaccccattatcttcaagtagaatgcttagtgtcatgtcctctatcaccctgtattagtcaacaaggtgttagtgagtaacatctaaaacaagaaccactagtaattaaaattaagataagaacttttaagacatcatttacatttaccattagtaattaaaattaatatattgtatattagagttagtcccatattgctaatgtatagaaataaattgccatatataagatgaatagactacttctcccattgccaattagttttgagnnnnaacctcattcatcttattctaaattctaatacggtatcaaagccacttgtgatcagttgtgagcccaaagtgccaccggtctaaaaaaagccatttgtgatccgttgtgaaccaaagtgctgccggtccaaaaagatacttctactgtctcccctttaacctccatttgggacctttcggccaatgtgtgcca

SEQ ID NO: 46803 - DNA, 1291 bp, Cannabis sativa
ataagcattttaggtagcgttttaggtagcgtgcctaattatttagggcgttacatagatggccttctgagcggtcctcactcaaaggtttggaaaaaggaactcgcactcaagttgcatgaccatctctaaagtatagtttagaaaaacaatcgttttatgttttatttagctaaagattagttagatcatgtaataagttactacagtaacaaaattattcagaccaataaatgaataaagatattaattatcattctaattgtgtcaattattttttactataggaagctatgaatttacagttgaaaatgtgtacaaaggctctacttgaatcaaaaagttgaacaaacaaaaatcaaacttacacaattcaagtgaccaagagtcatatgtcttatcgattacctgggggaaaactatacccgtacaaagcataggtaaataacaagctcagaaaaacttaaggaaaaatattcattctaaaagataacaaagcacgaaacatccaggattaaaggctgcatggtaagcttgttgtcttaaaatgaagtgaagtattaccaagtttaaaggccgcttggtcgaccacattgtaatgaaaaaaggcccatgggccgagctaaaataagagagaaaaaagtggagaaaaggaaatttcacacggctggagtctctggctctttgtactcatcggtttgttcatcactgaatatccttagaaagttcctcaactcgcttgttggcagccaagagttgtttattcacctcgccctacttcacactcttgtcctcggcctccttcttggcgttctccacctccctcttaatgttggtggtggtttttatagtctttaaggtcgaagactttgcgagtaggtgtaggccatctttaagtggagctgcatgaagaaaaggtaaaatatgcacttgtaaaagaatgagaaaaaaaccaaaggaagagtacttactcggttcgcctccttcactagcccacccataagcagctccatggagatgtcatgtcctccaaccaactgatcgtttaccttaaggagtaaccggtcatgatagaattagagcatctccttacccttcttagttttagggttcagcgtaacaggagtggatgaaggcttgagcagtccgaacccatccatacttccccctttgacgccctgagatggggtggccaccacctgagacttagagttcttcttggccagtaggtctacctcagacactgcttcctcagaaacctcggtcggagaaatagccagactcttctcct

SEQ ID NO: 46804 - DNA, 738 bp, Cannabis sativa
tgtaaaacttagggttctcgtttcctgcagaaaaatggtccaccgttttaggaaaaacggttcaccatttatcctgctaggaaaccccaaaaaacggcttgctatttttcaaaacagcttaccgttttcggtgatggttggaacccctattttttcatgttttcttgatgtttagggtatgggtaccctagtgatcgataaggggacttgtggtgatgaattaacgacctaaaacgagttaggtcaagtgtttaattattcttttttgttgttgtgacatagggcatgtgattgttatttttatttcaggtcggccaacacacttaaatcaaaacttgaggtaagaaagtacatctgtgcaacatagcatgttaagatacgatcataatcgtttgtgaattagttggttatgagctcaacgagatggtctttactattatgagagcaaggtgacaatcattaccattatgaaaccaacaagacggtcattactgttatgaaagcaacgagacagttatttccattataaaagtaacaagttggttattactattatgaaggtgagaaagcggtcatgatcgctatgaaagaagagtcatgactctaaattgaaattgttgttaggtttcttacttatcgattatctcattagataacgacaatgacatatcagagatattggctagactgttaggttttatgctctaaataaaactccatttcaatgtaatctatttt

SEQ ID NO: 46805 - DNA, 978 bp, Cannabis sativa
gcagattcgaaaacagtcacgaacatctccatctaaaatcatagtatgtagctgagagtaggacagttgatgagcctcgaaatccttagagcctgcgagttttacgactttaccgtcccatgaaaattccatagttagggctttatggtcatgaatacaaggacctaaagtttgcaaccattgcatcccgagcacgacatccaatccaaaaatcggtagtacatacaaatcgaccacaaaacggtgtccctgcaacagtagctctactcctcggcacagtttagaacaaagaagaaaatggccactgcccatatacactttgaaacgcttcgtctcctcccacggcaaccttagttgagttgctagtgactcctggataaaattattgttgctgccggtatcaattagaacctccaaggtttccgtcccatggttggccgagattctgaatatccgcgggttcaaggggtttgacaatgagtttaagctaacctcctcctctgcattatcctccaagtcattacaaatggtatcccctgtagagagttgttcctcatcttcggaagcacacaagatgagcattctatttttacacttgtgaccaaaactaaacttctcatcgcaagtaaaacagagacccttgtcccttttttctttcaattccgctggtgatagttttttgattggtaatggggaaatgctcgaaactgatgactgtggtggagtgatacctggtttaaacggaactatggagctggtagtcgttgttgtacttggcgtcgtgggcttactgtaccaaggtgaacgttgcagatccaccttccgtcggcctcccaaatcgtcattcctctcttcgaataattgagcctttgccatggcatcattcaaatcgatgggcttagccagaaggagttcacgccgtatctccattttcaacccccaaacaaaaaagttaaggaacatcgcctctgagactcc

SEQ ID NO: 46806 - DNA, 1268 bp, Cannabis sativa
gctaattccttgtctagtgttaaaaaaaaaaccaagagaaagcctaagaaaatacattcagtgtatgatggacgttgctgcaaatacaaatgttacttattatgaagatggttactttgacatcagggttaaccacaagatctttgctatgaagaaaactttaatgcaggagagcagaaactttgatagattttctgttgagagcccaagggttcatcaacttggaagatgcttacgctcaaacttacagagtacttccagcaccttccaccaacacaacaactgcccagacttcacaaatcaccactccatcaattttccctccggtaaccacctttacaactcctacagtttacggaccaagtgcttctgcacagccagctgcacaggctagttatctaaatttggagtggtacaaaccaaatacagtgccgctcctagacaaaaaaaccaaaaagtggaagcttcagagtccaatgtaagccaatcacagagaaaaatgggtttcaagggtccaagctagagtgattctacaaagaaagacaagatttgggaatcaagatactctgagtacaccagccttgttgatacttgtgagaatgtctttaagtgacttgtaacatggtccattacaagaagcctccgcctatgtacaagggcaaaagataaaaaagagatccaaacaaaatgtgtgaataccgtgataatattgggcacaccaccaatgaatatgattatatgagggatggaattgaaggattggttcgaaatggtcatctatccaattgggtaaggataccagtcatttattctggataggaagtagcacatggccaaattttcattcctggacaacatggagccattaatttagggggaaggccacccacaggttcctagaattcaagctccaaatgcataggcccctcaggaggtacaaaatgctccaacaacaatatctgttgttacacccgatcaagacccgtcctaggcatcccttagccatttctttagggcctccgcctccgcattccccttggtatgttcccccaagtcgtagttgtacttggcgattcagagctgaaccctttcatcgtcgggatgaacgggagtcaagataatacccggaggcgcaggatactcatccacatttgaaggaatccctgagttcgcgctgagagcaggagtatccaccctcctcggtctcttagaacgctctgtctccaccatcttgcctttgcgcttacatgttggatatattttaccag

SEQ ID NO: 46807 - DNA, 1395 bp, Cannabis sativa
gtgtctttgttttggagaaatttaggaaaaaaggggtttttcttgtttaaattgagaaggaaaaaagaaaagtgacttagagagagaagtaagatgtaatgttggttgaaaattgaaattggagttttacaatgtttttatatccaattgatttgaaatatattattgaaactgatgcagttattgaaattagacaattagcaattgaattagtagtagaacatcttgtaatactttggtttgttggttttgagcataatctgtcttcttgggtttgaagaatttgctggaataactttcttattcttgcttaaaaaaatgtttggtgcataattttgtttgattttgagtgtttaatctaattcaatgcagccttaccatttgtttggcttgagttgagatcaggtttctgggttgcctctcgtaataaagtttagaaagtggatgagtaacagtgaaaggaaacattgtagcttttattattttacagacttcgcataatgcatataggcttaggctattgctgtttcttttggcagaaattgtaattatttttagaagtagtgatgtattaagagaggcaaattataggagtttatgctgtacattagttgctctggttttctttatacaagagaaataaacatggtcatcattcgcaacatataggataacaaagggcacagcagctatgcgaagattgagttgattcgtttaatggccgcgcttcagcactatgatttgattaaaatcagcagctagtgtgattttgctgcccacaagtcacaatcttgtaacttgggcatttttgcctgcttaactttctgcaaataacttggatcctagaatttaatattattatgtttttcaatgctatacagccttaattatgggggagaaaagccgtggtaacaaagcaaaatccattattacaaagttatgcataaaatgaacaatttgttacaatacgtattagcttaattcagcacaaaacacagaaacctagaaatagaatcgaagcatttggattagtatgctgtatagcgacagccctcaaagccgttactcttataaacccccaagatgcaactcagaatttttccttctcccatagagcttctgtttcattcgttgtttcttcaaatattcttccatttctttctgcgcaaacaacccagaaaatggctagaattgctgctgtccacagtctgcaagtgttttcctaccacccttcaatttacacaaacaatttttacacctaataaccatcaagagatgtcataagattctatacaatttccactattacaacttctgagaccattcaacttcttctttctttacattctttggcaaattctattctttgagtactatgattaaatggctgacaag

SEQ ID NO: 46808 - DNA, 1916 bp, Cannabis sativa
tgtagataaaacatgatcattggctaattttagtccattatagataattaatgtactatttaatatcgcgccaaagatctactatattaaaatgaatgttgtttttgtagggatgtgtaaaaccagcagaatatgtttatgaccacaaatattgttgttggaagatatttatttatttgtttttaaaaagaaagcatttgtattaaattaaatcattacacaattattggtgaataatcgaggacaagcattcgttcatagagactcttttaacgaattagtaacagaagtaatcagtgcatcgacaacaccatttgtagaattagtcgcgaccagaggcaaaatacgaaaataaacttgttgtttggcctcgtagtcacgaccatgtaaaagggtcacgaccatggaaagtggtggtcgcgactactgaagcaaatttgacagcttcagcatcttttagtaaaatgcgcataactttcacatacgaactccaaatgagttgattcaagatgcattggaaagaagaaaaagaaatctaaaacttttatgttttaactttttccaaaatctgattagaacatagtcaaatttaaggttgaaatttcagttttattttcttgcagaattttctttattctatagattgttgtttttcgaaatttgatcaattgatatattccaagtgtgaaacctgaaaccaaagaaaacaagcataatttcattcaaaaaataataataaagaaagaaaataactataaaaagtgacccaaaacgtaggctaaaaatagactaacaagaatgtggaataggattagaagagacaccaccaccaactcctaaataatgaaataacataaaaaataatagaccaaaagacaatattattgtggggatgacaaacccatcccacaaccacaaacgaattatatttagatttagatactaaaaccaagtcgagacgacatcacaagaccgaaacaaagtgctaatagctctgcaacattcacctgaaactcacccaccaaccccgctatccaatattaagacaaaacaattgctatatgttagttataggcttggttagttagttgattgtaatcaactgtctcttgttagctaagtggttagaagttagttattgttagcttcctaaccatcattatatatattgtaatgatcaattgcctaatcaatgatgcaagagattgttttctcttattctgtatttccttcactttctctctttttcttttccttctcttcttctttgttctctttcaatggaaaaaaagttgaatatatctatcatggtatcagagccatttctaccatgaatggcgaacatggcttctaatggtcctggcaacactaccttttaatatgctcctcaaggcacttaatttccagctgctaaaaatctcaacatagatcaagaagacacaactgtgtacttcaatcatagtatctcgatcaaacttaacgaccataccttccttttgtagaagcaaaaaatcttagtagctattcacgacaatcaattactaaagttcattaaagatactacgccacctcctcaatttcttcgtgatgcaaatcaagctgcacgtaaactcaatcctgtgtttgttgactaagaagtccaagatcagcatctcgtgtcttggtttctcttctcaatgacagagagctttctccctcgtatggttggatgtaatactgtgtggcagatttgaaaggctcttgaacaacacttcactctgaaggtgtccttgaagatttgaattcagaattaagctctaaaacttgaagaaagggacgatgagtctcaatgattatctcctcaaggttaaataacatgttgatttgtttgcatctattagagaggtgctttcagattgtgatcacatcgctgccat

SEQ ID NO: 46809 - DNA, 1179 bp, Cannabis sativa
tcaaaaaaatcaacacattatcataatttttaggtataagtagtacattatagagaaggtggtaatttaaaaattttgtatcaaactcatatttataccacctgtatacacacaaaactaatttttcatcaaaataccttaatgttctaatgacattaaggtaagaaaagaaaactattcaactatgaatctcatttgttatagaaatttattttttgcggcatctcaccattctttgcgtcacaacggagcaataaataaagcaacaaataatattcggtaacaataggttagaatcgtatatgaaaaataaccacttgtttaatttttttagtattttaattattattttagtaataagatatatgatatatatatatttacaagacatatataaattaggtaataattttaaaatcgtaagatacaaaaagtattgcaatttaaatagagaaataaaatatatttgatttctataactcaataatttgtttaaaatcattattattaattttttagttaaacaataatgttattattgtttattatatgttattctaattcatgtttgaaatgatattaataatgttttatgtttattataagtggttttaaaatatttaacaatataaaatatttataaaaacacaaaataaaccatagaagtgaaatttaaataaataaatattaaatagttttattatttagaaataaaaagcccgtaattatttattaagaaataaatatttattattcattttattttgattaattataattttaaattttttttattgaaacataaaattaaaattataaatattaatatatataaattttaagtgtgtttatttaaagttttaaaaaataataaaatgtgtattatatattatagtgatccatgtttgacataataataataatactttatgtttattgtcacaataatttagaaacttttaaaataaagagtattttgcggcataaatacttaaatttaactccccgttgcaaataaatacttaagtttaatttttggcggtaataatacctaaattataattatagaacttttgtaggcacctgactgttatgtgttaagtaaattatcacgtagcaaaacctgattggtcaaagtcattaattttttatttttttaaaaaaattaatttaaatata

SEQ ID NO: 46810 - DNA, 1544 bp, Cannabis sativa
  modified_base (660)..(663): a, c, t, g, unknown or other
tttaatgaactcctcagctgcctcgtccacttgtcggctgtcctcatcggcttcactcaacggaaacggagagtcagttatcctcaattgccttaccatggggctccgcccgaacccgggaagagccggagaggcctccaccgcattcatcaccgcttgatcattgttcaaaatctccagaacagccttgagggcattggcggtgacgacatcatcttcgccttcgccttcgagggtgggtggcgcgtgagcgcacccgaagaaattgtgagagtggtggtggttgcggcggggcttaccgaggttgaataatgggccgtagttgggagtgttactgcagctgaattcgtattctcctgaagagagacgagggtcgtcggagccgacgttggaacggcgggaggatgcggcggctgcggcggcatggaaagtcatgaggttgtttatggcagccttgctggcgatcttgcctcgcttcatcatcatgttgaggtcaagcataagcttcttctttgatataccttttcttagcatgaagaaaagtacacgtaccatcccccatatcttcttcgctactactggtgcgttttgttccatttttgcttttttatatgttcttttgctattttctttgaggagtgagagagagagagagagagnnnnagagagagagagagtgagatttatattttgtttagagagagagagagagagatgttggttttgataatggggtgtagaggggagaagggggggtttggtatttaaagggtggagaaggtagaagagaaagaagggttttccttctaaaatttcatgcgaaaaaataaatgataataataataataaaaaagaaggattaattaaatttgtattttaaaatgtgaattagaattggcacacgaggagggtacaccgtaacacaaaaatgctttttgatgtttggtgatctgatgtgctcgtgctctttaattttttttttaaaaaaaaatattatatacatttagcttttcagatttaggatgtactactgcattaagtaacgttacttttatattttttttggacaataaaggatctaaagagaggaccgttttatttgactgggttgggcttatcttaggttacatctggccggggtttgtcttcttctttttgagtgggcaggccaccaaaaatgagggcagagtagagaatggttagtgggcttatttatacttgggtttcattttgtcacagtacaaagtccaataataggcttcggttttgggcttagattaatggactctcaattttctgttgcccccaacgcttgtaattgtttaagggaaatttatatggtatactttttgctatttttttataaaaatattgtcgggtagtattttttatttttttattgtgtatttttataagtttcatactgcagtgtatagtatttattttttagttttttttttgtttgtttcagtgttgttttctataatttatttttttaacgtcgattttactgttcttgctccatcttgctggaattaatgatt

SEQ ID NO: 46811 - DNA, 1540 bp, Cannabis sativa
  modified_base (1195)..(1197): a, c, t, g, unknown or other
aaaaaaaaaacagacctttgtatcaagcatgacagctgagaggatctgggtattatgcatagcagtacggagattattcaaagtctcctgatgatactcgtgagttccatgagagaaattgaaacgagcaacgttcattccagctctgagaagcttttcaatcatttccaccgaccttgaagccggacccagagtacagacgatcttcgtcttggggactcgcccatcgttagggatctcctccaatattccttcgatgtctatgttcgccattgatagcagctgaaacaatcgctaaacaaatcaatgaatcagtgagtcgacgaacaaacccgcacaacagaaacaattactcaaatcttagatcttctgaaactggttaggtgaaaccctagagagagaaaagtaccgaattgaaaaacagagctctcttccgatggtagtggtgactcgtgctgtgtttaccacaccttccccttcttctatatatcttcccttcccctgcctaattttatataatatttttttttcactgaaaaacgaatattcttttattaattttgacccaaaaaaaataatatttttaattattaaattatatgcatagtttcaattatttttatatatatattttaaaaaaatcatacaaaaaaatattattaaatttattaaaatttaaatatttattaataaatacacaaattattatcctcattgtcaaattatattgtttgtaatttgtgggctaaaatatttgtgtttagctcgtatttatagcaataagcacaacacatttcaatattaatttatttgaataatattagtttttagcatggattttcaagtcattgttatgttttttattattatttgaaatggagtgattataagaaagaaaaaaaaaatcaacttactagaaagatggtgttaaaaaaaatttaggattttcttttgggtggaacaagttgttcaattttagctttatttatttgagatagttaaaagttgggtattggtgacttgtgtttttgtttttagctgttgaaattaatgttttaattatggataaatactattttagaccttatattttgtaaaagttatcaattggacattctattttattaaatgagaaaatagactctgtattttttaaaatagtaataggattctaagcttaatttttgacaatttnnntttaatataatcaacttgaaaatacaaacagatacagaaaatataaacagttttgtgataatatttttcattcggataattattaaattttattttgacaaaaaaacagtttaaggttttatttttaccattttgaaaaatatataacgtctattttatcatttaaaaaaatagatagtcaaatcaataacttttacaaaatataaagcctaaaataatatttaccttttaattattattgaaagacgaagaaaaagaagagagcgcacacagaacagaagaggtgaagaatgaaaacaacttttaaagacagtgggctaatgtatcaaacaattaacggcaa

SEQ ID NO: 46812 - DNA, 686 bp, Cannabis sativa
aaaatttccctaaataaatgttatctccaagaaattttggcagtgtgtatgtatacttgccccaacaagtggtgccctagtcttatgggccttactttaagtgggctgaaagtttataaccaatagttttttattcacaagaaactcataaagtaggacttttttgcataaaggactcgtatcttgctaatatgagaatttctaaaagttcagcatgtgaattgacaatatatcataaaatgggaacaagaatcagatcttccttaccattgtaagagggaagaccacgcatccataaagatcaataaagacgttatataagaggagaaaagttgcctcatatgtacatgttttagatatacatatataggctaatattataattatagtatggattgatgttatcacatcagcacaactagagtgttaagtatataggctaatattatagttaatcgtactataattaagaatgttcatgacttaattatacgcgttggatgcggatagtagacttgcgataattaggtgtatgggaggctaattaccattcatacatatatattgcatgttttatatattttttttactgggtctgtcgactcacaattatctttcatgtgtaggtaaaggcaaggctaagactgagcatcagttaatggagagcttagtgaagattgtacata

SEQ ID NO: 46813 - DNA, 1902 bp, Cannabis sativa
ctgcatcaaactatcaagaccacaaccagccacctttttgttccattgttccataatagtattgacatagccatgatacgaaggccaatgattcccaaattgaaagggtttaaccccaatatttctgtgcacttcattctggattaaacagaggcagtgatctgagataacctcccatttaaagtaagcatctgagttaggaaaatcattcaaccagatattattaataaaaactctatctagtttggaacctcatgcttgttagtccaagtgtagaagaatcccgagcttttaaattcctcaacttaacccacggcaagctaagattgagcatccgcaatgtcattgttccgtattggcctaccaccacatttgtcatgaaaactaaacatagcattaaagtcaccaaaaataatccacagatcattttgcatcccaatactagcaagattatcccaaagacttttgcgatcctccatagagttactaccatagactgtcgtgaccaaaaaagcatgtttcataccacaaaacttcactttacaatgcaccatctgagtattctcacttatgatatcaacccgaacccaaataatcaagatcctactaaaaataacaatgctagaataacagttccaattcggaaaattatctaacatcatttcttgtattttctcatgtttaagtttagtctcaaacaaagcgccaaagccaattttattcaatctacagacatcaagaatatctttctgtttgtctttcttattcatgcctctaacattccacccaatcatgttatttgcttccatcaaaaactatatcggagttatgacacaatatctcatcttttgctgcagcaagcaatacagcatacccatttccagttttcttcacctttggatcatctttagtcacaatagaatccatttgtctcaatgcaattctttttggagtaacccaattacctccaacagtaacacatgatgtctccctctccgttttatccttctgtccagctttttgaacctgatcattagcaacaagatcagcaatggcaagcttccagccgaccctcttcagggatcgaagggagatcgtgttctgctccattgtccgccgtagatgcaatggcaggcttccggccaaccctcttcttctttgccatgggagaagcaagggaagactcgtacgccgttactttcttaaatcaacaaatcattagtaacaaataataatcaactatttgtaattatcaaaacaaggagacccaaaagtttgacttaacaatctccccctttttgatgatatcaaatatttgattattttgaaaagagaaaggaaaaattgaagcaatatatattagattagctctcccttaatatgtgcaagggaaagaaattaccttttaattttaccttgcatgattttgtaaactccccctcaattttatacttaagtttaaaaggttagacatcctaaaaaaattgaggttgtgccaaaaaaaatcatagaatttctcttccttttgattcatcaaaaagagtggcaaggaattcacaaaataaaggcaaagaaagaaaaaaaaaaaaacaacacataccgtgcattagaaactaaaagagtcaaactcatagcattcaacaaaaatataacaaaaaaaaataatatccaacaacacaaaaaaataaaatccaacacataaagtcaaaaggcactaagcctttgcacacaaataaaaaaaaaattaaacatgagataatatgcaaaaaaaatgcaagagagctagtttggtggaggtccaaatcgatccatgtatgctcttcattgtgtcatttcgccttggatgttgttaaaaattaattatcaaataaaaaatttctatttaatttatttattaattag

SEQ ID NO: 46814 - DNA, 1532 bp, Cannabis sativa
ttttaatttttcggtttggcagcgggtcggggcgggtgggcagattttcgggttcgggtctaaatgttcagccctagccgcgacatctgggttaaaaacctagaaataccaattccaacctactcgaaattatacccaaaaacatcataccaatcacatcaaagcatgctcaaaaccaattcatatttcaccaacaacaaccatcaacaacaatgaatcaaagcatagtaccaagctctacacatcactaaaatatgcaatttaaccaagctttgaattcaacactccaaggctccaatccttcaaattaaactcaaaaattcatgctcaaaactcaaatattctaaactaaaacttcaagctcagaaattaaagtgaaacctaaaattacacattctaaaatcatccaaaacttgccatcaacaattaagaagcacaccttacaatcctacccacacaatcatacatagagccacacaagtcatccaattctcatacacatgcattcaaaaacttaaacaacaacaacaagaacatgtttttcaagcttaattatcagaacttaaactcaacaaaagaaatattagaagcttaccacaaattccaaaagcttcaagccacaaattacacaaattcaagctttgatttcaagattatagaaaatgaaaagcaagtagagagggagagtaaagggggagggggtcggttagggctgaaagcaaccagaaatgaagttctaatttcctcaattttgtaaaaaatcattttgttgcaaatatgtttaagtggttaaataacaaaaatgcccctaaggccaataaaccacatatgcctactgtaagggaaaaattatcataaatcacacaaacaataatttttagattattcatttagcaaataaatgccaacataaaatctcaaaaatatatttcgggccccgaacccggttcggcccaaaacacccgatgtgactataccgcgccgatttgtcagaaaatacctgcagatagatagaataaacatactatataataatatagtccataagcacgatatatcatttaaattacgattttacccttctcgagtcaaaattacgaaaatgcccctgatagagtaacagggtcgtaaaatgcaatttatcagtataattccatatataataatataattttgcattaatacataatcaatctagttagggtttctaatccagtttcttaatcttagggtattacaatataactcatatattaatataaaatgtaatctcttatgccaaacatcaaaaattgtaaagttattggaattgtgattacatcttgtacatttattaagagggatagattcacttgaactagattgggtagacaccacaaaagtgttgacaggaggctgatgaacactagactgagagcattgtggttgaggctgggtagatggatgaagttggagatcatcagaatcaaacaaatacatgccattcttgtgctttcccatgagaagaatagcatgtgtcacctgatctttca

SEQ ID NO: 46815 - DNA, 1911 bp, Cannabis sativa
  modified_base (1478)..(1478): a, c, t, g, unknown or other
ttttttttttttttgaaaacaatcaactttgcttctacaatacaattttttttctccatgaagaatacaatcttaagaactataggtaccaaacaaaacacaaccaaattagtggctttttttcctactaaaatagtacaacataattgtgaaatgtttttaaaaaatagtaagtttgtagctgggggtaaaaatttgttagtttagttatagtttattttatctaactcaatataattttcagattatgaaaatttaattgtacctcatccaattaataaaagaaaatgttaaattcacctaataattttgttggtttatttgagttaatcagtctaaattgttattacttttcttttattattatttattattattgctagatttattattattaggagtaatggttactgatttctggtttacttttattatttttacatgcataaataaaaaaataaaatgagaagagataagctggctatgagatggtcaggattgcaatacaacctcatttgaaaattaaacataattctttgtaattggctgtaaaattattacgtggcaaattaggactggtaaaaaatcaattgacatagttgaaaaagagaatcactcataagcatcgaaagtgttttttggctatgaaaagaatgacacattcacaattgattatagtcaaatgattgtgtaatgtaagagatatcttagatgaacaactgttattgctattattaatgaatctcatccaacaagagacaatctcataataagtaaatgataaaagttattggatatactctttaaagtacactcttaaaaaaatctaccgatacattctttatcaattttagcatatgagagaattttttagtcaaattcttcttatgatcgtctacattctaattatttaagatattctgtaaaattttgaaatattctaatatatttaacaagccaaaaataggattcaaacatattgttgcacgcgagactctttaattttatatgcgtgtgaaatagactgtgaattctattattggcgtgttaaatttttttgaatttcttaaaattttgcatgatgtttcatataactacaacatagaagttcatgagtaaaattagactaaaaaattctttcaaatgccgaaacaaataaggggtggtgaatcccttttaagaagtccattgtaaattttttcaaagctatatataccctgtatacatatatatatttagagaaattcgcggcaaaagtcttcaaaaagtttagtttgatacagataagtcttcaatctcgaaaaatagtagtaatagtcctcaagatcatgttttttatttgttcgttactcttttaactgagccgcttacttttttaaaattgtcacatgtcgaaatattactaatccaaattattattttcatttttttaaaaaaataaataaataaataaattatttaaaaaatatttttttttnctttttctttcttttcttctttgtcttcttcttcttctcccaaatttttaaagaaccaaatcaatcaaattccctcaaaaccctaaaaaccaaagaaaccctataattctcaatccaaaatccaaccgtggtgtgtatacgcaaagcctataaaaatatgtaattataataataatactttggtagtgagaaaagcctcacaaataattatgagaggagctaaaagactcgcatgttattaaatcataacgctactagctataaattgaatgagtacttttacccttatattatataagacaaatattaaagaattctcaccaagaaattaataggatgctttcttgtatgcctccataatcgtggatacaatttggagggtgcggaatgacaaagttcacaataattgtcttgttgatgtgaaaaaatgtgt

SEQ ID NO: 46816 - DNA, 1015 bp, Cannabis sativa
  modified_base (35)..(45): a, c, t, g, unknown or other
aaccactttagaaatccaaaccgtaaatttaaaannnnnnnnnnnaaataatatatagaataatttttcattattttttttattaaaataaaatcaaatataatagttattaataaagtgaagaaataaaaattaagtttttcctttaattatagcgtcacaatacgtcttgatatcattcttaaaatacatgcatgtatgcaaaaaaatcaaagattggtgagcaatttattcatcaactaataataataacttcgataattaattaacttatgtgcacgttttaaacttcaaatgacatcttcgtttgattgataaactatattctttgactttgcattcattacaacagttttattaactctagaaccaaagaatattatactcaaactcaaccaaaaccaagatataagtacaaaaaaaaatcattatatttaaatcatgaaactggtgattaattaaaaatataaattaaaggacaatacatgtactataattttttcttaatatgttttgttgtttcttaaaaaaaaaaattaaatacttaatttcattataaaacaaatctaacatcccccactaagggattttaagctcaaaatctgattttcttttttaaatattgtatattcaagtgtggtaatcaataataatcatataaaatatattatttgtgttttgtacaaatttgttttgaaccatttgtcaaaaacaaaaaaaaaacaaaaaaaaaaaaaaaaatccttttgaaccaataaaatcattcgaagcatagcatcatattttcccaagtgccaaataatgagttttggagtgtatttatatgtatattatgtctctactcgtaggcatatttatgtttttgacattttcaaaaattattttggggaattagaatttttgtactattattacaacgtaaataattatataagaagaatttaatgttggattaaaaatcctttgtgggcacatatgtataatgtatatgctattataaagtgtgatacaaaat

SEQ ID NO: 46817 - DNA, 1338 bp, Cannabis sativa
tacaaatatatgttataactaattttttaaaaaattacaatcaagattataataggcttctaattgaaattcattaatttccatattattgtgtaatggggactgatcagctaatgtacctagctatatggaccccatgatgggactatttggggacaaatagcacatcatatggatagtattgttctaaaattgctttcaacatggattcaatttaatattccacttaattagttgataatgatagtgatccaatattcatgtgatagctcagtctttttccgtatgatattttgttggtataatatgaaacttgcatagcccattttcctccatgtgtagggggaatcaaggcacgtttttttttttttgtcaaaaaataaaggcaaagggtcaaagttttcagtgacaaaaacttcagagaagcacatgggttctttaattactaccagttaaatacttttaaatccccattaaaaatatcatatggggtgacgtgaatcattatatatatatatagtattatatatatatagtattgttatgagacactagtggtgcctagtaccttctcaatatattgcgttgtgattagttagcgatactttctaaaaactattatattaaattatataggacccgatacttaattgaaccaatagcgatattgatatgtaagagggtgctaggtaccactggtgctctttaacatctctatatatatatatgagcatttttcttaggtactagcggtgactagtaccttctcgacatgtcacgttgctattggctagcgatattttctaaaaattattatattaaattatgtgggatctaatacttagttaaaccaataataatactaatacataagagataagagagtgctagagtagtacccttttaacatttctctatatgtactacatttgtagaatagacatataaatttgaattttcaaggcaaaaattaaattctattatgataggacatgatgcttaaatgattgtcttgccaactatagccgctgctatgatataaatatatatataaaggcacacacgacgttccacatggtggatggtagagaatattgagttttcacccgtctaagctagcgttccacttgcactaataaactattttttttactagtgaacttctgtttcttgctacagtgttcttgaatttaggtaagaaataaaaaatatgaatgagctcataaaaaaaaggggacagaatagtaggaaataattaagaaaattataaagggtaaatactattttggaccttttgcaaaagttaccaattggaccctgtgttttgttaaatgacaa

SEQ ID NO: 46818 - DNA, 2001 bp, Cannabis sativa
ctttattaaatataaatatatacaaaaataattaatagtagggtaaatagcgacataaatactcaaattttaagtttgtaagcagcataaactcaatgtttatttttagcggtataagtactcaatgtttgtaaaactgtaattttcttctagttttgtcagtacagactccgttttgaatttattaaatgaacatttggaagtaaatgatactacatgtttccgtctagacccaatgatcgagaatcttgactttatatgtggtcagttttacaaacattgagtacttatgccgctaaaaataaacattaagcttataccgcttacaaacttaaaattttagatacttatgccgctgtttaccttcaatggtacgatcaagccttcttatctaagaaatttcaggctacaaagttataattaatgatcattggaataaagaatgaccaaccattatatagaagtgagtccatatcaaggccagctctggcctctgaggtagagacattccattccatgatgtacaaaactagtatttcttccactgagtgttatttatttaaatcgtaattttattattgcttttgtgcgtgacttgaaatttctacaactcaatatatttatatatatttatatatatatatttatatatatggtaaactttccttgagtaacttgggttcagtcgtatatgctttgtctttataaactgtgaaatctttgttttgtccctttggtatagtttttgcatcaacatattggtaaaaaaagacaagggtcaaacggtatggtcgattattaatttctgggtgtggtgtggtggtacacttatctatttattttacaaaattatattatagttttttgtgggaagatgagccatccccttacctagttttgctttaacgtttctttctttaattattttgattcacactttcctttttactaagttgaaaaaatgcatgaaatctgtctgaaatgattgtattaatcttggggtctctttcaaaagtgaatggtttgcatcatagaacagaaaccgatgtgccgacctcccatccccacactggattttttgcctcactttaatattccaaacacaaagctaaagctaaatcaagaaatgaacttaagtttatgtgtttttgcttgaccaaattcttcaagtttgatttgatagtttcaacttaatagtataacaaattaaaatatttactacttcaaatttgtttggattttggaagatcaacaactttctattatatatgtattatcacatcatatcaccactagggatattcatgcacctacatttgcatatatttgtgtttctatgttctttgtttttttttttttttaatatcttctttttattcattactttatactattctcatgttcatgacaaatgcttgaccatcattaaaataacaagtaggaatgtgtccaaacaagaacgaaccaacccccacaaaaaaatggttggttattatagatattaatgttccctttataaataaaaaattccaacaacctaattagaccaccactattttgggtcttattattagtaatgcaaacagagaatataatatacagccattagaatccaaatcttaggaaagatttctcttcacatgattgaaacattcttatattttatttttattaatttatcttttcatcttttgaaacattaatcaatgttctatattatgataattggttcccatatgaaaatttaatccaagctatcctaatagctcatctccccaaaagtaatattaagaaaataaatgacattaaaataggaaggtatatgtaatatcaaattattatttgtcggaatacaatcctctatttttggccgcatataatatactcttaagggtattactcctgaatggataaaattagaaaattttgagtttttatgcttaattgttctatttaattaaaaaaaatctcccatttttattatatcatatgggctgagat

SEQ ID NO: 46819 - DNA, 933 bp, Cannabis sativa
gattgcgtgcacttgcgtagtaattaataaatttcagcaacaagcacgagttatcataggatgggagttgataacagttggtggttgagtagcttggatatgggcagggatatctcgggtaggagcagtagcagacattgactgtgaggtgcttggagaagtttcagttgcagcaacagctggaggctgtattggtgcatcagtagcagcagtgtgatgaggaggctgctggttagatggagcagtggtgggtgattactgcagaggttgtgtggttatagcaacaacaggttgttgctggtggggaaccgtgacaacagcagcagggtggtgctgatttcttgaagatgcatcagctgtagactggtgagaagatgttgcaggaacagatgcagatgggtgagaagcttggccagccaaaggtatcacacatgtggtatcattggaaacatgaacacaaggaagagatgtattagtagattgattaagaaaaggaaaagtaaattcatcaaaaataacatctcgagaaatataaattcttccagaaaaagttagacatttataacctttgtgtttcaaactataaccaatgaaagtacatttttctgatctgaattcaagtttttttttttttttttttttttgtagggtctagtgtttggatagcaagcacaaccaaacacttttagagtagagtaatcatgttgtttgtggaatagtttgtttagaggtgtgttattgtttataacctgagttggaagcctatttataacataacatccagttcacacggcttcatcccaaaaagaaagaggcatggatgcttgtgaaagtaaggtaaggccagtttccatgagatgtctatgttttctttcggcaacaccattttgttggtgggttgtgggacaagaaactctatgtgagatgccattt

SEQ ID NO: 46820 - DNA, 1684 bp, Cannabis sativa
ccaggtttagcaggatcttttcaataaaatccatgggcttaaaaccagaaatgggttgggcttttgtgaatcattagaccatatgagtatgactggtaaatatcaaagactgaagacaccaatctgatattgatgatcaagtcaagtcaatgttatatattttcatatttcgtaacagctcgcaggaattcccaagtaaaccgttggagcatagtaaaataaaaacagagcatttagaaataagaatgaaaaaaagtttttttttttcttttcccttttaatataaattataaaaatggtgataatacaagggagacaaatattatataaataaatgagaaaaatggatataaaattaaggagtcctagcgtagtgaagcaccatgagatgatcagttgtagaagaagaagaagagtctggaagcaaagtagtcactgttggaccccatatgttatctcttacttgctgcaacgtcaacatgggtagaacctgttgccctctacatctgatctctatctgtttcattttcacacgtgcaaaacaaccattaatcaccattacatctttaaatacacataatacatcctcagtggcaataagtaaaaacacagatagttgacaaacaagtaaacctagtacatctaaaatattataataactagaacttttatttcttctatatatatgatacatttacatgtactaaaaattaagggatttaatcttatttacaaaagtgtggatacttgatggattattttggattaattattttttaatgttaaattatttaatatttattaatttttttttcatataactaacagcaaaataacaaaataataataatagtacaaaaatatagaagaagtcccaagtttcaattccccttccccaatatccataaaaaaaaaaaaacaaaaaaataaaaataaaaaattattgttgttttatgtatctaataacaaattaaaataaatataacaaaaaataacaaattttaaaaaaattgtttggataagtaaatgtttaattttgttttaatttatatataaataagaatggaataaatattttatcatctattaaattttgcaatatatttatgtatatgtattaaatttttaaattactatttttttcattaaaatattaattgtacatataatttttttaaaataaaatttaattgaatcacttacttttacatgtcaatcaacattcaatccgtataagtgcaaattttagatttttaaatctaatttaatccacacaagtacaaatatctgcactttctaaattgaattaatcatacaaattaaattagactagtattttatgaacactccaaatatgcaatgcaaaattttcaacttttagtctctcacaaacacaaaaaattcctttaactaaaactattagtcactaaaatcataacaaaactaattttaatggtcacaaattttatcactataaataacagttgtgaaattttattaattgcaacttgtaaataaatataataatttttataacagagaatctatattgtcatcaaaaattatcacaagtaatttgtttggtgatgattagttaaaagaaatatctataacatttacatatttaagagaacaagtaatagaacaagcaaaatgaaagagagagatttcaaaaaaaaaaaaa

SEQ ID NO: 46821 - DNA, 752 bp, Cannabis sativa
tcaatatttaattatatcaacaataacacttttagcaatttctctttataacacctttatcaacaacaatgtttttttatttctcttttagcaatttctcctaaaataacaatgtaaaatgctccttcattaaataagctaattataaatcaaaaaatttagctcatgaagagaagccttatttatttaagctataaatattatattaattttttaaaaaatatatgtgggtgatattattatatttatttttaaaataaataaaatatactacaaaatataatttttaagtcatatagagaaaatataaagaagtttatgtatagtataatgtaaatttatgaagtaaaattaaaaaaatatagttttttttttcttatgaaaaattcatttttattaaccattaacttctcttaccaaataaggtaacaagtcaattaaaacacactctaaactaaaacgacgatcacactccaaactaaaacgacgatcaaggtataatatagaaattttagtaaagttatgctcacttgaccaaacaaaaaaatcatataaaaaaaaaagatataattttaatgtggtaatttttagtaaataagaaagtactagtactttagtaacaggccgtgggaaccattaattatgggataattacactacattttttttacttttatactctagtactctagtatgaagcactttacactgaataagatgtaaagtagtgtatgtgagtgaccaagactttg

SEQ ID NO: 46822 - DNA, 1429 bp, Cannabis sativa
atattcttattatattaataaaataatagaataataaataatataaaatttggtgtaatttttagtgttatgattggaattgaaaaaaaatctagtgttgaaatagtagttttttggtgttgatttaatacaaaatttatgttttaccattggagatggcttaatagagtttttagcgcttaaactatctcaattatcgttttacttgcacttaatttttcaagctcaaattttagcgataattctttaaacctactgaactgttaacacatttatggtgtcatccaattaatgtcaccatgaatgtgtacacttttctacacgtgacacttttttttttaaagaaaatatattcattaagaaaaactaactgttataggagaactaacaaatcaagaacaagcatctgtccatacagactctctcaaactagtaacagaagttgtcagtatatggacaacattatttgtagacacacggaatagcattgcaagaactaccaccaacagctgctaataacaaaatcacatcaaaaataatatactaaaagaaaatattggtgtgggaatgacaaacccatcccacagacaaatcacattcagacttagacactataaaactaaatcatggaatgttgggaagcattgattgtatatgcactggaatggaaaaattgctcaattatatggaaagaccaattcacacgaggtgatcacggtgtgccaacaatcatgcttgaagcagttgcatcccaagatctttagatttggcatgcgttttttggtgtttcgggatccaatagtgatctcaatgttttaaaccaatcatcattattcactgacatcttacagggacaagctcccagagttgagtttatgataaatgtcacacaatacaactagggatattatctagcatatggtatctatccagaatggggtacatttgttaaagctatcccattgcctcaaggagagaagagaaaattatttgctcgatgtcaagaagctgcatccaatgatgttgagtgggcatttggagtacttcaatctcgttatgccattatacgaggtctgactcgattctggcaaagagatgctcttaaatatattatgtatgcatgtatcatattgcataagatgactgtcaaggatgaaagagagacatatgggttatttaattttaattacgatgaaggctacactgatactctaacatttgaagtatatgtcatggaattttttctgagttcccaactatgcttcaaagaaatgccaaaattcgtgacagaaacattcaccgcaatcttgaggcagacttggtgaaacacatatggtctaaatttggaaataactttaattagtatttttttaattatgttggattggttaattattattatgttattttgtgaactaattttaaattt

SEQ ID NO: 46823 - DNA, 4221 bp, Cannabis sativa
  modified_base (3639)..(3643): a, c, t, g, unknown or other
  modified_base (3897)..(3900): a, c, t, g, unknown or other
  modified_base (3944)..(3947): a, c, t, g, unknown or other
  modified_base (4172)..(4176): a, c, t, g, unknown or other
aaggggcggtctatcacggagaatacggcagtagcaaaagaaattgttcactccatggctagaaggaaaggtaatcgcggttttatgataatcaaattggacatggaaaaagcttacgataagatggattgggagtttgtttgtgaagccttgagtttccatggcgcgaaggacccgtttcttggatggataaggagctgtattcaaatttcaaagctgaatctccttatcaatggggttaagcatggatccatggtcccttcctgtggattacgccaaggagaccctttatcccctgccctattcattctagcagcggacctcctgtcaagactatggatagactattcaagggaggggaagataaggggcttcaaatttgcaagatctgccagccccatcactcacctaatgtttgccgacgatgttatgttatttggccaagcatcggtgaaggaggcagaggctttcctggaatgtttaaacctctattgctcgtggtcgggacaagctgtcaatttccaaaaatcaacagttttcttctccaaaggagtcccttctaacagagctaatgccatcgccaaccttcttggtatgtctaaaatgaaaaaagataccatatatcttggtacctctctctttaattctgcaaatcgctcgaaggacatgaactttctagttaaaaaagtgatggcaagaattgaaggatggaaatctcgcctcctatcaaaggttggtagagcgtgtctcatacaatcagtgggggcttccattcctgtctacatggcggcctcggaggtgataccgaggggcatttgcttgaagattgatcaatgcctccgaaatttctggtggagcgatcaaaacaataggaaaactatgcacacagtggcatgggattccctgtgtaaatcaaaattcgaaggaggccttggttttaggcaactaaaggatatcaacaaagctttcttcctcaagtgggggtggaaactcgtaactgaaaaatcctccatttggaacatcacaatgtccactaagtacctaagaggcaataatttctttgatgtcgagcctaaaccctcggactcttgtatttggaaagcaatgttgaaatctaggactctcctctgtgaaggtttgtgtaaaaggatcggggatgggaggactacatccatttggttcgattcttgggtgacaacaggggatcataaacccaccccgctgaaggatgctacccagggggcaaaccttgttcattatttcctaaatgacaaccttacgtggaatattgatcgcctcaacaactggtttaggaaggaagatgtgaagcatatcttaaatatatgtcttcgggcccactctcagaatgattcttggctatggcttggtgaagaaagcggaaaattctgtctgaaatcagcctatcgattagtaagaaaccgttccttcgcttctcagtcgaactggatttggaaggacttgtggaactcccccttacacccaaggctcaagcttctaggatggcagaccttaaggaatgcgcttcccactcgtcaaaagattgggggatttttttctatacagaattcattgtgtccactctgtgatgaagatgaggaatcaagtttccatctgttctggcaatgtcagtatgcaaaagctctttggtttggcagtctttggggcatcagaactgaaggaactccatgtcgtgactggaatgagtggctgatctggttcagggatagtgcgaataggcccctcaacctttgttttatggaattcttactgggtgcactctgcacttttgacattatctggaaagttcggaataagctgttacacaactcggtgaaattgggaatggcggaggcaattcaacaagtgtgtcgtcttttccaagatcacaaatccacttctcatgccacgctacgaaaggaaagaatcattactaccccccagaggattggatagcctgcttcacggacataaccacagcctcggatcatgcgttcggggcagctgtgtttagggactgcaacaacaggcttcgaacggccttttccagtcgcctccatgtcacggatccaactctggcagaagctactatgctggtgatagcagctaattacgcggcaaaaaacaatcttcacaaggtgttgttcttctgtgataatagccctgtggtgcaatactttaattcttctctccctgacaactatcaccagaagttggccggggctgctgaccgattcagaagcaatgttcaccctttagtaagctttaagctatgtcacattccgcgatcgcagaacttctgtgcgcacaacatggccaaatgggcgaagctacacaatgttacaggtgatatcgatctaggatcgatagagatgggagtgttctccaacaaggaggaatggaatccgggtgctaaaggaaaaggttaatttggtttgttggttattgccctgtgtggcactttgtcagtttgttttttcctttttagttaactggtggttagtttcctttttttttgttatctcttgaactttgtttgtttgttccgttttggccttttaatgaatgggtgcttgcaccctccctttaaccaaaaaaaaaaataaaaaaataaaaaatatcttagtagaacctttttttttatttccttttttataaaaagtagaacccattttgttagttagaaaattttgtcagatacatttataggtagttttagacctgatttatggtgtaaattttatattaaattttgctaaaaatgagtcaatataattatgagataattacataaaaatttttgtcaaaaaattatatttttacgtttaaattttataaatatatatacttttacgattttccatcaaaataatacgaaaataacaaaaaaacttcataaaagtaacagaaaaatataatatctaaataacatcaaaatactaacaaaaaataacatacaaataacaacaaattaacaagagtacaacataaaaaaccatattttctataaattaaatcacgaaaatcgtaaaaatatttaaaatttcgtaaaactattattttttttttttttgtatatttgtgaaataattcctattattatgatgtaaaatttggcccatgatatattttgcgccaacttaattagtacaaattttagtagggttgagaagtaaaataatcttaaattttaaaactaagttagtaaatgttcattttttaaaaaaaaaaaatacgaaaaataatcaaatataataaattaattgataaaaatttaaaaatacatttattatatattattttttaaaaatatatatatataatagttaaattaaattatataatttttttgcatattattatattatataaaaaataaataaatatattaaatcattaaatatatacattaatatttgatatatcgcatcactaaaaattaatatatcgtagtaataaaattatataccacaaaaaaattataacaataataaattaatactcaatatatatatcatgctaaaaaagttatatatacaactattaaaatatacatacatactaaaaaatttatatataataaaataaaaaattaaatattatctaaaataaatgatatannnnnagacaacaaaaatcatataccatacaacaaaacatatatacctacaataaaaaacaaaataaaataatctaatatgattttaaaaaaaaaaaaaattgtatatacaattttaataaaattatatacaatcataaaataattataccgtatttacaaaattatatatcatctttttatatcataaaataaaaattaaatatgtataatctaaaataaaataatatacgatacaataaaatttgtataccatatannnnacaataaaatttgtataccatatataacaaaaaatatatacctnnnnatagaaatatatataataataataaataaaaaaatttatataggatgctaattaataaaattataaatcatgtcaacaaaaatacaatataaaataaaacttaaaaattatttaaaaaagtaatataacatataataaaaaatacatatatcattcaccaaaccatatatcctactaataataataaaaatatatattactaatatatatgtatactatactaannnnnttatataccacaattaaaatatatgtaccatgataacaaaattat

SEQ ID NO: 46824 - DNA, 1162 bp, Cannabis sativa
taaaacaccattaaataaaaaagatgaatgctaaagccaaagggcatcagtgtgcctaaaaccctcttatctgttaatatcgttattggtacaactaagtatcgggtttcatataatttaatataatagtttttagggagtatcactaactaatcgcaacacgatatgtggagaagatactaagcaacattagtacctaataacaatgctcaatacaaaaatatccttagatatcatttttaatatttttaaatatatatagtctagagatacataaaataccggtggtgtttgaaaaatacggtacaggataagttaattattgatttaattattatattggtatgggatatctatcatatatgagcatggacatagctgctgaattggtatatgttggtacacattggcaaatgattatctacaaacaaacaatggaggtcaaattcacttaattgttgtctatatataaaactttatttcattaggtcacttgacaatcataaaatgtttttattatcatttcataactttttctttctttttctaatgaatccaaaaacaacaagattcttacgatctcaagtggccaaggttttcaaacatagagcgtgtggtattctccatgtccaagcgtttgcttccctctccaattattctgaccaaatttaataactttattgcatatatatctcctacgactatataatttatttctatataatttcctatatttatttatgatatttcttaatctaactggcaagcgtccaaatgtcatataacaatcttaaacaaatcaaaagttcatatgtagacattccagtttatataaaaatttagttgaaataatacctacacgatgctttgttagaatagatccacatatgttctaactcgaaacattataaggtacacaacaacaactttgttgatatttttaaatgcattgacactattcgcttttcttttgcagatcaccaagcttacttactcccttgccccaagttgtgctcgtcagatgtttggcgtcctccccctcaggattggttgaagctgaactgcgacatcaatgattcgagggtagtgatcaatgtcctcaatgggaaagattccccttgggagcttgagaactatgtctctttttgtaacagaatctctc

SEQ ID NO: 46825 - DNA, 1535 bp, Cannabis sativa
agcatgcttatttctgatacaatctttgtaaggacctttgctaatgattcttagttgaactatcttccttatctccatgctcaacctactaggaatagcacaacaaagatcaaagatacaagcatttctatttttccatatatagtacaaagaggcagccaagactgcattccacaaacgaggaaccatcctttgtttcatgttgcagcaggtctagaggatttcagcagttgaagttggccactggaagtcaccaaaccaagagttaacagcagctgctacctgtgtcgacaaactgcagttaaaaaagacatgatcatgggtttctatatcattttcacacacaggatagagatggctaggaatagccataaacttctaaaggaagtcccgagtgagcaggtggttattcactatctgccagtaaatgaatcgctgctttggcactacaagtttgtcccaaatggcccttgaatattaagtcttaattccctccactagtagattgtagaaacgtttagcactgaacttattccccctcacagcttgattgagaatcactacattaatgttgtcccttatattcaaaattttcttgaggtaccaacttgtgtcaaccttctttgggcaattccatatgtcattgtttttcaagtaaatggagtttatccatttgacccaaagacaatctgccttgctggcaagagcccaaagatacttagccaaaagagccatgttccattttttcccttcccgaaacccaacacctcccaggtttttgggaagacaaaccttgtcccaagaaacccagtgaggcttacttctgttccatgaaactccccataagaagtctcgacaactcttgtcaattgcagccatgatcttggacaggaggatgaatatactcatccaatagtttcttatccctagcaacaccgagtgaattaattgagctcgccctgcaaaagaaagatttctgcttgcccaacaatttaggttcttattcagtttatccataatagctccaatatctgtatacttccatttggttggtctaagtttgaccccaaggtacttcagagggaaactaccctcttctattttaaccaaatccagaattttggatttttcctcaccactaacccctccaaaatagatatgtgatttagaggtgttagtagacaaacctgtatcattgcagaatttagtgaaagcttcactcaaaagtctcaccgatttggaattacctttacaaaagataatcaggtcatctgcaaaacacaggttagtcaatcggagatgcttacataaaggatggaatccaaagcccttttgacctgagtaggttcttaacaaccttgtaagataatccattatcagaacaaaaagaagaggggacatcgaatcaccttgaaatagaccttttttttccctttgaaactagcttgaattctaccattgagaagcagatgatagctagtacccttaatgtaacgccctgaataaataggcacgctacccaaaatacttatgaa

SEQ ID NO: 46826 - DNA, 3204 bp, Cannabis sativa
ccggagttccaccgcgcacggtggttgcctaccgtcgacggcgaagcttgtagaacctatcaacaagatctaaaagatctttacaaatagaatacatttttaaaagtcgttttactcaatggatctcaaatacgactagaccagacccaaaactttttactgtaggagctttttaacggggactgagcagtgaagggagctacgggaacctcagagcttgtggtttgaaactcgacaaaagccatggtggccttgagtctagagaacgacgtcaaggcccatggtggcctccattttcgatgacgagacttcatcggtggtgaaaaaacattgagtcccgagatagagggagatttggggccttgcaattggggccgagacttaaaggtttgtcttttcacacttcttccataggtatgggaggattgagtttgagaaaaaaaaagtgaagaagaggggtcaagtgtggctggaggtagaagaggaaggagaaaagaaaaaaaaattatattttaaatatatttttaaattttcaattattttttattgaaattattatttggaccaataattgttcaacacgttgcaattataaataacttaacagacccgttaaatttaggactaacgggcttataaaaaatgtgaccttaaggactattgctgctatcttttgtggttggggactaatctgcatcatagtgaactttttagggacttttaccccaaatttccctaaaaaaaataaaaaaatccttctctctctctaaacttgagcttagctccaatggcggtcatggctactctcagcaaagttctatttttttgagcttcacttccgccatttcaatcctctatctccaagaattatcccaagcccttgtatgttttgtttatacccaaagaaataacgtcgccaaacccaaactctctcgcactctccccccgccaattccctacagctctcttctctccagtttgtaaagttcgtgccttttgcttctgggagagacaaaatccactgagaccgaagaaaaaggagaagttgttcttaaaactcaagttaaggttttcttttctaaaaaaaataccctataatccctctttccacacattttcttttcttcttcttggttgtgggagactcgccattaatggcagcgagctaacattggttgtgagaggggagattcggtgagtcactaatagtggcggaatagaaaaacacaagggagtggagatctagttcttcctcaacgtttcatggtcgttgaagctagaaatagccctcgtctcctattgtgggagactcgctattaatggcagtaagatggtggttcctcgagttttcatggccgatcgaagaggacggcacgctgaccaccgttgactatgtacgatgttagtgatgaaggagacaacgacttggctgctccccattgttgtgaattgagctttgagaaattagggtaaaaatgtgtgaaaagagggatcttttctttgggtattgaagaagaagaagaagaagaaactaaaaagaacaagtaaaaagtaaaatgtaattttttaattattgttttatattttttaaatgattttttataatatttaaataattaacattatgtagacaactaaaaatgtgccatgtgtaaatttttacactgtggcatgtcctacttggcacttaacagaggcttgtggacagaattgtaaagagtaaaataaagtatgagtttggtaggttttgtcatcaaaaaatcaattatgtagttaagtgttacaaatcgtatagttctcgggtaatttttcagccaatattctttttttttttttttgcagcaaaaatatctaatgcatacttctattggtatcgattaataaccactctaagagagttgataattactaaagaaaatagcagtaaaagtatgtaaatatgtgtatggatcgggctagcccatattttgaaaaaaattcgtaaaagtatgtgtcgtatcgtgccaacccataaagagatatgggccgtgtcgtgtcgtgttgtgtcatgccaatattttaaaagattagcccctcatgatccataagtctatattttcgtgtcgtgctcggacttgtgtcatgcattgctcaagctgacctatttttcataaatgggtcaacctattttcttatatgggctcaaatttagggtccggttttctattatttttttacagttaataaattaatcagtaaattatatatattttctattgtttgaattgtttttatataattttcaacaatactttgttagaatattattcatatggaaataaattatttatctgatttataaaatataattaattatatttttcaaaatattttaattatggtaaattaattatcaaatatttcaattacctgatttaatttcttgaattagttgtcaaaatattctgataattaattgtgtcacagatactaatagagtatcttacctataaatatagagtactggtccccaagttcagtgctcactttgtaaaaaatagtatctaagagagttaaagagggcttgaaagcttaaatactcacactaactaagttttcgtttttctttttgtagattcaaagttgatgtggaatcaaagctcaaagaattaatgactggaggtatttcgatcatttattcataatgcgtatatgttcaatttttttttccttttagctatgtctatacgctttttttagtgattgaaaaaattcgtaattaactaaaattatttcttatagtagtatagttgaaccttacattttactaaagttcaaaattaagggggaaaatttaacatcactaatagttcaatgggtgtgtttttctctgcaatagttgaaatgaaaatttatctatttattcaaaaattaataacaattaaataattgttaccactaagttattcaacaatcaaacatttttttaggagtgattaaaattactttaagaattacgatgtaaatattattggtcggtaaaggatagccaaatgatatgcttagccaaattcaaggtggcaaaaaaaaatgtcagtccaaattaacgaaaatcgcccccaaaaaattaaacaataaaactatgtaaaatacctaccaacataagtaaaattaaaaattaaattagtacactaattaatatagtacgtagtaataataaaatta

SEQ ID NO: 46827 - DNA, 1162 bp, Cannabis sativa
ttaagtgtaaattttgctcccagtatcagttcaattcaaaatcaacctttcgcttcggtagtaacactggtagcttctctagaaatgcatctagaaactcttagaccacgagattgagtctcggtcccactaatgttcctttcttaatattcaccacactaactaaaagttgttacatcaatcccataacatatctctcgctttaagtgctgagatcaatggtatctaggattcttacaccttgcccacaaacacaaatgggtcctcaccctctggttcaaaagttaccatatttcttttacaattgatggtcacattatactttgtaagtcagtccatccccagtataacatcaaaatcctctagatttaagtcaatcaaatcagctgacaattcccttccttccaccagcactaaaaaggatctaacccacctgctggagataactaattctccaataggcagcaaagtactgaaaccacgctagaaaacatcactatgtatatccaagttcccaagtactctacttaaaatataggaatgcacgcaccgaaattaatcaaaatggtcaataaagtgccaacaatataaaacagatccgtcacagtgaaagaaccagcatcggcctcttcttaggtcaaggaaaatacccgagcaggaacaagagtatcatctttcttttgttcctgtcgtagtaactgagggaaatttcttttctgatgacctactaccccacactagaaacaacccctagtttgacacttgcctagatggcgtctcttacaccttggacattctggataagtctgccaattctcgtttccaccacgttggaaaccttggttaccataaattatcttactaggactcgtaactggtgggtcattagctctttttcttgggatcattagggttagcacccttccaaatccaacattagatgtttacttccttaaatctcttctcatggtatttctctttgcgaattcggtctttcgcaccctcagcagcaagggtcaactcaatcacttgagcatagattcgaacgaacctaggttgtttagcaattaaaaccacaccccgcgtgatatgttcttccaaacatcgaatgaatttaactttcctggcgaccttagtggccacttcattaaaggcaactgcc

SEQ ID NO: 46828 - DNA, 1565 bp, Cannabis sativa
ggcctggccgcccacacttctctgcctggctagtggagtttgtgcattaacatgaggtaaatcacaccaagtactggagtttggtggatccaactgtctaaagtgattaatttcacttctcaaattttattttgaatgtttctacacgctctcattccttgtcagtagaaaattgatttttgggtgactcttcccctcgtggagggagtgctcctctctggctggccatagggacttttggaggcgtctagctagccatgggaacttctgctggtggttggctagccacaggatggatagcggggctattactgagcttgagatcctgggctggccccccatgccactggttgttaggatctggttgttctccctgttagacctttgaggcaaggtctgtcctccctctaacaagggacgatctgtcctactccctgaggggccaagttggtcagcttgtcgatagaccctccctaatctatccactagtcttccttgaagtggatctctgacgagatcttggcctcttacactggttctttagttgaactaccttatcagatcgttagcctctctattgcagccatctaacttcgcttggggagattgaaggatgtactctgggtcatccatccatcttaggaatttgcgtctctgttgagcaagtgcatcgtaagcaacatcacgtgcttcttcaaggaatttacatctctcctaagtgaatacatcgcaatcaacatcgcatggttcttcaattaggctagcttggcaaacgacctctctaagtctagctaactcgagatcttctcccaagtccacatggggctcgccaattcttggtcttgtctctcttgcatagtataatggatgaaacccaattgttgttcatgggagtgcccccaaggattcttccttcagttggaggcgcttgtggagggtcctcccttagaggcaggggcgaattgttcagatctaccaagatgtttatgccatcctagccaactgtagtgtccagattcgtggtgcctactatggtggcaggattaaccacatctgctgtgttcatgggaattccagttgtggttggaacatggacatcaggatctgcaacccgtgggtcttgaggaaggcctgaagatgcagatggtgtaactagagttcttctcatgttaaccatggtgtttgatcagatatgatatcaactcgctctcaattaaagcacaaaactattgacctctgaaaagggccaactgacagtagggtcgtattaatctgatgtttgccatgtgttacacattaagtacaataaagtaaataagatatggatttttatagaggttcgacccccttagttagagggtaatgacctactccctttttggttgtattgatacctagagataatactattcacatcactataggtggaatctgatatagctctctataaggttacaaagcatggatcaagtaggaaaatcactaatgagagagaggtatagccttagaggcgagtgagagagaggagcagagagccccttggggttgtacaagagagagagaga

SEQ ID NO: 46829 - DNA, 1273 bp, Cannabis sativa
aaaaaaaaaaaaaaaaaatcctctctctctctctgttctttcttcttcttcttcttccgatttcaatggcctacagagaaccctacaacgccacagccatgtcaccaccttcaacatccccacgttcgccatggcattccccagttccctacctcttcggaggcttagcagccatgttgggtctcatagcttttgctctcctcattctcgcttgctcatactggaaactctccggttacctcgacggcgacgattccaacaacaacgatgacaacagagatctcgaggccggcgacggagccgatgagaaatctcgaccggtgacggcgccacctgtgtttgaagaaaagatattggttatcatggctggtcaagttaaaccaactttcttagctacccctgtttcgagtcgttcttcttcgttcggagattccagtagtaataacggtagctgtgtttgtggtcagaagggtgatgatcggaaatcggtggaaatgacggcggcgccggtgccggagaagaatgttccggtaactgaaagtggtagtagtagtagtagtgactctgttcttgaacatcagacccattaaagtaatttccttttttagaaaaacaaaattaaaaattaaaaaaaaaagattttgtaattttgagcttttttttttgggagtttggtgatgtgattttctctcgggagctgtaaattatcattttgagaaaatataaaattatgaattaattgagcataatttccaaacaagaaaaaaccaaattgtatgtatagctttttatctttttctttttcatatatgctatattattatttatatatatataaaaaagcatatatggcatttcttaaagtagtttaagttacctaactctaatggtttatgttatttatttatttattttgataaatcagcataaatttataaattgttcaaacaaaaaagtaaactttcaaattgaaagttttgtgagtttctcaatgaaaataccaaggatacaatattaggaagattaggaaaaagtcttaatttttattcattttattcataatcttttaacattatataataaaattacagtaatagcaatagaggagtgaaattgaggagaataatatgtaattaagtggtggtacgtgtgagaagttagccattgtattttggcaatggtattatgatgagagttggcacgtgtaaaagcttaaatctttattcacatccatccaacccaccattaacccaagctacctttacctgcctat

SEQ ID NO: 46830 - DNA, 1344 bp, Cannabis sativa
tatttatactgcggggtttggtagaaaaccctcgattgtcttatgtgaatataagcagtgttttgggataaacacttattggtttatcgttgttgtgacatagggccaacatcagcgaggaggtttctccacttgggttggctaacatacatgaatctagattaaaggtaagaaaagtatattgtacttcatagcatgttatattgcaatacaattaatattgttgagaattgattgatattgggattaagatacggttattattattatgtaatgaaatgattgcttgattaggcaatgacaatgtgatgatcccataaatgtgatatacggggtcacctgaatagatgttgtgatatacttgtcaacgataccttattaggtatgggcgacagtaatatgagaatgctaggctatggcatagattgaaactgttgatgggtttcttcgtatcggcgtaccttattaggtatagacagtagtgacattggagtgccaagctatggtacaggctcgtctgattaggcgatgcgatatatgggtaccaagttatggcacagacacacctgattaggtgatgtggttatgcaatatatgggtgctaggttatgggacgagctcacctgatgaggtgattcggttatgcaatatatgggtgccaggctatggcatgggcttgcctgattaggcaatgccatgcaagattattagattaaagcattgactttcttgattaggcaatgtgatgtaataaagattgttactttatgaggtaacatgtatataatttatattatgaaataaagataatttctattattggtataatagttttgtattactaaatttctttatattgatatttattcatgataaatgcaagtagtgatttgggttttatcttatcaataatgcgtgatcgtttaattctgattgtttgagtataaataataatatttgaataataaaatatatgattgtagttattacttttcgtattgggtctttgtgactcacaggtgctatgtggtgcaggtaaaggcaaagaaaagctagatcaaccatgagatgacagtcctttttagcaatgtacatattggccctgctagcttgcgtgtcgagttgccaagagttgttttgagttgtatctactgtatattttgatttcatatttagacttataattgtatttagcctttttgtaaaacttttacaataggggatccccggaacacagttttagtgtcgttataatgtcagttttttgtattttattttagtcaagtttttaatattatcacgattttcaataatcaattattctattagtattaaactagttta

SEQ ID NO: 46831 - DNA, 1187 bp, Cannabis sativa
aagactttctaaatttagccaaacacgtcgcatgaaggtggcggtgggaatgaggccagtctctgacaaatgctgcgctcattggctcccaacttgaatattaagataagaactatttatttatttttatatatctttacattttttagggtgtataattaatattatttatttattagaaaaaacatacaattatatttattagtatttgtaaagaaaataattcaatgtgtgatttcgaaaagaaaaaaaaggaaattcacaaacgtatgggactttctcctcttttgtctcacgagaagattgccatgacgaattcttctatttttcattttttaagaaaatcttttcttttctcttttatttttttccctcttttcaaatgctttccaaatcaatgagatttgtttgcttattaatttgtaatattattctctcttctgccatgtatgtatgcaatatgtattatatttattataatttattctttatctataagcaatctacggctctgacattatttatggcgttacgtactaattgaaaagaagaaatatacaaaatgcacaagagctttttatattatatatatatacacattatatacgtgattcatgcattaattacatcactcctagaagctttttattgtagtttcgttcgtgtaacatgcatgcatcccaacttggattgaggcatacgatgaaattatatataaatctgctgtaatatcttttgttttataagattttgaaaaattaataaaaaaatatatatagcatcattttttttgtatggataatttatatagcatcattgaataatgaatattattgaacttgaaaagttgcaaaatatttgatatataagaccctcttacaaactttctccttatttggtgagatattttttttaatatatacacatgtaaagaaaaaattattaggaaataaggaattagctgttaaaaaagagtattgatattgggtactagtgaatcagtggtgcctaacacttctatagatgacggtttatgattgttgagcgacattcgacactaaaagttattttcttaaattatataggactcgatacttaattatactattgcagtatgacaccaaagaatgtactaaacatcagtggtgcttgataccaataataccttttcaacatttttcgttata

SEQ ID NO: 46832 - DNA, 2102 bp, Cannabis sativa
agtcattccaaggcccatctttaattggatagatgttagaatgggtggaattacccaagaaaacatcaactcatggcgtgagactcgaaatgattttgttccaccattgaacaatcacttcaagcagttagatccaccaaacctgagaaatttgtgtgatctacccctatcaacacttaggccacagcggccaataaggggagaaagggcagcaaaacattgcccaaaatagagttggccgaccatgaacaactacccatggtggtaatggctggtcatggccagttgcttaacccagggatgactagccagagtcaaaggcaaagcttggggctagctgaccttagcatacccattcttattgtgtggcagacgaggtcctgtccaatccagagctacaatccaatcaagaaaggccactcaaccaggatcttacaacatcagatccttctgtataagcatagttagattaattaagagacatgataaagggcttagttggttcaaaaccatcaaaccttgagctacataggttaaggggctctccattcttggcatacatcaatgccttacccttgcccaatttcaagattccaatatggaagatgtataccagacgagaagatcctttggcacacatcaagtaccattatagttggaagaccttattgaggtcaaacaatgacaaggcaaaccttcgaaggattatatacaaaggttaatggctgaggccaccaaggtcaaaggcctaacagaagaaggttgttatacaaccatactagggggatccttccattaaatgacatctagaaagataactagaggatctcaacacacaacacgaaggagttcctcgaataagtaggcaatatcataaaactagggtaaactatcatacaagcccagacaggagatcaagttaacaataggaagtctcagggtgttgaacagacccaagacttgctgaatgtctaggccaacactattagtgccagccaatcctcctgtagcaagaatactagaggaaaatgcaacattaacagtttcaatcagaatggtggctaaaaagagaagtacaatacttcccccacaccacaaaaccaaaaggataaggaggagaagtacaagtgctttaccctgctaacaaagaaacttgagaccatttacatggccactcaggctactgtcacatacagaaagccttctcctatcaaaaaggagatgagaaggagggacaaggaaaaattctgccaatttcacaataattttggccacaacacaaacaagtgctgaaaattcaagagggagattaaattcctcataaggaaaaacaatccccacttgtgtcgttatgtgcagattgaccaagctcaggcacaagctgctcagaatggagaccctatgccaccactagtggtgggtaacttgggagtcataattggcagaccccacattgcatgcaagactagtaaggctagggaatgatatgttcaaactctccgtcacgagcctaaaagtgacatcctagtcgtcaaagaaagaggctctaagcaactcaagcttggagagactgccatctcttttagacaggaggtgatgcccaagtcaacttcccacacaatgatccctttgtcattacaatatatatcagtgtcatgacggttgccaggtgcatggtggacagtggagcctcctccaacattatttacaaatcaacctatgaaaagatggggctccaactggcaaacttagcaccttgcacccaagtaatgaatggcttcttttgccaaggcatcgcactcatggggtacatccagctacccttgacagttgcagagaatcccatgacaagaacattgatggcacaattcgtagtaatcaacatgccattagctttcaacactatgataggtcgaccaaccctgtacgacctaaaggcaataacatccatctaccacctatgcctaaagttcccaacacggtatggggtaggatgtttaacgagagaccaacagtgttcttatcactgttaaaacctagctttatttaaagccaagaaagagaagatgccatccaagagctctgacgatgagcctgacaaa

SEQ ID NO: 46833 - DNA, 1314 bp, Cannabis sativa
tggaagcctttggcaacaaggcgtgctttgaaacgttggaagctgccatcttgattgtatttaattttatgaacccatttgcatccgactatgtgaggtatatggacagtagttggatcaaccagtatccatgtacgattgcgacgtagagccaacatttcttctcccatagcacggttccacccctcatgccgaagtgcatcttcgagagagtatggctcatgaagcgagagatcaaatttggcatggtggagatagacttttggcttgaaaatacccgctttggatcgagtaatcataggatgagaaggctttaaaggaggcatcacagtaggagagttgtgaggtgatgattctcgactgtgagcaggtgtcatggtcctgtgaaacagacagaggcgactggttttgtggtgagataacaaaatcattggtaagtatgggagaatttacctgctgtcgtgaaaactctggagactgaggtggtggttctgcaatgaagggactgtcaggtgtgtttgccgaagaagaattgaccaaagtaggtgtatctggtgtagtggcagtcgagtgttgtgtgtgtgtgtctgtgggaagagtgaaccaagtgtgaggagtgtcaagagtaactattctttcaggaacatagttattaaagaagccgtgtgcacatggaaactcttgttcattaaaatgacatgtcgggaaatgtatatacggccatgcgaactgagacatttatagcctttgtgcgcttcactataaccaagatgcactttgtcgagtgaaactggaacttgtgagtttggtatgaacgtagacaagggaagcatgctgaaccgaatatttttagagatttatagtcaggttttatggagaataggacttcatatggagattttccattgaggacagcagtagggagacgattaatgaggtggacagcagtgtgaaaagcatcagtccagtacctaagaggcatatgtgcttgagctaaaagggtgaggccggtttcgactatatgtcgatgcttacgctcagcccttccgttttgttcagaagtgtggggacaagagtgttggaaaacaatcccactttggttgacaatgtctgtgaatgcttggaattcacccccccagtccgttcttaaagctttgatcttcctatcaaattggttttccaccaaggttttgaatctagtaaaggctgagagagcttcggacttgtgttttaaagggaaaagccaagtgtagcgactgtggtcatccacaaaatggatgtaaaacctgaaattagtgtgtgaattaataggtg

SEQ ID NO: 46834 - DNA, 1202 bp, Cannabis sativa
actaagtaatcgagtgttgactcaaaatttggtcaactgatagtggagccttatttattgttgacaatcactacatgtaaataataataataaatgataaaagtgacataggaatttatagaggtgcggccctcttgattaggaggcaatgacctactctccttttagttgtatttactcttgagataatagcatgcagattacaagcttagaacttgtaatttctagctatggctctcttcagtattacaacagtaagaataaagtgttacagattaaaaaactggcaagatcttgtgaagaacttatgaagaaaagaggtttagagcctaggaggccctgggtgcgcatgagacttagagagaaagagttctatgcatgtgagaagcttaatggattgtgagaaaggacttgtggagacctttattacaaaaaaggatagttaaatctctagaatataggactaatatcttgagagaacattcctatctttgtgggttattggaactatcttgtaattcattcatcatgttcggaattgtttgcacaagttggctagccaaccctatttttagggcctggccggcatgtgtccctccatgggttggccaagtatggtttgccaagccttttccacacaacttcattggtcagcttgtttgtacaactttgctattcagcttggttggccagctttccttgcaaaggccaggcctccttggttgaacaggcctctttggtttgacagtcattcttggtcgactagcttgttctcaaaacttggctagcctataagtttccctcgtggcctacaagcttcccttggtcgaccagacatggtcgaccaaggtcttgatggcctatttaactccttttacttattcttacttgatagttttgtttgattgctttagaaccgttgacagttaacatgtcgtgtaaggtgactttgtcctgttattaacaagttgtattccacgtgtccttagttttgactatgtggatatgccacattaggtggactaaatttgagataatatttgccccccaaatccctgttaaaacttatttttaacatgtatgtttgattatattctataatctaacaccccaaacatgaattccctaaaataataaaataaacgcatataaaattgtagaaaaccttacattggtggcagcaaaatattatggctctttct

SEQ ID NO: 46835 - DNA, 752 bp, Cannabis sativa
aggacaaggttattttcgaggaagggagtagtgatagtgaggcccaactagaaagcccactagctattgatattggtgtttggaaacaaagcatcaagagtgccatagagaatacagcccaggagaaaggttcgaaccaaccaaacctttcaaccaacgaaggagctgctgtcccagaagtcattcgagagggtcctgagcgggtgagccgagttcgtatgaagccgagttggctccgagatttcgtaatgatggagcggcgctgaagtttggctaaggatcagctaaatgtagttattttgctattttatttctgccggtttttttcagaaacatatataaacaattctcatgtatttctttttttatgaaatgaattagacagtctagcttggagacttgtcctgtctcgaagaggacttcctttgctatcattgaaggttattgaccttaaacttgccaatagtcaatagaatgaagatttcacaaaagcagtgttcagcgaagaagaccctaagtttatttctagtctgcgcagtaaaactctcttgtacacaatacattgatctggaatttttctaagaatggagagtatagcgtacaaagcgagtttcgagttgccatgaaccaaattaaagtaactgagagttcagatacaatgtaaatcgaagcactttggatgtcaatttaaaatatgagagaaagttaaatcactttttttggaaacattgccacttgtgactaccaactaa

SEQ ID NO: 46836 - DNA, 1050 bp, Cannabis sativa
aattatatatacaaaaacttaacataacaaaaataacgttatttttgaaaataattgtcaaaataaggtggcccatgaaaatttcccaaatatgaatgtacagtttttttaataagtatttttagggatttggtttttttgttttttttttctctcacaaaaatgcctttttttttttacaaaaatatgaattgttgttttcataataacatcttgtacattttctattatatttgtatcatttttttgaaaacaataaacaaattcattaaaaatataatatatgtgtaattataaatactatacattttatattcatcaaataaatattaaacatgataatcagaataaatatatccaacaaagataagaatatttatatctagccaacacaagttgtttattcatatgagggacatgcacaattaatttatgagcaacacatactagagataatcctagaaatatggataacaaacttgtaaaaacttctaataatgatcataaaattatttgagtagaaaactctagtagttaaagtaattatagttgtaaaatcttggtaatagactgtaatccattgtcatcatcagcgtcacataatttgttttaaaaactcgctatcatttctctaaaagcttgaagggacaatagtgttttaactacacataaagtactatacattaataggatgaaaataaaaataatgaggaaataaatattattgcaaatttatattttattttcaccacaaataaacaaaataagcatcaatagataaaatttataaaaaatactaacaatagtccttataaagaaagtagtgaattatagaaaaactataagaaaaatgtaaaatgacttattttgtcaaatgcaattagtaattagtgcttaaagtaaatcaacaagtattaattcaatcatttaaataactattataactctaataactttataactcaaataactaataacttaaaattatttaataacttaaattatgtttgtaataataaatttaacatactttacaaaaaaaaaaaaaaa

SEQ ID NO: 46837 - DNA, 1040 bp, Cannabis sativa
gtttatttgaagccacatgagaaaatatagatgactgaaatttgttttattaaacctctctaaactaaatgtacgtaattaacacaaaattttaaatttctgtacacaaataaaaaaaagagaagggaaggtaatttagtgggctataaagcctataattcacgggtggccctattctaaccgtagagaaagcacttttgttagagttaattaattaaccatatatacgcgagaaaaggactcacttcatatgggatttcctcacaaccatatatatctcttccttcacgggagctgaaatcaatcatatcagaaggacgttgttgtgtggttaggtactgttttatatatatatatatcaaccaatatgttggtatgtaaatacttaaaagaaaaagtagaagaaaaacgaactcactaacttagtcatgaagagtcttcattcattcatttacaccaatcagttgtgtaatgtttcttaggaacacaaccctttgaacagacgtaataaatgtgtatagtgatggaccaggtccaagtgggttcccataaatgttgttctcatgtgaattataagtcatagcctctataagccatagcggcatagccaacaaaatatcttctttttgctacttacaaaaatactatttttgggttaatttttacaaaaatactgcaacacggcaaaaattacttttatactgtcttaactaattttttttcttttatactgtaaacacaaaaaaataaataaataaataaataagacctccatcttccacactcacggacagaaccaccacaggaacaccatagcaatcagaaaacaaccatcaattccggtaatattaaaaaaaaaaatcaaatcgacgtcaaataaataatcatagcaaaacaactgtagaacaacactaaagaaaatcaaacaaaacaaaggaaatcataattaaaaaaaactaaaaaatgttctgcacagcctcaatagccaatgcaatagcagttatatttgcaagtccaatcttaaaatatcagaataaaaa

SEQ ID NO: 46838 - DNA, 2342 bp, Cannabis sativa
aatgttaattacaattaatggtaataaaagatttggacatccacataattaataatatttataacatttttaaatttttataattttttaaataatttagatatattgccaaaaataggtttgatttcttttttttttttctttctcaaataggtgtgataaactaaaatattaaatattttgttatgggtattgtaaactatttagggtttttttttttctttttaaatttataagaataataatataattataacatataagaataataatataattataacaaattctaccattatattaatatacatttttgtatgcggaaattgggaaagagattgaaaataaaaagtttacgcgaacaatactcatatagtaaagaataatattataagtggaaaaatacaccaatcttttgcatacacattaaggatatgacccaatatatactccaaataaaacaaataatgcaaatccttattgaccttgtttttgtaccactttcttcaagtccccaaatggacatttatgtaccaataccatgcactttcaaattcccccaaatataattatatagccatatttgtcaatgaagcaaattcaaatgggttgaaagtccaaattttaaccccgctgtcgtgttgcttgtgtaacatattatccctttagttgttgtttggcatttggtatgtaaaacattgctagaaaaaactaccttgtttgtaatttgtaaagcctctattctttcctaatggaaaatcaaagatgaaagatctatgagttagcccatatttgattaaccaaacaaataaatgattctccaattttttttctctctctctctatttattttttgattttttctttacatacgtattataagtaataagttgttcacattaatgataaatttttttttgaagattgattcgctatttattattctgtacaaaatgatctttgttaatttacttatttatcgagctaactttttagtctcaacataaattttttgtgattaaatataacttttagtcataacaaaaagttacttataactaaaatatactatttaaatacaaattgttactaatttaattttagtcacaatatgtattatgattaaaaacacatttattcacaacaaattgtgatttttgtgactaatacttttagtcacaacagaagaataataatttataattagtcacaaattttgttatgattgaatagagcattgctatgaggtactaagatgcctaacaccattatgagatgacgtcctataattagttagcggctctttatacaagcacaatttgaccaatttatatgacattttttttagttttaagtatttttatggtatttgatatgccatatatatgtaaattaggttttcaaagcccatatttaatgtttttatttgtttaggcagttttatttgtcactggtactgaaaaagtcgtcggagtttgctgtgagctccagaaaattcgcaggtgccggaaaagccaccggagttgctgccggtgccggaaaagtcgttgaaattggcattgtccctggaaaaatcaccaagaaagaggtttcttggtaatttttccagtgatttcgtcggtgacaatgccgatttcgacgacttttttggcgtgagcagcaactctggtgacttttcaaacaccggcagctactccagcaacttttttggcactgacaataaactctggaaaagtcgtcagaattggtattgtcgccgaaaaattattagaaaaattagccagaacccggtttcttggtgatttttttagtgatttttccggcgacaatgccaatttccgacgacttttttggtgtcggtagcaactccgatgacttttccggcaccgacagctactccgtcgacttttttggtgctggtagcaaactttggcgacttttccaacaccagtgacaactccaacgatcattgtagtttcatttttttaaaaaaaaaatatgaagagaattttaatatttttttatggtaattcaaagtggcatgtcctatatgtgttaagttctgattttaaatactttattttttcctattaagatttcctactatattcatgtaaactagctttttttttttttttgcattttgatttgattgtagcctgaataagcgtccatgaagcttaaaattttgtgccctactattgcgtctacgagctgatcgattcttagaagtggaaaacagtctttagggcatgctttattgaggtttttgaaatcaatacagactcgtcatttcttgtttggcttaggcacgagtacgggattcgcgacccaagccgggt

SEQ ID NO: 46839 - DNA, 1286 bp, Cannabis sativa
tatataataaaaattaaaaattttgttaaaaaaattaagttaaaatatttttaacttaatattaaatcactaaatatatatttttatataattatattaataataataattttttattttattatatttaaagaaaccgtgtcaaacatatcaaactcgtgttaagcaagtcgtgtcgtatttgactcgtttttatttcgtgtcaagtcgtgtcgacctatatctaattttctcgactctaactcataaaattcatatcatatttgtgttcgtgtgttgtgtcgaaacatattttgccacccttgatcccaacatctaacgataaacagtcattaataattgaaaatctttttttctattttgagaaaaacactaattagtattaattataatttcctaatcaatcttcataataatttttttttttttttttttttgcagtattagttatatttataatatttttttgaacaaagattatgaattttattcaataacattcgaccattacaaatttacaatatcctttatggtgatagtcatcataagtacaatctaacaaagtataaagcaaaaatcttatgaaatgcacccattaagaatgaaacttttcaaaaatagttcaaggtgattttttagcattgtcattatgtatatactatataaacttttaataaataaatatcatcaaatcaaataagtataaaattttgaggatttcttatatgtattttttatttgaatagtgctatagttattctattattataattttttagttaattctcgtgtttaaaaaaatatacacttgaatatttttttttatgtctttattatagttataataatatttttataaaattttaaaaaacagtaaataatttatagtattaatatttttttaaacaaacataataaactgaaatattataaactctattttcagtacttaagctatttataatttttcaaaattttacaaaaataaatatcattttgttagcattctttttttttaatgaaaataatttttattagacagaaacatccgctaatacagaggactgaagagcaaggggaatatcactctcagaaaatagacgacctgaccaataacaagcatcacgtgccatacagtgcgcgactttgttagcagaccgtttgatatgaccaatagaaacattacttaaagaatataaaataacttgacaatctttaacaaataaaccaaaattaaaaggtatagataccgaactaagaatagtttgaacaactaaaatgcaatc

SEQ ID NO: 46840 - DNA, 957 bp, Cannabis sativa
  modified_base (902)..(905): a, c, t, g, unknown or other
cggtttagttgctggttaactttaagtgcctaaccacaaacttctatatgctgtatacaattgaattgaattatcttttcatctggacacactattctattctcaatacaggcttgtgatgtaaattgaagagttaactttgtggtcaaagaaagctgctgcatatgaatcattgaccattattgattgaggtgatgactacggggcttactgtataatgtatttgcactagctatataccagctagtagctagtgctgccaacaatggcgccacttgtacttacccatatcttgtttgctgttgacatgaccactccagtcgctctatgcgactcgtctttgagttatactaatacacgacacgcctcttcaatttttataaaattatgtatactttttgatccaaaaataaagtttataggttcaccaaagtgcacatatattagtggaaatacttgtgcaacttaacgaatcctgtcacctcagatagtgttgcgatcttctttggttacactgcaaaatttttaattcaattttttttgttactaatggctttgatgtttaagagacattcactacaggaaatattagatatactgatagagaagtttatcggtaaaaaaggctaatttcagtcagtaaatattagatatactaaccacgttattgacctgccgataatacgtggttagtattattcattaaaaaattgataataacggtaggattctgttgctattgcattttgaaattaaaaaatttaacaattaaatataatatttataaagggtaactactcaatggttacatttttatatatttttcttttatctataatagtaggttaccaataagtaaaactttaatttttagaatcaattaattataattaactattttnnnnaaataattaattgaatatttaataagatgttttttaacaactaataattata

SEQ ID NO: 46841 - DNA, 1543 bp, Cannabis sativa
gctgtcactcccatcaaggaccagcaaacatgtggtatatatattatacttacatacatacatgcatgccgataaatagctctccatatattatatacataatttatacatataatatatgaagagctatttatctgcatgcatgttatacatatatataagagtgttgtgtacatgcatgccaacttttaatcctagctagaaatacaatattaattaatatttatcatacgtaccaaaattggtaataaaagtatagaagtggatgtttgattttggtgtcttaatgataaaatgcgaatctgatacacatagatccaataattacattctctatacaattgttaataacaatatagaagaaatgcatgatagtaataataataacattacaatattacattacgtacacaggtagttgctgggtgttctcagcggtggcagcaacagagggaatcacaaaaataaagaaagggaaactaatctccctatctgagcaacaaatccttgactgtgacacaaacccagacgaccaaggatgccgaggaggactaatggagaacgccttcaatttcatagccaaaaatggaggcataacatctgaatacgcatacccatacaaagcagaacagagcacatgtgccaccacaaagagattgtacaacgtggccaagatcaagggctaccaagcagtcccccaaaacagcgaggccgagctcctcaaggccgtggcgccccagcctgtatccgtggccatcgagggagggggccaatacttccaattctactcctctggtgttttcactggtgattgcggtaccacacttgaccatggggtcaccgttgttggttatggtacggacgaggaggagggcactaaatactggcttgttaagaattcgtggggcacgaattggggtgaagagggttatgtcaggattcaaagagatgtgggtcagaaacaaggtctttgtggtattgccatggatgcatcttaccctgttgtctagctacctatagtttcttttgaatctgatcccccattattattcttattattgcatatgtatatataatgttctttttttgaagattttatttgctttaatgggttgtactttcagttagaataaaagtttaattattgtttcagctctctgtaaatacatttaattgttttgggtcttatagttagttttgtatctgcaatgcatcaacatcactcctgcgttttctgttttgtttgaactctttttcgagattaagaaagtgttcaatattaatccttaattacaaaataaagtatatatgaacttttggaaaattaaatgtagcaaccacgggccctatttgtttcggcctttaggataatttttaatttaaaatatcttacaaaattttgagaactttaaaaaaaatttaaccagccgataaaagttttaagattatttgaacattattttctatattttaatcattttaattttttttttaaattttacaatatattttaaataaattatgtacttgaaaaaaaattaaa

SEQ ID NO: 46842 - DNA, 1423 bp, Cannabis sativa
  modified_base (1367)..(1384): a, c, t, g, unknown or other
taatctttaagtgaccacaacttttttgtgtcactatatagtgtcactaaaagcctaatttgtagtagtgaatgtgcatactccttccaatcaaaaagatctagtggtgatggacccttatctaagcactcatctgcctccatgagttctgccaccagcaagactgggagcaacaacccctctggcagggttcactccaggcaagcaagaaattggaaccaccagcactcattacactggagaaactgagttgggtacatgagagccatgtatcagagaaccataagtggtgattggcgatgataatgaattacaaaacatgagggataccttggggcaagtgtaaaatcatactaacaccctccaccatgattagaaggatacctgggtagccatgaacctggtgtttgtactataaaaatggcgattccaggagtggatggatcaacaaactgagattttgagagcccaataggtaaagattgataatcaatccaggcaggcaaccaaactgatcaaacggtttaatcagtagactagacagtaacaagtggaaaataatctacttgaaagagatccgaacaggggaaaaggcccctatatcccaaatgaactatagtatgggccagaggaatgtccgaccaattatacttaggagacccaggagggtggactgtctaatctgaggctagtgggccacacaatagacgagcaagaaacccattatcttggaagaaaagaccaacataacttctgtcctcagacagatataccgaaccaaccaaatggagaattttgtgggcctataactattaataagcaggatggacaagttcaagtttataatcaaactcattttgtcggacaacagtcaggtcgttcatagtcatgtagtggtcaatccttcacaaacaggaatgatgatagggcgaatagtagagaccacaccaaccgtagtcgtaataattatcatactcattaggagaatcccccgaacaatctagaaatgattttagggatgatatgaatcgcatatgagggataattttttcaaattcaaaggctactaatatctaaaactaatttaaattaataaaaattaattttattctaataattagatttttatttgaaaattaagattctacacaaaattctaccaaaaattgaatttcatttcattgaaaaacgatttctaaaacttgaaaaaaatcacaaaaaaagtgcacatactcttccgcgcgcaagggaggagatggccgagagaaaggactacatgcaaccttcttgaccaagctagcttgacgtgactgggcttcgaacaacctgttgggttttgtgcgctaaataaaacccattacaatctnnnnnnnnnnnnnnnnnnaattttgaagtgatttatgtttacatgtttatggtttaa

SEQ ID NO: 46843 - DNA, 1746 bp, Cannabis sativa
ataagattgttagtatcttttttaattttaacttaatttcaataacatcatatgttttgtaatataccgtggtgtaggaaatccttcctgtccacatattggcttgtcacatataattttttccttgcgattgtataaatctattttttatgacatccgtcacatatgtaagatattacatattttattttatatagagattattttatatatacattattaaaaaagtttagaattttgaaagaatatttaaattaacaaaaaactaattatttattagacaaataaaaagcttattacagtttacatataaaaaattataatattttttaaatatgagattcttacacagttatatcatagagaaaattgaaatttccaaaaaaaaaattaataataaagatttatataaaaaaaaatatgatcaatcttatcagtcttaaaaatatatatataaataaatttttttaattatatatctgaagcaatatattaaattatatattatataataatgagaacagtaacttgttttttatattaaaatacaatgaaattcaaatcatgaagcgataagcttcaagacagaaccagtgtgatgatgaaaattaaagacaaaaatgatagtgcagctcttaatgaaaaattgtatattcaaataaaaaattttgactgcacattatttcaagtatatataataactaaaattaaataaatacagattaccacaaaagcctcgttgagtcattatttcaaacatataaactgcaaaatatgacatacaaaattgactcaatcaacataataaaatttagtatacttgttaggagtcttatttggcatggaagagaagatagtagatcaaattttgtgtggttggattttaagtcaacagtgatataaattaagggggtaatttattcgtagaatgactactcaacctattacacagaattttttttattgccatttttttattatgagggattaaaattggttaaagttgagatttgagactacatattttattttatatagagattattttatatatagagagattttccaagcttagctggaccaaactaattcttgagcagaggtgtgaaaatttttattgtttagttcacgttggaaaagaagagaataaatttgtagtgatgttgttgtgttaactttaaatctttgtttttttaggaaggattggtttatgctgttgagttttcacatagaagtggtagagatttggttaacatggccaaaaagaggactaatgtcattcccattattgaagatgctagacaccctcctaagtacatgatgttagttgggatggttgatgttatctttttcgatgttgttcaacctgatcaggtttgattgattgttcaatcgggaacacccctttcatgtttctattttaacattgagtattattataatgattctaaaattttttaagcaactcgtatagattattgtacatttctgctgcatatgatgatatactcggattcccctacacgatgtaatgaatgatgtaactcgagttttccgtattttcttgtcatttgggactttggattacctgtcgtcgactcattgtcattgattggaaaaaggaaattatagataaaaataaattgagaatttaaccccgttaacctcagcaaaaaaaaaatatttaaaaaaaaatcacccactaatttctcataaaccaagaaattctgttatatagccacactt

SEQ ID NO: 46844 - DNA, 2444 bp, Cannabis sativa
tatatatttaatatatttaatatttaaattttaaataaaaataaaataaaaaataaaaataaaaataaaaaataattaaaatctattacccttaatgacattccttacaaattagtgggggaagttctccattttttttccctttatttaatcaagtccttcatttcttaattttaataatgtaagtaaacaaatataagaaaatgattattttatcattaattctcattacttgttagtaaacaccaaacaaagatagaaaataaggtgtgattggtttaggatttgaaaactattttatgattttgaaaattaaaatggtggggtccacctaagaattcttgattagttgagtattttcaaaaacaaaacttgaatactattttgagttttaggctaaaaaataaaaataccatttttatgtttttgtgtttttaaatcattgaatctaaaaactctccaattattctcttacttttttattttgagattcccaaccaatcacatattaaattttttaaaactcaaaaacattaaatcacactacaaccaatcacatatttagaaacaaattttcacttataaaattgaaattttgtatttccaaaacacatttttaaaaaaacatatttttgaatcacataagagaaaagaaaaaaatagtattggtatcaaaaatttaatatacactaaatctacgaatataaattcaaattttccttgctttactttccttgacgtgttgtgttagtaaagctaaaataaaatcgtgaggaggctgaaaacgaagagagacgccattctcaataggcaaagcatgttgattctcctccgcagaaacggccccaaacttttgcacaatcccattctcaactccccattcttcactcgcctccacacatccgccgctgcctcgccactcccacccaccaccaccggcctctatggcttcgatcacttgaaaacccccaaaggcttccaccgtttcctcgatgatgctatccaaaggtataaatatatacacttaattcctctcactttagtttacaccaacgctaatacatccccttattcgttttttcttttgtgagaaggtccggagagctggttacgtacattgcaacaatgccttcttcaacggaaattatcaaagccatggacgaaatttcagacacagtatgttttaattttcagctcaagtttcgattctataatgttttttttttgtgcgaatttttgtgcgaatttgattgtatttttgattgtattattgattgtattatttttttttttttttttttgtatgtgttttgtaggtttgttccgttgttgactccgcagagctttgtagacacactcatccggacaggtttatttattttcatattcagtttggccttaaaatttctcatttttgaattgctcacattttctattcgaccagggaatttgttgaggaagcaaacaatgcgtggatgaaaattaacgagtatctacatgtgaggtgaccgtgtgaactggctttaacttgctctagattctgcttttgtttttgttgttgtattcatgcaatgtatgaacttgaactaattcagtgagttgaaagtgaactgaccatgataagataattttgctcagtggtagtggcaaacacttgcttggcatagtttttgagaattaagtcaagtaagatgacattaataataataagaagaagaattaaatgcacaattccaattatgtgccaacgctgtagtttctgttcatgttattaatttgtatttttttgcttttagtagttgtaattgtgatttgttcctaatgaaactttttcattgttacattcagtatcttaatactaatcataccctttatgatgccgtgaaaaaagctgagcaagaaagtcatctgctcacggaggaagctcaaagagcagcgcgttacctgcgtattgactttgagaggggtggaattcatctttctactggtacttattgtttttaattcttatttctgttaaagctttgatctaatctctggaataataccatgttcttttcactttccagacaaactagatcgagtaaatcaactaagcatagaaatttctcaactctgcagagagtaagtttcatgttgctgttaattcttgcatgtactcgttcatgtttcttttaactgatgaactttgataaaaatcagagtaaaaagtttcaacaagaaacataagggtaaccttcaagcaaaagataaataaataaaatacgcatcaaataatttctgtcaattatgcatataaattaaacgaaaagaacataatctagtgtttcacctaaatttagttgctcgaagtaagcaattataatattaatatgttggcatagactgactggctggctcacttcttattcattgtttatttccatgtgtttacactcttttgt

SEQ ID NO: 46845 - DNA, 1064 bp, Cannabis sativa
agggcataaaacccaacagaagtcccatgcagcttgtatatgggctttctctgctgctcgattatctttaaagcttgtaaaagtataccctgaatgatacctcctggtagggcggcattgccctgagtcgtcgcaggggataacaactccagtagtcgcagctggtgcgttaggcaggttggtgcggttatttatgccttgatcgcccaaacggggatcatgaggctcttcatcgttctggggcgtctgggagagcgccgtaaaaactgcgttaaggtgatcacgaagatcacccatatgaacttggtatctttctccttgcggtgtttccaccaaacctgacctggtgtacttgctaggagtgcgactttgtgaagacgaagagtcgaactcagcgtcattctcctcgtttcatggttggggtctactgcgagggttacaacgttctagatcttctttcagttgtgcctcgcggttaaggtttcttgcagattgatctctcgacattggttgatttagatcgagcccctcttgacctgtccttcattccctgcgagtattgttggttcgtcgtctagaggtagttacttgtggattatccgagagggtagtgggtactcgaggaggatgccgtgtcctgttctgtccgtcaatttcggcctgtaaagcccgcatttgatcctgtatcgtcgtgtactggtcggtggttaattgaacaatgccttcagataccacgataggtgtgataggcgggaattgtcccactgtggctgctggtctggatgtttccccaatgtgagcagcagtctcagggaacaaattaagcgacgttatgttcgtccatcctactccaccgttgatggtatcgacgggaggtaccctgtttcctggaagtgggacattcattgtcccaatgttgattgatccattgttgacgtctccatttgtttgatttccagccattgtgattctttttctaaatcaagaaagtattgcgttcccacagacggcgccaaatgttattgaaggaatttttacaacaccaaaaataaataataataata

SEQ ID NO: 46846 - DNA, 1200 bp, Cannabis sativa
cactacaccaaaatatagtattagtgacacttcaattagtaacatttcttaaaaaatgccacaataggacaattttagttacatttaataaaaaatgtcactaatttgttattatttaattataaaataataatgaaacatagcaatagtaacattttaaaaaaaatgtcacaaattatcatatagtgacattttatttactggcatttgtttctaaaatgtcataaaacattagttttagtgacattttgatcatgatttaatacatttaatttagtaacattataaaatgtcattaaaatctattttgtgacattttattggtgagattatttataatatcgattaagaaattaatttttttcattaaaaaaatgaaaaattaatttaacaaactccctccttctactccactgctacccccactaactagctgcgcctcactcaacagcccaacctctctttttctctttcaactcaaattataccgcctactggaatttgtgatgtcgacacaaaaattgcgatggagaaagaaggcgagatcaacttcggagttggccgtattgcctcctcccatctttcggttagcatttgtctttcagatcaaggtaatgattttcttacaggcataatcagagagaggcgccatataatttttctgaaatttcatttcgtttatccattggttcataaatcaacaagagaaatgatgtgtttagttaattataaacattttatatatgtaaacatcgatttcaccttaacattattatttacctgttattgaagataggtttttatatattttagatttagtggaaacttatctagatgcggaacttggttattttttttactatatgtatatactaggtggctagaattttaatgtttaaaattcgtgtagtttctttgccatattgtatatttatctatttcttgactctcagattatttctcagctttttccttggttctactgatgcgtagggcgtattacagggagacattgatgaccagtaacatagaaaacgatcatgagagctatatatatatatggcatatatgagtacagtaaagggcgttacactttatcacctccttcaagctcgaattacatataatttatatatatatatatatatcttaattatatatttatacctttctctttcttatacttgcactaattatgca

SEQ ID NO: 46847 - DNA, 1413 bp, Cannabis sativa
ttcatgttcatataaatttgtaataatatgtataatattagtgatataattcttttaataatctttattatcacaaaatatacataaatatatgggtaaaaaactaggactagtagctagtaactctaccaaatcaggtaagcctaatataaaaatcttatattttagataagtaggtaaaaattaaaacatgtaagatttgtttgattattctttgagcatgatctctatagctaatttgaacaaaacagtaccaactgctatattattgatgatatacatatatgtaaattaatttccatgaccaaacaaatatattgagaacacataaatcaaagaattactgacgatcctatatacttatatatatatatatataaaatctgcatagatagactaataccaaattaataagctaattatctaattaaagtcgatcagttttgattaaaattataaacgaaagactgaaagagatcgaagttccctaaaaatatgaaatgataagaaaccaatcaaatgatcaaattaacactagaaaatgatcatgacaatatgattaatattattacttacagccataagggatatggatgatcgaatagcaaatgaagaagatgtcgaaattaagattgtagtggctggtatagctagaaaaataaatctcctgctgagtacaaatgaaagaatatatcgatggttacaaagtttacttataagacttgtttacctgtgattacattaatgtaaacaccccggcctaaatgtctttaagtatgtttgctagctagctagctatagaactatataataaataatatgtacgctagcttgtggaattaaacttaattgtttttttcccttaaaaaaataaataaattaacaattaattgtttttttgtcctctactttgcagtaacctgttctctttggcagttttctttcactgtttttttaatttttattagtaacaaattaattactaattctacaagcaatcatttgattcaatttatacataaatatattataagacagtattttgtaaaaaaaaatctatatataagacagagtaataatgtgttaaactctaacttttaataaatgaattagtcttatattaaatattagtggtgtccaaatatgttaagtcccatattaataataatgtatcgaaattcaatatcatacataaaatacataatgaaatcctaacattttaccatacacacctatactcatacttcttcatgcagtacaattttgcattctaataaaataatatttttttaagttatgtttggaagttaaatttttgcaaagaaagaaaaaaaatagaaaataataagctcttaaatatagtatgaaaagaaaaattatatattaaaaaacactaaattaataaaaatttca

SEQ ID NO: 46848 - DNA, 3130 bp, Cannabis sativa
ttgttgcaaaattgttacaaatctacaaactagactattattggcctttgttatgaaaagaagtttcctattcttgtctttctaaggatgcattaattttcacttttgtgtttttgcattattttcatcttcaaattagagtaattgttgtatttaatatggaaaataaatagttgttgattttgtaattgttataccacaacaacttctctgttggatttaacttattcccagctgctttgtataatggtttttccatagaataggccaactgatataagtatgccttttctgtgtctgattttggagtgttgaaataatgaaattatcttttaacttaaccaagaaattaaaataagtgtaattataatttatttaatattgtggggctaatagggtaggagttgagattcctaagattgaagtaagatttgagcatttattaattcaaggagatactgtggccatgagttggtttttagaatttgttcttgattagagaacatgtgcttatatcagcctgcagcaatcatggtctcacgacggcgagatgacagtctgtggaagacattgaagttggcacgagatacgatacattactcgagagacatgaaagcaactgctgtggctagctggtcagaacaataccagtttgatcactgactaataagatgagagaaatgagaaaaatcaattgtctcttgaggcatacttggattggacatttgtgtttgtatatatatgaatgaacatgtttcaattctaatcacaaatcaaaacagatataaaatgtagtaatttcctaataaaacttatgctttgtaatgctctcgcttcaagttttcattcgactttcccacagacttatgactcttatatgggtacgttactttgactgcttcctggaaccaacacgagtgtttccagtgtgcttcgtcctcactcgtactttcttagaaaacttcccaggaggtcatccaaacacgcttaactttggagctcttaagttatgggatgcacttgttgatataaataatattttaagcccttttcaactgtgtagtcttatacctatacagtctcggaatcatgataggactattgattgtcaaatgcttggtcttgcttttcctcacatcaaacaccatgagcttattaggtccctttataaatagcagcttattgtctagtctcttacataattattatttgttatgatgtttgtgactagagagaaaacaaagccttgtgagatctcatttctactgatttgattaggttttagattaatcaagctgttgaaaatatcaattacacattattgtttctcttctttttactttattcaaaagaaaaacactatatgttgttcaaccaaacatgatctcctacttttgctgtatccattctactttttctgttttttcaatcatgtattgtgattactaagctttatagatctgttttgtgattataaatattgaaacatgttcattcatttaaaaattcagtaaaaatattctgtatgcacataatctttctgaggaacaaattctaagaagagcaacaagaatagcagaagagaagagtcaggccaaaagaagcacagaagcattaacaaaccgaattagtggaatgagagatgaagcgacgaatagggggggaatggcctattaatcgtcgttggcccttcccttaactgagttgtgtaggttctcgaattccatgtctagttgggaattggtttcgattcgaagcagtcaaacacaaaaagccaagaatattgtatataacagattagagtatgaacttgaaaaaacaccacaaaatcaaattcaaagacataaaaatttaccttatatgtgctaacatgcaagttcacaacatttcaagagcaattgagattcacaagaaatataatcaaatctttaaaccaatatactgagtttgagtctgagtctgagttgagttcctttctttttagtttttgcttctttttgttaaatggtaaaatcttcaattttattggaaaaaccattatgcaaaatcctactggtttaaatgtttataacacatatacaaaatcaacactttagaaagccaagaatagataactctgttcatagctgatattgaacaatatgatcagctagttcaaaagaaaataaaaatctcattcttatgcattgtaatcaaactcatcattagtacaaagcaactaaaatatgactttttcattaatagataatgtttctaaaaacggcgaaatccacaacaaggcatccttcaactctgaatctttctcgggttgctgacaatgagtaataactctgagatgcttccaattaaagaaggtataacggtgtatcttcttcaaatcttctggccatatgagaaccttcaagtatataaagatttgaaaaaaaacatataagcattaatacaatattgtataacaaaagatttgagattcacaagaaaatttatcatatctgtaaaccattttgtgtcatagccagactgattctcgtcatcattagttacaatttttccatttatcgaattagatgactctattgatatgctgaaatcgacacaacctttataataaaagtactctaatcttggagctgattcaacttcaacatgggacagtttacaagaaaggaaaggttcctcaaaagtgagacttttcaattgttgacttcaaattctccaaacgaggaatattaaaaataagagcttccaacgatggctgatgatcattcgcgcaattacttaaagaaaggtttctaattttcttgcaagcatagaaattgagtttgtcaaagttaagctgacatagtttcaaagattcaagatttatggcttcaacttgtaatgtatacataatctttatacgctcaaattccaagaacttgaggcttaaactttgtatttgaccagatgctgaattctttactattgatgatcagtttcgattacaaagttcaagccttaggttcatggaatttgaatacttagacatttatatcatgagtcacatcttcaagtcgaagccataaatctggagtctttggtaccagagaatgttactttgaacaaaatagatttctcttcttgcaagaaa

SEQ ID NO: 46849 - DNA, 1153 bp, Cannabis sativa
tttttttcaattatcactattcaccacattaataataagtttaattcaacaataaaataaagtaaataaataaaagaccgaccctattctggtgaacaggctgaagtgcccataagccttctgcaaagcgatcaagagcgtaaccttcaacatacaatgtgttaggcataggccagtagagcattgctgcgtttagaacctgaacggaaagctttagaggtaaaaagagagaaacccaaattaagaaaggcacggaagaatgaaacgatatgagtccatttacgttacgtttggatgagaaattaggcaatccacaaccgatgagagagtgcgagctacgggtatagcatcgcccgcgtatccaccaatggatgctccgactcccgtcgggactatcattacgctcgtgtaatccctcctaaactgcttatcgagacggagttcaaatatcacaaaaactttctcagaatttagattctcattctcagagaagaggaagaagagctgaccttggccgagtgattgagaccgagacataaaatggtacttctacaactgctccgcttcctactgaacggtgtggatttttgggcgaaggacgacaggaatggacacccgagattacagaccgccatttttgcgaagtagcaaaaactccccagagtgttcacttatcctacggcgccgtctgcttcaattccggtgggctgaccactttttttttttttttggaaaagaaaggcgttcattcgttaaacagaaaacttattacaaaatacattcctagtaatggagaaaacatcaaccaacccaaaacagttatggggaggggtacttaagcccacctagctaagttatggggaggggtacttgaggccatatcacttaaattattaattttttttatttttacactctaaaataaatttttttattatatttataaaaatttatataacaactcatataacaactaatggaacaacttaaatcgcaactcaaactcatatatcaaatggagcaacttaaatcataacccatcgtaaaaataaaaaataaaaaaatatatataatatatatactaggcggcaactacgttgtgtttcattatatatttacatattatattattttacatattcataaattttaa

SEQ ID NO: 46850 - DNA, 1528 bp, Cannabis sativa
cgccgctaatactaatttgaataaataagcgggtattttctcgcatttattccacccctttaataccggcggagtgggggatccaccgctaataatgataactcgccggtattgttgtttttaaattatatttttattttttttttaaaataaatactaatactagcggactccctaaatccgccagtaataacctcattattaggggcggaccttccctgccagtaataggtccgcccctaattatcaaaattgctgtagtgacatttttttaatctctttgttggtccttgcattatattgcaatagagtggtaatatcttgattttcttccgttgcaataatatctctaacaattcccacacacagattctttggacatcacagtacagctcgcaaataaaagaataaagacagttctcataaataataggagttaataaacactccttataaagaaatattaaaaaaaaaatggggttgaaaatgtgaaactaagatagtatcaattttttcgttatataaaatgaaaaaaaaaaaaattaatagagaaattattatcattctcatgctagtttgtgataatattattaagtttatgagattttgtacacattaatttgtcgaatattgtattgtcattcaatattcactaaaatttatatgtgcaattatttttgtaattttgggttgcgatttagattacttttctaaatttctgtaaacataaaataaatgaattttaattttattgttcaaatggtgacgtggcattagttatcaactaactagaaaaatttcagctaagcctaagccatagttagtttttatatgagtctaacaaaaactcatttatatatatgtatatatagtttccttttgaaaagctctcttaccctccgaactatatgggatttgacccacccacctttaacttatccataaatccaaaaaaatttttaaaaaaaatcacatttttcggatcatatatcttatttattgatatttatatatatgtattctaaatcaaaattcaaaatgagttagtcttacagttacagtagcgtgtttgtgtttgaggagagagagacaatgaggatggaaggggagagtaatggtaatggtaatgttaatggtaatggtaatggtaatggtaatgttaatggtaatggagtagtatcagcttcttccaacggtaggaatcatttggttttcgcttattatgtcactggccatggctttggtcatgccactcgtgtagttgaggtatatacatatacatatcatctccaactcatcactcatcataatcgtattcatttgtatataattgatgtgttgcatttgcaggtggtgcgccatctgatcatggctggccatgacgtccatgtggtcactgctgctcctcccttcgttttcacttctgaaattcaatcccctcgtctattccttcgcaaggtttttattattttcattgatatattaaactagttatttgagatctgaaattgaatcaacttttctaaat

SEQ ID NO: 46851 - DNA, 1574 bp, Cannabis sativa
ttgtcttaaattttgagaattattttcctgttttagggaagccaattttttttgtaatgaatttctcgctgttttccaagccttacagttgcgatattttaatgcttaaatagcaaaagatcggaaacggtgaaaagttatagttgtgaatggatgagattcgagataagggatacaaggggccagtttggttaagtggtaagaaaaagtagctgtgagttggaaaagcttaatacgagttagctggtaaatacaaaatgaccataattatcaatatatctgtgttttgttcatataaattcatacgtgctatttataatttttttatgaaaatatttgttaacaatatacttttctaataatatttatttatttattttaaaaagtatctattaaaaatgattagaaaatttatcttttaaataaaaaaaatcaatataaatagtttattatatatatgtattaaaattaaaataaatatggaccataacaagtatttcaaaatattctacgttgagtcaaatatatatgacacaatacaattattgtatatagatatatgacacaatacaatactttggacttatcgtacacagtccagtccatgaggcagtgattgtatgatgacttggcaagttgagcacggtgatagttgttcataccgtgtcccttgattgtggataatctatgtagttttcttttttggcttgatattactcctgtttgagatttgtggaaagtaatttcctgattctatgcaaaatggtaaaagggaactatcgttggcttctaagaacatgctggtagaccctttcggctacatggagctataagtcctctaggtacgggctacacttggtagagactcgtctgtgtgagtaatgcgagtgccttctcgaaaagccaggctgatattgggcttggcccaatctttgtcttctagggcccactgatgggctttaataatccatcttgtgtccacgtgtcttgccaaaaacataaataacattcatccataagcttccagaatgttgtggattgtggaagcttgcttcagtctacatagacagataagtgggagctaaaggtgaaacgtttattgttttctaaattaaatcgaatatgaaagacaaattctatttacttggtaacgtggcattgtttctttggcttgcgagatctctattcaattgacgaaacatatgtggcaactcaaacgttttgatggcttttacttcagcacgagcttcaaggagcatattaccgtgcaattttacatcgattctaagcaatgcattaaatgctggatggagggctttctaaaccgttggatctattttgtgcttttggaagatttatctcgtctgtgaatttagaatttatacggatcgtgttttgcaattataaatatttgtaagtgccattttttaccaccttttcctaaaattcgatttttttgtttcaaaatcaaactccctaagagtgaaaactcagaacttatattatactcaaatcgaaccatactggagtgtgactttgacttatgtattttccttcttctacaaattagggct

SEQ ID NO: 46852 - DNA, 1508 bp, Cannabis sativa
aatatatatagtaataatatagctaaataaagatgcatattatagtaattacaaattagatataatttccacctgttttttttttaaaaaaaaaaaaaaaaaaaaaatctataccagttttttggtaaaaggttgtcggctataataaaattcagttttattatatgtaatatatttaaatggtctatatgtatatacacctatatttttctatatttatatatctctctatatataaataataatttgctatttttaattagtgagagttaatattttgttttcaaatcctcatttcagttgttggtccttagctattaatttaatattttaaagataatgatatatatcaattttagaaaacagtacagttattatttactttccaatatcttaatttttgttatgcaaataatctaaaaaagtaaaatcataattaatattattgatttcctcgaaatttcattagaatgtgactcatctgcttattttaagccagaatatcatgtgggtcattttcatttttgatttttttttctctacagaaaataattagactatgaagtcaaacaaaaaataaaattgaaaattaataaaaaaatatattttttattttcaaatgacaagtagctagtgatttttttgtctatatatacatagtttagttggtctaaaaactcttgagaactacactttttataaatcttatttctttgagtttttgttcttctccaaaaaaaaaaaatcaatattgaaaaatacaaaaacaagaagccatgggaactcaagctcccaccaatcagaccaactatggtgatcaggtatttattatttatatatatatatcatctctttcatgttctataaaatatgtttatagccatttttttctctttaaaatttggcttcttttacttttttcttgtcttttttgtgtgtattttggtttttaacaatactaatcacttataatgtttatcatcatagtcttcatcgtatatattacaaaaacatttcttgatataaaaatatttgaatatatgaatcatacgtatggtcagattgaattttcagccatttttgtttttgacgaacaaatttttattcttcttttttctaataaattaagacatgtttctcttctctttgctgagttttttctttaatgagctgaaaacagatataaaaatatgaacataaatattatataattatattcttttttggctggaagaaacattataaaattattttcatataaatatattatataatttaaaaatatatataataatgtaaatatccaatatagttgactgctaaaaatataatattgtaatattagttcccacgtggctttaatttttggcctttgataactatctcttctctactcaatcgccttcatacgctactactttcatttcgctcatttttcctttaattccaagttggacttttctttttttctttttcttttttgaaaataataataataaaaattaaaa

SEQ ID NO: 46853 - DNA, 2844 bp, Cannabis sativa
acaccacaaaatttctaactttttacttttctattgtggggcgaaatttttttaaaaaacatattgtgtactatgttaagttttcactgttgttctacaattgtttttatagttgttctactgctgtttttaattgttctgttttgtgtgtcactgttgttttataaaaacacagtatttttaaaaagatttccgtgttttttgtaaaaattaacctaaattccagtatttttgtaaattttccttttttttcttagcttttggttggacttgggtataaaagtgatagttttgaaatagtgttatttctttctttctttaattcttttataactgggatttacacctaaccaataaaaacaaaaaaccaaattcaatttttgaaatgtattcaaacaaattattaattttagtattaaactgagttttctatgaacatttatgaatttaattgataaaatggattttgatttaattttctttaatatatatatatatatattatatttacagactgatctacttttatatgtgttttttctgattatattcttcatgaaaataatatataaacaaagtataacattattgccaaaatgatgtaaaaaacaacattccaaagaaaatttccaattcttaaaaaacttgaagaagtaatgcagatatgtatttttgtaatatttctcattttgggtatttattaaaaaattctttaatttcattcattttaaagttgtagtttaaatatattttaacaattaaaatattatttttaaaaacttttatttgttttcttaattagctgatttatgaaatatgagtgtatttttatcacctccaaccatatttcatatttcatttttatagtcttaattaaacctatgaatacaacattgggttccgaaaattaatttgttaatttttgaatggaagtagataacttcattaagatagaaaagccaaattggcaattatagcggtgttaatagcattaggaacattgctactaacaacagtacaatctgaccaataacaagcaccgcgagccagacaatgggcggtattgttagcagatcgcttaacacagcggacataaacattgaccaaaaaattaagcaaattaagacagtcaataataacagaaccaaaaacaaatggcatttcaacattgctttcaagggcttgaaccaccgacagtgaatctgttaattaaagtacttggtaaacagataatgagataacataggttcaaaaaactcaagaataaactaaataatattttcaaaatcaagtatacttaattaaaacgaatagtatttttgaaatagtaagaaaaacaaaataatatttttcaaataagaatatgctgtacaaatttttattgcaattaccttaaattttgtttgtaagttacaactactcaacacatttttaacataattttaattaagaacactatagtggagttattaatctacgaactacatcaaatggtgcttatatattaattagactcagacagagtgacattgtcatgaattatttgttagtgttattttaaattttagggcttctcttaaaattttagactatacttttcagttttgagttatttgtaaaactatataaaaaaaaagtattactaaaagaaataagcaaaaatgtaacatcatttcattatttgtgacaatattacaataataaaatgtcatgggttagcatttttcttttatatatataatataagaagttatttcgttattatttgtggctaaaaagtcaaaaatagcaactagagaagttatttttaagagaaggttttatgttatttgatctataataattgtttactccatttatgaccaccatgcttttttttttagcagaaaaaggaaacttagttaatagagtttttaataattgaagacatggtgggtttggagggaaagaatatgtaagaattgtataaaccaatgaagttaatattacaaatattcatgaatatagagtccctagctagtgtatagcaagacaatgtaaaatataggtataattgtatgttataaaatttcacaacaaaacagtaaatatgcaacaaaataattcaaaattaaatacgtgtcttgataataaatccacttttacattaattccgtattaaggagtcactcactacaatatagcctcatgtgataaattaattaatattagaaaagttatctacattaatgtagtaaaatcaacaatgtgaccaatgctaggacacacatagtaacctatagctaggtactagaaaaaatatattaagacagaaaaatatataaaataatagtattaactcctgttaaagattggattaaactgaactgtgatatcagagtgggttagatagcatgtgtgctgcagttgtggctaggaatcacttgggcagagtaattcaaattcatacggattctctgatgcattgtgtggagaagcggcggtctgctgctcggctatttcggtgacactggacattggtgccaaatttgttattgtggagaacgactcgagtgtagtgatcaaggcgcttagtgggaaggatcctcattgaggtcttgaaaattatcgctttttttttttttttttgtattagttcttctctttcgtttttcagttgtaatttttcttatgtcaatagaacatgtaattttgcggctcataacgtggccaagtgggcttttgctcatttgagatttggtgatatctcggtctcttctatcccgaagaaccttctatgtaatgaccatgaaatctaattatttttttcttaataaaaagaaaaccctaaaaagttactcaatg

SEQ ID NO: 46854 - DNA, 3311 bp, Cannabis sativa
  modified_base (2348)..(2349): a, c, t, g, unknown or other
gtggtttaattaaaaccttagattaaattaaaataagactttaatacaaaatactatcataatacggggatcccctgtttataaaattcttttacaactagttataaaatcgctattacattataacaaaagtaagttacattttcaatcatataaaaaagatggatcctacttctcggaagccaagacatcacgacagatatgtacactgctgcagagacctaaaactcatggctgcccaattttgcctttcaatttacctgtaccatttagcacccgtgagtcacatagactcagcaaagaaaagaaattaaatccaattaatcttgacaaaataaaagtaaacgtaacacatcacacattaacatgctcatacaatttcatacttgtaaacacaccatctcggtaattcattaagcacccttactacttgttaaccacgagctgtgtatgtcactatcgttgcccaataaagcaaccgataagtaagaaacctatctacagtttcaagagtaattaaccgtaacggtaatgaccgtttccaacccttaccactcgttaaccacgagctgcatatgtcactatcgttgcccgataaagcaaacgataagtaagaaacctaactgcgatttcaagagtaatcacttataacagtaatgattgtttccaaccctcgatcacagctaaggcataacaagcacataaacaagaccttcattatattcaagtctataccaatcacaatcattaattatttaaccatatatggttgtatcacttttcttacctcagtccagaaaccaggcgtgagagccgacctgagtggaattacgctcgacgatcccgggtcctatgtcacgacaacaaaactcgatagacaacttacccaaactctggaatcaattccctaatctctgaaactggacatctaacttcccactagattagaataattcaagtatcactaaaataccctaatctaagctctgaaatataccccgagcggaaaccggttttgaggctaaaactagagttttcccctactggaaaaactggttgaccggttttactatgcctgagaaactggttaaccagttttccttgctgcagaaacgaaaaatttggtttgttgcttcaaaacccaactaattcttcaccaaacctgctcaaaccttccagaataattccatatcataaaaataatgtattcaagtcatcaattcacaacaatttatctatttaagcgaaccaccataattgagtaaaaatttagctcaaaaccctaaattcctctaacacaaaactaacagctctaaatctaaccaaactaaacttaaacaatctctaaatcaagtctaaaaactaattctaattccaatttagcacaacagccccaaaattaaagaaaaccctatcttcaactcgacctaaaccttaagaaattccaccaacaaagatgaataacttacctcaactttgtacagcaactaaggttgattagctcagcctagaattggttgaaattgaagataacttggttggactcctgctgcctccttgggtttcgaaggaagagaaaggaagaaggagatgtgtgggtctttcttgattttcctctaagttactaagcttttcattttttttatctaactaataactaagaaaatataaacctataattaacttttatttcagcacaaattaaccataaaaggacaaaatccaactaagaaaagactcatttgccctttttcttaatcacttaaataggttaaggcttaggggtatttcggtcatccctagctaataccgccaaaaagataacttagaattctaaactagttcggcataattcattatagcataattcaagcgtcgtgacaattctgaccactccgtcgagtttcgcaaggtcgtcgaacccgaaaatattttattttgaaaatggtatctgcaatacccccatatatgacaaaatttctgtaattaataaattatgctttgtttattcttttactcttatttcactaattaacttttaactagcttaagtaggattgtaatcctactctaatgccacataatcacatatttaataaaatatgtccaattaaatatcatcatattttttctgcgatattacaaggaccagaactatttttttattaaaataaaacttaataataatttgatctatttatgttatgataaaattggttacattttctgtatctgttcgtattaaaaattgtctcaaagttggttatattaaaaaataaaattattaaaaattaaacttagggtccctatttttaccattttgaaaaatatagggtccattttgtcanntaacaaaatagagggtccaattggtaacttttgcaaaacacaatgtctaaaatggtattcaccctttttatgactaatatttttagtcacaatatgtgaatggtgatttgtaattagtcacaactattttatttttagccacaagttttattgggactaaaagtaagattttttatagtgcatactcccagactttctcaaattttgacatgtatcaaatcatgccccttgaactttcatctatactttccttactaaaattggacaaaagtttttaaatccaacaatctcaataattcaggggaatttttagcgccattaaaagttcaaaaaacatgatttgatacacgtcaaaattcaggagtaaaaattcctaattagccaaaaaaagtaataaaaaaaaaattcgtcatgagatcatcttctgtgtaaaagaaaaaaaagtaatgacttattcttttaaacaactccaattatgtttttgacgacttaacaaatttatacacctcgtaaatatttttttattaaattttcccattagccttgagttgggtagggtggcttgatacttgttttgaccaaaaattggtttcgtttttatcaataaatcgtaaattaatttcttaatttttgtttagggttctttctttctatagctcttagaaggttttttttctgaaatttatctcattatttttatacactattttttctgcaagcgtacagtgttgttatagtaaagttttaatactaaaaaggttttcgaacccacaaggattgattattaaatttaactaattataatactttttaattttatactttaattagataacccaaagtaaattataattaagaatcaagcaataaagtaaatataaaataaatagacaagcaacgatttttaatcagaaagtaaaaacctagagtattaattttcctatttcaaactatgaatctca

SEQ ID NO: 46855 - DNA, 743 bp, Cannabis sativa
ccacttttaaaagccacccaataatactcttatcaaaatcatttattttttctttaaaaaaaaacaaacatttaaaatatatattgatgacgtcataaatcactaaatggcttttgttctttctgatattcactacaaaatacattataagtctttcattccactcatacccatagttagtcacctaatcttttatgaataatgattaaaattcatcaaatttatctttcttctttcggaaggacatcaaatttatctttgaaatctttgtgtgattttttttttctgtgtgacaaaaaaggtggaactgtatacgtatagttaattcactgagaattcagtatcaatcaattatatccgtaaaaaagaatcaacatttttcttcagtaataatgtcaacacaggtaaccaaaagaaaatgtgaacataaaatatgcactaaaatactacataaaaaatcttaatacatgcccctacaaaaatattataaagacgtaaatactcaaagttttatatttataagcgatataaagctaatatttatttttaactgcataagtaccaatatttataaaattgtaatttttttttatattttataagtgctcaaaatttgagatgaggcaattgtcccacctaatgaggaaattacactctatactcttttatattgtcatattttatttttatctttttttttaaatattgtactaattttgccctgtcacttcaaaatactctcc

SEQ ID NO: 46856 - DNA, 997 bp, Cannabis sativa
cacttgtgaagtgtcactaaaaacagtttttccagtcacccgcattagtgaccgcgttgaagtgtcactatacacttttagagttactcaatgtgtgtcaaaaatccaattttctagtagtgtctcttgctgacaacatagagggatgtaaatggatatttagggagaaacttaatgctgatggaagctatcaaagattgaaagcggttgctaaagaattttattacagccctggtgttgattttggtaaggtaataatatataatatatataataacaataaataatatgttgtttatagtagaattatcaacactaatttaatattcaataaataaatacttataatgtaggacatatatttttattatgaaaaaaataattagataagagcactcctaatggttaatatattctgttgaaatatataactaaaattttactttttgtaatttcacacatttactttatactatagatcaacttttctaaaaaaaaaaaaaaaaatctatatcatttcaataatatatttataatatacaaataatagaatagtaatcacatataaattttttatgtttgcacttattaattaaaaaaacgacatcattgatcgcgtttttaaatgtaagcccatataattctctatcattatttaataaaacatcataaaaggattaatatcatatgtaaggtcatgtttaatttgatgtagtagatattgtaatggaatcaaaattaccattataatttttttttaaaaaaaaaaatgatgtaatgattattacattatgtaatataatttttattacattggagaagctatgtaatgagaattacatcataactttaaataaaataaagggtaaatggcgaaaaaaccctcaaaattttcattttggtttcacttaacctcgaaaacccaaatttggacggtaaaacccccaatactcgtattctgttaccaatttaccttttctgtctattttatgtttta

SEQ ID NO: 46857 - DNA, 1155 bp, Cannabis sativa
ggggatggggattaaaattcttaacggggatggggacggggggagcactccccgccaattccccgccccgtgtgcatccctatttacattatatttatttaaaaaatcataaaaagtttaaaaacatttaatatgtcgaaaacatacttcaaattgtttgattaaattatttttttagataccaaaataaatagggatgcattatttattttaaagggacctttaatatttaaatatttgaaaagaatttaggccacaagtatttaataatagaaaaaaaggttacaaatgtgtgtaatttgaatgtgtatctactcttaagacatgtttactaataagtaagagaaaaataagatataaattcccttatatttgtgataacttgattaaataagggataaaataaaaggagcttccccacaaattttctaagggactttttggaatgagttaatgctagtaaagaaatagtaatgtaaaatattattatttttaggctttattcttagaatattattcatataactaccattgaggagagaaatgttgatatcttaaaaaagatgagtttgaattatttcctaccattatattaatttaagagaaaaatgcagcaaaaatacttaatgttataatttgttatggtttaatattcaaactttatttttgatggaaaaaatacccaaagtcacaaaaagtgtgcttccgttaatactttcttgttatagtttcaatgtgtacacgtgtacggtatatattattcacttctaaatatattttaagcatttactattttaagtttaaaatctttattattattaattgtgagaaagataaacacacatatttatttttcttttctagaaaacagtaaaactaaaaattaaaagaaatttgccacaaaataaaattaaaaaatatattcaaaagatattgaaaaatttagccctaatttattcatcttctgtgacataagaagaagaagaagaaaagttgttgtactcaaaaaaaaaaaaaaaagaagaagaagaagtgaagttgtcgaagaggaagagcaatagtctcattctgatgattgaagaaacaaggtacatagaaggtggaaaagagggagtcgcacacaatggttgttcgggcttttgaagaggaagctcc

SEQ ID NO: 46858 - DNA, 4428 bp, Cannabis sativa
  modified_base (497)..(503): a, c, t, g, unknown or other
aggcggcccaaaagcacagtcgagcaacttgctcgactaagggtcagagggcgaaagaggttgcccacaactacattggcaagtgcgtaccaagtgttgacgagcaactccaagagttggatgccaacacccaacaccctggatataccatatcgatattgatacaattaagtatgtcatgtataatttaatatattaatatttataaaattattaaccaattataacacattatctctaggtggtattactttagagcatctccaatgaagagctataaatgtggtatattactattttttaaaatattttggtaaaacttaactccaatagtgatgtaaaatgtgtgccaaatatggcacaagctaaaaattgtgctacatttggcacaaaagatagcatgggctgaattttagcctcacaataaatatcatcttttttaattacctatttgccacttattaatactatttattgactttgaataagatatattnnnnnnntattaaaataatataactaaaattaattattttgtatatttttaatgagtattaatggtaatattaacttttatagctaatttgcactttatgcattggagcacaaatataaaaagagaaatttacactcaatgtgagattttaaaattcttcacttaaatatggtacttttaggtttgaccaatttatatagtattttttttaggtatttttatgttatttaatatgccatatatatgtaaattaggtttttaaagcccatatttaatgtttttatttatttttaggcagttttataaggtaatttttagtaatattcgagcacctctgttttaatgtaatgaaattgttttatttttttattgtgttttgtcttttttttattataaattttacttttgaatataaaaaccagtttcgtgatgaagaaactagtttcttaatgaaaaaactagtttcctgatgaagaaacttatttcttaatgaaaaaaccagtttttttgatgaagaaactaattttttgatgaaaaaatcagtttcttgatgaaagatctttggtgatcgattttaatcgtaggagagagaaaataatcttgtgtggctggagagagtagcttaatttttgtgttttttcgagcacctatagcttttttttattataaattttatttttatataatcaaaactagtttgctgataaaaaaattagtttcttgataaaaaaaccagtatcttgatgaaagaattttggtgattgattttgatcgcatgagaaactaggcaatttgaattgtacgagagaaaaaaaaaaatcttgtatggctggagagagtgtgatcttattttgaaaaattaattatcttttttaatgttttttatggcattttctatttaaatacttatatatttaattagtttggttataaaatgtcatggcattaattttacatgtcatatatatcagaacttctatttattttctcattgtaaatatcctatataaaaaataaatcaaatataattttatgatatattttaagtcaaatttaaccaaaatatatactatttatatgtattccattggagatgatcctatatcaatactctatttcatagccttgttgttctaaattgaggactaaatataaaagaaagtagctactggtcattagtaagtgtgattataacagtgtaatgtaaatgtcctaataaatgatggatgcaccacatatcatttatttatttttaatggtaaatcacatcattatgcatttatctaaactcatcattaatatatgagcctgaaaccctccctcaatcatatcttctactttttattatttattaacttattaaattaaattaaatgaatacacttttcttctatattttttcgaaatgaattctcctactatttattaagatatgttattattattggttttatgcaaaagtggcgcatgcaaaattacaaggaaaaccaaagtgaaatgaaacatatcattattacaatttttctcatatgcataaaaatcgtaggaaaagaatctgtgttgctatgtgaaagtgagctgattgggtaatgggtgggacaccgtacaaaattaataatattaatatattatttttctactatttttttttttttgagaaaaataaaatatatattttttttaaaagcaaaaagctaaagagatccaacaatctttacaaacatgataaattaaaataaagggtaaatatcattttagactctgtgttttgtaaaagttacacattggaccctctattttgttaaatgacaaaatagattctgtattttctaaaatagtaaaaatacgaccatgagcttaatttttagtaatttttttttaatataaccaacttgaagacaattcctaacacaaacagatttaaaaaatataaaaagttttgtcataacacatttagatcgaatttttataaaattttattttaacaaaaaaatcagttcagggtcctatttgtactattttgaaaaatacagaatctattttattatttaacaaaacaaaaggtccaattaataacttttacaaaatatagaattcaaaatgatttaccctaaaataaattaagaaactcggtcaccgaataccaaaatcctctaaaaaagacttaaaaagtattaatatattagtgaattgcacttaagtcatgtcatgtacacaaattaattggggtgatgtttttgttgaaataaagtgttcttttttatttataagtaaattaataaaaaatttatatttgcttaaaataaaagttcaaacaagaatgtttgcaaaacaatttttttcctctaaaaaaaataacaactaacctaatatggttagttaatattaataagctgttaattttataggtaaaatataataaaaacagaagaacaagaacaaaaaaatagacaaataaatcttaattcgtttggccatatttctgaatttattttctttacaaaaactctttcaacttatttaggttggtaataaatgagggagaggcaatggaagctgtggtttctcatttaaaaccataaaaatgtaagaggaatttgcatgagtaatagaccaaacctaatctatatactccaaaagtctccaacaaacctattctatatttttgggcattggaagcaacatccttctggtataacctaactagaaatttgtttaattggaggcataaaaaattgtttattttgtactatttgtgcttcatattctctctccttttcaccctttaattttgcttaaagcctacattaatataaagctggtgtggtagtagttgatatattttattgggaaagtattattataaaaattattgattgaatttctattttgttaaataataaattagaccatgtatttttttaaaaaaaatttaccgcataaatactcattttattcattttgttgctaataagtacctaatttttaaaaattatagcattaatactcaaaattacacttttatattgtaccgctggtacacactaaacagaattattattaaggacacgtgtattgtcttcataattgctccttttttcttcacctaattaattaagtgaatacataaaattaatttaaataaaaataaacaaattaataatatttttaaatatatatgataaaaaaaacttgaatcagtaaatctaatctcacttgacttagccacccacccacgcactcctccaccatcccaccaccacataaaaatcgatttaaccatttgcaccaccaaaaaggagaagaaacccaattgcaacattcctctccctaaacccattgtacctgtgtaatcgaaccttaaacccagaaatctaatcctttccagcgataataagtgatgagcagcttgaaagggaaatcgtcatttacaagttgaaggaaaaggaaaatagaagaaagaggtggtatggtgcagaaaagggagtttgtcttctttttcttctaaaatagaggctttggaggggctctgatttgcactaattcatttatgttgatatttgagattttatgctgtaatttcaggttgagagatgtgtgatttctttgaaatgggtggacatggaatgttgtgtgaggtgcatggctaattgatggattatgagaagaaggattgatgaatgagcatcaaatactgataaattatgaagcaaatgaaggattggaaaacaaaagagggttaattggtcatgtttatgagtgttgttttcattcatggtgttaaaatttttgaaaaaattactgatttaggtttttttttgatcatatatgttttaaaatattattaatttgtttatttttatttaattaagtttatgtatttacttaattaatttggtgaagaaaaaaggagcaattatcaagacagtaca

SEQ ID NO: 46859 - DNA, 2757 bp, Cannabis sativa
  modified_base (172)..(173): a, c, t, g, unknown or other
aaaaaaaaaaaactattttgaaggtaaaaataaaaaaacctcatttattatttttttttgagagaaagtggaaattttattaacttgaaaagcactcttctcttacaatagaaagtaaatcagatgtggcagtagcctcatcaaacatacggtctgacgtaaaacaagactnncttgcaatgcaatgagcagccctattagcagatcgttttacaaaagaaataaaaacattatgtaattcagaaagtagcacccgacaatcctgaacaaataacccaaactgagatggcatttgaaccagaccattaatagcttgaacaacaactaatgagtcagtttctatttccacatcagttaatgccttcgtcttgatccaatttaaagcctctttgacccccataatctcagcaatctcaggagaaaccgcaccaaatttactacttgagaaagcttcaattagattgccattcgaatctcgaagaaggaagcccatgccaaaccgatagccccatcgacgttgatcttgaactttgtagaaacaggtgaaaattataatcaatttatttatgaaagaaactaataaattataatcaagtgaaaatttacattttaattttacaatttagaaagaaagtttcttacaatgaagagagagacttgcgaccattacaatcaatggttagcaaaattgatacaatatttgtggtagttagcttttaggctcagacttttaattttagacaaatatttattttgtgttctaaacttttattaatgcctagacttgtgtacttatcttgttgtaaactttaactttgttaatataattaaactgtattttaattttaaattaaatctttacaattataattaatttataattatttcaaaaatattaatataaatttatataattattataattaaaacaataattagaaatatgaaataataaaaaaaaaacagaactctaagcctcataattgaagacatagaacaccttgtgtgtctaattggttattctctcataactgatgacgtagggttcacgttctcatatgatgcctcacttatgtcttcagttattttataataacccaagactaggtcccctttacgtcttctataacgaaattttttataactaaagataaatgatgttaaaaattgaagagaaatgtcttttttctagtagtgtacaggctgatttttttttaatacaaaaattgcacctcgagcttactatttatttatttatttatgtttttaaaaaacaacatataaatgtataagggacgtcctttattattttcttttatatctaacatttttggacatgataaaaaaaatattcatgtccatcaatagtagacatgaatatttttcaaaattttttatattcaacactatttttactgaacatgagaaaggtacatgaaagacattatttttgtgagtagttaaatggtacaaatgtaataattagagcactattaatttttacatacttaataattttttacgccaatattccttatttttattattattttgtcatatatgaaaagtcaccaaaaatattgagctatcatgatattatgtattgggccaaactttaaagtaaaacccataagacttcacaccaagagacatttgtggccaaatatatggtcattatttataaaatccagaaattcgcacacatacaaaatcataaaataaaataaaggcacgactgacgagtatacgtgatagtgggatacgtccttttacatgttttttacagtcatactgtgatgagtgtaaattattatatagtaaatactaatatacgccccacacacagaccacacacacatatattgttttgtttttatgcgtgggcaaggtgagttgcgagatcttgggtgacctcatttgctaggtcaagcaatgtgtggggatctataatctcatcgtggtgcttctcatactcaaaacgccaatgcacaatgctgccttcatcaccctcagctttaggagtcacaacaagtattattttgaagctcttataatgctccataaggtccccttcaatcagcttgaaagtgatagaattcttctcatcatctatggcttccactatttgcttagatactcttctcttcccatctgaaatttgttaatcaaagttcaccacaaataaattaattcatatacactacacattttttaataaaaaacgctagctactcttataaaattaataatttatcactatgcgtaccgcatttaatcaaattttatttgtacataaatatttttccacttgaaaaaaaaatggaccctgaaaaaatggtataatttccaaaaatatcaaaaacatatgtattataatattttctcacagattttttttttttttttttgaggtctgggttgggtagtctgctttaacggctagtttaataatattattatgcaaggcgtgtttgttattatttgtgcctttaaatatatttgacaaatgctaaattactttatattacacactatataattatactctattttgctctctttaagcaatgaatttaaatatattttatcttataatttttacatgttcacttagaataaaatatgtcgtcaattacaagatcacatatatgggcaaaatatcattataagaaattagtatatataatagggaaatatatacaaaatattatttttggtaaaatttttatatttttattttaaatatatttttaatac

SEQ ID NO: 46860 - DNA, 1851 bp, Cannabis sativa
  modified_base (53)..(54): a, c, t, g, unknown or other
aaatggaaagacagagagagagagtgggaaaattaaatgtaaggggtattttnngtagaatttgaaaatagtggaattattttgtacaaattagtaagaggtataaaatttgagtaaaatttccctttatatattatattgtataatcaaagattcaaactttagaacttcaacacaagcatcctcttatcatcacttaataagagtagcttaagtgttcacttctcttatgcatggagcataagtttttgggctttcatccaaaaagaaaaaaacagcataagtttttgggatttatgcactaattttctccaatttttagtgggagtgtcccaataaaagaagtcagagatgccgagtcagcttctccaagctgcgatgcgtccgccatggcatctccactctctctccaaaaccaaaaccttttcccttctttctcctctaattttaaaccccttctacactccctcctccgccaccttccgcgcgaaaatgtcggccaactcgtcaactcttactcactctatttctctggcttctcaactagctcagcccgttcaaattgtcgccgctcctggggtctccgattcggaattctggttttccaaatctcctttctcgtatacccattctgaaaaaattggagaaataaaaaatgaaagatggggattttttgcttgatttatttatttattattgttatttcttattattctgatttttccttttttgatcactctctaggaacgccatagattcatctttgttcaagcagtggttgaagaacatggaaagtgagactgggattttgtctggaggtgatttgtctctgaaacaagtcttgattcaggtgttcttataactccattttgttgtattcttttgcttggtttattgaaatataaagtgtacatttcgtctatgtgtaattccatttcaagacatacttacagataataacaattaaagaattcccttttgattatgaataaatcaccttttctaaaatgggaggtgatatttcaccttttttatagtttttttttttttcttttggttattttactggagaacaaagtacttttcttgacaagatgttgaatgtgtatgactgatgttaagtatatagaaaatatatttggcaaagaattatcaaaatagttattatgtatgttttgcaatggattgttaaattagttattttacaaaatgatcttacaaagagtttactttgggaaacacatttcttttagtatactgacattgagtgatggttttttcataatagggagtggatatgtttggaaagcgtattgggtttctcaaattcaaagcagatgtttttgacaaatcaactggcaataaggtatatattataatcattcctccccatgtactttgagtctattttgttattttcttaaagcgcaatagccaaattgagcttttaattatctttttcttctcttcatgatcaatgccatcccatgtattttttcaacaagttggtcttaaatttgtctctgaatattccattacttctttgatgcctgctttcaatcatctcctcctcttcgtttctgttttgactaaaacatgtttaggttccaggtatagtatttgcccgaggaccggctgtggccattctgattcttttggactcagaagatgagacttatgctgttctcactgaacaggtttgatccatgacttatgctgttctctctcagctaaagagagtgaaattaaaggaaagcatgacttataaacttttgccattgctaaaatattgttgcgaattctggtatgttttctcaaggtgagggtccctgttggtaggctcattttgga

SEQ ID NO: 46861 - DNA, 1864 bp, Cannabis sativa
atgctataaaatattactttttttgtttattaatttaacactaattaatgctttttacaaggtttttcacatttttttatttagttgatgatattatatatatttgaaaaaacaaaaataaaatgaatttgctgtatttttaattaatgagcaagtataattgcaaagattaagccaaataattgcgtaacattactcattttcttagtcaattttagtacaaaatttaaattattcactagagataatctaaatgtgtaatttgttttataagcagtaatatagatatattataatcatgtatttcactagtttttctaataatttatagtcttgaaaagaaggttcaaatagtaagttacacccgtaagtgttaattttttagtttatttttatacgtgtgtaattatttatttagaacttaattttcacacccataaactatttcgatttttttgaaaggaaaaaaactcgataaaatacataatgcgtgtaataactataatgtaacattgtcatataaaaacaaattaaattataattttttgtatacagaaaacataaatatccctatactaaaatgatgcttcttgtaataataattcttggtgatatttctaatttagaaattgttacatgtatatagatttgatgttagtatacgtagttgaagaatacttttaaaagtctaaaatgatgagcacaatatctatgaatgtattgtatagttttctttatttattttttattaacttactaatatgttttatttcataatttatataaaatatttaattatattttaataaaagaaaattatttatttaattaaattatatataacattatttattattacaattaaaattataatacatcattaaaaaaatataaatatacaactaaatatatgtgcattgcacgtaacattaatctattcataattataaagacgacgaaatttttttgggtagagacatattattctttgttgctccatgatgcttaccacccctccctggggtgaatccagtcttcttctcaggtacatccctcatcactaatttattattattatttgtctgtataattacaaaataaataatataattaatcccataatcaatatacaataacaagaataattatattcaatcatatataaacaactcaaataccatgctcatctaattatatctagtatgattttagttggatggaattaattaaccaaaccaaatgttttgatttttttttttgttagttaatcaatttttatcaagtgacaaatatatatatatatacactgatcattttaaaaaataaaaataaaattaaaaataatctaataacgacatatcatatgatttggtatttaaattaacaaatattttataaatttttataatttttgtgcaaaaatatagcttttctttcaataaaaaaagttactttataaaaaataaaagaaaaaaattaaaaaatatgataaaattaagtaagagtaacaatcttatactattttttttcatatttttgtaacttttttctaaaatttttctataaaataaattttttcaaaaaaaatatatatttttacatacttataccttacaaactataaaaaaaataaaaaaatcttgtccatatatatttacatgtttataaatatagagccagaatatactataaaacaaagaaaaatacacactaatcattagttaataataaaaatagcaaaaatatatagtacaaaaatcccctaataagtacacattatatatatatatacatagtattacatacttgttcagaaaaaactatttatgtatattgtatatatatatatataggaactcatcaa

SEQ ID NO: 46862 - DNA, 1455 bp, Cannabis sativa
  modified_base (1423)..(1424): a, c, t, g, unknown or other
aacttctaaagacaaattaaaaaaattccagtctaaatgatacttcgacgaagagcaagctctcaacacagttctgcaatccgataagatcttcacctttctccatgaattatctgcaataaggatcaaagccatccgaacagccaaagtttccgcttccgtggcattaacagccaccaaactctcgaccttgtaaaaccaggaattgtctacaaggttacaaactaccaccgcaagaccacttctaccttccttccaagatgcatctgtgaagatgataatttctgcatttaagagggtttctatcggctgttctgcaggaggatggatatcctgagtgggggttcgaaaactgccatcaaggaactcagagcagatacttttaattgcaccaagagttgtttttatatctgcaactcctcctttgaatttaaccttgtttctgcacttccaaatctgttgaaaaacacagccaacataagttatgacctccaatctaggaatactagcaagcatcgggactaatatttctaagaattgggccaaactgttacaaacaatacggtccaccgagatagaaaaagggcctgcaaaccaaatagccttagcaaaggcacaatctttaaacagatgaaacgtatcttccacatcattcccacaaagactacagccaaaacttgtgaaggaggcaagtctgtgaccagttggcagagcatcactaagagccttccaaagtattatcgataatctggggtggagtccagggtcccaaatccatttccaaaaatctttcttgggtctaaatcgaattctctgatcctctagataagcatccttaacgctgaaacaaccgtgatttcttcctttttaaaagactctatcctggtgggaataaggaattctgtttatggtaagaatcttatcgcccaactcgtctccaaagatctgtctcactaactcctcattccactcatgaccattggagatatcagccaaagtcttaacggtaaaaccccgatccctcagggtatccattaccccttgaaactcagcaaaagacatccatggtatccatggttgcctccaaaagtcaatttgctcaccagcagcaggaagagaaatcgagcccttcctaatcacatctctagtctctaaaatgatcttccaaagggccgagtcactacttttaggtgtcacctcccagaaattttcatatcggcaatatttgcttaagaggcaagaagtccatggtttctccacacggctggccaaatcccaacatagttttgaaatgagggctttattaatatcctcaaatctcctcaaacccaaacctcccgactctttaggttggcatatggtatcccaagaacgaacaactaagaatctatccttcttttcacttccaacccaccagaatttnntcagaattccatccaactctctacaagtggt

SEQ ID NO: 46863 - DNA, 1165 bp, Cannabis sativa
atgcatatgatcatgagtgttgatcaaaatttgggatcactagtactagctattactagtgactttggccatgaatattgtaactcatactcattatgaagataattaaagagatacaatccactctgtgaaactttccaataacatttgctatcatgacaatcatttttttgggcatcaaaaacaacaaaatgacctttaagacctccttgactagtactcatatcacaatagaatagagtagttctaaagaaatttatattgaaactccaattgaaattatcaccatatgacacaatatgagtcccaagatcatcatctgctgatttgcaatgaacactcaatgttgtgtttacatctaagaaattgattatgtagacagtgtacttggcattgacacatgagtaattgttcatgcacaataatattccaagaattacaccaaaaatattaatgctcttattattcatggtgatatatgtatataaaaaaatttatataaaatataattttgtgatgtgatttgatgtttaagaagaagatatgtgattatatcttgtactttgtatttatattgcaaaaattacaaaaaaaaaatctaagattaatttcatatatattgttgttgagattacgatactatcttattaggaatgatataataaaattaataaaagaatatctttgcattttttttttgaaacacatatatatatttggtattacatcaattcatcataaattatttttaattgtatatatgatttcactataaaaagaaagaaattaagtacgtttattataatccatggtgtttgaaacttgaaagagattttctttctcttaataataataataaaaaaaaaaagagagattttattttaatcaatgagtgacataagtacaattatgtatttataaaaaggaaattacttaaatattttgatttttgaagtgtggcatttgtttggaatctggacacagatgccaaattagataaattatgtacgttgttgggttaaaatgaaatccttcatgtagaataatgtgtagaattggccaaatggctggggcagtttgttccagcaaattttcttaaaaggttacctctgtgttagaattggttttccaatagacaaactagttactatttacacgaaaacta

SEQ ID NO: 46864 - DNA, 2334 bp, Cannabis sativa
ttattttcattggactttaatcatttataactgctcatgaaatgtggacattccccacatttcatttctatgcacatgggataatatttagtaactatccaaccgctcttttgtctttatccttaaatggttatgctgagtatgtaggttgtttctcgctaagtacgagttgtcttttaccgtcattgtaggaaaaaacgctaagtatagatatactcctccttgcagtgtcttgtattataatgatattagcgaggtggttattctatcatatagagggcgagatggatgaatgtatggttattctctccatgtatacatacgtggataaattagttgccagctcttattcctaagtatgtaggtcaatgagctgcaggctcttactcccaagtatgttggtcaatgagttagagctcttactcccaagtatgtgggtcaatgagctgcaagatctttgttatcttgtcttgaacatttattagacactctgtctatccgagatggacttattatctcactaatctttaacgggcaatagttattattcttatctcgcatttgcttatgtggtagtgagtttgaatatttttatcgactataatttattgaaacgaattatttaagttgcatttaatgatatgcaatttaatactatatataatatcatttgagttgattcatattcctcctgaagtacacgtgtcagcttttggttgatagccgaatttcaggtataacaattgccccctaaaaagtgcttttttaattaaaaatgactttttaattaaaaggaaatttttaattaaaaatgacttttttaaatgtcttcaacggtattattgtatttttcccaaaaatttgcatgcttagaattttagcggttcaaaacttggaggcacatcatttctcatttaattctctgactgttattttcttgtacaattcccatctgtttgattagattacccttaatcgaatggttgccatcttttaggaataaatttgaaattgtgcatcattttttccatcttcagcctacaaaccttcaagctttgacaaaatctcaaccaccctctcttttatatttgcatgccctctttgtctctcacattcttcttgcagatctcatctgattgtgctccttctcttcaaagtcatcatgacccagcttttcgatcatcagaatcttcaccaataagtccttttttgcacagaacatctcatcaaactagtaagtggcatttctctttgttgatgcttcctttgtgtgttcaatttcaatttattggtatgtgtttttcttatctgcattgttttcttgcttgggtaatttggttttgagtgcttggattttagggctagaaaatttaaggttattatgattcacagagtttttgggttttatttgtgctttgtttttcttggaattggggtattttttattatcatgtcccaattgatccttgaatttgcaatcccagaatctttagaattggtttgtcctcaattttatgccatagaatataagcccaaaatttgaagacctcaaaccattcttgaaataaatgatgagaaaattagggatcatctctttaaatctggttaagaagaaacctctagatgttataggcaattttgcaagaaattattgaaggtaggcgtcagtattttccagaagcagcttggcttgatctggtggatgcatcatgatctggttgatccttggaagcagaaagtagtcctttggacatgctttgttcaggttggtgaagtctatgcacactctttactttttatttggtttgggcatgagcacagggttggatacccaaagtggatagaatgcctcggtgatgaagtcataggcctgtagccttttgacttcatctttgagggcttgggcgcattgtttttctaataacctccttttttgttacacaggtaagaagtttggaccaatgtttaaggcatgggtcatcatagaggggtctattctgaccatgtctccatgtgaccatgcgaagaagtccaagttttcccttagaaattttatcattactgattttatttccaatgctaaatgggtgcaatgccttgcccaaagaagccatacattacttgtgtgcaggatgccacattggttagttggagcccctatctcttcatatgttgatctgaaaagaatgttggaggagactccatgtccactatgcatcttacaacggtcatattcttaatttgtgtagtaatgacaaggggtcattgttgggttttatggcctaaatcaaactccatttcaatgtaatctttatcttttaaatatcaataaag

SEQ ID NO: 46865 - DNA, 1307 bp, Cannabis sativa
aaaggcctaaggtaatatttttgtgtgaaactttatgtaataaggagaaacttgaattattatgtagaagtttggagtatgaaggttgttttgttgttgaagctaatggtaggagtgagggactggcgttgttttggaagaatgaagaggaggttaatgttgattctttctttacaaatcacattgatagcttggttcagtttgaagggtatgggaagtttcgttttactgggttgtatggtgagcccaatcgtagcttaaggaggaatacttggaaacttttatggactttatatgctcgatcaaaagaggtttggtgtatcatgggtgattttaataatgttctccacaatagtgaaaagattgggggtaatccttatccaacttggctaattgaaggcttcaaagaggtgactcaacaatgtggtttaattgatcttgaaatgaatggccatccatttacatgggaaaagagtagagatactccccaatggattgaagcgaagcttgatcgtacaatggttaatcatgactggttaattaagtttcctgacgccaagttattcaacacggaggtttctccctctgatcatagccctttatttttggatatggagcatcaagtggctgttgaaagggtgagacattttcgtttcgaaaactgctgggtgagatttcaagagtgtgaagctattattcaggacagttggagtaatggtcttcttatgcaccagaatcagttgtgtggtcaggcacttcaagattggggcactcatgtttagggtaacttctcagctcgtatcaagaattgcaatagagagttaaagcaactgaagagccgtcgtgatgctgaagggaagcagcaatatgttgataccaaccaatagcttttcgaaatcttgaactagagagagatgttttggcggcaacaatctaaacaattgtggcttcaaaatggtgatcaaaatagtaaattttttcactctaaagcttcctcgcgtcgtcgtaataacaatattatcagtttaaaagatgttatggggaatccaaaaaaatgggataatggtcttggaaatgtgataaaggattatttttctcaaatttttactgctaaacatggggattgggatgaggttttgaattgtgtaaatcctatagtcaaggaggagcacaatagaaatttgcttaggccaattcaagatcaagaagttaaagatgccttgatcacggttgatcgaggttttgaaccaaagtgcttttattccgggaaggttgatcacggttaatatcatgctttcatttgaaat

SEQ ID NO: 46866 - DNA, 2959 bp, Cannabis sativa
ttcatggtgacttagatgaggaggtatatatgaaactccctccgggttttcaatctaatgattccaccatggtttgtcgtttgcgttgtcattgtacggtttcctacagtctcctcgatgttggtttgcaaagcttgtcatagcttaaaagtggtatggtttccttcaatcctactctaattattctttatttacatacaccaaagggcttgtacaaatgaatgtcctaatgtatgttggttatttggtgatctctggtaatgattccgttgcgtaaaaagttttaaagtatatttaagcagttgttttcgtatgaaacatttaggtgtgcttaaatattttcttggtgtttgaggtggctagaagcacttctagattatttttatgtcaaagaaaatacacacttgatatcatttcagaagccgaattgttgggctcatagcctgttttattcccaatagaacaaaatcatgagttggcttgtgacacagggccctgccttttggattcaaagccttatcattgtttgcttgggtgccttattttttttagcaattactcatcctgacttggcgtactcagttcatgtcttatcctaatttatgcaggaaccgagacaaacccattgggaagctgcattgcgagttgttcgttatttaaagaattctctagcctaaggcattatgttgcgattcgatagtgacttatctttgacatgttggtgtgactcatcttgtcctcttacaagacgatctctcactagttggattgtgtttttaaggcattcacaaatttcattgaaaaatacaaaacaacatacaatatctcgttctttcgccgaggttggatatcgttctatgacatctgttacttgtgacctgaaatggttaaaaagtttgatttttaatttaggtgttcatcattcaaaagctacttctttttactacgatagtcaatctgcattacatataactcaaaatccctggggttaactgccattttgttcgtgatgctatccagaattgtcttattacaccgtcttatatatgttcccacaacaatacaattaacaaacattttaaccaagactttgagaaagaagtaatttgatctatttcttgataagttgggtatttttgacttgcatgctccaccttaaggggagtgttaagatatgatatggtatttgatataatattattttatattaattataggataatctatatataggcatatatttttatttcctaacattatttcctagcattatggcttgatttttaattttgtcgtacaagcttggttgtttgtatatataattatattaaatcaataaaaaagaaatacgatcctaaacttatgccatcacaatgaactattaaaaggttaaacacgacaatcgctttcgacaatgtatgcccataatttttccgtaatattatgtttgctacccaaaatatattcctttatgaaacgtctttgtaagatgtacgttgtacctactatcaataatattaacattctattacaaaataaaatttcacagaaaaaaaaaaaaaaaaaagtaacatgcacagtaaaagattgcaaggcttgctcatggtgggactagtatcaaaactaagattcaccttccgtaattaattgaaggattctgaaaaggaaaaaaataataataagtgtatggacaagatagaacttattagggactgtttggcattgaattgattgagacactacttcacacttttatcagaagctgcctcaaagtgtgaacattctttttactaatttatttctctttttctttatgggttgttggctaaccttgtccttttaacttggtgaatactcaaaagctgagtatagactaatactatactatatactatacttattataggagccaagaggctgagtaccttgcatttgcaacctctttatgacccaaaattgacaacattctgttccttctaccatactagctaccataacttgtcagagctttatatttctcacactaatcattaaaagcatcttggccacatgataaaggcaaaaataaaattaaagccctcatctatacaccataattcaataccctccacacatgcccttatataaaagtaatacctacaactccattctctttctctctcctattgttagtcacaaaaaaataaatcatacccaattagcttactaagctaattatgatcataagctttactagttgcaaatgaagagcttatctttttgtaaactttgttaattcaactcaacaaatcattcttgttataagattctctatctaaacaccatatgatatgatcaaacactttctaatttctttggttgtttgggaaccaaatcatttactctttcattcaaataatagttaattaactatatggtggtgaaggaattatgactttaatttaaacatacaaaaactctcttcaaccttttaaccaatgttataacttttggcttgccaaaacatgaccaattactaaaatgttttttttttttccttcccttttttctttagcctaatttgaataaacgtattcataaatctttataataatgttcataatttttaccacctatatatggacatctctacataagaattaagaaactccaactttttgtgctatatgaaagggtattttgtttgaccaagcacaatttaaaatggagaaaaaaatacaactcgggcgtgcccttatcattattagattcttgctataaagaattataactacatcccaaaaaataaaattatgaagaaaaaagaactttataggcttagagttaatcaattccggaatattaggttactaatactaataatcatattggacaggagacaaagctcagtcatatttagggaacgttgtcctcaaacatttatgtgtttaaaataattatttaattattaatttaaata

SEQ ID NO: 46867 - DNA, 1198 bp, Cannabis sativa
tatatatatatatgaattggattgattgaagtgtcggtaaagagggacccctcaagtttgatggaaaatgtgctgcttttgtctatagattactttgttgtgtgctttagctcatggccagctttgctttgctatctttgtaattatgcagatgtataaatatggatttttgtttatgtgaaagtgggtatattggaataactcaataaaagtatattttgctttcccttattgctatagatatactctatatatcagtattgttattgggtattaatagtgtctaacactttttataagtggtgtcttataattaattagtgatattattttaaaattatttttttaaattatacggatttaatatttaattatatcaataacagtatgacattgaaaaaaatattggacaatagtaccatttagcaattctttatgtatatttaagtcaaagagcatgtggtgtggtgacatgtctcatccttaaccataaagcacaaatgataaaagagagaaagaaagaattggccaaaggtaaaggttaaaagaagaacccaccaaccaatcattatttacttactaatatgtcctatattataaataaataaataagaaaaaagtctatttttatatttaccataattattcccttgtatttcaaggaacctttgtcttttattagctaggctttaaattattcatgccacttttctcttaataattgttagttataattagagatatgttgaagatgatgcccttgtttatagatgctaattttctataattatgaataaaattacattaattaagctaagttattaaatcctatatgccacaaaattagatctttatactttatagagtgtttttggctgcaaatttattatagagactatacttttgcttttggtttgagagagaggaccactttgaagaaaaagaatagtgttccaaagtatataacaaaatattattggtttttactatacattcacttatcacttgatagtgacttaactatttctactaggttttttttgttcttaagataaaaagaaaaggatcatgtgatatgctagtgatcccatcttcaacttaaaacaaaaataaacattcatagaaatcaaattctaaactcataaattgtaacgtccccgtttcaagcctccattggatccttacacccacggaatga

SEQ ID NO: 46868 - DNA, 2196 bp, Cannabis sativa
atgcgaaatttattatattgatggtttttgcttggtaaacgatgaaaatatatgacgaatggaaattagagtcacacgagctagcttagaaccattgctctagttggacaatcataattttgattttgaagatctggattaggctaggttattgttttggaccatttaatccctaggcctataggttacttaagtataaattaaactagaggaatgccactttgcgatattgattctgcgagtactagacttaggattacagaagctactaagtcaacgaagggccacaaattattgagccggtcaagcttacccctcccttttactagaacttccctatatgcaattgcaatttatgtaacaaaggaagatacctagatcttttcttaattaggtgcctctcttggtagattaatacggatagatttattgtcatgccgtagacagatagaaaaatatgtaatgccatatctaaaaaaagaggaacacttataccaccactataggtaagtgttttccctcgagtagagggaatgagttgagccaatagtttttagttattcaccagctaggcggctcaagcaaaaaggtgagaaatagatctacaagtttaggaagttttgtcctgtttgggaaaaaggagaattagctttttgagtcaaaagagttccaagtaatcaaattgaattggttgcatccgtcttcctgcttagtgaatctttaagggatccaatctctcaatcagttggttaaatgcattgacatttacgcattaaatttcttcttttccaaaaagtggaaaaaatccccttgccttgctgctgagtatgccctagctcttttttttctttttgaggagtggctagctgatttcttcatctaccattggaattgagagttgcagaatcacccatgatggctgtttcagttcttgattcagtggaactgcctagacgagcttttcagttgcttcaaaagaattttgttcttcaatctctcagaaagaagaagaggtccccggttgatctgcgtatttaacattttttaatgttccttcttctcctttgcttttgctttggcctaggagtaggagctcaggtcaggcccttgattcttgacctgttccagacctcccatcaacacactcattggaagcaataacagagtggtcagtcctatcttctggcttgtctctggcactgttgagcccattattaagcttcctgataggacactttacccaattattgctgttgggactgtaggtactgagcttgggcctgcatagtcaatcagggttccaaacctgagtattgttttgatagaactacggtttttattttgaaatggttgtgttgcctaccccttgtataggttggcctttggttcagcgacaccactccaattgtattcacctctactttatcctcatacgtccctagaaaatttttcttcctattatttgaggacttgttggaaagcaacattgtagagagggggagcaactgcccagctgtcaatgcattttctatctggtagccagcacaaactaaagaatgaaaagttgggtgatgtagtcaacctattggtatactcagtgttcaggatcttcaagagcataaccattggatctttctctgaggtaagccttttttttctcgtatttcattatgcatccgcatctgttatacaactctatctttggccacttaaaaccgtacagaagcttgactttagggtatagggaaagattttcaagatatgcaacatcatacttgtccccacttaacttattaactacccgttcaaggcgactgattttttccatctgaggatcggacggctgtggtgggacgtatggcactatctgatttatgggtgtgggagccaagtacactgccagtactataggtgtaacgccctaaagctaaggcacgctacagtaatttttcaattacagtgctatctatgctaatcaaagaacttactcgaaaattgtgtcgaattaaaacttttatattaaatacaaaactttataactttatacaatcatttacaagtaccgggatcccttttaaaacttttatacaatatacataaccaggtcgcacagcgactacaaaataataaccccagaagtcccgagaccgaacactccaggtcgtgccgctattacatgtacaacctcatcccagc

SEQ ID NO: 46869 - DNA, 785 bp, Cannabis sativa
ctctcgttcgaacgacgagcaacatccatgaccaccgccacctcctccaccaagcctccatctctcgctctaccttgctcttactccaccttgagctccacctccacctcactctccctcactcctcctcatctcttctcgttctcggtcccaatctcaccaccattgtaccaccaccgccacccacctccacatccaggaggatcttgatattgatgtcttagttcaaggtgaaccaaaggtgagagtttgatgtatctttttatttttcattagtgtattcattatggaaatctcactaatctcttgaatttccatgacagagaggaacaatatagctgagtactttggagaacaattgtcgggatttagcttcactgtcaatggataggtgcaaaagttaatatatttgtaacgaaaatatatctttactgtattgaatataaatgaggtgagaattagttttggtggtgagatatggttctagatctataattttttttttattaactttgtgactatttagaaccgtcgagaatagtgctcactgtagccaacaatttataacagcaggcaaaggaattgtcgattgctataaatcgtcggctatagtgagcactattcttaacggttttaaatagtcaggacataggcgtgtctagctatttttaactgacacatttttctttccattttttgcgatggtagaataggcatcggttatgtggcctgccgacaatacctttactcgactatttaaaatagttaggaaatcaaatttttta

SEQ ID NO: 46870 - DNA, 1257 bp, Cannabis sativa
  modified_base (344)..(347): a, c, t, g, unknown or other
tagcctttctagcttctttgtacagctttccctgcaaaggtcaggcctccttggtcgaacatgcctatttagtctgatagtcacttttggtcggccagcttattctcaaggcttggctagcctacaaacttaccctagccgacctataggcttcctttggtcggccagacatggccagccaaggtcacgatagcctgcttaactccttttgcttattgcttgatagttttcctcgattatattccacttgtcctcagtcttgaccatgtggacatgccacgtcagtaatttagttttagtgacaacaagtattgtgactaaaagtacatttagtcacaacaaannnnaatttttgtgactaatactttttaccatgaaccttttagtcaaaacataggaataatgaattataattttagtcataagttttgttgtggctaaaagtaagattttttgtagtgttaatttactgccctgtcgagcaacaaaacttattaaagcaatcccacaatcctttagcctcctccacatttgctcttctaaaaagtattagattatcaacaaagaataattgcgagattgttggcccgtctcaacataaagagatcccatgaataatattagcctgagcctcaaccaagttagtaaagttagcaacttgttaatagggataatacatcatggcaaacttggtaacattcatgacaataaagcagccaggttgacaagtacggctaagtttgacccctgatcaagggcatatatatagggacatagtccatagtaacgttctatttgtgattaaataattttctttcaaaacaatgaaactaatagaagattaagttcaagactaagactaagacatattaaaagaacacagttgttcgctactagaatctaacaaattgtttaaaatcaaccattcttatctagtaccaaagagaaataatgttaataatctgcatgtaacatgcaatgtttccaggcaaactcaaaattcaagtaattaaaaagtactcaagttgctaaattttagtaaatagcaaaagaaccattcaattttattattatttcctcctgtctaaggagtagtgcattttacctgtagatatataataaactaggcaaattgatggccctattacaagttttgtctttttctttttttactttggtacgttattaatatgtacaaatatattacataactactagaaaaatattaatcaaaattatgttatttatatatatgta

SEQ ID NO: 46871 - DNA, 1854 bp, Cannabis sativa
  modified_base (33)..(45): a, c, t, g, unknown or other
tctcatttttaaaaataattttttgaaaacaannnnnnnnnnnnnataccaaacatgctctaagttttgagggaaactcaaatattaacctcctttaaaaagactaatgtagtgagataatacaagcacttttacttattttagatctgatattgataaattttctttatattgtactcttaattaccaaactatgaataatcaagtttaatattgtaacattctacctttgtttctctaatttgtactgaaaacttgaccaaaaagactcaaccatcaattctcattccatcataataaagtttaacattctatcttaagtattcaacaactaataaagatcactaatcaaaaggaaaaaaacaatagtttgatacaatcataatcttaattagcatgattaatcaaagatcaagtttgttccatatattttgaatcccaatacctattgtttccttagcaaaactcaatttccttctctctttatggctaataacaggcaatgaaagagcttccatcttgaagcttacatccctcaatttgatctcaaagaaacttctgaggtgagttctcatacataagtacacctcatctgtcaacaccataggcaagtcgggacaacgaagagcaacttcaaggcgcaaaacttctttgagtatcattcgaaagacctcgaattctatgccaacatcattctttggtacttcgttcacaatgaaactctgcttgttctttctaattgttttttctactaagtgaatcacacataagaatgccttgatcacaatggaatcattaccatttttctcaacatttaagagttttatcatagccttgaaataatcaagattgttcattaggtttatcctatcacccaaaaccgtcaccacaaaaagaaaatcactgataacataagagatatgtgtgccaagatcaatcacaactttcttcatttcctcaaaagtagtctttctttgagattgattaagttgttgcatccactcaatcaaactcttttcgccttttcttctccccttttcggtttctttactccaaattgtcatgaactcttgcaaatctttcaagtaatccttgaaacaacgatgaccaagatatggaatgttgtacttgaagtatttgtcctgaaattcatcggcgcgtttgctaagacactcggcttgattcgtcatgtctaggaatttgagtttgaattcctgatgatcatcatcatcttcattgttattccccaaaagggctgatgcagcagcaagcaaagacctatattcatttgctattgccaaaaagtattgagaatcttctgagttttctagttcttctaacttcttggaaatgttttttgtgacatatctccatgccgagtccattgcatgagtattatctttcatttctgccatgcatgcatgccactttcaacttctttaatttcttttgtaattctggagagagagagagagagactgactttttagagtcaaatgtcgttttatgtataatgtatatacatatgtaaatctttctgagtcttactgttaagagcatgtggttagattagtcatttcaggaatatgacttctgtattattttcaaaaaaaaaaaaaaaggaatgaatgaatcagtatgatattgtgtcatcaattctttccgttttcaggtatgaatatgaaaataggaatagaaatagaataaaataaattttaaaatatgtaaaaaaaattgataaaaatattattatgttttttctcctaatgcattggaatgatctttccttctattttaaaatgaaatagtcattccattaaaatggtggaaaatgcattggaatgatctttcctt

SEQ ID NO: 46872 - DNA, 2176 bp, Cannabis sativa
ttcttcccaaacatatataaaaaacactgcttttcatcgccttacatatattcctttgtgaaaattttcgattccttttcttcctactcttccttggaagcaaagacaataactagtttagtctagtctttgttttaggcccagcgaagcagctcttctctttctatctctccgtaatggcaaagaagagagaagaaggggatatgggtctgttattggatggaataatagaggccatgccgttgtttgccaaggaactgatcgccggtggggtcgctggtggctttgctaagactgtcgttgcaccactcgagcgtgtcaagattttgttccaggtataacaagaaatgatttgggattttcattttacacttttggagattattgaaactgtttttgcttaatgggtttctggaatttggtcgttttatgtcattttgttaattatttctttgttgggtcttgtgtttgagatattctgaattggaatcaagattggttactctttgttgtttgttagtgtccttactcaatcctttgatgtaagtttgttttcttcaagcaatcactggtaacgctcctgatttaaaagtagaatcaagctgaggaaattgttaaccaatgctgctccaatagaacaaatttaagtaaagaaataagttggtggggattaatgtggaaggctctaaattgccactgttttacactgttagtggaaatgaatttggatcagatcagatgtgtaccagaaagaacattattctccaagtttatagaaagtacttatgcatttatgtgtttcagaccagaagagcagaatttcagagcattgggctatttggatcatttaaaaaaattgcaaagacagaaggtgttttaggtttctacaggtgaattcttatttcattatcattggttcattttttcttaaactctgttaaatatgttatttttttttttttggatttggtacagagggaatggagcgagtgttgcaagaattgtcccctatgcagccttgcattacatggcctatgaacaatatcgcagatggattattgaagcctttcccaatgtagataagggaccggtacttgatcttcttgcaggctcatttgctggaggaacggctgtactttttacttatcctcttgatttggttagaactaagttggcttatcaggtaattaattggagagataagaaattcctaaacttctctgtagtttattccttctctatgtccctcatacagagattaaattaacaatgggaattattgtaggttgttgatccattaaaattgagtgttcaaggattagcaaacaatgaacaagtttacaaaggaattcttgattgtttctccaagacttacaaaagtgctggatttagaggtctctaccgcggtgtgggtaagcattctgcactgctgcacagcatgcttgctgacattgcatgtttttatgatttgtagggaacccttctgattttctcatgaacacaatttttcagctccatctctttacgggatctttccttatgctggtctgaagttttatttctatgaggagatgaagcgacatgtgcctgaagaacacagaaaaaatattatggtaaaacttgtatgtggctcggttgcaggtttattgggtcaaacctttacataccctcttgatgttgtcaggaggcaaatgcaggtaatgttcctcaagttctttcaaattactttttgaattttaggactgtaattgatgacttatatttcaacaggttcaacaattctcgccatcacacgccgcagaagttaaaggaacgatggaaatgcttattaaaattgcccaaaagcaaggatggaaacaactgttttcaggacttagcatcaattacttgaaggtagttgaacccccattctgtctacttttatagccttttccttctttccaggatttagataaaaaatttagctttattttattcaggttgtaccatctgtggcaataggatttactgtttatgatcttatgaagctatacctgagagttccatcacgagatgaagttgtagttgaagtggtaaccaacaaaagaaatattcagccctcgtcccttcaatcctaatcagattttttcttctagatctaggaaagaaaaggaaggggaaacgttaaatgtttcta

SEQ ID NO: 46873 - DNA, 3249 bp, Cannabis sativa
  modified_base (3155)..(3165): a, c, t, g, unknown or other
ttcttgagaagtcactcggcccagcacctcaagaagtcactcgtccaaggttcttgagaagtcgctcagcaaaggttctcgagaagtcatttggccaaggttctcgagaagtcactcggccaagaacctcaataagccactcggcccaggttcccgagaagtcactcggccaaggttctcaaggagtcactcgaccaagcacctaaagaagtcactcggccaagcacttcaagaagtcaacccaagcattttaagaagtcactcagccaagcaatttaagaagtcactcagccaaatccttcaagaagtcactcggtcaagcactttgagaagtcgcttggccaagcctcccacgaagacactcagtcgtgacagtttagaacttggtggaatcttcccaagcaagaagagaatgaagctacaagaatatagacacaaggatagagtaagcacacaaggagagtacgacgatgccttttgaaagttctcaaagaaaggaggtactagaagtggaggcatcgcatctacaaggtctaaagacccatccaagtgtactctatagccactacccgtgcaccccaggaccacttgacaccagacaagagtatgaggtgcaacaccacctcctgcgcatgcagcttgtagggtgaaagtgacactttgttcccttgggaccaccatgtaccttaggcttttatagcctataaatacccctccttcagatgtagaagagcattgaaaaatcattcttgtaaccaccatattgagagtaatagaaaattttcttttttttctatactttgagatagtcagttaagtttgtatttcatatttttcttcatcttaattctgggtttgaagtagagtttgatttttcggccagcaagttagttgatgagttctcaccatcaatagtttggcaccgtatgttggaacgacaagcttcaacaatcgttctttgtcattccttcacaaaataaccattataagatgaccagagactctcgttgccttcaaggcacgcaaattcaccccagtggcaaccacgtgatctcataagagcgggatccaatgcaacccatcaccgaagaagacaatgtgtgtagtcgtaggcctaaagtaagaaaagggagtgagaatgttggcagaccccaaagagaaaggaatgatgcaaacatgtgagggtgtgaagcaaagcaaggggacactcgccatgtggaaatcctgatggataagtagcaaaacagagtcccaacctctgtcacgatcaaaggtgaagatggggcgcaaaggcaaagggtcccaacacccataagacacttttgccccaatactagagaactcttaagtcttgcaacgtggactaaaagagtatcaaaagaaaattagagatttgatggaaggcatcagcaagaagtatccgacgaggctcccaaagtgtagagggacgtctaaactattagaagaggaccttgcataggaggggcactcgtaagggaagagataggtacaccagacaggcaaggcaagagccctaagtttagagcttagagaaaagacctctagaaaatttcaagggagaaagcggcccaatcacctttacagaagaagatgcaagaggagtaaactttccacacgatgacccgttagtacttaaaatttagttagctaatgctccattgcaccgaacattggttaacaatgggagttcagtagatatcctttacttcacagtcctaagcgagatgagactaggacttagagatctaaaaccctgtgccttgccgatatatggattcatcgacaacttgattcaaccacaacaaaaaatagagttagtcttgatagttggggaatgacctcgctgctccacagtgatggtcacgttcttagtaatatattttctagtgtcttacaacactgcattgtggaggcgacgagggtccacggaaaccataaccatgtcaaggaagtttgtatgggacatcaaatttagtggccatgtaggtggtctcaggactcttagttgggagggtgaagcatgtgtacttctcctcctttcccttttggttttgtgggtcaagacacccaagaagtcacttggccaagactcccgggaagtcactcgaccatgcttccttagaagtcactcaaccatgcttcttgagaagtcattcacctaagactcctgataaggcactcggccatgcttcctaagaagtcactcggccaagactcccgggaagtcactcgaccatgcttcttgagaagtcaaaactttcatgtgtaggtaaaggaaacgcgaaagataaacaggagtgagcttgagctaggatgggattgtacatgtcatggcagcgtgacctggaatgttcggtctcagacatctagggtttccattttgtagtcgctgtgcgacctgacataatatatttttgaatttttttgtaaaagtttagaaacgggatcccggaatttgtaaatattttaaataaagtttataaagtttcacattaatatccaaagttttaatttgtcatgattcttgagaaaaatcttcgattagcaaagatttcactacaattgaaaaatcagtgtagcgtgccttagcattagagcgttacaatttttgtatcagagccgccaggtttgtctacagaagcttgccaagacatgtacaatctttatcagagaaagctcagctcacggttcagtaagcctgtacttgtttagtgttatatgtgattatgaaaacatgttaggaagcatattagattatagttgtttattttaaatgtgttgccttaaaatccataagagcggtattaagctttatgatcgctatttgaccaacctggcttatgggttcgaaggctagaggtggttagggaaatacaattccctaaattccctgtggtcacaattgaggccgtggcagagttcagggtggtcaacatgtaaatccaccacaagctcctcctgattgggagaagagattcgtggaaattcaagatcgtatctgttgacctcgcttttagcaaacgacaatgagtcttatttagtaaacgataagtgatctatagcaattgatatatactaaagataatataaagacataagagttttataaaggttcatccctgagcagttcggtnnnnnnnnnnncctcgttatttgtattgacttaagaacaaggagaaaggttcctttcttatatttcttacaacagtatctctgaatatgaattct

SEQ ID NO: 46874 - DNA, 2419 bp, Cannabis sativa
ccctcacagtaactatacacaattagcagcgcatggccatcggtcaacatcaagttgtacaagttcgtacggatgatggttatccctcaattgggcctcacctacttggcggaaagtctatattataatatattttaccccatcaatgggcttaaatctcatgcaagccttaacaggtccgagtttatacgtaaacccgactctagcctaaaaatatggctttaacccttcatgcacagggttacaaatttggccacacactctggtaaaaaatttagaaagaacacttgtgtaaaatactccatagccaaagacctcaataataatgacttgtggactgaggttctttaacgccccaaccacgtaaaaattctttatcttctttacttctaatcattttccttaagcttaatgtatttcttaatcgatttctgaaaaatgataacatcacaactagtgatgtaaatacaggccaaactttttgacatggcatgatcgaaactggcacgagtttggaaggcacgagcacgactcgacatgaaaaaatatgggcttaggcacaacacggcataatactgtaaattggcacaacaagatacaaaaaaaatagacttaagcacgacacgacacaatatgcctgaagacacggtatgtaagcacgaatagagtagcctaaaagcacaacacgttaaaaattcttataattttaaaattataataatacagatttatattttattaaaaaaaatcaaattttaatcattctaattaattcttttaaatgattatgcgtaaagtattatcgaatatttatataagaaattaaaaatataaaaaatacatataatttagtgattaacttgttagttgtaaaaaaaatagtgaaaaagtgaagtccaaattcgacctcatataagaaaattggctaacctatttatgaaaaaagataagtttgagaaaagcacaacaagaaaatataggcttatgggtcgtatgaggtctaccctttaaaatattggtacagtatagcacgacccatattttttatgagccaacacgacatgatcgatattattactggcttttcaaaatatgaatcaaactggcccgcgacatgcacatatctacagctatgatcacaacattggttctaatagaataaaaaagttgtttgtaaaaaagaaatgtaccattattgtcataggttagctaatagagttgcacactatttaactaagttaactctttccaaaaaaaaatcatatatttggtagcttggttattatatgcatgccttgattgaggtagtatgaataatttacactcaatatgagttttaattttttttacttaaatatggtagctttaagtttttgactaattttcatggtatttttttaaaactatgttatggtattaatttgttatgccatatgtaaatttaattttcaaaataaattgttcactgaagatcctttatcaagaaattagtttttttcattaaaaaaaatttcttaaaaaatttcttcatcaggaaattggttttaaattggttttgattatataaaagtaaaatttatatacgaatttttaagtttttacccatccagcaacgatcgatcggaacaaaactcaccaaagatctttcatcaataaactaattttttcatcaagaaagtagttttttttttatcaaaaaacttgctttgattatatagaagtaaaatttatatttgagtttttaagtttttaataatattttttctatctatgatgatttatctaatatttttaagtttttttaatgttatatttagtacaattaaatttgcatgtcataaatatgaagaaaaaaaaatgtgtcatatttttgtaaatagttcactataaaaaaaaaacactttttcgtcacaacataagttttttgtaattaaatgtgacttttagtcacaacaaaaagttacttgtgactaaagcataacatttagatataagttgtcactagtttagttttagtcacaacaagtattgtgactaaaaatacatttaatcacaacaaattgtgatttttgtgactaatattttagccacggattttttagtcagaacataagaataataatttataattagtcataacttttttatttttagtcacaaattttattgtgatcatattattattaatagtaattaatcatatcttttattacttttttttacttgacatttatggcacatacactttttaaagaggccatttaaaaaaaaagaatgagaaactaaaataaatcataaactcatgtaaaattcatcaatttgttcttatgtaataacaatctaatctactacgcaaacataacagagtaatactatatataataaataagtcaatacagctatgcatttaacaaattta

SEQ ID NO: 46875 - DNA, 1055 bp, Cannabis sativa
  modified_base (1007)..(1011): a, c, t, g, unknown or other
ttttttttttcttttttgttattattttcttataaagtaagaaaacttaatcatttaatatatattaaataataatataatagtgttttaataaatttttagaggtgtttacaattaaaatattttagaacaaaaaaagataaaaataatatgaaggagtaaaaataatatatttttaaatgatgtgaatttttttttaacaagtatcaccgttagagatactcttaacatggtaaagataattcccaaaaaattgttagctctccatgcttaaagaatgcttaaaatattgttaccattgctagctcatagagcaacttctaatataggaaatactttaaacaatatttgtttgatgagtttgatgtatttttaacttcttttacagtagatgtttatttttagagtgaaaataaatgttaattagtaaatatgcctaaaagtgacatctttgctgttttctctctctttcttttcttataattttttttgtaaagtaagaaaatttaatattattataatagtttctagaagtgtttatcaatgaaatattattaaaataaagttccaaaaataatataaaaaaaataatttagagaattttaacacttttaaaaaatatcaccattagaaatttttaactttattactatagaaggtgacaagaaagaaattataaaaaggtgtttttttttttttttttttttttttttgataaggaattataaaaaggtgtttaaactgtaaaaaaattactttaacaaaatgtaagatagaaaactatacatatttacatatttacatatttattatttaatagatatgaatatatatatttttggagagctaggttattaattagttattaagtggttatatattaaattaaaatatataaaatttcattaatatttaaatacagtaaaatgtgagtggagtcgtgtaaagtattagaatattttatttatggaaattattttctaattaaggaaatgattttctatttnnnnnaataaataaataattgattttctgttaaatgaatattttatatt

SEQ ID NO: 46876 - DNA, 3376 bp, Cannabis sativa
gtaaaataaattccaacagaggatacatgggatccccttgcctaagccctctcctaggttcaaagaaaccatgtaatgttccattgaacataagagagaacttgggagaggtgatacaattcattattagctgtatgaacttcctgggaaactttaatccttctagaatttcttccaaaaactcccattcgatggtgtcatatgctttttgaagatcaagtttgatcatacaactcggcttattagctttcctgttatagtgcctcaccaagtccggacatatcatgatattatgccctataaaccttcctttaataaagtctccttgagaatgagaaattatttcaagaaggatgttgattctagaactcaaaatcttggttgcaatcttgtaaataacattgcaacaagcaattggtctaaaatctttaacattgttagggcatttagtttttggaactagagtaataattgtggaattgatttctctaagtattttacctgaatccaaaaatgatatcatagtttcacatatgtcatcccctatattctcccagttgtcttgaaaaaagctactggaaaatccagcaggccttggagatttattcccatgaatactaaaaatagccttctttacctcctctttagaaaatccctgtaacaacatattagactgttcttgagtcatcactagacctctggccaggattctgctctcaacctgtcttcgattcaccattctggtaccaaggagatctttgtagaaggctaggaaagcttcaataataagttcaaaatcgtgcactctattcccatcatgagtctcaattgacaaaatgcgattctgcctcaccctatgcttaatacaagcatggaacaaagcagaattgtagtctccattttctatccaagctattttagctttctgctgtaagaaagaagagaaatctttcaaaactataattaacaactctctagactccttctcccttctgtgtaaatcactacttagtggctgttgttgaatctgattctgcaggttctccaggtctaatttagccttactaacaacactttgtaagtccgagaacccctccctattaatctccttgagtttggccttaaaatgcttcgttttggtaatcacctgaaacattttagaccctttgattgtcaaactccatacctccttcaagcaggtttcaaatttagggtgtgtcttccacatttgaaaatatttgaaaggcttttttccactcaccaaaccaggatgtagagttagaagacaaggagaatgatcaaagagaccttcattaaggagcactgcttcagcaaactcaaaactattaatccaagattgattggccaaaattctatcaatcttggagaatattctatcttcaccaggctgctttttagtccatgtgaaaaaattaccactagctttgacatcctccaaattacaagtgttgacacactgcaggaagtcagaatcaggataagattttactctttgaccaatcctctcttccttagcaaggatatcattgaagtctcccatgagtaaccagttgtctacagtagctaaatcacataagtctttccataaaagcttcctttcaagtcgattattagaagcataaatcacagttacaaaactgttaaagccatcaactgttgatatctttaaatgcattaattgactagtgcatttaataatatcaacagtaaatctccaacgattccaggcaataacaatttttccccctggatgccaagctatgttaaaagagaaacaccatccttcaaatacattcgagtacaaggtcccaagttttggggccttgactctagtctcaagaagaccaaaaaaattaacattttgaacatgaataatttgctttattagatgttgtttatgttgattgttggctcctcaaacattccaacatagcaacttatccatttgagagagagggctctcccccctgtcttggccccttcctttgataagttctcaactgcttcaatgactaattcctcaagcaggtggaaagaattccttacatctgtaacagcctttgctgaagtattaaccactatttgatcttttctatctagtttcttgatccttgtcaccttcacaaatccctcctcaaacttgtttcctattatcatgtttaacaatccactcttgtttcccattagtgtgcttcttacattctgcagcaagatggcctaaaccagagcaatgagaacacgctactggtttccattcatatttcacacccactattgtgtttgaaccaaactcaatctcaaattccagcaagtttggaaattcctgatccatcaacacctcaactaggaccctagggtagttcaacctctctctttccctagtaactgaatccaccataaccggttttcctcactggccaaacgatcttgaacaaagacctatagccccaatacttcaattctagctcctccaattgaacccaaattggcacacacttcacatcttcttttttaaagttcacattgggatcccaaggcttcattataactagtcgtctattaaagaatatatagcctccattcagtatttggtccctgtattcaagagagctaaatcgaatgataaaaattccatatgaaaacatcttcactcgatctatcttgtctttctatattctattgacaaaaccttcaagaatgtgcaaaggaaggtttgctcccaagacatagcaaactatcgacgacttccaaaatgtaatttccatactcaatgtcatctaaggtaatcctcaccttgctattttcaagctcagatttcttaaaagagtaatctaggttacaaacaatagatccagatcttaatatcagaggggtcggaaccttaccttgagcaatttcactattacattgctcattagctttgaggaaatgcacaaaatcgttcctgacgtcctcttgtttctgaattgcttccagtgaagatttgcgagataaaggaggttggaaaacatccataagagcgggatcatcttccttcagaacctccttgtccgacatctccaaggggttaatttcaacaagttcatcgaccaaagttgcttgaattgtatcagatcctaatttctcacccttcttcttggtaatcttggtagcagatctagatttcccatgagtttttgacctttttttagccatatatggcaccagctttctcagctgcaagagcaagaacccacaggagaatcttctaccgccttatacttctcatatatatatatattgatgtttggaaggatttttgtgaaggaaaaaaagggtaaatattattttgaatcctgtgttttacaaaagttac

SEQ ID NO: 46877 - DNA, 1516 bp, Cannabis sativa
ttattattttaaaattagttttaataatcagtatatgtctaaatggtaaaataatttaaagtgtttttatattcttatacattagataattggttgaaatttttttttctaggattttatatgtgaatatatatgtgtttatgattgtgaatgtataaatatatacaaacagtatacaaacagtatacaaatttatgtgaatgtaaatgtatgaatgtataagtgtttgatttttatttaaaggtaaaaaaaaattgtgttagtttggttatattttgtgtatatgtatgttgtcacatatgtatattactaactatttttgaatgattttctttgtagaagttagtctctcttttatgagatctctatctttgagaagaacttgtattttaagaataggctggttattttttgattattaatatggatatgtatattataagactttaaatatcttagatatttattcatagtaaagtatgttttgtgacatgtactgtatttgtatatgtgaaaatatgtattatgaaatgttattttgttttaattgttattcttgtaagctcttgtaattgttagtttaatctttaaaaattttaagaatgtcgaattatagttgttatgttacctaaattgtggtagaaaaataaaaataaattataaattaattttaaacttcatttttaacttaataaaaaattgaaatattaaaatttaagtaacttcaaaattttattaggttactatttttacgattatataatttaatgaataagtaatttatattttaatttgtatggtgaatagttattaattaactaaaagcttaatttgtcataatatgctatcatttatttataatgaaaaaatgtaagatgtcaaataaaaactaatttataatcactaaatgtattaataattaaataatttatcataatagtcattataatttatttaaaatggaaaaatatatgatatattaattaatcaacttaaaaattctataattttgaataatatattaaaaaaaataatttaagtgaaaaaaataattcataataattaaaaataatgaataagcttaataattaaaataattatgtatgtaaataatgaatttataataataaaagataattcctcataataagtgagcttaagttttttaaaattaaaaatttgaatatgagctaaacaaatttagtaatcttatttatttaaaatttttcttagatggcgattgattaaagttggataacgaaaaatcgttgtgatgatgtcttctatgcagcagacaccgcatatataagcagcagatgccttcaatgccatcaatccaacaaatgccaccagcgtcttagatgcatgcagcagatgccacacatacaacacaacctgcaaatgccaaaagtctcgcaacacccttgctatctacaaatatgatgaggaggaggagtccacataattaagattatagtattgttattcgtaataatataagtattgtttatttgaa

SEQ ID NO: 46878 - DNA, 975 bp, Cannabis sativa
  modified_base (509)..(509): a, c, t, g, unknown or other
attaaaattaaaagtgtggtatatatattattttagggttgtgacttgtgactgacgcactttatatacaaaaataactcaccttatgatgtaattagtattattcatttcatcataccatatttaatattgttatagacttcaacatatccttacttaaaattaagagaatttctatttaactaacatgttggtgatgcactataattgactaataatttcacacatattatttattaaatcaaattttataaaatttaatattaaaatatactaataataatcaatacaccactaagttttagtacttgacttaaaatcttaatacatatatttttgtttaaagtgttttcataaaaatattggattgtaggtaaaaatttacaatgttttttataaaataatcgtaataaaacaaagtaaaacaactaaaacaaacagtggaacaactaaaaaacaactgtagaataattgtaaaaacttaacacatagtatttttgaaaaaaaanaaaaattaaaaattttagtatgtgatttaaaaactcatttttctacattataaaatataatgtgtgtaggattacgtatattcataataatatagtaataataatattaacataccggccaatcatcattaaagtggcttgaggattagttccaggagagataacaaaagttgatccatcaacaactcgaagtgaattagtcccaataactttaaaatctccatccacaaccttcccaaccagacatcccccatgataatgccaaaatgtcgtaacagagcttcgacaataatcttccatagccgaattatctgactggttggcaggcaaaggaggacccaaatacatgaaatccctagccccattcaaatccttgtacttaaatcgatctaaggattttgtttccaacatctcaccgacttttctcatcgcgctaacgcagcgagcaagatcaatcgggttagag

SEQ ID NO: 46879 - DNA, 807 bp, Cannabis sativa
aaatatatcatattattattatatgcatatgtatccatttctttttaaagaataagggttgaataatgaatacgtagatttttcattaaaattactatcaattaattaacagaatgtattggtgcttcttttttgaagcaatataaggataagactatttagtgttagacaatagtgttatgtatcatttttgatattttgaggtatgtacttttttattgagattcaattattgtatgtgagatgtctaatgagatttgtattttttcacaagagtacacagaaggagtagtggtggattataaaaagtatgactatgtgcccttgagcttctcttagttgtccatgtagaagcaagtgtgcttagctaacactattacaatagaattgcaatattgtgggagagaaattgcagaaagatcatagaataattgtactacatatatgtgtgagagagagagtttgattaattattggtggctacccactaattagtaattttattttttggacacatatatggttttcctactttctaacatgtacgatttaaatgcatatagaatagaagaaataatgaagatattttacatgccatgatcatggagaattttgaagagatactggcttcctccacataataaatattaacaacatgattattattgaccaaagaagaactggagatgactattggatctttatcttggtaatttttaattggtatttgttggataaattcccatactattgtcccacaaataaagttacaaggaaaataaattagacctctttataaagcctcaa

SEQ ID NO: 46880 - DNA, 1665 bp, Cannabis sativa
tgtcgccgattttgttgattttaaaagcttttatacgccaaatgatatgaaactcaacttcatatagcactacctataaagtctttaagtttatcgagctaggacaaatgtcgtaaaccttaacaaaataaatatttaactaagtttttagggtcttccattagaaagagcccttcaaaaataagcgtatgccattaaaagtgacgagcacacggtattctttagtaaaaggcgaaagaatagttcgctttgtgctcaacacatggctgcgtgaattttaaagactaattgccaccaactatatagtgttactctttgacaggaatgttatgctctttccagtgtgggacaatattacaaaactgcaagtacattctttctacaaagataagattagtaagtaatattggactacgttcattgccttacattattagttcattaattagtttcatacatagttaagttcccttttagtttataactaactagtcagtagaatttgcttcagacaaagctgctctgtgatgcaagttagtgcatgatcgatcagccttatttacttgaacagcagtaggtgcaatgtgcatgcattacaaaattgcaaatatattctaagtaaatatatatatttatggcaaggaatgcatgagctagtactggttataggtctaatgctcttcacagcaaaaaagaatacttattttcttgaaggccccataataatcaactaagttaatattcctacgctccaatatataaaatagccagtgctatactattagcatactcaaatagcacttaagtgttaggcaatattctcccaatactaaaatccaaaaaaatagaatcattctaatattaattttggaagcgaaaaatatagttaaattttaaacttaattttagagttttctataagaaaaactcttcaaaaataagcgtatgccattgaaagtgacaagcacacggtattctttagtaaaaggcgaaagaatagttcgctttgtgcttaacacatggctgcgtgatcttaaatgatttatcattagttgtattatagaaaatctcttggaaaagttcttaagctttcttcaatgtgggacaaattgactgagaattggtacatatatcattacattcacaatttggctgcccaaaactagtataatacttctcgtgattcactctaacttttaacagtaaaatagattgctctaaatatttttggtcacatattaagaaattacaataatcaggcaagatcccatttttgttttatttgttttttatcatatttactgttcacttttcttttcattactttatcaatccaatttttcttaaccaaagatgaacatttgtacgtagtagtactagttactatataatcttgtaagctacccataattatcgaaaaagtaactttctaagtggatcagtcgttctagaaaactttagtgggaaagcttgggagtattgggagctcctcgaaattcatgtgagaaatcatatacagaataacagagatagggtcgagcctaaattttgattagtagattacttgaggtatattttagtatttagtttataaaatgttctacaaattataaaaaaatggtaaagtacccaaaattttaaaaaaaataaaactacttttttggg

SEQ ID NO: 46881 - DNA, 1543 bp, Cannabis sativa
tgttatcaaataatgtaggtttttaaaaaaactttgtgataaaaagaaaagcaaagtaggtcttaattaataccttttccgggagccaacaaccttgttgttatctgaatccccagatgaagataagtcaacctccacactacaaaaattgcaccatcgaaaaagtatgtcaacgaaaaagggtacgtaacgccatctatgcttgaaaccaacagctttataaatgaagagcctaattaattactgttactactatgtgtgaggatataaaagagatatacatatatgcatgtactaataataattcttaatctgaaattccaaagaagcccggactcattcatgtacaaacaatattacagttagtatattatgtggaacggtaatgaactcactaattagttatatgatcttcaattaattatgacacgaccctcatgtcatgcatgatgtggcaaaaaagtacatacacatatatataaattgtaattgtatcattaataattcaaatattaatttatttacgactccaaccaaatgaaatatattgtttttgacttttaaaagaatgtcaatagtaaaatttccataaaaataaattataatttcttttttttttagaaaaaaataaggaatatttatattctgttgcctgaaattaaatatccatttagtaagcagaataatattattcatttattgactttttattttataatatatatgccctgattaattaaactttgataaatttaatgaagacaacaaattaattaatttataagaacaaacaaagcccacacacaccttccattagtggaagcattaagttgatctagctgtggaggccaaatgaaaccggtggctgcaaccggaaattcgcctccgggaataagaatatcgtccattatggtatagtcatatagccaattacagttttctgtggaagccatggccatctccatttctaattatatgtatgcactaaattaataagagcaagtagggaaagacgaattaggaatatgatatcacagaatcgatcaataaagagaagtagagcttagactgtagctagaagtttagaaatattcagcacagtactaataaatcccagtccgatactgtactctaagtggagatagagtagagatcagtagttattagacaaacaaaaaattaatattgaaccaactagtggatttgacaacatttatttataacacttctcctcaaagagttgaccaatgataaatcattaaacaaattaaaattccaagaatatgtcttcggtatcttgagttaagtaacatgattttcaaagcagttggaattattaaattgatttgagttttgttattgggataaattttctctgaccgccagaatgacttcattaatgaactcacattcaaggaaaggaaagcacacctcgcatatatttaatgaaaccgtagtaataataatagagaaatgctaaaggacactactggtgcctagcaccctcctacgtgtcaatatcgctattggtgtaattaagtat

SEQ ID NO: 46882 - DNA, 2184 bp, Cannabis sativa
aaatatatataacttaaaataaaattaaatgcacgtaaattttcttctagtatgctcatagtcatgaaaagagacaaaagaaaaataaataaataaataaaagagagaaaaaacagagagagagagaaagacacaccagaaggagaaataggattgaagagaaagattactttatttcggtaaaataatcttcagcttcggtgtaataatctttcgtattaagatcaatgaaatgactagaattatttttgttattatttttaatattacgtatactattacaaacttcactttcactttttatcctaattttttacgttaaaattctcagtaaaaaatattgtagtatcattcatttatttatttatttattcaaatttgtcgtattgttttaattcttttttaagggacatatgaggctttctagtactaaaaaattaacatgaagagttttgtttatggcatgttgttgcatgtgcacttgattaaattttacacgtagataccttgttggcctcacgtaggttactccaattaaaatgggtgatacaaagtagttgagttcagcccatcaatccaagttatatatttttgagaccaattatgggtctatgttatggagcatatatacatccatccatttcgttgggattttttttttttcttttttttgactaatatataacttcaaaggaaaaacaaacacaacaagaagttagaagagtaccattccagcttcccctaaaactttcctagtcaaattatgagcattaatatgattacagtttccaagtgagaatacatattgttggttaacggttgagtatgcaataggcaatttattgtatgataaggactaccttgcaataaattatagagatatttctaataactagtttttggacgtgggttccactatgtatatgattgaagattgttatattatttaatactggctaaatactattttgaattctatattttgcaatagttactaattagactctctattttgttaaatgataaatagaccttatattttctaaaatagtataaataaaaccctgagtttaatttttaacaattttatattttagtatatataactaactttaggacaatttctaacacgaacaaatacataaaatgtaatcatttttgttataacatctatagattagattattattaagttttattttgacaaaaaatcagttccggattttatttgtacaattttgaaaaatacaggatctattttgtcatttaacaaaacaaagggtccaactattaacttttgcaaaacaaagggtctaaaatattatttatccatattaattattcaagaaatatatgcttaaattgtaataatataaagttaattgaaaaaaattatcaatttgataatttgtatatggtaaatctgtttcagaaaaaattctttaaggaattattagaatcattgatattatcttacattatattatgaaaaatgtaattttaaaacagtatgtttgaaagacattgaaataaaagaaaattacacatcattagaaaatgacataatagagttcttgtaataaaataatacattggatgatttgttctaaaataaaaaataatacatttgatagtaaactttaaaatgaaattacaattagaatagaaattgacacaataataaagagttctttcaatcaaaattagtcatcaaaaatattaaaattaaaattatcttgtttttgaagtagaatacaaaataatttatttttaatagaaaagatttactaaactacaaccaggggcgaatgtacatatggggttacaatggtcgtgacccctccttattttttacaaatcatatatagtaattgatatacaattgcaactaatatacatagctacaaacaataaaaaaaaatactttgaaaattcaaaacaaaaaaatgtatgtgattgcatttcaaaagagtaaaaaaaataatattttaatataaataataaaacataaattttaatttttaaaaagtaaaatattagttaaaatcaatatttataactattatttttttaaaaagtaaatataaatataaatatataggatagggtaggatagggaagggaacacatatacccgtacccaactttattatgtaacgccctaatgctaaggcacgctacagt

SEQ ID NO: 46883 - DNA, 2089 bp, Cannabis sativa
ccatcttagcacgcacgttacacgcagcaatggttgtatgaaggacaggtagctttgtccacgactaattagcatagaaaagcttgaaggcgtgggctgagagtatatatgtagccaccacattagagaagtactctccattaatatcatgcatgttggtagctttgctggtgcaaacaagacatcatttggattatgggtatggtggtgttactgatgtattatcattattaattaacttgttgcacgaagagtggtgtcgtagtaagtgttccaatgtgcttttgggagagagaagaagctggctttgctacaactgctggttgaatttgagcagcattgactttaaagttatggttcgaattagcagtttctttgatcagtgtgatggtgattgtggagtggtctagtggatccaattgttagattaacactgtatcttgtagtacgtaccaagtgatgatccaacttgtggagtctttgtcttggatgtgaagggtcccccatattcaggttaggaattgtagtaaacagagatcgtcgagcaagttgcatgaggagtgaacatgcatttccttttaaaataatcagtgtgataacaatcatagccagtcataggaacaccttaaagttctggtccataagtcaattcaacctccaacctattatcgatcaattagtcaaaaatatttatcatgccatcttaatttaaatatagagctaaattggcaaatgaataaatgttatatttgttataatatgtatacaataatattttttttaagatataaatgagtatatacaaaagtaaaatattattaatgatcattaaaaatatatatatttttaaaaataattagtagcaatattataatttaatatgtatattaaagtctattattaatgattaatgacaaactgtaatttttttaaatgacaaattgtaatttaaaaatatacatttgatgttctgttgtgttaaattatttgaattttagtttttagaaatgttaaaacacaacaatattatatcactattttcatacttaattagaaatattataatattatagtgcatacataaaacatgtacgtttacattttttatttaaaaaaaaaaaaatcaaaaaaacaagtgagcaaaattttgggtatatttcgtgtggtttttactgaaaaaaatgtgaaaacaattctgggtagtattgtcttctagtaatggataaatactttttaagcaataaacgtgccagctagtgaaatattagaattatcatttataattgtaaagtgtatacatcatttcaaagtattattttttttattttatctcacatccacataaaattttacatttccttaaaaaatacttaaatagttgacaattttaggttttatatataaaaatattaaggtggtatttggttagaaggaatgaaatggaatagcattccaatagaatgctctttccaccattttgatagaatgactattctattttaaaaaagaataaaataccattctatataacaagagaaaaaatttaataatttttttatcagttttttttatacattttaaattttatttcattccattgctattctattttcattctcgatcttattcctatattttcattcctcccaactaaatgtcatctaaaccaatatttttttagtaaagaaagtaaatttttctctagctataaaaaaaaaaataaaaaattgaaaaaaaaaaaaaaaatcatgtggttgtggtctcttttgagcaatactcaacacatatacacataaaattagtcttgagacaatattgcatatatggcaatggcaagaccactctaataattagcaactcccattaatttgtacattatatagatcgtattctattagtattatagtaaattgtattgtattttatattttttttatattattatgttattttaatttgagtaatttgcggcataaatacttaggtttatcttctagttgtaatttaatacctaagttaaaattttggcggcataaataccttctgttacactttcagatattccgtaggtaccttgctgttatcttgc

SEQ ID NO: 46884 - DNA, 1737 bp, Cannabis sativa
tatacatattttttaaataattttaaaatatcatttatctttatagtaaggactcattttttataacccatttcaactcagggtcgatcttatttggcagtaatctttagcacagtggttgccaggcgtgaatcaagtggctaatttgggatcaatctaagaatcttgttagaaatttgtgttatgttgctcttgcatgtgtggtttgtaacatttggcttaataaaaaattatgtatttttgagttgaaaatctagcttaaaataaagctaataatatgattaaaactatcattaaatttgaatttataattttgcgagtaaaaagctttcaaagagacattcacatagtgtgtgactcttatgatggtgttagattatatttttttttaagctttattgctcatgtcgttgaaacttaaaattgattgtttaacagctgtatctgcttctaagaagagaattatatttaaatgattttagatcattattagatgatgtggcaagtgtgttatataaatttttaggagtttttttgatacgtatttttcagatagtcaatgtgactgctcatagattaattgtacatgcttttcgaatggatgaataatttgtttgtttagataattttcgtttttgtcttttggaattttaattaggttgttggacaatattcttatagttcaatgatatatttattgccttaaaaaaaccttctttcttgataaaaaaaaagactaattaagatttttgcccctcatactttagcatgtactaaattatatccctaaatttcccaagttcttaaaaattccccccaaactattgaaattattggattcaagtacttctaaccaatttcattcaattttactaacgtgacgattatctttataccaaatcgtcctctctgattttaatacgtatcaatcataccctcaaactttaacatgaaccaaatcgtgtcccccaaactttcatcagacttttgctaataaacttagacgaaatccttgaatccaacaatcttaaaactttggaaatattttttaacaaccgaaaaaagttcagatgccatcataatttgatacatgttaaaaaaagttcagaaagcgaaaatcttaattagtcattaaaaaaatacccaatcgtaatttcaaaaaaatatagtggccaaaatcatatttttggcttttatttaaaactccctttcttcttcttgaacaagaaaagtactgagtagaagagacccctttttctctctttcgctttttcttttccattactcttcttcccccaaaccccaaatttctctccgatcttctctttcatcagctcgccatgggagacagtcagtactcattttctctcactaccttcaggtacataaatctctctttctctctcaatatctgtttttttcgtttcagtctctgatgtttgatttttgaacagtccttcaggaaagctagtacagatcgaacacgccttgacagcggttggctctggtcaaacctctctcggaatcaaaggtattactgcctcgcatttgttgtctcgtcttcaattgatgcttagtttaatcgatatttttgaattggaaacctaatctcaaatttaattgattttggggatttctttttttcttttggtgattaatttggtgtgaggcgttgcaagattttggctttggtaggaaatgtaatggaacgtgtgtctttatatatatatatatata

SEQ ID NO: 46885 - DNA, 965 bp, Cannabis sativa
gacttgtgggaatttggtttcaacaaagttttctcatcagacactttactttgttcttctaatttcaggttcaattggtgtgatctcgttgcttgtcttatcgttgcacgaaaatctgcatctggttttagccattttgcttttaacatcagggagtgctggtgtagcaatatcagatgtgacaatagatgcatgtgttgcacagagcagcattagtcatcctttgcttgcagccgatatgcaaagcttgtgcgccctgagttcgtctattggcgcgctcgttggatactctataagtggttttttactccatcttataggtcccaaggttagctagctagctagcttctgtatgtatgttgttgtagttttccgagctactttacattccgatctaaaattatgattattctcgttctttgtagggtgtgtatggcttgttgacgattccatctgctcttgttatttttgttgggattgtgcttaaagagcctcacatgcctaatttccaatacagacaggtatttgtttcgatttaatctgtcacagctacacaaaaagttcacacactttcaagaacacaatctaaaccagaattctcttagaatagagaagaaaaacagtgcaagaaagtagaagaataacaccaggaattaaacgagttcgagctaagtgtaatgctctacatctcggttgaacagcagccattatcatcttcattaatcaccaacagttacagagttttagaagttgttctaactcaagaacacttcagagtttcaaaactcacttttctaggggtccaggatcataactgaattacctaactcaatcccgagccaatcaatattagtcctagttggaaactaacaagaatgctgaatagtaacttgtaaccatttaccatagtattttgggcttttattaggctctctcttacctctatatcccatgttgaacaacca

SEQ ID NO: 46886 - DNA, 1234 bp, Cannabis sativa
ttagtttattggataatagagagctttttgttttgtttttctttgttcatggttttttgggttgatttatttgaactgaactatcatcatcatcattcaggggaataagtgatgaggccctggcattatcagatttgcactgtagcattccaatgaatgggatggttgactcattcaatgtctcagttgctgcaggcatccttatgcaccatgctgtttgtgacagaacttctcgcctggtaatatgatactactaactaactaccatatgattgaaattgatgatatgtgcaagactatgattgttctttccttaaaaaaatgaaagaagaacttgacaaccttaattaaatcaaggtttggctgttgacatttttttattgttgcacaaaatctactgcagggctgtcacggtgatcttaccccgaaagaaagtcaaattctacttgcagaattctctttgcgtcatagcagaagttcaattaacattgcttatgagtatgcaaagaggaagccacctctccttaccccgaagctttgatctcgagtttgatacctaaaagtaagtgactacaatagagacaacgaactgtatcaactcgacaagagaagttttgctttcatttcaacgcaaatgctatgttggtgtaccatagaaagccaagttcagcatgtggaatcagaagcttaataattaggcacttgtgctgttctgttttgtattttgttattaggtaatttattgttgtgaaaatgagataggggtgaaaagtgatgcagaactctgagaatttaatgatgaaagagatcaatccatagcttttaaattagtattacatttttttataatttttttgagtacatttaggttaattagaatttttgttttttgaattttcacatgaattaagttacgttctaaagaattctctcgagctatcgaaattgttaaatttaaagtttttttatcaaattttactaacagaaatttaatatgaatgaaaatttaggaactacaatttagtacatgtcaaaatttaaaagatacgatttaattttagtagatacaattaaagtttaaaaacacaatttaatacatgaataatcgatacattagttaagtaaaattagataaatttgatttttaaatctaaacaatctcaatagttcaaaagaatttttaattgaaaaattcttaaaaaccataataaaaattcaaaaaaacataatttat

SEQ ID NO: 46887 - DNA, 5678 bp, Cannabis sativa
caaagaaattccaaactagtatataaataaatagtaatatttacctttttttgccttccaattccaatatttttgccacaagcatagctgtgaagcactttaaagggtccaataccataccgatatgatattaatgttgatttgtctaaggtatgtgacacaatttttggaatgttttgcagaaaagcattgagattttggaattctaagtatgacatatttgtttcatataatacaggaaatcttgaataaccttctaagagcaacagagatgaaccagcactggctgaggcgattgggattagagaggttctcagcagccggctgaggtggagacagactgcccttttggtggttcaagacttctatgaggtcccagttttagttaaacattcattggcttgcctgagctgcttatactttcactgatggtatttttgtagatggtgatcttccctcagacttaatgccactgttaatggctgatggtgttccttctttgtactgttaaggatttaaatggaaagccttttgtgtatatttgaaagggtattgcagtgtcagtgtgtttgtgttatgccttttggctctgttgtattgcataatatatttgtttttctcattctttgtagtttggtgtttggttggaataaaaattctctaacaatgcacaaataaaaataataattataaataaaattatagattctgatgagtcacatcacagtgcacataatagtcaaattatgtagaaacattatttaaaaatattatatctttagaaatcaaaagatggggtcaaacagaaactttctgatttccaatttttatgattaaattttggtctattgcattacattggattgattgagtgtttgattattattattgctaaattatacatcaaatatatatgattactgccattctaattgcatgttttcttccaagatttgtagatatatatgtatatgcatatatatcttgtgttaagacttttatgctttttgtgaacagagaagagaactatataagaatatggtttaattggaaagaaccaagaaactaacaaccaattatgttaacagtccaacaatgataatgataagcacctaacactcactttcttggtcaaaaaaggtgtaaagcaattcagagaattgactttgttgctcttcttgtaataattataccaaaaccattggcctaagctttctcattttcatgctcttgcactcatgttcttaatttcactctcttgctctgtgttatcatttgctttcctcatttgagaattatggctgaagctgttctcactgttgtgcttaagaatctgagctcactcatccaaaagcaaattggatctgttttgggtgtcgagaaagagatggagaagatgtgtagcatcctctcaaccatttctgctgtcattgaagatgctgaagagagacaatcaacaaatcttcctatcaagaattggctgcaaaaattggaagatgtttcttctgagttggaggatgttttagatgattgtgaagtagaggcctttcgattggaggagagttttgcacatgaccattcatggattcgtaaggtacaatcttctttatcttgtttgagtcctaagcatctttactttcgtcatgttattgctagaaagatgagagagattggggatagattggatcatattggaaatgagcgaatgaattttcacttgcgggaggttgatgttagggagagacgaaatcagattagagaaagtcgtctgactggttctgttattactcaaccacatgtgtatgggagagacgaggacaaggagagagttgttgggtttcttcttaatgatgcaatcaactgcaatgatacttctgttttttgtattgttggtttagggggaataggaaagacaactcttgctcaatgcgtcttcaatgatgaaagagtcagtattcattttgagttgaagatgtgggtttgtgtttctgaagactttgatgtgcgtagattgatcaaagctatcatagaatctggaactggaagtgcctgtgaagcattggagatggatcctctgcagaaacgacttcagggcatgcttcaaagaaagaggttcttgattgttttagatgatgtttggaatgaagatcatgagaaatgggacaaattgaaatacatattagaatgcggatcaaaaggtgcttcacttgttgtcactactcgtctgaaaaaggttgcatccattatgggaacaacaccaatgcatgaattgagtagtttatctgaagatgactgttggtcattattcaagcaacgcgcatttggtaaccatagagaagagcgacctaatcttgtggaaatcggaaaagagatagtgaagaagtgtaagggagttccattagcagcaaaagctttaggaggcttaatgtgtttcaaaagtgacgaggaagagtggttttctgtcatgcgtagtgagctttggaatttaccagaggaagaagccttccatcttgttgcctgctttgaaattaagctaccttcatcttccagtagagcagagacgatgtttctcttattgtgctacgtttccaaaggatcatgaaatagaaaagacacgattaattcatctttggatggcaaatgggttgatttcttcaaagccagaactcaatcttgaggtggaagacgttggaaatgagatgattaatgatttatgttggagatcatttttccaagaggggaaagatcagtatgatggaagcatcaggcatgtcaagatgcatgatttatttcatgatctagctcaatctataatgggtgaaaaatgtcataatgtgttggttaatgatgatactcacactactgtcaacttgtcaaaaagagttcgtcacttgatctgtatgtttgatggaccaggtccatttttgaacataccaagtactgaatccttaaggacattcatgacagtatcaaatggttcattctcttgtgataatgattggaaatttcgctcattacgcgctttcagtaacaatggccttttatttaagttatccatgtcaagtagagctatatcatcattggtcagtaatttgaaacatgtacgttatttgaatctctcaagtagtagtattgaagtcctccccgattccatttgtttgctacaccatttgttgactttagacctaagccattgctatgatcttcgtaagctacccaaacatatgattcgcctgaaaggtctccgccatctttacattaattattgtcacaaattatcacacctacctccaaacattgggaagctaagttgcttaaagactttgacaaatttcattgttgataagagaaaaggttgtcaattgaatgaattgaaagaccttaacataggaggtgatctagacatcagcaacttagaatatgtgatcatgagtccaattgaagctagatttgctaatctatcagccaaaagaaacctcaaaggactgcgtttgtcttggaacaacaatgaaaacatatctgaagagaatgcaaaagacgtactcgaagctcttactcctcccacgagtttgaaatggttagaaattgacacttacaagggtgtccatttcccatcttggttctgtaatgacattcttggaagtgttgttcgcatcactttaactgattgccataactgccaagaacttccctgtttcgggaaactaacatctcttcaacaacttacaatttctcattttggaaagattcaagacttgccaactgatttcctctttggccttaatgcgctacaggatttagaaatcagtagttgtcgcgaactcaagtgcctaccagagggaatgtttcgagattgtccattgcagagtattatcatatatgattgtaaaaagttaagttcactatctgaaagttttaagaatcttactatgcttaactctctacaacttcgtaattgtccagcgattgaagaaggctttccaagtggtcttaaccatctcatatctctccaacttctaattataagagggagctatgatgctcctcaaagcttggctattctgccagaggggttgcagcacctctcctcacttgaatatttggaattatcttttcttagggagcttgcattgttgcctgattggcttggaaatcttactacccttaaagagttcaagatcaaaggttgtccggatttggaatgtattcctatgagcatgcaaaggctgaccaacctaaagaaattgtttattgtgaagtgcccaaaactagagcagaaatgtgagaaggaagtaggggaggattggtacaagatatcccatattccagatgtgagagtagtgagataattgaagaaggtatgaaattgaaagttgaaacgaagtcatgagatgccaatatgatgaatgtttgtgtaaataagacttgttaattaccttatattattagatacaaaaacatgcttcaatgagtactctattgctctaactaatgttgcattttcatacattattatatacaatcatattttcttggaggataaatctggtttttgatttcaattttgtaacttaatgcttccaccaaaggtcaagaatttgctgtggcgagctagtttaggttgcctttcaaatcgaattggagtgactttgggtcgtgctggtcagatcatatggtgatctggttattgaagctgggatgatatgttgacaaatgtggtagctgagaatttgtgctcattcatttctcattctttatagttggtgtgtttttgagaagagaaaaggagagagagagtaaatgaatgaagagtattttcattactgaattggtcaaatatatacaaggcaagatcaaatgaagtaaaagctatgctgcaacataacagaatacaatacagttgacaaagccaactaactaacaggtgttttgttggaatagaaataaaaattcagcaataaaattagaacaaattaatatatgtaagtgtgattgtatgaattgttgttgggtttctatcaatccaattgtaatgacacttgtattctattgttttgtatggttggtttagattaggggttactcaatagtcctctcataacatattcaatagaattatttttccggacaatctgtaaactttcatagtttacattgttaaaaataaaattcaaacaattactaaaaaccaaaacgccaaagagtgtgtaccctcatggtttttttgccacaaacatccttaacagctacgggatcttccaaattgggtcttcacaactctgcaatggtgaatttgatttaccgaattcggaaggattttcaaggcatgaagttggaaatgaaatgttcccatgtttgtcttctttgcatgtgtttaaatggatggttggttgtggtttgaattcccatccccaaaagattgttcattacagagaatattatcatataaactattgtataattaatgttaattaagatcactctctgaaagttttcagaatcttactatgattaactatctacaactcagttattgtcatgcaatggttgctctgctcctcacttgaatatttgattggagctttcattggagagaattgacacaatacatatcccatattccacatgtgagagtactgagatcagtttggtgaatctagaatgaagctattgccaat

SEQ ID NO: 46888 - DNA, 1194 bp, Cannabis sativa
aaaatccttgcccttttggcaaaaataagtggatctattctttgtaaacaatagaatcaatcaacaatccaaaacctaaaaaataattggaattgcaaataaactatatacatattcttaagaaatattcatgtgtagacatcaataattagtgttccaaagataagctttgaataaagaaaagaaaactagaaaaaagaacatgaaaatcaacaaaaaaagaagatatcaatataaaatctcaaaacaagtggcaaagttgtgtttgcatggcccaaattagaggggcctttaattaggacaaaagccatcttttaaagtcattaaatattttcttttttaccatcttttgataaatgcttatgaaataaatgtctcttttttattttatctttactgtaaaatatatcttcttctactttttttttttttctttcgatattgataactaatgaatttcaaaattttgaattattcgataaaaaaaaataaaaaaattaagtggggctattatagagtggcccaaataagatctcttatatctaccttaacaactgggatgttcaacaaataacgaatacttttcaccattttaaacatttttttaagcaattgcctcgatccccagatacaaataaatatgaataatttaacactttattgtgaggaataatatataatattgttaattaataataattccctagtttctttttctttttctttgtaggacttcttgacctctttttctctcctaaattcaaatcaaaattgtacatagtttatagttaaagatgtcctttaccttagtactactagctttaatattattaagattccaagactatagttttctagaattaatccactcataatgttacaatatcaaaaactatccaatcaagttatctttatataatattaccgaaaaatgtctgattattatcaaccttagaattacaaatattattttttaaaaaaaagttggtataattaataacaaaaacaatagatttattcataaaaacaaattaaataagttatttttaatttttaaaccacgtaaggtctaatcataataaacggcaaatcttaaaaaactattggtaacatcataatcaagttactgataataagtacgtattagttttttttttgggtagaacacataatatataatcacatatatatata

SEQ ID NO: 46889 - DNA, 650 bp, Cannabis sativa
atatatataattgagatggccgttgaaaatttggatccaagagaaaaattcagaggatatgcacatgatcatgtataaactataaatttatgtcttcgattttataatgtttttatatatatataagataattaaatgaatattacgtagtacagttaacatgtatacaacaattaataaatacattatatatataatatcacatagtttacccaggaatactatcattatatattgttggagtattttaaatgtttattaaacaaccatgtatatattactacataacctatattttcattagttacatatattattatttgataatataatagataagattaattaattgtgataaatatatattataagtaaaatatatattaaagtatttggaggttatatgtatatatatgttatatataatgtaacaaaccgtgaagagttacatatgtgaatataagatttgtaacatatatattatatttgaaattatgtaattaaagtgaataaaatacatgtgggagttataaaattaaatggatagatatttatttatagtgttgaaatgagtattgggatgtttgggaaagagttgtctaaaaaatgagagttaaaactaaaaaatagtgtgctgaaattgtcttggg

SEQ ID NO: 46890 - DNA, 1611 bp, Cannabis sativa
acgatcagggtaatctcgttgggggggctctaggtatgttcgcaaacctttggcacaaatcatctttcaggacgtattctacataatctttcttcattactggccaaaaatattcttgtgttagtattttctttgagagacttgaacctccggtacgatctccacagaaccccgcatggatctcttgcatgatccgtttagtttcagggtccgacccacaccttaagtatgacatactgagtcttctttagtagagaatattatccatccttacatactgatgtgcctgatactgtagcctccttgatatggccctttcctgaggcaactcgcctttcgtgatgtatctgatgatagagtccatcaaacttggctcttgctcatttgtcgctaatgtttctttaattctgatgctcggctccgcgaggcgttcaatgggtaccacccccagtctctctatctcaagtccgatgctaacttggccaaacagtctgcttgagcgttcttctccccggaaattctctccactttgtactccgtgaactcatgaagtagttaacggacaactgctacgcacgcgaccattttctctccacgcgtttggtattcccttgagacttgattgaccaccagttgtgaatcgctggagacttctactcttgtagcccctacgactttttccaacttcagtcctgcaattagggcttcatattcggctttgttgttagaagccaggaatgcaaaacgcagggctgcttgaagccgaagtccatctagcgatatcattgctatcccagcatcggatctgttttcgtttgacgctccatccgaataccttccatgctggggtctgcgctactggcacacttgaactagcttctgcctcattgcattccgttatgaagtctgcaagggcccgtccttttattgaaatgcatggaatgtagtgtatgtcaaattggctcaattccatagcccatttaaggagtcttccagacgcttctggcttctgtaagacttgccaaagtggatggtttgtaagtaccttaatgggatggccctagaagtagggtctcaacttccttgaatccattaagaggcaaagaactaacttctcaatcaaaggacaccgtatctcagcccctatcatgcgcttactaacgtatagtacaccggatgctggaccttgtcctcttcccaagacgagggctgcgctgacagcgttctcagagacagctaagtatactaacaagtcttctccgtgaactggctttgaccttttagttttttgaatgtctcctcgcattcttcaatcaattcaaatttttgacacttctttaaaatgttgaaaaaagagatacacttatcggttgacgggaaatgaatcgacttaaggcggcaacctttccagttaagctttgcacatctttgtgcttcttgggggaaggcatgtttagtaaagcctgaattttgtctgggtttgcctctattcctctttggctgacgataaatcccaaaaatttctttaacttgactccaaaagtacacttcttcgggttaagtttcattccgtacctccggaccacctcgaagcattctgtgaggtcgtcc

SEQ ID NO: 46891 - DNA, 1486 bp, Cannabis sativa
ttggctacttgggaagtaagcctgctaatactcccatggaaactaacctgaaactaagccaagaaggtgaagaacaattggatgacccaaaattgtatacgaggattattggaaagctctaatatttgacaataacaagacccgattcggcatattcaatcaataaactcagccaattcttgacttcaccgagagttaatcatctccatgctgcacaaaaagtcttgcaaaatgtgcagaacattccaagacaagacttgttttattctgcagaatctgaaattagacttgaagcttacacagatgctaattgggcagcttgtgttgacactagaagattaacaactagtttttgtgtgtttctagacaagtctctagtgtcatggaagagcaagaaacaacacactatttctatagatcatcagttgaggcagagtacagagcaatgccaaacactacatgtgaagtaatctggttactgtcattactgaaagaattgaacatggagcaccatggaccaactatacttcaatgtgacaacaaggttgcacaacaaattgcagccaatccagtatttcacgagagaaccaaaaatattaaaatagactgttatatatcttgttagacagaaggttcaagaaggaatcatcaaaacaaagctcacaaatcaagcgaagatcaaattgcagacatctacaccaaagcccgacctgtttctagttcagttcaatgtcttgaaaaaaaaataaatttttgtaacatatacactccaccttaagggagagtattaagattgttaatgtgtagtgtttgttagttagagttagttagtgagcgtcaatttcagttacaacttacaaagtcgttatttaacaaccttttttttttttttttagattttcccatgtatatatataaacattgctttattcttcaatgaaggttactgaaatttcattcatttatatctcaattattccatttctgttatatatatatacacaacaaatacattatatatattaatttagttaactaataggtaaattaagatagttgcgtatggaaattattatactgatctaataattgaataactataattaatctatttaagatatcaataattgtaaaaaagaccattgttacgacacacaaaatagctaggaaaattatagcacaatcttatatatataaatatatattacaacttacgtggtacaaaaacatgcatgtacatactcatgcattattctttgttataatttaaaatttacttccaaacacatgatataaaatcaccagccatcttaataaattcttactaaataattattatattttgtaataattattgaaatgtaagagtgatcctggtggttactggtcaaactacaagtttgatcttcatgaatacaatgcccttatattattcaaggggcatagccaccaccatgaccaacaccttctccatagccactccctt

SEQ ID NO: 46892 - DNA, 1647 bp, Cannabis sativa
  modified_base (1048)..(1062): a, c, t, g, unknown or other
taggatgtttcaagagagcttgctattactagaaaaggaataattagaacaaacctaatgatcaagacaatgatgcaaattagggagagaattaattcaataaacaaaagccaatttgagtgatggctatgaaagtggggaattttatatggttgccccaaattttaaaaatgaatggattcttgattcgggttgtactttccatatgactaatggtaaatctttacttactcatttcatggaatctaaaggtaaaaaaggttattctaggcaacattaaaatatgtcacattgaaggttcaagtactgtgaacttcaaaatgtttaatggtgtggtaaggcctttgacaggggtaagacttgtacctaatttacctagaaatctaatctctataagtgttccagatgaccttggtgttgtcagtaaaattgaaacagatactatgaaactaagcaagggttccatgaccatagtgaaaggctataaggaaggaggtctctactacctaaaaggggaaccagtttctaactgccaaaattgcaacaccctagtagttaaggcgtgttatcgtgattttatactagctgtgcaattcgttgctaatcaacgggtttgttagaaaacgtgattaattaaaactttacttattaattcacctttaaatgaaaataaataacctttgcataaatcgagatcccatatttaaaatatttacaacaatattacaaaatattagttacataagttgtcgcctagcgactattcaaaatatagccaactatcctgaagatcgtacgctctaggtctaactgtcccaacatgtacaatattcatctactcacactcactgttgcttagccttagctttgcttttacctacacatgtaaacaataactttgagttgacagactcagtaagaaaagcataataataacataaacttaaattggattacaataaggcgcccatacaccctataataacctatcctacattccgtgcatactgagtttagaacgttcgtacgacagtactattgaccatannnnnnnnnnnnnnncggtactctagtcgtaccgatgtcatagcattaatcagtacttagccaaacatatattgatgatattcaatgcgtctctatgtacattaatatcgctactataatatgttatctagcagacattcataaacatgcacgctaaacatgtaatcacatatgcatattattatactagtcttaccttgatcccaaatttaggtgtgtcagtcaacctgaagggaactgctactcgatgatttagagacccctaaatcacaatatacgcaaagctgataaatgatacgctaaattatcttttagggacctaaaatcataactaaaagttttcccatccatggataacatagcaataccctatgtatcgtaaaaacatgaaaatctagggttccaaaattgctacaaccaaaaaaactaaatttccaaaacaaaaaaattggttcttaggcttctgctaggggaacgagttgatcagttctacagggcaagcctaaaccagaagaccgattctgtgtaggaaccctaaaaaacctcacacaaaactcaattctaccacaaattgtctcaaaccttccagaatacctatac

SEQ ID NO: 46893 - DNA, 1544 bp, Cannabis sativa
aacaaaacacagggtccaattggtaacttttgtaaaagagagggtccaaaatggtatttaccctattaattaagaagtattttaatggggtggggtgttatttcctaacattatagttatattgtttaaatttttaagaataattttttattacttataattcgtaataataataatcataaattgagttaacatgctcttaattaagttaaccaatgaatgattttggtttgaagatgttcatgcttgattcattgaataattgatgtgaattcttaaagttaaagtgattctaatcaccttgggaaaaaaaatagaaaggatgtttgaaatttttgtgataattttatttatcatgatttatacatttttggttagaaataattattacttgtgaatgtatagttttgataaagtgttgtaaatagttagtataataattataaaaaatatacatatattataaatttaacactattaacatttgttgacatttataaatgaatgacaagtaattaatattaaaatttcaatatttttccttaaagttattacatcattttttttcaattattgatttttttactaagcaaaattttaaattatatagttgagttcaaacacattattacttgtaaatattgttggcctaacattattatttatatatataaatatatatgatgggtttactaataaatacccatctttggaattatatcgatttttttattatcttagtttgttcttttaattatcttgggcgtgctgtgccatatatctgcagaaatgaaatatatttattttttattattattttaaaaaaacattatcattgttatttttttgcacaaaaaatatattatcatgttctatattaacttcttttcgttttttttttctgtatctgagttaaagaaacagagagacacccaacccaaccccatagtaattaagaactctacattttcccccttggatccatactatttttttaatcttttgccataaatatatgatcaacaacttggctttttttttttttttgaaaaatatgaaaaaaaatatttatatcaatgatgaagagataaaaatttcaagaaattaataggtcaaacaacacacatttaatatttttcaacgttgcatatgacacaacctcaactagtaaaagtgtgaaatacctataaaacaacgtatgaatgggtcacttaaaacaatgacaagaatcaattgtgacaaagtaccacaatatatataccatactatcaaaaatagacgttatctaaagacgaccccatcacctttaccatattctagacagtcgcgactcaaactcgaatctcgaccaccaaaactcttaaacacatcaaggactcttaagagaaactccagggcacacatcccggccctcggctaaggccacgggtcgagcctcgagagctgggtataaagaaagtgagttcgaatggaacaattttattataacaataatatatcctcaattaactaattacttcttaatatcatttttttcatttaga

SEQ ID NO: 46894 - DNA, 1318 bp, Cannabis sativa
ttaatttaattttaaattatttataagaaaatatatttaataattttattaaataagtaaataagtttagatattctaaacaatataaataataaatttattattcaatatgattaattgattgaatgaacgtctaattcaaatttaaatttataaaaaaataattatttaattttgttgatactttaaataattatttaagttatattttaattaataaattaaatttacatatttattttcttaataaaaaaactaactaattgatttaagggtgttagtttttagatgtgtgtattacttattaaaaacctccaagtaaaaaagaaaatatcgacgtctgcctattagtatggttagggtttatcctgtttcatcttttgttagtcatttctttgttgtctttggtgaacgtcagtaagtgatcatccctttggtaaggctggtgtgattaatttctccaacgtttggtacagtgttttctccaagtcttgggtctttggtccgactggttgtaattgtgcgactgttttggttcgactggtttttgttcgactagtttttgtgtgattggtctttggtccgactagtttttgtgcgactgggggtccttgagagtgaccagttttagcgtacaattgggggttcttgtgtgtgactgacttttgtgtacgactgggagttcttgtgtgtgactggggtttttgtgtgcgactggaggttgttgtgtgtaactgggggtttgcgtacgactgggtttttggacttgttattttgatagattggttcttggctacctggtttcatctgtggttggtttttgatagagcaagtgaaataaagggtatgatgttacaactagattcttggattaggaacgggtttgtagttgagctggacaagaaaatgaggaatggttatagtgataatttctttattaagttgttgtggaatgattacaagaccaagtatggggatatgctgaatttaagtaatttaaggaataaggatgttgtactatgatactactacaattaattaagttttataataaaacataaccaattaaattttagtatgttagttttaatgtggcaatataggtagcatcccttgcaagaaccatttgatgttataaagttgtttatataagaacgtcccataaattaaagagtgcctgcctttgcttgtgttttgttagttcactatcatgcaaagtaataatcaaaatatgtacactttagactctacagcctaactcaaaaattgcattgtaaacattcattggtctgattacaacaaatattatatttgtaaa

SEQ ID NO: 46895 - DNA, 1798 bp, Cannabis sativa
gcaaaacccatgataactcgaactcctcaatcaacttgatccataatcgtctactaaaattgcattccaagaacagatgtccaacatcttccccactgcctttacagccgacgcaccagccaggggaaaaacataggtgaggctttctcttttgcatcttatcatggacattcactttgtctaaagacataatccaaacaaacactttaacttttgttggtacacaacttttccataaaattcttgtcccgcatagcccattaagaccagaatttgaaataaaccagcggaatgctaatttacaagaaaacacctctcatggatccagcttccaaatacgactaccatccaaaatattcaacacttctacatgttccaccttttgcagtaataaaataaggctaggaacctcaccttcccgtaaattcctcctaaatttgaaatccaagctctctacctagccatgcccctcgtcaactatcagatcctttatagtcgcattcctagctttggaaatcactgctaagtcagggaaggcactgaacagagaattatctccaagccaaacatcttcccaaaaccaaatactgtctcctctaccaatttttaagtgtaccagtccaagatattcatcatacaaatctgaaatatccctccacggacccttaggagacaactgacatcctttttttgtgtcccacaaattgtcagccatactgtagcgactcaacaccactttatgccacagcgaatcaagttctagagggaatctccacaaccatttcattagcatacctttgtttctcatttccaaactcccaataaccagcccactttcattctggggcctacaaatgtcctcccacgccaccaagtgatctcctcccaccaagtccccaccttcccaaagaaatctctcatcattttctccataatcaagatgactgcctttggagcttttaacagggaaaggtaaaaataggaagagatgataggatagattgaataagagttaatcgtccaccccttgataaaaatgagcattttcacccatcaagcttcttagcacatttcgccaacattggttcccaataagaaagttttctaggcgtatctcctagtggcataccaaggtattttaaagaacagtcccccatttcacaccctatagtggcagctagattggtaaccacttgctcctccatacataagcccaacagttggctttgctcatgttaagcattaagccagataccgcacaaaatccttcaactaatctgaccagtctttgtaagtgactaactcgaatcctatcttttccctctaacagcttagactcaacagctttattcaccattcttcctagaacatccgctaccaaagtgagaagaaaaggggataatgggtccccttgtcttagtccccgagacccgttaaactttccccttggcttcctccacttttctccaaaccctttattttccatcacaaggtccaaaaaattccattctacccgatcatatgctttttcaaaatcaatgttaaagaccaatcctttcttccctctatttctatagtcttcaactgtttcgttatcaatcaacacagagttcagtatctatctaccctctacaaaggccgactgagtgtctaggatagtctctaccaacactcccttgagtctgcaagcaccttagcgatgaccttgtacacacttgttatcaggctaattggtctaaagtctcttactttgcaactgttaatctttttttttaaattaaacatatgaaagtttcat

SEQ ID NO: 46896 - DNA, 804 bp, Cannabis sativa
gggattgcacagcttacccggtatttcctcttacggatcacgggactactgactatcacagttgagttaaaacttcttttcatttctctgttttttttttcttgctctttagcttgttactttctacacgcaagatataatatatatgaatataacgtagaaataagagtgtggggttttgaattctaagttttggtttgaaccccaagccaatccaaagaaagaataaagtttctttggaaacgctgtgtgatttgattcaaaccttagtgtctactctctctcaaaagataaaccacattttttgtagtgttagttaaaattagtcatatctgactaatactcagttagaaccagtacacttgttattgttaaagttttaatcttaacagttataagttagattgaaatattactgtctctctaacactcttggtattgcctttaaataccaacttcttttacaatcaaagacaacacttttcagaattctcccttcctcttttaaattctctctctacagaaataaagttatataactcaatcttcttgtgacttcatagttgttggtgattattactactctaacaccaagtgtgaataaatagagattaaagccaaagacaagcaactgatcgaacctcgttatattgctgtaatttaatttttattttgtatattttatattttattttcttaatttgttggttcatgttattgcactagttattatttttttgttctgattgttttcgaggtaattaaaacacactttctctgttgcagcaagaatatatatatata

SEQ ID NO: 46897 - DNA, 1424 bp, Cannabis sativa
  modified_base (1210)..(1210): a, c, t, g, unknown or other
aaaggtttcccctgtctatgaactcccaaaatatatagaaaggaactttgaaagaggttcatttgggatgggaactctgagattcagagccactgttgaactatctaaacccctattctcaggtttcttcctaagaagggaggggattaaagacttgtggatccaatatcaatatgaaaaccttccttgaatttgtttcaaatatggagtcatgactcatgagcagaaattctgttttaaaactcctatggtgattaaggatggtaatggagctttcttcccaatgtatgggaattggatggatgaggatgcagttgaaaggtcaccattttaacaccccctacctaaatggttcaatgaatggattatgcaaaagatggcagcaaaggacctgaaagttcgtcatcgactccaaaaccaaagaatctcagattatgtggctgaatcagagtgacgtaagttgcagttgcaatatccaggtaaacagagataagttgaagtggtcattgaaaataggaaggcgatcggggaagtcatcttcaataggttcctgacggtgactttgccaaggatcggtgaagttaccccttttgggaatatagccgaaaaatgtgcttgaaaaggtcatcccaatgaagcctattgtggtgactgagacagaacaggatggcttggacattgttaatcagaaaaagacagtagacatgcctaacatgacaggggtaaaggtacttgttcaaaattagaggctagcattttgggcgttaacagtggagcagagatgcttacctgttcagaccttcttctagaggcttctttgtgctctgtcttgagtacttcctctgcatccattaccattttggacaaaccgatgtaatgaccgcattttatagtatggattagtaaaggcaattagcactaattattgatatttttatagttatttgagaatttatctaattgtgggtcccattattaaaagtgggcattagagttataatttctcaattctaaagattttattaaactgtaggtgtactatttaagttatatttgaaatatgctatttttacaattttttgctttgcgacaacaaaaaatgtgatggatggctattttaatcacatgggtaagtctagaacctttttgttagtgggtttaatgttggagaaaaatagaacaccaagtttgagcggggttatggtttttnaccattttacccctaggcttgaattagctttaaattatgcaccaagggtattttacattttatgagggggattaggtggcgtttattagaacatgaaagatgcccctttttgtgctgaatattgagttgtataatgcatttttagaaaaataagaaattataagaaaatcaaaaaaattagagaaattcaacctcctctctctctctctctctc

SEQ ID NO: 46898 - DNA, 1624 bp, Cannabis sativa
aacattattttctttttaatttcaaaaaaacaaacattatttttttcaagcaattatatattattacacaagttttatttgattcatatcttttttttttaatgtaagtactatttttaaattgaggtgttcagaaaattatgtgatccaattacattcggccaatttaattacaattaatctagtaaaattgaataactaattataattatttagatgtaaattttaaaaattcaattgaatcaaattaattgttagatgggacgttaaggcaagtttgcctttgatgaagtggccgctaagaaagttaaatgcattcggaggttggaagagcatatcgcttaagatgtggttttaattagttgccaaacaagtgggagttgtctagccatatgctcaagtggttgagctagctcttactactgaggatgcgagaaccaaatataaaagagaaacagtatgaggagagattcataaagcaaacgcctaatgttggtcccgataagggcattgaccctggtaatcggaagaaaatgcctaatgaaccgtcagctacaagaccgaataaaagatttcaaggtaaacaaagttttcgacgtggtggaaacaaaaattggtgaacctatccagagggttgaggtgcaagagacgccatcaaggtaaatgctaaactagagccgcttccagtgtggggtagtaggtcatctgaaagaaactgtctacagttacagcaaccagaatagataggtgatgacactttagttcttggttaggtgtttgctttgacccgggcagaggctaatgctggtccttttaccatgacaagttaaatttctattggcggtaacttttgaaccaaaaggtgaggacacattcatgttcatgggcaagaattaagggtctcgaattccattaatctcagcttaaaggctagagaatcgctatgggatggatgtattagtttcctatccagtgtggtggatactacaaaagaaacaccgacgggaccgaaacatgtatcagttgttcaagaatttctagatatctttccagaggagttaccagggttaccactaaagtgaaaaattgattttgaaattgatttgatactgggggtagagcctgtatctaaagcttcgtatcggatggtacctgcagagcgaaaagggttgaaggttcagttacaagggatgttgtgcttgaaattactagcccgagtacctcaccttggggtacaccaatttttttgtgaggaagaaagatagaaccttatgaatgtgtattgactgttgggagtcaaataaattaacggtaaagaataagtatactttaccaagaataaatgatttgttttatcaatggcagggaaatactgtcttctctaagattgatccttggtatggttatcaccagttgaaaattcgagaggagggtattcctgagacaacttttcgtactcagtttgaacattatgaatttctggtgatgtcctttggattaacaaatgctccgacgacattcatagatttaatgaaccgagtattcaaagatttttttagatgattttgtaattgtcttcattggtgaaattttaatatacttgtttcggaagagacacatgaga

SEQ ID NO: 46899 - DNA, 871 bp, Cannabis sativa
  modified_base (799)..(799): a, c, t, g, unknown or other
taataattatcacccgaaaaataggacataaaaactaccaaattacacacaatgtaacattgatataaagaaattctattggatataaccatgaaatttaaaaatccgaagcaaacaaaaacaaatacgtactaacattattgtgaaaagagatggagttttaatgcaatgttcttacaagcaactaacaacatcacattcggttatattcaatacacaatgaaatcattgaataggttgcttcttaaattacactaaaagctaaaaatcattataacatcaaagtgtttcaatacaattatgtttagcaaaaaaaaaaaaaaattaaaatgtacaaactttctaatctataatgagagagcctataagaaagagccaaaattttatggctcataaaaaatcctgaaaatctataacacaaattctgaaaaacgcctttaagagaggagaaatatcacggaataaatcattagccatggagcgaatttgagcaatttttttacctttggtgtactcacatgatattttttaaactttgatttttaatctgatggtaatgatttgttgtagtttatttgtaatttcaacttcctttttttttgatccaaacaaaaataactaaaatataagtactgtatttgcacgtaacaactacttagtatataataaattaattattataatatatgagatttttttttaaaaaaaataattaactatcaatatgagtaccagtcatcagtttttttttttaattaatataagttagaaaaaatattttgattttggaaggtaggcntggatgataaatacttatgagaaaaataataaaagaattaaaagaattaaaaataataatttatacaattat

SEQ ID NO: 46900 - DNA, 1610 bp, Cannabis sativa
ttggcgttggaaaaccacggttacaaacaccgaaaaggaactgtacagattttgtctgaaaataaacaacaaatataatggtctaataatactgaagatgatataaaacaacagaaaacatcttctgttgcagaaaactttcccagtctctgataagatctaggaaggatagtcctcaagttcggggttgtatgttaagttacaattaggcaaaaaagcatatgcgtgcagacggtgatgtaaagcatttgttcattgatagaaatttaaggtttggacagcttttgttgttgtgttgctgaaggttatgttgtgtgagcctagtttagtgtttcattaccatagagttatgactaaaacattttgttgcatacttgtgtaaatttggggatgaattatgagatttggtcagaaacttagtcttatggttttgcttctttgtattatagaatttcatcccttgtaagttaggcttgtagcttctacggtattcagattctttattgtattttgaattcgagttccaaaggcgagtttgctcggtaatgtcactaaattcatttattcattgtatattcagttatgcacttagtctgtctattattatcttttgttatcaaagatagaatgtaagagtcattccttaagttacattctctgacttgttttctcctgttattgaacttgtgacatctgactccgaatctgacatccttcgatttatgtagttgaaagaaagagcagagaagcttgagaattggaggatgaaagagaaacttagagaagaaaagaagaaagagaagaacgagctgttgcgccgaaagagttccttatgggttgaccaatctggattggagaagaaaatacttgaagcaattgttgacacaacacccttatgatagaataacaaatgtaagttttatcaaaaccacaccttgtttcttttggacttcttatgatactctttctgttatattatgtatatgagccaaccatagttgcatttctctcaacatttttatatatcagtgtatattgtaaattgtagctatattcatgtccaaaattgactattttgaattatgtgtcataattttttgagtaaatataattgtagattctgtattttctaaaattgtacaaatgagactctgaactaattttttgtcaaaataaaacttaataataatttgatttagagatgttatgacaaaattggttatattttttgtatctgtttgtgttaaaaattgccttaaagttggttatattaaaaaataaaattatgaaaaattaaacttagagtcctatttttaccattttgaaaaatataaaatttattttgtcatttaaaaaatagagtccaattaataacttttgtaaaataccgaattcaaaattgtacttaccttaatttttttgaagataagaaatatgcatctagataagagtgaccccaagatgtaattgctcttaacttttattatattgtcaaaacttgatgaacacattttggccattgttctttattttgtaggtacatggaaaaacttgaagatgtccttcgaaagtactcgatgaactcgacgattatttaaacaaccgatatc

SEQ ID NO: 46901 - DNA, 1500 bp, Cannabis sativa
  modified_base (1013)..(1020): a, c, t, g, unknown or other
ttatatatataagtagttatttgtcaaaatatgtgaattttttctaactgttaaatattcacaaatatagagaaacccctatatattatctctatatgagcatattataaataagtaggttaatttttactactaaatatatattatatcatgaagtgggaattttatgattggtttatacgtttcaaacttttatatatgaagtcttttcctacaaattcatgatttttatatatgaagtcttttaagtaggttaatttttactactaaatatatattcttacttgtacacttcctgtaaaaaaaattcaaaagattatttatcataagattactctaagcacgtttaactagaattctcaaatgatggaccaccaaaaacaagatatactttgttcatatataggtcgtatatatacctaccaattcatttaaactcttttcaacagtgtaatcttatttatacacagttttagaatctttatgtttgatcttctctaagaaaaagtgaaattgcacaacttacttaatatattctgttacaaatcacaaaactactaacaattatagtaattttatatataataattatcaaattaaattatattattaaaatagtataacacacttaatagtggcgtaaggcataacactaaaggcctatcaccacccccatctaataattaagatgttccaacaatatatttgcactccccttactactttatatattatatatatattttatattattgtaatttctttgataaatatatttatataaaaaaaattataaaagagttgtacatatttatatataaatacagaacaaaaattgtttgcaatattattaactttggccggtggcaggccagctacttaagatgtttattgatagaaatagaattagattcattatcaattaggactggttctgagtctaaataggaggttataggcaaaaaaaaaaaaaaaaaaattatccttactataaagataaatgatatttttannnnnnnntaaaaaaatatatatattttctaaaaggaattttttttatttgggctcctaaaattagtagaccttaaatgcgaacttaacctgcttatgcctaactaaggccggtccatgctatcaatcttaattaagctagccttaattatatatatgcatattatatatatttatttacatggagtcttgcacctttagatttactaatcaatattaatttaatttaaattactttgaatcatattttggtaatgagttaaaattacttaagatgcaagactggctttttaattaggtgaacttaagaaaataaaaattattagaccatgtatttaaaatatatgtagtatttttaaaaattactaatatatatatatttgggtaaatagcgacataagtacctaaagttttatgtttgtaagcggcataaacctaatatttatttttagcagcataagtacccaatgtttataaaactataatttt

SEQ ID NO: 46902 - DNA, 3273 bp, Cannabis sativa
ttatgatacaaaatttatatcaccataaatatactattttattttattattattttaatagtatatttacctataacattaatttataaactacttatatattttttattgttgtacataataaacaaaaacctttaacaatcccatcgaaaagaaacaaaaactgataaaaaaaaagtaaagccaaaaaaagatttaccaaatccaaaaattaatctaaaatttagagcaaaaactaaataaatagtcatttgtgattcagtaatagtgagccaaaaaaagacaccaaaaatctaaaaaattgattcaaaaagtagagttaaaagagccactacttgtgtttcagggatagtgagccaaaaaaaaccactaaaaatcaaaaaattgataaaaaaaaaatagagtcaaaagagtcactcgtgataaattaaaaacaaaaaaagaatctcttgtcattaagttatccaagataatgagcaaaataataattatcttcttaaaagggaatgttaaagaatatgaaaaataaaatatataaagttaatgaattttgagataaattttccaacttcttagctagtcataaacaaatagaattggcttatatattattcgatcaacaaatgtagtagttattaaatttactacaaaagtttttttttttttttttttttgaaaggaaaatttaccacaaaagttggttgattttctatgagtaagattttggagtcttcaaatatggaaaatctatttaaataaaattgtatatatttatatttttatataaaaatataaaagccacatgtatctagattttagataaggaaaaaccagatctagatcaatgggaatatgaggctttcataaatggattttttttcattagaataaaatgaataagaaaatatcctcaataaatagaaagaaaaacctctaaaatatcatagaaatcaatggatataaacatgcttgataaatatctgtcaaaatgtccaaaattttcaactcaacaacctttttactataccaaatttacacagaaccaacaaattaaaaataattatgtaaatatatatataatataggagtactgttatgtatatactattacacacatgtgtattaaatgttaactatttatatttttaaataaaaaccacaatacttttaactgtgtgattcacatcaattacacattattgtgtataattgatgtgtctgactctgaaagttttaatatctatgaaaactaagtaattgaacttaaatgaatattttgaaaaattaagactagaaaactaaatcaatgaacactagatttacaagcttcctctgcattagaaacacattccaaccgagtagtgcttggttctccaagaaccgggtaaagtaacatccactataaaatcaatttaattacatataccagttctgattttacaaatcaaactacataatttgaaatgactttacacgatgttatctaattcttgagcacaatcaagacaacagatctaaccacacttagatccaagaagacaagctctccttgcttccacaaagctgaaattccttcagcagttcagaccgaactctcctcagacattatagattcgaactccttcttcaacctcttgaagattcaatgaattagcatctgcagttaacaaaaaaatacgaaagaaatagtttgcaagaattaaagacgattctaccaaagatgagagataggaaaaagcaacatgagcacattatatatactaagttgtagaagaaccggctcagctaactaacttcagcaactcaagccagctggcaccgactcacacttgaataaaagatatcaaagttaaaaagctgacatggcaaacaataaaataaaagagactaagcaaatgcagctaagaccaacttagatggtcaattcaaaggaccatgaaataaccagggaaaaagctaaaaccttataacagatgaacagccacataatttgccatacagaaaaccttgcacttacaatctatccattggcaaattatgatcaatgaccatgcacaaaatacagaaagagagacacaatatcaacaactgttgttgaatcattatgatcacatacaagaacttgcttacttggatatcagcagcagtggattcattttgaccatgagcaatatcttactctccttggagattgagaacaatgttctcccctggatatcagtagaaactggcttctcttggacaatagcactacctgaaggaccgtgatcaacacctatagaagaaggctgaacattagactcagggatgaaagaagcatggccagcagtaacaaatggaactgtacccatattcaatggagaaatcactacgggatgcacaaaaaaggcaccaacatcatttgaggaactggagaagtcatcatgggtaggagcattaggacaggcttcaaaagatttaaaacttcagtcatagcagacaatacatcaataactgcttttcaaactgacgctgcctgagttggtcatgagcataagtgtcaacaaactcattcacctttgagaacaattgacttggctaagatgcaggactaaacccttccagaagagctgaaagaacagtcaaggaagaagggacattagatgtcagggcctcacctgtagtagaacatccataactaataatggcagagccttaccatgcacaagagtgaaagatttcctaagagtaggaacatgcaaaatcttatcatgctcataaacagtaggaaaacctctttttaccacacgattaatcaagcttggataaggcagtgtgtgtttgacccctttggcagtggcaaaactcactatctgatcatacatgagtggtggaagatcaatactgacactagtacccaatgcaaagagaaacctagttgtattatagttgattgtagagatgtgtgaatttgcccgccagtttgacagtgcaattttgtgaagtactcgataaaatttagagagcacaatgacctgtaactccttcgcattccaagcaaactcggagttgcctgtgatctcagaccctatttctttaaaagatggtttataatcatcattgaaaagtggatggggaatggttttgatttttaagacacgactatcgtaccaccatcagaaaactatctgcctaaatcgtgtttaatagacaacgctaactatcaggctcctatcgtccaccacaagatcatgtcatttatcttgacattacacacccaaaaaatattgggct

SEQ ID NO: 46903 - DNA, 1665 bp, Cannabis sativa
tgctgattttaaagggagtaattttgagtttattccattcgggtcgggtcggaggtcttgccccggtatgcaacttgggctttacgcgcttgaattggcggtgggacaccttctccactgtttcacgtgggaattacctgatggtatgaaaccgagtgaactcgatatgagtgacacgtttggactcactgcgccgagaacgagtcgactcatggctgtaccgagtaagcgtgtggtctgtcccatctgattatctctcttttgaaaatttgggcacatgtgaatttggagtttttatggcttttattatcattattattactattaatattaatatcactctctcctttttttttttttttaattttgatttcctttttaaaaaaaaattgagaaaatttagatgataaaggaaaggaatcataaaaaaaataataattgaagtgaaaagacaatatatggtgaagaagaaaaaaaaaagttggagattctcttaatttgtgtataagatctctctttttaattatataaatttgtataaacttttattatcttgtattttcatttgatgaaaaacaatttgaataaagttgaaccacacaaaatgtaatttgagtttgaagaattaaggaaattaaaggtgaattgtgttattattcataagtgcaattattctttgttcttgatgattaattttatatatttttataataataattaggaaattaatatcctaaatatgtaatatccttataattattatttattgtttttcctagtgggatttgttaatttatttagttttattatgcatgtaatgttgtataagagattaacataacttatataagatgataataattaatctacctatatatatatatagttatattaaactcactatattaatatatatgtataaattaaaaaagattagctaaaagagctggtagaaactcactatctaagagcatagtttttatgatcaactttttgattatagtctttattgaatatattttttggtagcttattgtatataatcagaacttttattttaattatattaatacaaacaaacatacatggttggattggatcattaatctttaatttagtttcttttctcatgagtcatgatgaatatgattagctcaaaaacaaatataaaactctaagaacaagagtcaagtttgtcgactttggtgtaaaaagcaccaactcttttattttatttatatttggatatatattaaatgcttcctagtttttcccttgcaagatttgcctttatcaaatatttttatttttatacatttatatagaaagttataggtatataaggtggatatagatattgtaattgtacgaagtatccaaaaataatgttgtatttttttttttttttggcttattatacaaatagtattttagcactaacgattttaaactatcaaaaatagtaaataattgtttaaaattatcggaaatattcaattttaaccaatagtcttaaacaataacttatttttattagcgacgattcttaaaaaagttaaggaaaatttacaattaaacacgtttttctcaatttaatatcaataataacgtggatattttaatttttgaatataccgttatttataccgttttttcattttaaac

SEQ ID NO: 46904 - DNA, 844 bp, Cannabis sativa
tgtacccgatcccgcgagtaccaccggtgacgagagctgtcattccacgaagtgaccatctgggattgtcctctggggtagtgctggtgcttgaatgggacacattttgacttcgaactggtgttaaggatcggagtggattgttgggagagaagtgaaagtgggtgggtggtgaggttaggagcttaaagaaagggagggttgagttgaatatggtgcagctctgggtggaagaacaaggaggagaggttgtgagtgttgcgaaaaatgaggaacaaggtggtggccttagcacttgagacatttgactaagtgtttctgcagctgatttcttcgattgtagctgacgctgtcacctctctcagttcagtggaaagacaattgctcagttaaaacgtatggaattttcaatttttttttttttaatattgttttatgggtaaatactattaaaaaattctttaatagacacccgtaaaataaactctactgtagtataattggtccacatataaaaattttagaaagttattgtagattgtggtgtattgaattaaaattgaatttgaattagtcaaagtgggatatattgatagacgcttaattagtattatttagttgatttggtaatatagaagcattcatatataccttaattattatttcattggtccatctggctaaacataaagtattaataaagataattaaaaatgattaaaatggaaaattagttcagggaaaacaagaagtcattatcttcaccgcccagaccgtcttctccggtgaaggtgaagattagtgcattttttttttgtaatttcattttgattcattcttattt

SEQ ID NO: 46905 - DNA, 830 bp, Cannabis sativa
aagtttatgcttatcttattattcgacaatcaaggtgtgagtcatcaatcttaaatttagattgttagtattaatttatttattattattacatatcaataatagattttagtatatctagaaaatcaaacatcaaacattatctatcttttgtaaaaatttgtgctacaaaccaacaagaatagcctaaacaaaacaacaagaatagaaataagacttaaaatttccgcgtttgctaacccttcctaacaaaattatttaatcaaaatagaaataaaggctgtaatttaagggaggtgtcttttactgttattttgtttttttaattacaagtgaaatatattttttttaaaaaaatatgtacctattgaaactattttcatttttaattttaaaaatctttcaaacaaattttaaacatattttttttttcttaattatagtctattcctattctctttcatcaatatttaagactcagactcagacctacaccctaaacccagatcctgaccaagaaccaaaccccggacctcagtcttggagtcggaccttgaccccgactctaaccccaatcctgaccctaacctggacccagacccgaactcgaacctcgacccggacccagacctatacttaggctcgaagccggacccagacctgactcaaataaaaacaaaaaacaaaaaacaaaaatgaaaataaaatttacagaacacactttctaaaaaacaaaagtagttacaaaacacattttgattttttaaaaacaaaaattctactttcactttagtgatttaaaaaatatatatattatctgttgattatgg

SEQ ID NO: 46906 - DNA, 4739 bp, Cannabis sativa
aaagtagaattactaatttaccctttttcttcaccatgaagtaaacttaaaacttagggttaaaatggtccaaaaccataactctagacatttctgacattctaaaagtctaactatattgctccactagaaccaagatactataccttgtctaagtgactatataggaccagcgtcgcattccaccattaccaggcataaaatatgatttttttttttatatatatatatatcataattaatatacctagatatcaaatatatctccatgattgtaaaaataataattgaaagcctacttatgataataagcactaattatttgttaattcttaaaataaaactatgcgattagtacaattatcccccgttaaaaggatttcgttctcaaaatttaacctgaataactctagatattgagccctcatatcgaactccaattcctaggtgtcttcctccaccttattatttctctagagtatcttgaccaaaactatggtcttattttggaggttttatcctttctgtcaaggatctacactagttgctcctcatatgacaaatctggttagagctatagggttttgtaactcaaaatatgtgtgggatctaagacgtattttcttaacatggagaaatgaaatacgttttgtactcctgccaatgttggaagcaaacctagacggtaagctaccaatcaaaatttttcaagaatttcaaaaggccctataaatctaggtcataacttccccttttttcttaaaatgtttaaccccattcattggagatacctatacgaagacatgatctttttctgaaaactctatttttctatatttcaaatctgcataacttttctgcctactctaagaggcaagcattctagccttgatcttctctactgcctcgttggtccgttgaactgattttggacataggtatttcttttctcaagtttcatcccaatgaacatgagatctgcattttttttccatacaacatctcataaggagccatccctattgtactctgataactattgttatatgaaaaaactatcaatggtagatacttacttcaagagcctccaaaatccatcacacaggctcacatcatatcctttaatatctgaattgtcctctcagactgaccatctatctggggatggaaagttgcactaaactttagctttgtagccatggttcactagagactttcccaaaactttgaagtgaattttggatccttatctaatacaatgggcttcgaagatccatgtaaccttactatttcttttacataaagttctacataccgatctgctgtgtatattgtttttatcggcacaaaatgggctgacttggtaaatcaatcaacaactacccacaaggaactaaacatgcctgttattctaagtaatccaaccataaaatccatggtgacatcctcacatttccattcaggaagagttaaaggttgtaacaaccatataggtctttgatgttcagccttaatttgctgacaagttaggcacttagatacgtattctaccacatccttgttcatactgcaccaccagtaatagggtattaaatcttgatacatcttggtggtacgaagatgtaacgaatagggagtggtatgagcttcgtcaagaatttattttctaagttccacaatattcaggacacaaactcgggttttgtaatgtaacattttgtttgcaaaaattgagaaatctttaccttgaccaactaagaattcttctcgtaccttcactagttctgaatccaccaactgagcatttctaactctatctaacaaatctgacggtagtgtcaaactattaagtttgccaactacaaactcaatacttgagatgaccatgtcatttgccaactgagatgaaatcataatcctactgaataccagctcgggacctttcctactaagggcatcttccaatacattagctttcccaagatgatagagaatctcacaatctttatctttaaccaactccaaccactgcctctgtctcatattcaaatctttctaagtaaagaaatatttgaggctcttgtgattggtattaatctcacactttactccatagagatagtgtcgccaaattttcaatgaaaaaacccctgcagtaagctctaagtcatgatttgggtatcgctgctcacactccttcaactgatgagaagcataagcaataactctatccccttgcatttgaacacaccctagacctgtctggaggcatcataaaaaaccacaaacttttcttgatctgacagtaatgctagttccggagctgtgatcaaacattgcttcagctcttagaaacttgcttcaaactcatctttccatataaacactgattctttttagttaagtttgttaagggcattgagatgttgtaaaaatccttaacaaaacattgagaataatccgctaaacccatagaaattctaacttcattgactttccttgaccttggcaaatccctgacagaataaatctttcttggataaaccatgatcccatccttacttacaatgtgtcctaagaatgacacttgggataataaaaattcacacttttaaatttggcatagagcctgtgttctcgtaatcattgtaaaaccatccataaatgctgcccatgccccatttctgactaagtgtacacaagggtgtcatggataaataataaaacacatatatcaaggaaatccttgaatactctattcattagatccatgaaagctgctggagcactggttagtccaaaatacataaccaagaattcatagtggccatacctagtacgaaagacagtcttcggaatgtcctcctctcggattctcaactgatgatagctcgagcagagatcaatcttagagaagactttcttttcttgtagttgatcaaacaaatcatcaatcttaggtagagggtacttgtttttaatttttaacttgtttaattctctgtagtcaatacacatgcaaagtgatccatctttcttcttaacaaacaacaccagttttctgtagtgtcacacattggttgggaaaaaccttaaatgaagtatcccctaaagttgtatctttagttccttaagttctgcaggagccattctatatggtgccttagaaactagctctgctccgggtgctaaatcaattacaaaatctatttttcgttgcagtggtaatcccagaagttcttctagaaacatataaaaattcttaaaccagttcgatgtctttaggctgaactgattcaggctgattggtatctaacaccactgccagaaaccctaggcactcctcctgtaataattctttggctttcaacactaacatcactgatcccacaaaaataaacagctcctcaccctcaggttgaaagatcaccatatttcgcttacaatcaatactagcagcatacttggacaaaaaatccatccccagtatattatcgaaatctgctaaactcaattccattaggtcagtgctcaaatccctatcttcaatccaaattggtatagacataatccacctttaggagataactaattctccaccaggcagtagggttccaaatcctatttttaactgtaacacgacttatccaatttattaattactttagccgccacatacgaatgagtggccccagattcaaacaaaaaagagtagtaagagttgttaactgaaagctaacatgtcactaatgaatgaatggcttcaacatcagcatgagtaagagcaacaccctggctagagcgagtttagcctctgtcctttgatcttctttcgttaactgtgcgcagtctcttttgtaatgtccagatactctgcaccagaaacatccccaacattcacacttgaccaaatgatgcttcttagaattagggcattctgggtaggtgtatcggttctcagatccactctgcatattaccacgaccttggttcccccagaacctcttgttctgattcgagccaccagatgcagatgaaactttttttttttctgagcagtagttgaatcactaccacccctaccataactcgaggtaagaggagcagtggctccactaacaacctgagttccttaggactcttagatatgctcaattgcgccctcagcttgcagtacctttccaaccatatcaacataggtagttatgtcatccgttgtgatcatcaagtcatgtttaatcttgggattccacccatccagatatttttctttcttgttaaaatcagatggcactatttttcttctcaaacttgttgtatattctgtaactgacatatctcttttagagtcaactgtgtaaattcttttctctttcaactataggcagcctccttatagtacttagaattaaatatttcctgaaattccttctaggttattctggtgacatatgagggacaccatgtcccctcaaaccgaagcatcctcatggaaatgcaaagtagcataggtctctctatcattgccagtgactcccataaaattcaatattatgttaataactattagccattgcttgattttcataatgtccagacctcctaagaagactggaggtgcttgtttacagaacctttcataaagttgttccatacgattgccaataggaacttaccctacttgcgcataactggggcaggagccatctacacctcaggaggaggcattacaggagcac

SEQ ID NO: 46907 - DNA, 1037 bp, Cannabis sativa
gtggtggtgaaatcttattatattgtttgtatatttttttttttgctggagaaatcatctctattaaaaccagaaaatcagggaaaaaactcaacagttcagcaaatcacatggccacaagagggaccaagtcctcagcatttaaaaaaccagaaaaggagttacaaaacgcccactgagcgaggttgtgagcaacctgaacacctgcacggggagtccacacgatctccacctcagggagatcatcgagcaactccaccaacgctcagaaagaatcagccagccgccaatcaggtgccctctgtgcgtgtaaaccatgcaccagtagttggcaatccgaggcaataacaacctgcctccatccccggagattgcaccacttcacagcataatcaacgcccacgactcagcctccagtggatgatttgattcaaaattcacagccaaagcctccagcaccattccctccgaaatcgacgccacaatcccagctgcaacgtgcatatctttgaacgctgcatccaccaacaacaccagattacctgtgtaaatctcagtctgattttgctgcaatacatcagcaattcttggagattcccaagcggcttgaaggttggcagcaacattgatcacgttagctaaaatgcctcgccaagtaggactaatatggtcatgaaaggcattgttgcgagcagtccacagcgcatcaaacaagcaggtaccaaatcaaacaaactcacccaaatcatcttcatcagcgccctgtaaaaaatcaggggagaataaccactccaccatgtttcgaggagagtcaaaacaaagtgaatcacttctaagagcccaacgactggcaaaccacacagccttagcaagaggacacttaaaaaacagatgttgagccgagtcatccgcgtcaccacaaattacacatctagtatcattaccaaaaatcctttggaggcgatttccaaaaggaattatatctctgcaaagtttccaaatgaacattttcagtcgctcagtaatctggagcttcc

SEQ ID NO: 46908 - DNA, 775 bp, Cannabis sativa
tcatgccaagaactaaaagacaccatctttttcacacctatcttctcctttcattattattattattttataattgttaaaaatagtttggagttagaaaaaacagtactcagacaccatatcactattgatgcttagcactattcaaaatgttatattactgttggtataattaagtatcaagtttcacataatttaatataataatatcgctaaccatatataatggctaacctgatccaatgtgttataccgttagtagtgcaatgaagtatcgagttttacataatttaatgtaataattttaatagaatatcgttaactaatcacaaattatcacctcataatagtattaactacaagtaactaataaaaatactcgttcttacacctctcttctcctttcattataattcttttataattgttataaagtcttctagtttttttgagttagaaaatcagtacttggacccagctcagtttctcttcttaatggtctatatttactaatctcagtacaaactttgtttgaatcaatatgttttattcagtcacaagagaatataaataaagtgagaaactttgtcccaataaaagagaatatttggctacttcactaagtttaattgaatcaagttaaactaggttcttgtgcagttgttttcttgagcattacaactcatacccgtgaaatgcgtcaaaatgttctgtctttaatcttaaaagtcaactttatgttcatttttacaatggcaataataattgagaaata

SEQ ID NO: 46909 - DNA, 1494 bp, Cannabis sativa
atataaatgacgtactcataacttttacgtgtgatcacctaacattttagtatattgtaaaacatatatataaaccaaacttggtcataaagtttgaatcaaaaaaaaaaaaaacttggtcataaagtatatatacacacatacatgatgatcaaatcaatatgagtctttaattaaaaaataacttatggtttatattttggaggcctatagatcggttgctacaaaatagttttcatagacggtgatagttcaacaccatgagagagattttgaaccagcagcttattaaaaaaaaataagggttaaataattataataaatattttatacgaaaattgtacaagtaaaacgagttttcttccttatttttttcaatcttttcaatattagagatcgagttatatttattggctattgaaattttttgcctctatgacatacgtattattatactcttgaacttttcaggtcgttacaatgctttttgaattatttacgtacaatagtataaattagtcattctatcaagttttgtcacacatgataaataaaatgatgatatgattgcttaatcaattaccacatcagtgtaatagatataactttatattaaaaaacataatatatatttttaaaaattaattaaattaaaacttaatgattaagaaaattatatgtaaaactaaattgaaaacatttaaaattattttttcgaattagttacacgtgtagtattgatatgatactgacgtagcaactgcctaagtaattatattatcattttatttaccacgtgtagtaaaacgtgacagaaagacccatttataatattatgaatagtttagagactatttttaaccgggtaaaaaaattcaaaaaataaaattatatataaatatatgtgataatttgggagacaaaaattctaaataacataaataataatatgataaggaaaaacattggaattctggggagaaaaaaaatgtccctattatttgggttcatgtatacaataaaaaaaaagctggacaagatgaattataaagtaccgccctttatttatttatttttttttatgaaatacaaaacaacacacgtgatcaatgtaattgaaatttatgtaacataagataatattttcaatattttatacgagaatatatatatatatatatatttttatatattaaaagtacttatttaacggcaattcttggtttaacgatagtttttaacggaactttttttttaataaaacagacggaatctagtatatatatatatgtatatgtattacaagtacagaaactcgattttttgttttcccttttaatttgtatttgtagcttgatgcgcatgtttaattatatttataagtatttgttttgattgagaaaaagaatgcgaataagtatatatgaaaacaaaaatacgatccattattctaaaacagaattatgacaagtctaatattatattatattcata

SEQ ID NO: 46910 - DNA, 915 bp, Cannabis sativa
actaagctcaaatgtattagaaataatctcgcattattaatgttgggaaagataatgttggccatgtgtaaaaagcatgtgttacttttctcattgttaattaattttgagataaaactccatacaattttattctgaaactattaaaggtagggcaacgaaatttagaatcaccttaaacttgtattagcaaaagatcagttgcatattaggattgagtattcaaatacatccaaatcacataaataaagtacgaaaagcttcaaatccaaaaataaaaatatagcatatctgagaaatttaagagaaaattcacattgaagatcataattgtttgttaatataaattaaatgagaaaatatactgaaccattacaaatgacatgtacacaatgagattcgatttcaaaactaataataggatgaaaaatattatggtcaatccatcgatgtgtttacattcttttgctgaagatacaataattagggcataccaaaaagaagagatatatattcaagtaattaatatcacatgtactatcaataaaatacaaaattgcagaatagagatttgtggtgagcatgagttatttgacctaattacatgtcggtttgcttttattaggccaccatgtccaaatagtactactgtcctttttaggtaataaatgatgagaaaaaatgtaccatttagccaaaaaaaaaaaaaaagaagaagaaaaccatgcttgaatctcaatcacttattttctcaagaaaaaaaaaatctcaatcacttatagctatatggcaatagctcacatagtacatactatatatccaaagactttattgtaatttactcataaattataggtgacccacatctagactaattacgtggttgaaaatcacttggcactaggggtggcaaaa

SEQ ID NO: 46911 - DNA, 1300 bp, Cannabis sativa
atgaattttggagttgtaggtgaaaaattctaagttttggatatgtttaacacactccgtttataattgaaaataaagtttgaaacttcaagctaatttttagctatgatccattcacttttaggaaatttaattctgagctatatcgacagagttataaccaaaatacaattagtcattgacaagaaatcataaaacaagagagtcgtggctcttgcgaaaaaatgggaaacttcccaaattttgtttataaaacaagttggggctaggtttcttttatcatttgaacttagagactaattctgggcattggaggattttgagaaaccttcttaattttgtatttaaaggggtcgagagtttagatctattatcattcgaaaattgagagaaatttcgagtgtagaaggaaggttaggagcataaggcactattagaggactggtcaacaatgctctatctcttatctctatcttttatgtttttaattgaatttctattattttagaatgacttctagtatctattttttttttttaaggattattatgtgaactacttgaatttattttatggattaatgtagttgttcaatttctcatttttcttttaattcaattccatacgatctattttaattctacaattatttattggtcgtctattattgttatttatgaattcgaatcaaaattctgaaatgtgatatttgaatatgctctaattgttatagatgcaaatttatttaggacgaaagtagttgtttgtatgattttattagttgctttgtttaatgctatctttgtgatcaaactttatcataggaatgtatgaagtttttaccttgattgagtttataaatcttaaccagtttataaactacttaactcaacttgtcaattgaataggaagtttttacctagattgagtttaattataagtcttaactagattagaaactaattaactcaacttgtcaattgaataggaataagagaaattgggtaattgcattaggaagtaaaataaatgatagttgggaatcataataatctttgtctttattattgttatttcactcctaaaaaacttagaattcccgacagttttacaccgtcgagtaaagaattcctaacagtctataaaattgtcgcctatacgagcatcgtgaatactaggtagaataggcgaccgtagaaaaatatcggtataaaagaattctcgacggtttaaagtcgtcggctatagtcgatactatatgccacggtttaaaacagtcagctatactatagttgacggt

SEQ ID NO: 46912 - DNA, 1322 bp, Cannabis sativa
tacaaacattgggtacttatgccactaaaaaaaatcattgggtttatgccgcttacaaactcaaaactttgggtacttatgtcgctatttacccatttactaataagcaatgtaaatcaatggtaagataatcattaattcccttacattttttgctttaatttattaaaattaggtaagagagaacttgattaaaaaaaaagggaatacttctccaaccaattttctaaggaatgtcgttaaagataatgtcttctatttacctttatttatttattaaaaattaaatatataatgacaattttatcatttaatatatgccttacaaaataaatatcatatattatagtgttatgcccatattttgagtagcaatatagtgctatgtaatatagcaggaatatgaaccatctcgaatcatggaataataaagacattcagacaattcgcctcgggaagtacagttagtagaaatattcgaactcaccttcttgaagacaatggcaagacatgaataaaaactaccaattgatgagaccagcgagacgaacaaagaaattccatctagggatacacaaaatacacaatagaattatttggaaagggtagataattagtgatccaaagagctcctaactcattgacccacatacatggttgaaagactaaatacaacaccttcaacatgattcatctcgcaattgtcatgctgcgataagcatctcgtgtatacttcactcaacattaatagaagaatgcaaggaatactataacatatacttagatgctggcttacaataaagtgtctagaagagtattgttgtactgcgagaaggataaagcataatcaggcagttatgtaaataaagttaaaagtacggttctggaaagttacttgtgtaattatctcatgtgcatataaaatgtggggattctttatgtttcacttatggttacaagtgataaaaatcccaagagaataactatcatcctagacttctataaataaagacaaaacttagggaacaaaggacgaccaatttgagaaagaaaagaattctatctgtaaaacaatttattgtattttgtatacaatttatcaacctcagaataagatagactcgcggactatgaagaattaacttcaaaactacgttgaaaatcttcttaccatttatttctattatcattattattagggtaaatagtggtataagtctttaaagtttcaagtttgtaagtggcataatcccaatgtttatttttagcggcataagtacccaatgtttgtataactttaatttttctctaatttcgtcaat

SEQ ID NO: 46913 - DNA, 2283 bp, Cannabis sativa
atcgcatattcgagaaccggcgttgtcgccctttacgctgccgactatgcctaggccgtggactaggaagcgccattgaagagcgccaaggagaagaagaagaatcgaaaaactctgctctttgaatcgtttaatccgccgcctcccgacaccaaaggggttaagcatctttaaatgtcgagtccttttccatttgggagtagagaagagattctcggagaaccgctggagaaatgggagattcgaatattttaaattttgatttggaggaggaaaggagacgcgagaggggcaaagggaggagacaggagagagaaagagggctgggattttttttttttttaaaatatttataattatttttaaaaattaaaattacgtggaccactaaaaaatttgccacgtgtacaagtgtgcacatgtgaatagtccactgtgacacttaactgtgatttttggatggaggtgtgcagagcaaaacggaaccatggtttaggtagtttagccaccaaaaattcagtttttgtggttatgtgttacaaaccgtaaagttcaggtggtttagctgccaatatcccttattaataacaatatacataaaattcatctatagacacaactatgttttacttactaaatatattgacctacaatttgcctttataattatgatcataccactacctacaatttttttttttcatttataattacattacaatactaataagctaataaaaactacaaagaaaaaactaacaatttaatattatgcttgattattattacaattttttactttgaaaacatttaaataaaaatttgagcaaagatgtttttccttaaaaaaaaatattacttaaacaacaaacatagaaaaatttataaaaaaaaataaaatcttaaataaaactaactatacgtctcgacacctaatatcaacaattaatcgaacgcacaagaatatattaatcatttcagataaaaaaaaagaacatattaattagtgcaattacataatttatatttattattaagcactttattatgtcttagtcttatgaaaaccaaaattagatgtcaaaggaacacagagtgtaataaacaatttaataacaagaatacaacaacaatagctagtaattaattaaccacctacctaaaacattacataacccaggttggtattcaacaaaattcatccatacacatctcacattctgatctgtgcatatatatatatatagaaacctcaacaaaatcatataactaataaaaaggcaactgtatgtgtgtatttacacatacacatacaaatacaaattaaaccacataatgatgaagaacaataattgggtgtttattattgtaattttagcagtgtggatgatgatttgcagcgttgatgggagatcagagggtgttttaatggagagtgatgatggaggttctcatactgccataaatctatgtcgtagtccctatcgagaatattttccttggtgctggttctataatggttaataatattggatcatgtatttataaataaaaatatacataatttataaattatatatacatatcctttattatatgtatttaatatctttcctttccaaattatactcactttattataattcctgttatatcttttcttgaataattctaatatgaccaaaaaagaataagtttgtgtacgtacgtatattttgtttttgttttaattttgtagtaataattaacactaagaaattgcatgcatgctttcttaattcatttctattgtttatttttctttcaatattctatttcaatctgctgcaaaaatatatatatatatatatataaatatacatttaaatgaattacactataattaatatcttccttttcgaccttaaaatatggctcacacgtgtagggtgacatataaagactcatgtttattttgtttgattatcttattattaaaataatttaaattaaattaattaattatattttaattattgaattaaatatattataagataatatatttaattaaaaagataataataaaataaaaagacttatgatttctgttattcaattatataatatttatatttaaattttaattatgaatttgaatcaaattagatattatcttttattttagaaggattaaataaatgtttgtttataacattatatatatatatatatatgatatatatcagtataaactaaaagaactctaataagcagaaaaaaaaaaataagtgtcaagtttga

SEQ ID NO: 46914 - DNA, 3203 bp, Cannabis sativa
cccctaaagacccaagttggggggtcgtgacaaccaccatagttgggtgacccctcgttcgttgtcagtagttatggtgtaatgtggatgcccccatataactctcagaatgtcattacatctaaattgcatgacttgtatcatgtagggggtgagggtatacccctagaccaaccctttgggaggtaaggggtagtagtatataccccctagactaacttggcatgtgggtgcgtggtgattgttcattccgcttacgaaggtgttactccatcatttttccttctcagatacgcccaccttactcaagctaggggtaatggttactgtctgactttcattctaacgtcagaccacccttcatgattaactgtcatgactttacatattcttcattaatttagtctcgatatttttgtgccacgtgttgctactcttggcacgtcatcgtcggtcttgggggggtctccttatgaggatggttgtcacccccctcaacgagggtcccgggggtgttgtccccaagtatgggcttaatcctcaaaggtggttgacgaccatgtcacacccataagggaccctcgtcattagtagctccttcaaatattcaaatcccacgaaaggctcaaagacagttgtcaacccacgaaaatagcgggatattatcctaaaaatcagcctctaactgcctctaaaaatcaaggagatggttgagatagctccacgttggtcgcgtctcctgaagcgagaagcaccgaccccctcccctatataaggggtcacccatgacctgggaaggggatctgcaatctcaaacacttagaataattaacactttttattctttgcaatcaagaacttgttcttgacttttgcaactcaaatcaataaaactcaaggggagtacgctattaccgacatccggagccgaacctctttaaattttggtgtcttttatttacatttattataaattctagtgttattaactgcatttattattgtgattttggtttaaatctcatttattatgattctgtgtcggttggctaaaaatcaagtcaatattttggtgctttcattgagagcttttgccaaaatctcgaagtttttcactgaaaaaaatggtgttaactaaaagatctcaaaagcgacctgacgaagagatggaaagttcccaccaagttccatcagcaagcaatcttgccgtgaacaatggagaacgaccctcgcgtctggggaatggcggcacagccaccaccactcaaactgctggccatagagcaactggccaaactgcagccactggacagacaactactaggcataccaccaacgccactaccttaggaggcggcgctactggtggtgccaccggaagaggtaatactagaaattttgtcctacatactaatggcgtgggccaagctcagactgggcgcgaccctggcatctttacatcgcggaatgaaccccgtgtggacatcgagggaattgaccccgagatggatcagctgcgagacgcgataggcgagatgcaaggccaggtccaaactatgcactaagagcaaaatcaagctcgagcagccttcactgaaagtctcgctaaccaaaggagagaattcaaatcttggctggaagttcatgcttgtgagatgaggaggcgccaagatgaccaagatcgtcgcacccgagaggctagcgacttaatacgaagctacttcaaccaaaacactcaagggatgggtagtgatgcctacaatcaacagatacctaaaacctatccttggaaggtccctatcccgaggaaccagagggagagggtggtctatggacctgaagagcgcccaaggaaccaagagaggactacgagtcacccctccaatagggttccctgcaataataatcgactactcccgaccgatgaacaagttcctcccagccatcatataggacgtgatgactcccacaatgtctgtctaaggcggagtgatggaggaaactctaggaacaacaatggtgactgtgacagaaacagtggaaggatgccccaacatagggagtggcaaccccgcgaccaacgcaaccaaccacgagatggcgatgatcgcccaataaatagtaggtccagggggagaagagaagaccccgaggtcaacagtgactaccatccaaactaccctgatggtcatggtaatgatgaagctgaaagtcgggctaacaaccaaccaaatcttgagatggggggttatcaagccggagggccgtatgcccctaataggcaacatcaacctgagaatccgccccaaaggggtaggaatgaccaagtaccacccccagttgatggaagggctgacagtcaggatgcaggaggaaggctaagaacggggtcaatttttgaacgggtaggcccccgaggaggtagagacctacgggacgctttcaacagaaatagggaaaatcgtggttccaacatagtaaatccatctgagccggttcaaagagaccaagcgaatgctggcgttaatattgctcaacctcaaacagtcacagatccagtgatccaagcttggttggacgagctaacccgattggtcaaggaccttactgcaccaaaacccactgacttggatctggaaaggaggagagggtctgccttttcccaaatgatcaatgacctccctattccaacaaagtttaagatgcccacttggaagtacacggatagtgaagacccactaactcatgtggagaacttcaaaatccaaatggaccttctaggaatctgggatgaccttaggtgtcgaatcttcccttcaaccctcacggacacggcgcaacaatggtttactaaactacccccaaggagaatcacttcttaggatgagtttgaagggttattctatacccaattctcttcagctcgacaaataccaaaagagttgggtgacttggtcgccatcatgcagaatcgtgatgagccactaaaagactacattcaacgctttatgcaagaggcaaccaaagtaaaaagtctgagcgatgattgcaagcgggccgccatcatgggggccattttggtgggaagtcagatatcgaaggatataaggcagaaaccaacccatactatgagagacttccttgacagagctgatgagttcattaaactagaagtggctgaatggaacgccaaaggcctcaac

SEQ ID NO: 46915 - DNA, 1276 bp, Cannabis sativa
  modified_base (451)..(470): a, c, t, g, unknown or other
aaaatcaatcatactaaacacccaaagtctatcttaattatcctcgtctcttccttttatattggccactaaaaacttaataaacaaagaaaaaaaaaatttatccaaaaattaaaacctatacacggtctctcttctctttcatttattattctgaaggctcagataaaaaaaaaaaccctagctatctctcgtcgcctcttcttcttcccctctctctgatcaattagctttccttcccactcactcgcagtgttgctgctactccgacgaagacgaacatagaactgctgagatttgactctaaaagtaccacctatatcgacggttattatggaaaccaccaagcttttgactctaaaacacatgaaactaccgagaaaggagtgccgagattgcccaattttttttttagagtgaagccatagctcatattattattattattatnnnnnnnnnnnnnnnnnnnnttattattattattattatagttgattgagatcaataatcatacatattaatattgaaaagttattaccttattacttttttttttttttttcaatttttttggataaaagtataatacgttattcagttacacgtacgtaaagaaaaattgatatggtatttgaagatgaaacaaatgaaaagagaaagtgataaatggtgtgtatcttttcaataccaaaattacaactgaaaccttgcatgcatgcatgcacgtacataaattggatacgtaaataattaactatatattgtgaaggtttctaacgttggcaataattaattcaaataaatatatatagtctctctttaatatttattgatcaagcttattattttttttaatgattttttatgaataagattattgtattgctctaaataattaattttcaaccattacacaaaatcaatcaacttttacacctattaataaaaagactaacaattagcctaggatcccctgtaacacccaaaaaagtatactaagttacaaattacaaaacaattcctatcatcgatctctgttagtcttaccaaggcaagatcacagattctaattgtttaattactctcaacttgaattatgtttacagtttgtttaatctgccaaaatgcatcattgagatccatttcaacagctgattcaacttcctggttttaacattccaatataatacaactattgttttatggcctccaaacacttcctcctggctgctgtacatatattcaaagaacaaagtgctcaatagtctcattttct

SEQ ID NO: 46916 - DNA, 2161 bp, Cannabis sativa
ttttaattctaaacttaaccctaaaagctaccctataaataaaaaaagtatagctcttatttttaaaagatgatcagactcctactcctttgtcagacaaaatagaattgtaccctttgaacattatatgttgtaccaatacactcagtaacactaccgtactagtattggtggcatatcatgaatcacaatatcagcatgcatataatacacatacacatatttatatacatacatatatatattctatgctaatcttacctcaattccaattcaagtgtgtcgatcgatctaaataaaaatgtgtgcgttgaatggaggcccttgagttcacaccacttgaatcccactaaaattcaccaaaatcatagagaaaagaagaagaaatcttctagtttggtatggttctccttggccgactatggagagagagaggggaaaaggtgtgataattttgttttcttttcttttttttccttcaaataattttactaataaatttaatccttatctttaaaaaaaaatataataataattaataaaaaccaagggcgaaaattccataattacctcatacatccaacttaaatattctataggttcaggagtaaaatagtccaaaatcataaccccgcctaaacctgatattccaaaatatcacttatatttgtcccacttccaaactctcccacgtgactataattgtcatctatcgtattttctattgttaacgagcaaattataaacattgtaaattttacatataataagaataacatacttagagtttaataaaatctccaaatgtgaaaaattataactccaatacccattttctaaaaataagacccacaacataaatattcatataaaattataatttaaagatagctaatgctaattttcttactaatctatatttaatcatgttgtcattacattttgtcttgtacattattcatgataatagaatttggaatattgacaggtttagcctttatttttctaaggacatcattgatgaaattctgaaggttcttatttgtcctcttatggatgacactctcatttagggatgtcatccatctagcaagtttactgctaactcagcctatcatcttgctaggtctttagctttttctttttctccatcttcctctaatccgactgcttttaaggattggtcaaaactagtttggtctatgaaattccccaaaaatcaagcacttgtttagaaagtctttcatcatgtgttgccttgtgctttaagctttttcaaacaacaaaaaaaaagaagattatttcccatcctttctgctccttttgcaatggtaagaaggaaacggtttcacatgccctattaaagtgttcttgaactaattttttttggagaaatactactttaaagagtttctatacaacgaataggcattgtgacatcgagaaacttttgttaagaggctttgataatttgaaccatgatcaaatttcccttcttttgtgcgtatgttggatggtgtggaatcaaagaaataattctgtgttaaataaccctgccttaaactttgtgtaagtagaagactttgtgcttaattttttgcaggattataaagaagctcaaagtcataggttgcatcaatattctgacttaagctccttccaatagtggtgtttatcaaaattgtaatgctagttgcagtttgccttctactaagaaatttaaattgagtgtgcttccttaaatgtcaaggttagaaaaaccgatataggacctgtagtcattgattgtaatggggctattgttgcaagattatgttcttgtgcaagaatctctactcctatttatgcaaaagccacgacattgcatactacactatcttagtgtgtagccgtgaatttcccaatagagttggtggaaataaattatcaagttttggtctaacaaaatcaaacataaatagaaagataaatcttctctcaaatgttgttcaattagtgcataacactttgtctttcttttgaaatgttaccctttatcatatttctaaaaataacaatgtattaaattctcattgtttacctattgtaagttactttacattaaaaaaataaaaagatagcataaactaatgtggactgttaggatgatttatattgattt

SEQ ID NO: 46917 - DNA, 705 bp, Cannabis sativa
  modified_base (26)..(39): a, c, t, g, unknown or other
ttagcgagagtcaaagtaatcttatnnnnnnnnnnnnnntgtttcatattgtaaatactagtgtaaaagaaaaagtgaaaataatgagaccaaaatcagtcaccatcacaattccactacataattcatattaattcgtcatgtgagcatgattaatgataagtccattaaatattactttgttaaaaagtatgatttttatttatttattaaagaaacttcatgttcattattaaaaaatataaatttttagttctctttattttgttaaatctatgaaaaaacaattaacactataaattttacatagcattgaaaagaaaaacaaattataaattaagatttttcccctcaattttaatgtgtatcaaattatgttctttaaatttttaaagtcattaaaaatctcttatgaactattgagattgttgaatttaagaattttttttttctaattttaataaagaaattataacatagataaaagttcagagggcttgatttagtgcatgtcaaaattctatgagcatgatttcctaaatattaaaatttagggagcatgatttagtatatggacaatcactgaattagtaaaattaaatgaaattagataaatattttttaatccaacaatctcaatagttcaagagaaatttttaactaaaaaaaagtccaaaaaacatcatttgatacatatcaaaattc

SEQ ID NO: 46918 - DNA, 1094 bp, Cannabis sativa
aggttctcgagggagaagagattcaagaagtttatgctttgttgccatgtatgccttgggtttaatgatgccatgttgagatcttgttgtcatggcatgtgttctctgaggtgcagcagatggagtaggcaaggtccgtataggttcagatggaactgatgatgaatcagtagacatatgtgcagcatttgagaatgacagatgctgatgtagtggtgtagatgagctactggaaaaattggctgaatccaagggagcaacacttgatgaaggagaatcattgtgctcattgacaacaacaggttgagtattagtgtgaggtaaatactgttcaaattgagttgtagggaaggaatcattggtgttggaatttacctatgttgtgttgctggtgtgaattgcaggaaactgagcgtcattgaacaccacatttcgagctataaagaccctaccatctttattttcacacagatagcctttatgcttgggagagtatccaagaaagatacactcctcggatctgtactccatcttatgatgagaataaggccttaagtgagggaaacaagagcatccaaacggcttttgaattctgtagtcaagttgctgcaagaacagactctcagatgggctaacattgccaatgacagaagttggcattctgctaatagagtagacaacacattggaatgcatgccaccaataagacatgtcaagacaagaatgagctagtaaagttaaaccagtttcagtgacatgtctatgcttcctttccactcttctattttgctcatgtgtatgtgggcaagacaactgaaacttgatgccttggtcactgagaaatctttcaaatggtctatattctcctccttcatcagcttggacagcctttattggtaagttgaattacttttcaaccaaactatttgaatcgagtgaacacttcaaatgcctgagatttaagtgttaatgggaaaatccaggagaaacgattgtagtcatcaagaaaaagtatgtagtatttatagttatctttggacacaatatgggagggaccccaaagatcagtgtggacaagttctaatggttgagag

SEQ ID NO: 46919 - DNA, 1899 bp, Cannabis sativa
tctgtcaaagtatacttcaatcaacttcaaataacttctcacagtgcaagccttatcaaaatttcatctgggcctttttttatttatttgagctctaattacttctttagaagactccatcactttattatttaaatgtgttaaatagtaccacatcgttagctttagtatatataagaggaatgagttactcatttcattactaattgattttgagatagaatctcattcatattattctcaaattttaagactagctttacatctttgctccgctctaatttcttggcagcagccctcacggcacaaaccaaatgattctatttttattattttttgaaagtgaattccttcaaacaagcaaaataacaaagttagcttcagtagtcgattaaacaccaagcacatgagttgacattcttacacccaatgtgacttcaatctaaaaaattaaatccattatcatttataattgtacggtgattcaactcacctaatccaactgttatgccaataacactgatcaagaacccaaaaagaagctaaaaaataaacaaagtaataaaccaaaatgtttgaataaaagatggaacttagcttaattcaatggctggaatgatgatactttattgaattaagatagcactatacaacacgagtttcggcgtcttaattatagaaatagtatatagatcctcactttgagagaagtcacttctagagtgaataatctaatacaaccctcctcactcgattcttggacagtattggaaagtgttgaattgagtaatgtagcttcaagagagtctatttatagattgggagttggttgaactgtgctgacatagctaactaactctgatgacatgtcttagttgttttcgaattcttaacaattctacttgatttagctcactaaatcgcaataggtctaaaagaatgtagaagcaaggaagacttaacagtcttgaatgctcagcaaattcaagtagtgtctaaatttgttcttggtgacacttttggtaaatacatctacaggggttatcatataagcaaattttctcgacttgaacttgttttgaaagcacaacatccctgatgaagtgcagtttgatatcattgtgcttagatctcccatgaaacattgaaattttcatgagatgcaagacactttgattatacagtgaacaataatgtcttctgagttgaacccttatttactggtaaacctttcagccataatgcttcgttgatggcttcagtcgtagccatgtatcctgcttctatacatgacagagccaccactttctaaaggttcaatttccaactgacacagcctcccaatacagtgaagagacaccttgtacaacttcttcttgggttaatgttgactacaaaatccaagtcaacataacaaataacttcttccttgcattggctttcattgttgaacactataccattgtttagggtcctttttatgtacatcatgatccacttcagggcttcccaatatttttgtaatatcctactaaattaggtgtgttattatgatttaaagctaactgtgcaattcgttgctaatcaaggagtttgttggaaaacgtgtttaattaaaactttacttaattaacctttaattcaaataagtaaattttacataaaccaggatctcgtatttgaaaaattacaacagtattacaaaatattaactacgaaaatggtcgcctagcgactgccaaaataagcctgctgccctgaagatcgaacactccaggtctaactaccccgatatgtacaatctccatccgcttgcactcacttctgctcagcttagccttgcccttacctacacatgtaaccaataattgtgagtcgacagactcagtaagaaaagca

SEQ ID NO: 46920 - DNA, 2695 bp, Cannabis sativa
gatttgtttcaaggggatcaaagatgagattaatgaggagaatgtgtctccttcttctgtctagaatgtcttcgtaacacaatttttcattgtatatttagtcttttagtgtgtagtttagatttttgggtttagtattgtttcatatttttagagctctctttagagcatctccaatagagtaaggttataaatgtggtgtatatgtattttttagtctatgctcataaaattaaacaccaataataatgtataatgtgttccaaattattaaatttgacacatgctaaaagttgtgtcaaatttgacacaatatagcatgtatcaaattttacaacacaataaatatattttttttttatttactcatttgtaactaataagtttttgtacttttatttatatatttaatatttttttattcactttcaataaaaatttaatatttttattgattttttttacaattttttattaaaataatagtaaattgtgttttgtaaaaattattgattagaccttctattttgttaataacaaattagatcttgtatttttcaaaatagtactaaatagtattatgaactgattttttgtcaaagtaaaaactaataatagacggatctagagatgttattacaaaattgatttcgttttttgtatctgctcatgttaggaataatcttcaagttgattatattaaaaaaattatttaaaattgagcttaaggtcctatttgtacctttttaaaaaatacaatgtctaaattatcatttaacaaaaagatgatccaatcaataacttttgtaaaacacaatatttgaaaggtttggattatataaacaaatattcttgttctatcatgctactacttcgcttacgactttggtagtaagaggtttgtatgataaaaacaaattttttggttctatgaagtcttccaaagaaaaagactcttttgtgtgaaagaatattttgtggggtaaagaattatttggcgaggggtcatctcgaaagtgggagataagaacgatattgctatttatgaagatgcttgaattctgttgtgtgcttgttctttggtgttgtcacctaacatcctcaaggtaggtagtgtggtggcgcagttgaggttctccttggggggtggtggggagttgattcatgggtagaggtggtaattcatgttcatgggtcgtgaagcaaatgctaatctgtttattaactatgtcaaaaattaaaactaaaacacaactcatttaaaagaggtatataaaaaattatgcttaattttaataaacttattaacgtgtttacaacaagattaacatgtttatatcgtatttaactaaaaaaactataatttacatgtaataaatataaaatttaagagtgtatattttacataaatttctattgtgtcactttcgagttaagtgtgtcaactcaaaaatgacccgtttaataaaagagttagtcgtgtcaacgcaaaaaacgacccaaatttgtttatctcatgcgagtttcgagtcatattatcgtgtatgacccaaattgttatcgagtttaattaaaatctaatatgtaatttatattgaagtttgattgttactacaaaagttttcacttgatatccctcatctcctttacaaccaccaaccgatattcactacaaccactttacaatgcagtaatcatttaaactttacaatgcacatcaacatcattcaagactaatataagcaacaacaacaatataataaagtgttccgtggcttacgacagagaaaataaaaatgtcatcatgaggaattgaaaatatttgataaataaattggcagctaatatagcaaggaaggaagttaacaaatacgacatattcttcccaccacactaattcgaagtccacactactagtacccatttagcatgaaaaaaaatcaagaaatcagcaagcttagtatattgatactttagaatgaccccattataaaattgaccttttacctattaaatcctttgcaaatcgatagccttgaggactcatttgatgaaagcatccttttgcaaatcaggaaccaattctgttggaattgaggagaatgcttcagaggataagtaaaactttaaaataggcaaatttatgttgaattaagaaaattaaaaagtactaaacaggttacaccacaaaaatctaaacttgatgcaaaacccataccaaaaaaattaaaaatacaaacaaaaaaatatatatatataaatatataaatcttcttaccaccttcatcttcatccgaggagcttgcagctcggcggagcaacataggaaaatcaagaaaggagaagagagcgagagaaggaggccagaacggaggagatcgagaacgagagtgggaggaacaagtaaaggagagtactccgacctcaatggggttagggtttggggcagacagagagagagagagagttgcaattggggtagaatgaggtggtgcggtcagcgttaatggggattggggttagggcagagagagagagagagaagagaggttctgttcgaaatggggctcgatcggaatgaggaaccttattttgatttggggatttttaaaataagactcttttaacttcgagtataaatagaagccaaccaattttgcttcaaattctacccgacgcaaaatgtctgtgtata

SEQ ID NO: 46921 - DNA, 2101 bp, Cannabis sativa
ctaaacaatgcattaaatgatggttgtagagttcctctaaccgttagattgattttgtgcttttggtggatttatctcatccattgatttggaatttacatggatcgtattttgcaattataaatacttccaaacgtcacatttcactattttttctcaaattttcctatttggagacttgaatcttcgagagtgaaaatccaaacttaaaattacatacaaagtgaatcacactggagcgtgatatcgacttatgtattcatcttcttattcaaatcaaagctcaaaaatttccaagaaaaccaccctagtggttctaactgtatcgctagaggaattaaaaatctggatattaattttgaaattaactcccttattaactaggctaacaccattactaagaggctacatcgacttgaaggtcctttagtttagagaatttctatataaccatctttcgacgtcagtgtgtgctctcccaggacatagtttcttttaagttcagaagtgttgcctatttcatcaccaagtaagttttttccttttcaatttcttgaactgtattgcatgtcaagtataaggatttaaatgtgatttatttgttatctagaaattatagctttaggcttgtggctgagattctattgttgacagaaataggatactgaaaataatttcttgaataacttttggactcaataggaattgaatctttttgttgttttgatctgaaaaaccctattttgctgctggaatgttggaaaaattttatttccttagttggaacccttatggttttggacaatacttgagattttcttgttcttttttttattcttgtattcttgaatctactacctagaataaatactccttgaagattttatttctggatagtgaattaggtggggacctcttccaattagttatgggggaggatttctccttgcccttactatcttagttggtttgggtaactaactgcttggaaccttctttttcaggttccataatgtctgcgagagctcaaaggagagtggtgaagactaaagaagaagttaaagaggtggagcaagctcttgttccaaaagtagtgttgaatccatcttcatgggaaatagattagtacaaaaataagttatggaattatgaaaaactccaaaaatacaagatgcagagaggtctcagaagtgttctagaaatatttggaacatgctatatattttaagagagaaaccaagctagtgtgctgagggaggttctggtccttggagctggggatatgtggagatgtgtgctcatgttcctttaagatgttactttatagagttctttgtgatattcggttataatgttaagataaatagtttggatcttacttgcatgctgtctttacccatattgttataatgcttccatatttgttgtttgaacttgttattctgttattttttttgcagatcaaccactcacactccaaatgggtttagtgaaaaagttccttggcaccatccacaaaaaattagatgaagtcatggaattagccagaggtggtcgtgcaagggagaagctgtgcaaccttttgatgctggatcgaagaaaccatcacttccaaaagaactcttgaaagctgttcaaaaggctctagatgctggaactaagaaaccaacacttctaatgaaactttaaaagcagttcaagaggctccagctttaagtactgttgcatgtcttttggccacttctattgctgtggatcccacttctcaatgaaaagagggtgaatatcccttggctatagttcttcctcaacataatcttattgagactgctgatggtggtgaagatgagggtggtgaagatgaagctgttggagaaggatatgtcttcctcgcaagggaaagagctcgcatcaagttgggtagagataacaaaaggtcgagggttgaagctaaagataagctctagcaacttgctacttcccaaaggcaaagttcaaaggtccatggacgaaggggtgccgatgttcacgaaagtgaaaaatctactgggcgaaacactcgttccaccaaagccataattatctcttaacctttgcatgt

SEQ ID NO: 46922 - DNA, 2841 bp, Cannabis sativa
tgtttccaaatatgaactcgagtagagtaataatgatgacgagtcccctattgtttctcgagaagatctcaataaagaaagtagtgatgaagaatctctccctacttcacaagattactcaggagagggggctagggacaaatattcaccctctaattcaaaggcataaaacccaacagaaagtagcagtgatgatgtctgcgatgagtctttctaaagatatttaacaatagaaattgtcactgaagactcccaatgagagagttccttaacacaaagctcgaagaagccgttaagaaggtcacaagagttccttaaccaaaagcgatcaattacacaacttatttatttcttcagtctagaacagacattgaccaggaaagtgaagaagatttaaaacttaatacctccactaaaacaaacacctcttttgtttccaaagatgaactcgagaagagagatagtgatgacgagtcccctattgtttctagagaagatctcaataaagaaagtagtaatgaagaatctctccctacttcacaagattactcaagagagggggccatggacaaatattcaccctctgatgatgtctcctatgagtcttctaaagatactaacatagaaattgtcactgaagactcctaataagagatagagagagagagagagagagagagagagaccttatatcatcacaaaagcattcgaaccgggacaaataggtttcattttgctatgacagctacttaaattcagtgtcagtacctaggtagtggagcaaagagcatttaagatgatattattaatacaacaactgttctctagacagttctcttcacagttagattcaatttaccttgtgaaagtgaatcgattgcctcttgaaccgacaagatatcatgaagtcatcttttggttaggaggtccatcactaaggtatggcccctaactattagtcaaacattgcattagtgtagcgggtatcactttggctaagctttgatgaaaatggaagtctgtaactactacttctttttcttttaacctagcccacaatgatgtaatagaatttaacatctaatgaaaaaaagcattgagtaaaacttattggtacttcattgttattaatcaattatagctcacagacttgacaacgctctcaatcactgaacaaagcttgtagagttggtcttgaggtaactacaattatttctttagtgaattaaatgcctccaatccatgaatctctagatgagttgacaagtgctcacacatgtagcaactccctgagacccatgatcaagaaagccaaatgggatttggtataacaactaactaatgaaggcttttttctgatcactcttgggggaaatgagacatagtatatgggagctatgaacgttacatgagaattcacaaaaaaattatggtgcacgagagccatgtatggcccatacacttttgtatacgatagataggtgttaccctagtgttatacccggtttaaaaatatatatatagtatttaaagatttattgataaactaattgtatcgaaaaaaaaataattgtctatttattgttatggatagtgagtagggataattattagagttttggtggctacttatcttaaaataagtaaaattgtattagttgggaaaataaaagattttagtattcttacgagttaaggacattgtttagacccgagatataatttaaggcccattagcgtaatgaggtgaagtaagatgtaaccggcctattgggctataactgagccatttaaattgacttagattatactggagagtcggttatatttataggcatggatttatggtattattcttaagtatggatacaatatgacatatattcaaagtcttttggggctgcaataatcatgtgagtgaactatatgtttgaaacgggtgatgttttaaataaatttttagttgagtcatacttaattagttggatttcttttatggcacatgtgtgagttagcttttatttattttgtaaataagtgtgaaatgattagaatattctaagttttagtttgttatttgagtgtgtgggtaagttatgaatttaaaatatgacaggagatatcatcatggcttatacttgagaaaatatcaaataatatcaatatgacttagtaaacttcttacccaagcggttgagttagttaatggattaagtagagaaataagatagattggttagggatattttcttagaatcattaattagcgtagttataggggatagtttcgataattatgtcaggtatataacatagattatatatatttgaagttagtttccaattgaataagaataatgagttatttatttcaaacattgttttagttagtggaaagccgaaagttgtgataaaggaaatatgatatatattacttatatgctttagctttattaaaaattaccatacacaagtctaaagaaggagagccaaacgaagtaccctttaatcatacttccactcatcaactattctacactttgaagaacataagccgtcatacctattataagcatagtatatcgaggcttgctatcaggttaggaccggactaagtttcgttcaacggagactaagggaacgatattgcctgcttcactctaagttttaaggaaatcatagagcaatatctttcatactctctattatcaatcaggtaaggaaattaggtagttttttttgttgttgaactgtacaatttaaattatttgtgtattataataattttttagatgtattattgtgaatgtgaatatggtactaagaatgtgtggtatggac

SEQ ID NO: 46923 - DNA, 2372 bp, Cannabis sativa
tgtgtgtgtgtgtgtgtgtaaatgggatttctacgatagggggtgccagtgactgaggtgttagggtcattgtgataagggttctgtgattggtcgggggttctgtgattgaggttggtgcaagtgaggttgttgggggtttatgtaattggcatatttgaggtgtgcgattgggatttttggggtatgagcttggacacttggaggcaggggagctagtgggtgcagctggagtttggcggcttgtggggcagtgagggtttgattggctggggagagggagaataattaggggttatgggttgtgagtggcattgaggagggtttggtgagtattggtgagtgagagttttggtgtgtgcaataatggatatggatttagcaaaatgattggcagaagtgctacaactcaatgaatttgatggttatgtcattaagcctcaccatgcaagccttgaagagggacggaaaaagcttgaagtttgtttggtgggaaagaccgttcacctgaaaccaacaaatagagaaggcctcaaaaatactatgaagggtatttggaagattaaccatcagttccaggtgaaagaattgggtgcaaaatatatttcaatatttctttggtagcaaagaagactgtcaatgtgtatgtggtggtggtccttagatgtttaagaagcaattgttctgctttgttaaaccgacgagtctgggcaaggtttcaaagatgagttttgatcatgcctctttttgagtttcaattaataatgttccactagcttgtatggttgatatttttgctcgtgaatggggtagtaagataggccaagttaaagatgtcaaattggctaatggtgtgatgaaggatcgagtttgtatgaatattaccataccacttaaacatggatcaagggtggctattgatgaccatggggtagaggtctcccttatcttttgatataaatatatccatgagttctgctatgactgttgcattattggccataaagcatggattgtcccctaaaaaattttaaagatgaagaaactgattcaattcaaagaggtcaatatgggtcgtggatgtgggctttgagttcttctcctagattttggaccgcattttggcagttacaaatggattataatagtaagtcaccgattatgaatatgagaaaggtggggaagattattgatgttgttaaatgttctcgtgcgagacggaatactgttgaaaaatttgcaccaacctctttcttagaaggacgggagagagataaagaacaatgccaattcagtttagttcttgatgctaatatatatacatgacaaggtgatagagttgccttcaatccaaatggtgagtgccaacccctcagcaactgtttcacgacgcttcccatcactgatacgctatgagaggttaatgacatacaagccactaagtctcatgtggtgttgagtaattttcctggtgatgtgagctgatccaaggttaaccatgggtcatctggtgctaacagaggtaaaagtggctgccacaaaataatgtgatatagttaaacaatgatgaggtggctagtggaagaaaaacaattagtaaagtaaaagccattatcgaatcagagttgctttttggtagactactttgggagacatttgatcctattatcaaatcataacacaagaagaaatagaagaggcttagatcatcatcggtggtacatggctctagtagttctctgcctagtatgtcagcgtcgccgatgactagtatctccagcccagggcattgtcttactactggcataaaaaggaaaaatgataacagtgtccttgtaaaagatggaagagtgaaacttaattcgggttcatgagtgtttcctattgtgttggatgctcctgcggctgcctgtgagaatgatgtattggcactgtttgctcagcaaacttgccagaagcaatgagtctcttatggtggaatgcctagggattggggaactccaatgcattgacctctctacgaactgtggttcgtaagtgttctccaagtttagtcattctgtttgagactaagttgtgtggtaattggggagaaggcatccaaagacagattagggcactcccaactggtgctttataatagctaaaatgtaaattttttaaagaatgatgctaagtattagctccatcagatgaggtaaactcatctttattttagctcacaagattttgagctaaatctttctccacatttaactacatgaataatggttctttaaattttttttaatattattttaacttttctaatcacatcatacacatattacccatatatataatattttatttacataaatataatattttat

SEQ ID NO: 46924 - DNA, 1996 bp, Cannabis sativa
ctctctctctctctctcttattcagcctaagaagaactagcaaaaactaagccaatcattcatcaaattttagggaatttagtttgaaatcacggggttttagtggtacaatatgaggtaaggcctagaacctttttctttttagttttgaaggtttttctttgattttaagcatacatttgttgagaagtggttctatttgaaccctaggagttgtgggatgttttctatggttgatttaagttattttaagtttgtttgtgtttaatttaagggttgattgtagttattttgagttataactacttttattgcttggtttatatttattaggccctaattacgtgttctagagaatatcttgaagtttggtgttgttttaaggaagcaatgagatttggtgtgtttctgaagcagaaaacagcagaccattttctcagaattggtctaccatttttgttggtatgacctagaaaaacagtttgctatttttagaaaaatgatctgccatttttgaggcagtttttccaaagtcttgttttttttttgcgtttttctaatatttagggttttgccatgctacttatcgataggaaaacttttagttttgagtttaggtcctcaaaaagggttttagcaagttgtttacttattttgcatgattatgacatagggcttccgttcaacgcataaatttccattcaggttgaccgacacatttgaatctgaaaacaaggtaagattattataaaagtttatacgtatatgtgttatatgcatgctatattatgtgatttatatactaccaacactagtacggttgcagtacagaatgtattggtacaatatatgatgttaaaatgggtatatgacacagtgttaccaatgctagtacgggatgagtacatagtgcatgtggtacaacactcagtggtactcgaggtgcgattcattcagctctctactaccaaactagctagtatgtatgggaatgtggtaggttacttctgttaagaatattcttgattcatctgaagccttatagataggtgtatgagcgcctagatgcaagtcgattgcatgtttatatgttttatgcttctcttacccgagtctattgactcacagatattgtttacattgtaggtaaaggaaagatgaaagcaaagcatcagtgagtccagggtttgaagatagttgtacatatcaagatggttagacctaagtgttcgacctcaggacgacttaggccttcattttgtgtcacggagcgacacttttgtaagatgtattttgagtaatgttatgaattatttaagatgggatcctagattttatgtattgttgcttatttttaaaagtttaaagtttattagaagtttcaaatttggcacaattttcaaaaaaatcatttggttagcaaaggtgtgcacaataattagaaaatcactgtagcagtcctaatcaagtaggacgttacacactccatatgaggatccctctcactactgtagccttgcaggagcaattcaatatctcatattcatgagacctgacatttcttatgcggtgcaacagatctacctctttatgcctaatccgatggatgaacatatgcatgctctcaagcacattctacgttatattcaaggaacacttcatcatggattgcatcttaatccttcttcaatatcttctttgatttcatacacacatgcagattagggtggatgcacggacaccagacaatccacttctagttactgtgtgtttcttggcgataacctactctcttggtcatctaaattccaagccacattatctcactccagtgaagatgctgaataccgaggcattgccaatgtgatttttgagtcatgttggatatgtaatcttcttctgcagctatgttttcctattcataaggctacaattgatatactgtgatactattagtgcgatatacctttctggtaatctagttcagcatcaacgc

SEQ ID NO: 46925 - DNA, 4193 bp, Cannabis sativa
  modified_base (1840)..(1845): a, c, t, g, unknown or other
atgcctctctctttttttatttttaaatattaaataaataatttttgagctgagtgattattaatctttatcaaaaaaaaatgtcaagcggtggagagaagaggaaatcggcggcggaggaaaacgacgacgtcgccggacctgcaaagacggcgagagtagaagaagagagcacgaggactgaggaagaggaaatcgaggaattctttgccatccttaaacggatacaaacggcggttagttgcttcaagaaaggaagccgtcaacgtcaattaacggagcaaggttcgaatgtcagaacaatgttggagacgggaaattgtgacgccgttaaagatgaaacggtgagtattaggccaaatgatgaagaagaagaagaagaagaagaattagagaatgagaatttgggttttgatttgaacgcttcaccagctccggattgtgatcctgtttagatatttttatattcaatctgattattattatccttttcttgtttatgaatgtttatttttattttattttatgaattagtagaagaatagaaactatgattatatattctataatataataggaatttgaatggctttgttttttttttttttttgaataaatagatcatgtgatataaattacaatattattgttagatttttggaaatttggttattttggtctaacaattaatactttcattaatttttttttttttgagaaaaattattaatatttgagtatgaaaaagtcaaaaaatacggttaaatattattttaaattttgtgtttttgtaaaaattataaattaaaattttgttttgttgaatgataaatttaattatgtactttttttaaattgtacaaatagaatttaactgaaatagtgataagacttaataataatttaatctaaagtgttatgataatattcattatattttttatctgttttttgtgttagaaattggtttaaaaaagttaaagttagttatatttaaaagtaaacaattaaagaatttaattgataatttttataaaacatacaatttaagtgcagataatatttaatttatatttatgaaacctctctaaaccattatagtgaataagtgtatttaaatgaatttttaaataataaataaaaataaattattgttttgataagcaaaataataataataataataataataaataaataaaaattatatttgaaacaaccacatatatactattaaaccatctctaatcgaaaatataaaaatagagttatgtttgacacaaaaagtaattttgtgatatttttattaattttattatgttctaatatataattataaatcttgatgtaaaatttaatatgtcatttaatactcatttaataatatattaaaaaatataaaataataccaataatgtaaaaataaatataaaatttaataaaaagaatacaaattatttaatgtaaaagaatttgttaactaaaattaataataaaatattaaaaatgacataataataaatataaaattatagtatttattgtaatacaaattttacatcatgctatgtggtgatttaaattttgatcacttttgttattccacatatttacatcacaatttagcacatcattagagtagagttttaacaaagtgagctatatatttgacacaaaaagtgattttgtgatatttttatatcaatttttactattgtgctttattgcataattataaatcttgatgcaaaatttaatatcatttaatactcacttaataatttattaaaaaattataaaataatactaatgcaaagtaaatataaaatttaataataannnnnntaataataataataataatgaaagtaatttaatgcaaaagagtatgttaactaaaatttaataataaaatattaaaaacgacctgatgataaatataaaagtatcacatttattatgatataaattttacatcatgctatactgtgatctaaattttgatattttttattatgtaacatatctacatcacaatttgatatactattagagtaaacttttaataaaatgaactagcgaaataaaagatgttaataattccacatgtttgtttggtgtggtataaaaatggaaggaaagtattgttgcttaatttcaaaattttgggtccgtggaacataagtcatgagtctagtatttggaagggtatccttaagtctagagatatcattcttaacgggtcagtttccttggctgcctttggagactccattgatgtttggaaacaactttagattctttggctgaagctaaaggattttcaagatttaatgaagagtttaagaggtagtggctttacaataaaagataattgcagatatctcaaattaacaatctttggaatactcctttcggttaccagctggtttggaaacataagaaaaatagccagtatactgtcaaggatgcatgttatgtggatcaagttccgagatttgccaaagcaagagatttggaaatggatatggcacccgtcaatacatcctaaggttgttgtcatgttgtggagaattctgaatgaagctcttcataccaggtctaagcttgaggcttctatttttatcgaaaaaagattgtctcatgtgtggtgttttggaggaaagttgtgttcatctatttaaagattgtagttttatgaaaactatctggtttaatggtccttttccatgccatttagatgtcattttaagggattctttgattcagatgttagaattttccttacttatttttctaaactctagtagacctatggtgatttttattttggttgtgttgccttagaagtttggcatcaaaggcacttccttagattgaagggtggatctgtggatctaagtttggtttctttttaaattggagttaattttttcgaattttcttctcaccttcaaacaccgatgccaaaaacagtatggaattctgagaggatagtcatgcctagcaggaggatgttgacattgttatatgcattggctcctcatggaatgctggtgtgattggcattgtagcagtaatgaccaattatgctgatggtagttgggctcattattccatccatacaaaagcttcatttgtgttcgaggcagaaactcaagcaattcaccttgctctttcttgggctctccaatcttcttggaaggtatttcatattttttttaattctagtcaatagtatggcttagaatagaagcctttcggagtggagcttcttaaatgtgttgttatcgattttagatttagttaaaaagtttaatgtttgtaagttttcgttcttgtatcgtaatttgaattcttttacggatgaccttgctagaagagttagaatctctagcttagatgctggtttgtatcaaggacaacgaattttccttgtaattctgttgtttaaaaaaaataaacttaaactacaacaacagaaagagaaggtgaaaatgggtggaagagaaaaaaaaatagggataaaaatgtcatttgaagagtaataaataaataaattgaaactgctcaaccaaactttcacaaataatttggatatttattacattgaccaagttttggtaaacttagaaaatattaaatgtaatttctaaaaagtttataaaatcggttttttttttccttggccataattgagggccttatgtctactctagtctatatgtctagctatcttcttggtgcagttttttggggtctatttcttgtgggaaattagagttgtatttgtttgtatagctaaataaaattctaaatgtttggtaattcagtaaaaaaaaaaaaaaaattatatgtttggtgtggtagaaaaatagaagcaaataatggcatgcttatttattaaaagaataaggtcttaattctcatttatttatttattaaactttataataggataactatattttcgaaaaataataatttaatcaaattaaaatatttcaattatctttcttaattattaaacaaaataaaattattataattttctttacaaattagtttacaagataataaattattgtttgtaagtattttatattttaaacttattttaaaaattataaaattatttatgttagataaattaataatgaacccaagatctatttgtatataacatagaacac

SEQ ID NO: 46926 - DNA, 3996 bp, Cannabis sativa
aaatatatcacttcctcttatcttggtcaaaagatcaaccttgagaaacagtatagacacatacgttttttagggggacgaaaacaaagctatcttaaggctagtctatactccctcggttttgaccaataatggaagtcgtaggttacattgatatgtactcctttttccactcactattttatgttaatttgtttgttttactaatttttagaatgaatacatattaaccactttaataattatgctaaaattattcataataaaacctcaaattatacataaatattctgttataatcattaaatttgaattcataatttaaaactcttttaaattaatatgataatttttaaagtacaaaatttattttaaattaatcttagtcaatttaaatgattaagtatcaaaaatgataaacacataaatacataaacacatagaacaattctaatataccatgtttttactatgagatgcatgatagtatagtaaaagagaaaatgaacttccaaaaataaaaaagtgatctaaaagaaactacaacaaacttacaactgcaacatagataaatctagctaaaattttcaaaaactgaaaaaaaaaaaaaaaaaaaaaaaagtacaagtgaataacaattgtagtaaaaagaaggagtatatagcactctttttttcttaatttgattgtaattaaaaaaaggtaagaaattgccacagatgtgacaaccagtttcccatcacactatatttactttttattttaaaaaaaatcaccctaaggtgacaaatgcaaagtattgattacaagcaattattaatctgaaaattgataagtttattttagtctccttcgtttatatatatatggctgcatttttaataggtattacctttatgggtaatattatcaaattttgagtttttatgcttagttttattatctaattaaaaaattcttttatttttacattatatgagttggggttattctatcggctaaaacaaaaattaagaaaaaaaaattttcagcaaaaaaaagttaaatttgacttaagtattttatatataagcatattttttatatactctaaaaaatgatatttttgtttattttttttttaattaagtagttaaattaaacataaaaattaaaatttttcttttattatgcgtcatttgatcaaaatctaatagtttaatattttttaaattaatatttattgaaagctaatttcaagcctttgaaaaagggtgctgaatgggttgtaaaagtttattggagtaatgaaaaacacgactgatttctcaaaagaaaaatatttatagttaaattgtttaataaccattaatagataatacttattgaaaaatgttccatatatatattttaggtgtggaggatgtgctagagatacataactcttgttaaaatttgtcgcttataattatatatcttagtttcattaattatgtttaaacaattgctaaaagaagttatgtttaacaaataacacagtgtggtatagattcttttattaaagttaagatcattagtcgttctgtctaaatgtaagtctatatgatttgttctaccattatttgttttaagcaaagtttagaaaaaaaaaatataataattaacaaaactttattttaaaaaaaaaagaataataacaaaatgattaatatgatatgtatgattttatagtcctatttatactattatatatgtactagtaagaaaattgaaaaaataaataggagaaaaatgatgaaaacttgtaaaagagatctgaaaagattaaaagcaaaaatggagtaaaaatttttgaagaaaaaaaatttgaggttaaaaaaaaaaaagaaatgacaaaaacattaatagtaggtgcaaataaaacaaaactcacaactctaaatatgacaaaagaatacaaattattaccataattttatttaatttgagaaaaataaaagagtaaggactatgggaaaacatcacctaacaagtaaacaataagcttacaaagttatgtataattgaaaaaaagaaagttaaaattataaataaagagattaaggatatgtacatattaaaagtatttctaatgaagagctaaaaatgtggcatatatacagaccattttcataaaattgaacttccatggtagtatataaagtggtccaaatttaccatatgctaaaagttgtactaaatttatcacaaaatataacatatgtcaaatttaccagaaaatataacatatgctaaattttataccacaatatttattattctataataatataaaaaataattcaccaaaagaataatattgtataaaaaattatacagaaaaaaaatattcataagaaaatgaaaattaagatcattaagaaataaaaaaccccatgaaagttgatgtaaaaaaatgccattcctaaaagaatgttaaaggcggtaataaattccataaatggtcatatactcttattattagtgtcaaacatcataaaatgtaaccaaatataaaaaatccagaataagttataaagaaatcgtaagaaaaaacatatacaaaacgattgtgaaaaaatatatatattagtaagaaaaatataaaaaaaaattggggtttttgtttttttttttttatttttattttaaaataatttttttttatattttgacgaaatttcacatagaaatatctatgagaactaacggaacaacttaaattgtaactgaagagcaaccgtctaagcgtgctaatttttgggagtaatttgaggtgcacattagtcagcattaatgagccaaatattgaagagacccttggtcagaatcacgtcggatcaccaacagtcacttcgaacacgtgccacctgttcaaataagaattcaaaccgagtgaagtccacgtgcaacttcggaagtcctgcgcattggcaggcaaatgttatcctattttttgtactatgacgtggcagcatgtaagagtgacagtgtttatcattccttgtacttaggtagaaagatattccaaagagacttcaagcaacgtatctacacgcacaaagactactaaaaaaatacaaaaaatagtatattgagtaattcttataaaaagtatataaattaattataaagaaaaaacttagtgaaaaaaaaaaaaaatatagaaaaaatataaaacaaaaattcataaaaagactacaatatgttttttttgtcgttttgtcaaaaagactacaatgttatctaatataatctagctagtaattatttttttggcgggtaagcttcgggtccaaatataaactaataattttttattatttttttttaaaaaaaatgctgtatcaatttttatttgattgatatattcaattgtcctttttttttttttttgtgaaaagatatattgaattggcaatcgtgcaacgaccaaaggaagctggattttattttaactttttccttaagtgtgtgaatgtgactgatgtttattattctcgatcgaacttcaactctaatacatattatattctttttgaaatggataatccaaattattagttgtagggatcttttttgctctttggctttttatatttgttagtttattatcatgattttaactaaataatctgaaccttttatgtttttcgtatactacgtttatgtttggtgcaattaatttgtggaaatgatagagagttggtgaaataaagttgagcaaaaagtttaatgtttgcttattttgaattaaaaatctggttatgagcttatatgtatattagtgtatgaggaatggaaatatgatagctagtatttacatttttattttttatgacataaaaaaataacaaaaaagaaatcacggctaataataggggaaaataacatgtataaatcaaattattaccttacaaaattccataattttttcaaacaaacattactttatctctgtaattctctctctctctg

SEQ ID NO: 46927 - DNA, 1014 bp, Cannabis sativa
aatattttcacaataaaaaacataataaaataatttatgtattctatgcatgatttatataaggagaaaagtaaactctttgtaattttattaataataaggttatgttacgtgaacacgtatttttcgtaacaacttattaatcaaatattttattacaaatatatatatatgtatgtatatttatgtacaccacgatttaccactaattaaactcattattgtataacctcttgccaatgacatatcaaataattagtatatatcattaaaaaaagactaaatttaaattttaaaattaaaaaaaaaatcaaattttcaaccatctaaaacaaaacttgcactcataggtagtttaatttatttttcctaaagatcgattacaatactccatggccataaccatgcatgttctaatcttatcttaattaaattagaagatttaaatatgttttaatattatttttttttaattttttttctttatttttacactactacatgtttgacatactttgataatttcatttgtcaagtttaacaccatattttgaaagcaaaataaatatatctaaattgtaaacataataaagaatatatattttctacaagaaaaaataacatatttaaatatatatataagatttgtgttctcaaaactactacactactactaaatcatacattcaaacaaataattaatagttgttaaacaaaaaattctaaagttataatactactattaaattgtgtacccctattattaaaaatgacatataacatttctttatttattttcttcttaaactattatatatttttgtagagttttgtctttcattttttttttttgcataattatttatgtatgtattcatatttgctcccacaaactgattttttacttttttttttattttaatttttcccatcatatattttgatttttatatatccttgtaaatttatagttttcatttttatttcacttattttcatatttattctataaaa

SEQ ID NO: 46928 - DNA, 1732 bp, Cannabis sativa
ttgtcatttaacaaaacacagggtccaatctgtaacttttgcaaaacacagggtctaaaatagtatttacccttttttttataaagatttacgaataaggtagcacatactttagcgtgatattttgttcatgttgctgattgtatttttagtaagaattctttatccactgaaatttcattcttagttaagaatgatttgatttgatgaaagatgcattttgttaaaaaaaaaaaacaatttacaaatactctcttagcttaattagtccaaacatagtatatgataaggtgaacaagataataactaaagtgattccaataggcaataggcaagttcaatataatgctttgaatttgtttaaaatcaaagaataatacagcaaaggctcaacaatagactcaaacttagaattggtgactcaatatgaagagttgtgagatttgagtcatattctaaagtcctattagattgcattattacatggattgctaacatggcagaagttaacattgcttgaactcatccaccaaatttgtgtggttaagatatagctagaatattcccaagctttcaactctcagcaacttctatatatgcatcctatcatattcggacagattagactgagtaattatttattgaaatactttaaagatcagattgagtttactagtgatataatatcacctatattgggacgcactcttcgagttagtatcaaattttaaatatactctttgagacagtgtcgatctccaattgaactaaaattttattttcttattccatattataaaatagttacataattatatatctataggctttctcactacttataatttactaataagcccccataatattttcttagtctaacactttttcacccttcaaaatcactaattcattaaagtggtaaaaataaaaattgtaattaaaaaacaacaaaaaataaaagaaacatcaatttaacaaaatcaacccactgattttagcccatacactattcaataaaatcttttagcccaactcctaagcccaagcttattacagcaacccatcttcttttccacatgacaatgagccaatgatgccgatctgtttcttcaacaatttttttaaaaaaaataaaaactttgaagcattcatgaaatcgtgaccttcttctccttgaagccataagagcatctctaaggtaactgtaatatctatattaaaatagtatttaatttttcaattattaattacgcaagaataattattttatttatttgtattgttagtgagttgagaatattacttagagtagttataataattttttaaagattgttaaagtagtatttattgcgaaggtaaaatattatggtatttttacaagataggtaattaaagcccaatataaaagtccattagattttagtgggtttaattaagtgaaaattacatcaaatatgggtttttaaaaatattttacttaaatatggcatttttaagtttgtacacgttttatggtagttttgtatttttagactttattatgggattagatttgccatatttgtgtaaaattatttagaaagcccatatctgattgattttctctcaaaattacaatctcactttacaaactcattccacaaacccactccacgtcttcttcttctccaatccccattgatctcaaccatacacccattgattcctccttttcacatgtaatttg

SEQ ID NO: 46929 - DNA, 3304 bp, Cannabis sativa
aataataaaatagatattattatacatcatatattagatgaagtttattaaaaaaattaactatttaactgagtagaataatttaatcaattatccaagcatattgagataaaaatgataaaataaataatgatgtatttatagtacatattaaaataccactatgctttctaaataatgtgggacaaaaataaatttagtaaaagaatcgtgcaacttgattttttaagcacaaaatattaatctcttacaaaattaaaaaaaaaatagaatgaataaaataatatagagtgtcacctaatcatttttgtgctattttttatataaattttagtaaaagaaacgtgtaacttattttttaaggacaaaatattaaactcttttaaaattagaaattaattatgaaaaaaatatatagaatgtcatctaactatttttgtgtttttgattctatccttctgatgattgcaggtctaagtgtgtcactacttgtacttatagtgttattaacaacatcatgaacaaaattatggggaatgtgatgaaaatattctgtgatactcaattctatcatttcttggatgttctcaagaataaatttcatccccaagtttttcacaatcttttgttgaggaaggttcagcaaggccatctaaagaaattttaggcaaaagtttgtgaccgttgtattaggtttagtgctgtagagttttctttgattactggtttggattgcatgggtgattgcaaaaaaataggatttgaccaggaatcaaactaacttattgacatatgctttccttgcactaaaacaattgaccataagtctattgaggatgcattcttggcaagagatgggggatgatgatttcctaggtttgaggatgactgttttgtactttatttattgttttcttttaagtaacaccccggagaaataagtacattagttatacaactatcaatcaattgttgggcaactattgaagattcaataattttgttaatttagataaagtttttggaactatttaaaaatcaataatatgtgcaaatgtaatgttactaatgctttacgtttctattataatatttttaagcaactatttaaaaatcaataatatgtgcaatgcattaaagaaaatattttcgcatgtataagttctgaaaaaaattaaaaaactcaaataaattttcttttaatatataatttcttggatgtagaagaatagttttggatcgtcctttatctcaacggttggtaaccttccttcacttgatatttcagttgcaattgagtactttctttgttgtattcaaacacttgtttcaacttgtgtacacgtattttatatttgcaatccattgagatgaattcaccactaacttcgtaatttacacaattcattccttgatcaaactgtccattgtaaaacatgagaaatgaaattgcgtccctttcctgacattttaaaaattcatttatggttaatctactatgagaaaactgtaatgcaacaatgacatgtgctgttaggcactgtaatataaaaaaacttaccacaatggagtttgctctatatgagtcgtgtattgtctattttgagtcttgatttttaacatgataatattttagtagcacaactattaggcaactaagatataatgtaagcgcaactatgtatgaacaatgtgattgaacattgttaagaaaaaatttaacaaagtttcattgtactaatgaacaatgacttgtacgttaagaatattttgtgaagagacaaaagtaagaacactataaaccaacgtgaaatcaactaatgttaaaatatatgaaaatactaaccatattagaaatgttttttaatgagagccttgtattggattgtcaatatgaaatatacctggaaataagactaaaactattaatgtagcattgtcaattcgtaattattgatacatcaattattggagtgttaataaaacagacgaccaacagtaatgcaactatatatatgaaaaaaataatgtttccagatctgtggtgcgagatgaatgatgaatgcgatcagaattgaataaatcaagtattaaaattttggaaaaaaagcgttaatgcaatagttataatattacttagtgcagtgatatatatttggtcatcatacttgatttggattgatcgggaacttgaaatcttttttcttacagatctatatttaatgaatatataaattgaatttaggagtattagttttatggaatttgaaatagaaaccaaggttcaatcaatgtttcataccaatttttctgcagatttttttttctgtcaattatgattactttttgatttgagtttgttcttcttcttaggtgacaattgctagaattaatagtgcttctttgtctgcggaagttttttaatcgttgctgacctcattgcattgcatgaagattttaatcttaaaaagtgtaaattgtgtgggttgaaagtgtatgtagtggactgtatatttatttatttggtgagttaatagtttttttttaataatattgttatcttttttattataactggaaaaaagcccataaagaaaccgtataggcgttcgttgttcaagaaggaggtgtgtacaatttgattaaataaagtctaattcaatcttatagataaatatattattaattatataatgtaatcatttaactaacatggatcttttgactcaattgtgcttgtctcacttgatggttatgatattcttattaaagcatggttgttcaaccacacctgctgctaattaccttatcttcttattaaaatgatcaaatcattaaaaataataataatatatttatatttatatatcatttactcgtttgttctttgggcattacagataataaagtgcttacgtacgtaccttccaatgcatgcatacacataatttataataaattctttattgattgcaataattcactcattcatatacgctcccttcattcctaaaaatatctattcaatataaagtgtgcctatataacataattttttatttttaataaattcatgggtaactttttatttatattaaaaataagatggtttattattaaaaataaaatgatttatgagaaattcatgggttacttttatttatatataataaaataaaaataaaataaatctcattaaatccaaaaaaaaaaaaatagagttccaaaattttctttaattatcgtatttctaatcttattcgattatttatgcctcttttataaaccctatttgattaaagtt

SEQ ID NO: 46930 - DNA, 2183 bp, Cannabis sativa
tatatatatatatttatagttttgatatcactagtcaaattgtgccatagctttttctattatagatttttcaaaaagaccaaattaagaaacctccaagtaatatgaaaccctagctaataagaccaatcaacttcataatatttgaacaatcaaatgaagacgtcaaagaaaacggcctaacaataacatgtatacacctacgttgccaaacttccaaccaaaaatattggaatcatttccccttttccagacccattccctaccaataaaaagattttatgtaaatatctataattttgaaaccattttgagcttattatctattgttttactttattggagttaatctcgtagaaataaattatcatatataagatgaattaattatgttttctattaccaattagttttaggatggaacctcatgcatcttatatcaaattctaacataatattaaagtcatttgtaatccgttgtgagcccaaactgtcgccagttcaaaaagaacagtcaatctaaaaacttttgttgtttttcctttaacctcctccatttgaccttgtgggattctttcccggtccaaacatgaggagaatagagtctattagagttagtacacattgttaacgtgtagaaataaattatcaaatataaaataaatgagcatgagctatttcttccatcaccaattaattttaaaataaaaccccatacaccttatcaaatcctatcacattttcaatctaataagtaaaatataatggagagtgtatacgtccaaatagtgaacaaaaattcaattttcatttcatttcattttagggggtgtattcatttgaattttcccttaacaatttgtaattagaattagactaatattgggtacattctttaaccaaaaaaaaaaaatttgacaacttgataaaacaagttcacatctttccaaccctttataaactttaatttacttttcttcttaagaggaaaaaaaggcataaagttgagctcactgaggagataataataataataataataataattaattaagttttttttttctttaattatttgttttttttttttattattatagaattagaactgcacgtgcaatggcgcgtaaagaggaagacttgaaaaaaggcatcaattcatagctttgggacctaaaaatgaagggccatttaggccatcccataccttcttatgtatctttctcttcttttttattttatttttttttaatttttctttctcaaagaaaataaataaagaattaagttattattaataaagcgatagcaaacacaatatcaaaaccgaatacatgtgttctgttttcaggttaaaaaaagcaaaaccagaaaacatagtagcaacaaactggaaagtattattttataggaaaatcttatgacaccccaaaatcttaggataaatatatatataatttggaagaaaatgtaaagtacttaaaacccatcaaagagttttactgattaattttaattatatacattataatcaggctgtgttatcttaaatctttgattaagtgaattttattttttaattaatcatcgtaatttctctgctcaaataattgatattacatgccatcaaatcaaaatctaggcttgcctaatgaatgaatggtatatatattttcatgcaaattcctaatatctattgatctttgaaaaaaaaaaaagtaaaagaatattggaacaatatctatgtagtccattcggtggatataaaatttctgaaaaggcagaagagatatagtggatatatatatatatataattacaataaaatgcaataataataataatgcaagcagccaaatgtagctcattcaagtcgacatatatatatatatatatatatgataaaactaaatatctgtgtttttggctatgtattttattttattgttgtgtataataactttcccaaatacttcgtttaattagaagataatccacaccatatacttgtctaataaaataaattaattattagacattttttgatagcaaattaattagacatttggtaaaggaaaaaaaggaaaaaaaaaggggagttatatttgcaccccacaaaattataaatacaccccattattaaaaaaaatataaacttgaataatttttaaaaattactctta

SEQ ID NO: 46931 - DNA, 628 bp, Cannabis sativa
agaggaagaaatatatcataattatttggtaatggaaactttacaaaatcatatgaaaaaaaaaattatgggacatgtttaactttttattattttcttatatgtagtttatcatacactaatgagaatgtaaaatcaaatctatgtttaggatcttattttttaagttagtatttagagtaacctaaaactctttaacacttaaatttaagattcctttaatattaaatcttatcatctaatgcccaccaaataccccttaaaatctaagtttttttttaagtctcatgtctaattacaatttgactgagttgtacatgaacaatcatttttcaaaagctaattaagatttttgtcaaccgaatttcaacacatgtaccaaaatcaaatcatacttttcaaatttttcagaacgttaaaaatttagaaagttctatttgcacactacgaaataataagtacatgtacatcctaatatttacaaaaattaaacttaaaataatttttaaaaataactcttaatgatttttttaaaaaaaaatttccacattattttgtgctaatttcaatacttatttttcataatttttttaaatcatctataacttttttttttctaataaaattt

SEQ ID NO: 46932 - DNA, 2119 bp, Cannabis sativa
aatctacatcatgatctgccttatgttggaaatagccgatagcccttctgcatcagcattttttaagtgcagtgattcattctttgcaactcgactatacatatctttaagtaggaaagacagtttcccataacccccaactaattctgccatatacgagtaaatttggcatatttttatccctgcactcttcatacaagtggcatccaataacatcccatttggtataattcagttcgagctaatgaattgtcgatgcccggcaatgaccaaggggtgggaatgtgttgaacaaaattccttgcaataccatttcccgtcctgctttcttaaggaacctctagtaatagccctatcctagtaatagccctcggctctcttttacggttcaagtttttaatccatttcaattcacgatgtccttccttagtgcacacccactggtgatattttatagcacccccaaattatcttttaatttttcctttccttagactgaaaccaatcatgtttgactattggtggataaagaactctacttcttcaaatgtcaagaattgttttcctaccaagtcctctcgaataagttcaatttggtccttaaagatttctaacttttcagcagctacaatccacttctgcaaagtaattattgctaacttgttcttcattgaaatcacccattgagtaattcgaattaggattcaaatcctttacttctatcattatatatcatagaaggaatttgattaattaaggacctatgcacatcatgatagtattagtagatgttttatgaaattttggtactgtaagttcatactattactataaacatcaattaaaaaaatataaagatcaatcatagaaattctttgttctaacaactcatgttgacataaattgaagagaaaaatatgcatataatgagttatatttacttagaatctttgtaaagagaatcaataaaaataaaatgtttaaaatctaaattaagaaataatcaaactattttaatttcaatttggtgtcggcaagtccggaatcactgcattcagttatatagaaatttatgtaaccattgtttcatgatatatgaaattcatcaatactcttacattttgatcatcacatatcaatagatttatctagaaaatgaaatagaattgtacctacaatacactgctatatcagacagactggtaaggaatcatttgtagagtattataatcaaaataatataatcgtaactaaaggggtgagaacaagataacatctgcacagaaaacagagctgggtgggtcaaagagtatataatataatttaaatataaacagtcattgaaatttagattacaaaccgaagcatattcctgaaacattattatatatatgtcataatcatatggcattgagatcgagcgacaaaccaaaccattactattaaaaaaaaaagaccctaaatgatattcatataacagtcatggcattgagattaataatgctacagcgaaagataaataaaccagacgattcataactgagtgaagtttcagacactctatgattaccaaccctagaccctaaacgaaattcctcagagagaagggttatggtgtgatacgagtctccatgattttctctatatagaataagcatcgtaataggaaacagttacttgtttcacaatgaacgtgaaacacttcaggagcaaatgggtagaagttttttaatttatttattttaaaaaaaaaacatacataatgacaaagaggaaaatattataataaaaaaaaatcatatttgttttggcatttaagaactttttagtccaactttttttttttttttttgtagttgtgcacattgtagttatttaagacctcttgccaaattttgagaaattaaaaaaaaactaacacactgaaacagggttcaaacagtttattacacacgtgacactttcattttatacgcctgtgaattagactatttgaaaaaaaaaaaatttatagatcacttgaatttttatatgcttgtgttgaaccaaaaaaaattattattatttcattatttcttaaaacaaaacgaataattatttgttggaaaaaatagtctct

SEQ ID NO: 46933 - DNA, 1410 bp, Cannabis sativa
ttttagttcccatcaatgggtattaccaattaagaagtattccatatatatatatagagagttacacaaatatttgggacattattggaattcggaatacacatgatgtttttatataatacataataacctcacataattttattttcaattataagtgcaaattatgtaattttgtataacatcactatcatttatattttaatgtataggtttaaggataatattagttagaatttaatacttaaaaatatcatgggctatttgacaccaccaaaatgtacattattgtcaatgttaattaattactacaattaattgatatttcagctcaacaacaacattgtgtggatggagtctcttaaaatggatttggaaatcgtatgattatatttcggccaaaatgttattcttccctatataactgcaagtgtttctaatttccaaaacaatttaattatgctcgttataattgattagctaattgctattataattttgaatgcatgttttttttttttttttttgaaagcttataactttgaatgttaagtgcttaatttcatatacttgtatatttttattttctcttgagatttttcacacatggttttactcttgaattttaataaggtcatttttttttgtcaatatatatattattaaaataggggttgatgaatattttttatctttttaactcatatagttaatgatttataattaataatatatatacatctctttaaagtctaattaaaatataagtgtgagttttttcaattgactaaagtttttgatgaggaagatcattccaactaaagttttgttgtttgatctcctctctaactaattccataaatatattgtgtcattacaattttctcatgttattgatcaaatgatcttagaaatctagaatggaaaatttagtagattagtattagaattccaatctcaattattttaacaatcaaatatctcttttatatcatttaattactctttttgtatattattattattttttaattaagtttaattaggtgatgctaagtgtaatatatatcgtattttaattttttaattaaataatatattttttaaaaaaatttaaaataagatttgagattttgatttttaagatttttttaactatattacgacaataatagtgtatatatgcctcctatcaataattagtacttcatataatcatgatatatcaagtttgacttaccttacaaatataatttgacttaaaatattttcgattttgatattaaaaaataatttatataaattatatttcaagatcatgtacctttaaaaatcatgtaaaatatatcgatctataaaatcataaaaattattaagttttactccacttatatattaatcgaaaagaaa

SEQ ID NO: 46934 - DNA, 2459 bp, Cannabis sativa
ctaaattgcaaaaattggtctcaagaaaatcataacaagaaaaatatggtcagtattacagagtgcgaaacaaaatttaataacccaaatcaaatgcacgtttaaaaccataagaaagtaacaactaatttcaatggatttattttattttttcacttaataaaagagaaaaaaaaagagcaagatatataaaagatgaagaacaagtacataggcttaattatttgtttaagttacttgttcttcatcttttatatatatttactcacatctatatatataaaagatgaagaacaagtaactcaaacaaataattaagcctatgtaattctacaaatttaaacttattcaaactttaattagataaatcctagtaacaatacagcatcattattcagatgaataaataataaacatgatacaaaattctaataatttaataaatcataaatgtatgacaatgctcctgattatttatttcttatttagcatcaacaagagaaaatgtaggcaaactatatatacgagtcccatgaaaatcttacaataggaattttgacgcaatgctttaactcagcatttggcttcacaatcaatacagtagctagaattttcatttcatattcttaaatccttaaggctatgtttggaagttggatttcggtggggaaagaaagaggtaaggaaattgaaaacaattgattcgataaataatgaaaaattgattttttttccacttttttttttcctacatttttctttctatgccaaaatccaacttccaaacataaaatccaccaaatcttctcacttcgtatgacattgtgccccaaaaaacagattgaatggcaaaaacagaaaaaaaatattttcttattcacacaaaattatcaaatatatctatatgtatatgaaaacaatgagatgaaaatgaacacacctctcgattccatcataaattgatgataattctatttcatatcaatgggaaaactgtacagtttacgcaatatgtacacacatatacaaatcgatactcctgcaatacaaatacatctagaaaattgaacattaaaggttactttctcatcatggaatcaaacaataaaaagaaggaaatgggaaaaaacagagctagggttgggaaaagcagcgataaaattcaaatctataaatacctaagaacctttacaatattacaaataacgaaattgcgcttgataagaaagagtatcaccgattccgccatgagcatttggattagtgattcatttcgataataactcagaaatcatacacagcgaaaaaaaaaacaaaaacaaaaacaaagataagattatataaatatatatatacatggagagagagagagagagaggagtaggagatgaacctgagcttaacggtcgccggagatgcaccgaagatcgtcggtgcagccgcagaaaataataataattataaaaaaaaaaataggagagagaaagagtgaaagatatagagagagaaagagagagagaggattgctttggtttggtgggtgaaggaatgaaacgatagctgcctgcctcttcaagaaatgatacacgtggaacaatatcagtcgttggattggatacgattgaaaaatgaaatgcatcgacggtctcagattcatagttgctaaacacctttaataaaaataatgaaagcttattgttattattattttttatataaataagaaaaagtttgatttgttttaatttaatgaaaaattatcattctctattttttttaattcaaattttgttatatgattgtgtaatttgtagttgtagtagatatttttatttatttttaaaaaatttaaaataatttatagtattgaatattttaattttgttttgttattagaaatcatcaaaaataaatgagatgcttacttataattataatgtagatcttagtataaaaaaatgggttataatttattcaattttaaaaactaaaaagtataaataattttattggtaaggacaaaaatagttttaagcacgttataaagaagagatggaaaatcttttatttaaactagctcattttttaccttaagtgcgtgcacaactaatttatgtgagtcatatcagctaaataatttaaatgaataagagacaatttaagaaaaattgtatagtaaaactaaaaaatatcatttaaaaagagccaaaggcattacatgaagaaacaatagggctcacaagaaaataacaattttttgagatattaatttaaaaatgttgaatggaaatgaatggtttttaatatatagattaaataaagaaaatagaaagaaaatcattaagtgttttaataaaagatttgatgcattttttaatttgagttttgaattttttccaaacaaattaagtattttagtgcatctcacacatttaatattttgagattcaaagttgtat

SEQ ID NO: 46935 - DNA, 1980 bp, Cannabis sativa
aaaaaaaaaagttccctcccggtagggaacttttgctaggtcctaccataatcttgccctaaacatatatttaaaaaaaaaaaaatctatatacatatgagacttactatataggttagtgcatactttagttaataaaaatgaacaagtcttttaacaaaaaagaaacacttatatattaatgaaaacaacttttaattacagtataaaatgcaaacaaaaaatattatgaatataataatgaaaaaatccttaatttcaaaaaaaataataattataattaataataaaataatgacaaaagcctttttttatgtttgattttctttttcatatcaatgtaccaaaattgagttataacttccgagaatataattagattggtctcaataataagaaaagtaggttctttctcccaatagcattgtaaaagttattctccatgatttctttaacaaaagaaacaaaaaagttattcttaaacgatgtgtggtaatggaatggcttttaaaattggaaacacatatttaaatacataatatttatatcaagtgggcatatatatcctcagataaattaaagtcatataatataatatgtacacatgtagatcgattcaattatatatgcatgtaatattgtacgtagtggagcaatattataaatatatttagtctacttaggatttttgtcactctaattatgctctatgtatattgtgccttttgattttttttcagtcgattaaaagtagtctttaattatttacagtattgtaaattaatttttctatcaaattttatcacatataacaaacaaaataatgatatgcctatttaaacaattgtcgtgttatatcaagtgtgtaattaattttaaaatatttttaaatttagttttatgtaatttttttaatcattaattaatgtttttgaatgaatgaaactttattagatctgctaaaaaatctaacttacacaaatttagataaattcggccaccaaactcttatttcaacaagagaaagagctaatgcaagtttatgagcaatacagttcatagaacgaggaaaaaacaaaaatttagaaacatgaatatttttgcacctaaaataaatatcttgcaatacctaacaatagttcaccacccaactcattcctactaagaagagtagccacaacttgacaatctgtttcgacttcgacattgacatacccaagtctaaaacataactacacaccagccaaaaccgccattgcctcaaccacaactggagaaagcaaccccatcactagtactatcatagaagccacacacatggcagcatatggtccctaataaccgccccaagacccactctacactcatctcaaataggccagcatccaaattgaccttgaagaacccttcgaccggcggttgccaaatcaacgttgaaggcagtttatcaacatgcctcaccatcgaagccgagatgtactcttcttccctccaaatgatgtgtccctctagcttggtagtcacgagcaaaaaagaaagcccattggttccaaatacgctaaaataacaccatcaatctttccatttcattgcgcccaagtaacaatatcatgcattaattggtttttaccttaatgatcttttaaaattacatatatatatttttttaattttaaattatacacgtggcggcgctgatgtaaaaactgactaagttatagatatgtcattattttatttgtcacgtatgataaaatttgatagaatagtcaatttacaacattatgaatagttgagagactatttttaacgggttaaaaaattcagagagcacaataattcatagttcgtagttcgggaactaaaattctaaatagccatataattatatgccattgtcataaaaaaaaaaatacaatgtatttattgattattatgcatgtaatattgtataggtacgtagtgaaatacattgactac

SEQ ID NO: 46936 - DNA, 1912 bp, Cannabis sativa
aaaaacaaattaattattattagtctcatcaacctctagaaaattactcatccactccaaattcaaaggctcatcccataaagttgagttaaggtaataattatcttgatcaaaaatactaataatctcattcctttttgagcacccaatatcattatcataataaccattatgattatgattataatcattatgataattatgattaacctctttgatcatctcttgagccaatttcttcttcttcttagtttgtttctctttattttgcttcattatttttttgcttaaatgagaattccagtaattttttatttcgttgtcagttcgaccaggtaatcttccagcaattaatgaccacctatatataaaaatatttatattttaaaagttaatatataaaaaatgtataaatataaatgagataaataattaaattgaattaattaattatatttacaaatatacctatttcccaagagtttatgaagcctaagtattaagtcctcttcttggtcagaaatattgcctcttttaatattaggtctaagataattcatccatctcaatctacaactttttccacttctattcaaacctacaaaattatataaatatatataaatgtactcaaatccataatcaaaaattatttttgcatgtgaaatataattaattgacttatataagttcaataaaaaatcctaccaaacaataacaagaagaagtggagtttggaatgtttggaataggttatctatatcgaaacacaggttggtgctttagttagtagtgttggataaattacactcgaaaactcgtttgcacaaatttaatatttgtttgaatgatgatattgtgtggtttgtgggttggaaaaagaatctagctagagaacatatattctttggatgtcatttaagtattgctgactaatttaagtatttggttggagtggaacacaaaagttatttcgatttctttccttattcgctaaatttataagtctaagaggtttagattttgaaaacaagtttggtatatcatatttggagtaatagaaatgaagtttttgaaatttgaaaagttatacaacaaactttattgtgaagaaaatcaaagttgatgtaaggattagaattagagccataatgctcaaaaaagtactacaaaaagataaccttgtttttttaaagtgttgtttaaattgtattattgttatgtggtaatatatactcatttagaattaaaaaaaatcaataaaaaggtatttaattagtctccattaggttttgttttggacctttgaattttaaatttaaaatttaagtgtagtatataattttatgatatttgaaataattatatatatattgaaaaaaatgatcttgtatcaaatatatagacatattttctcttaactattttccttaagtaaaatcaaaagtgcacacaaagacaaagaaatacatatataatttagaaaatagaagagattaattagacaatagcaactccttcactacatatatatatgtatatgtatatattcattaaaaaaaaacctgcattgatagcaagagattgccacttggttgggccatgaagttgaataacttgagcaagtttttggtcttcttctgctgtccaaaatcctgatctgttgccttctttattcttcaaagtttggatacacattttcttcctaatgatacctttgtcttctttacatcttcaataaattcttatatataggatgcttacctcctaaaaggggtccacttaatggaccaacaacctctatgtgtttcagaatttatagttatttacgttgtatttatttaagatattctgtaaaattttagtgatttataaaaattaacatgccaaaaacaggattcaaacaatctgt

SEQ ID NO: 46937 - DNA, 2338 bp, Cannabis sativa
gacatccatgttgaggtttttgaacaataatttcaagaaaaagatagtcattttttatcaactcaacttgatgtttggatatagtactgaaaacgagaggttttaacttgaatgctcgatctcttggatcatcactcttaatggaacccttaatgagtttggtttccatcaccttcccaccacatgccttgtctaaattttttgacttggctattgtgagcttagccataattaactgagccacgtgtgggtcatattcatcaggcattcttttaattctcttcatacgaggcatggcaggttaaaagctcaactaacttcaactcagaacagatgaatcacagctcaaatcagctcctttgaaccttgttaagacaaaatcaagatgactacaccttggaggaaaggaaaatttcagcttaaacgactcacataaaaatcatatttttgattttcggacgccttatcaatggagtttaaggatttccaaccagccctagaatccttaaaccaagctttacgagatgggaataaaattttttaaaaaagagctctcctatttataatgatgcaagtcctttattcctaaagcaattagaagtcttttaaatttttagtttaaaaggtaaagatcaaagataagtaaaatatgatgctcaccttctctcttctccttttctacttaagattttgaattcctcgttagaagaggaatagtaatttaaaatttagatggcactactactcctaatgcaattaggattcatgcaaattacaagttcaaaaggataagataaatgacaagtaaaagatgagcatcatttctcttctccttttatacatagaatttcaaatcccttattctaaaaagaataggaatacaaaacttggagactgacttaatcctaatgcaattaggatttgtgaaaattttgatttttaaagggaaagataaaggataagtgaaaaatgatattgtgttttaatcttttcctttattttactgaagaattttgaattgcttatgaaaaaggaatggaattcaaaatcctaatcatattaggagtacttgaataacagaaaaattgctcaagatttcctaaatagatgcccctggtagtttcaagagtaactggcataattcatgtcatcaagttaacctcacacaagtgtaaagttgacttgggtggcaaatgtttacccaaaaactgaccttggtgacttggacattaatgtttgacacgtggcaagaaagaaaagatcacagagttgagtagtcctgagtcatagcagtcgacctaggaggggtccctagccctatgcccaggttgactttaggaactccataatgggtgtctggattctgccaagttatttccaactcactatctttcgatattctattccatgatgaaataaataatccaagcccaaggcctaaaagctgaaaatacaagaaatagcaccccgaaagtcaacccaggtacgtagagtttcacctagcacccaaattgacattccaactagggttttaatttttaggaccgtcttagtgaaaatgggtcaaaatttgtactgaaacatgaattagacatgttacaaaatttatgtaatgcatcagaattagattcaggataacttcaaaattgagcacctggatcaccaagtgtcccagtcaacctaggctgcttccaatcatcaaactgaagaactatcctgagcattgtcttcctcttcatccaaaacaaggaaacaagtacttttggggagaaacaaatcaaattggagggaaaacaaggcacttagcgcccaagttcacattttttcaacttgggacatttacaaggagttttttctgagaagttttctaggcatattctctatatttgtcaaagattaagatacaagtgtggctagaaaatggacccaacacctaggttaatattttgtcaacctgagatgtttccaatcattttcccaaaaaaattgttctgggcattttttccgtcatcagaaataatgaagatacaagtaaacttgggaagaaaacaagaatcccgaagggctaaaagttgagcccagcgtccaagtggacaatcaatttagtgcaatggtttccatcactcaaatataaattctactccaagcattctcttcaacatggtcaaaaatagggtaggagaccttgtcctcaatttcaaatacctttgaagcatcaaaacaacatctcaaaagcttcaaaaagagcacccaatgcgcaggttgatgtatggcctagtgcgctgggttcttcttatctaattctgattcaatgtcgagcgttcatctagtttttcat

SEQ ID NO: 46938 - DNA, 2662 bp, Cannabis sativa
aaagaactacccacttctctttctgaactacacattttcaattgtccattgctaagaccacgagtccagagggagacaggggaggactggccaattgttgctcacattccaaatatcattctcgatcacaagaaaagatttattcaatattgaaactcatcaaagagtcttcaatttgtgtccgttttaggtatgacagtttgactcctcttcttctttattattttctagtctatattttgtaattttctgctctaattatttacttatattttgctagaatttttaatggttgtgagatgattaatatgaagctactacaataaatatgtaaggtttttctttccttgttgttcaaatatgattttcataatatcttatcagtttagctacttttctttcctttaaatttctgattctcactcattggcagtgctgtgatcataataacagaagtccttaactaaggcagggtgatcttctaagagctggaaagagaagattagtttcaccatttgatctaaaggtttgatctctactctacttgtttgttaaggccttccaaattaatagcttccattccaagtgaatgaatattatataactctgttgttgcaggcttctaaatctgtcaaagccacataggcatagctagtttgcatttcaaatcggcttctgcaagtcttaacctttagaagtcttctcagatgcagattgggctacaaaacttggatgaaaaaaaagatcaactattgacatttgtgtatgtttcttggtggaaatctgtaattgtaatgtaatgaagaccaagaaagtttgagtgtggtgtgtgattgtgaataatacactaactagagtgattagagtactgttgtgagatttggggtttgattattttctgccacttttccatattgacctcacattaacttcatgcctttaacttccataaattattgaagataatggattagtcttttaatctgttttagctagctgcataattaattaagaaatgctactaatgtgttcatcttttattgcggaattcaaatgaagttgtttattgaaaaaatgaagaaaaaggactataatgatatatgcataatggactataatgatatcaccaagcttcctgattcaataggcaatttgaagtatttaaaatatctgaagttagattgttataatcatgaaaagatacctaatacaatatgtaagttgtataatttggagacattattgctgcagcatacgtgtgttactagactaccaactgacacaggaaatttaaccaagttgcgacatttaattcttccttggaaattagaagagatgccatcacaattggggaagctacaaaatctgcaaacacttaatgcatttgttgtgggaagaaatagagattgttgtggtattgaattattgaaagagtttcaagatctacacgggagactttatattaaagtattaaataatgttggtaggcttgaggaagtttcagatgctgcaacaccatcattaaagagtaagaagtctcttagtcacctatatttgtactgggatgatggtcatgaacctgaagttgatgagttgcacaaagaaagagagcttatatgttgttggatgggaggccattgctgcttgtctaatttagtaaggctgatgttgctaatatgtatatgtatattttgtgtaaggtaggtcccatgatctggtgtgacaccattattttgtgtttctattatctcatattagtaggcccttggccaaacctctctctatcaatcttttttcttagttgtcattttctgtttgttactaacaataacaattaattgttgcttaagtgtgatgttggtgctcaagattatctttaaccatatatctgtctgccactctcagaaaaagaaaggttttcaaagattctctcaagataactctactttactaaaagcaagattctcaataatggattatgcctttgatggatgatgatatattacaatcaatgaattattatatatcaacagttattgtgatatataattaaagatcactacaacacaacactgctactctcacacagtactactgtttgttctgttagtattctctcttttgcaattactatttgttggaagatctcatctcatcttatggctgctgaattggttggaggagcgcttctgtcagctttccttgatccgttggtgcaaaagttagcttctgaggtcaaggatttcttcagaggaaaagatgccattctcaagctggtgatggagttgaaaactttgttgtgctcggctgatctgctgctcattgatgctgaggagaagcttattaaagacgccagagtcaggaagtggcttgatgatctcaaggacgccatttatgatgcagacgacttggtttacaagatcgacactgaagcatggcaaaaccaattggaaggtggtcatcatgaagatcatagcggctgcagttgtactagtagtaaggtgctcatgaaactcatctcaactcgtttaacttctttcgataagaaaagaaaagttgagatagaagagatgattgggaaattgaagcttcttctagacaataaagatcttggtttaaaacatttggaaaaacataagcttccagagagggtatgtgctcc

SEQ ID NO: 46939 - DNA, 2249 bp, Cannabis sativa
taagatttacatgtcaccacaactatacaagtctgagagatcgactatccgcaacatatcaaagaattgcacaaaattcagtatgcagtacatacttgcagagaggtacaaacattacataacccaaaaacaaaaaaaaacaaaaaaaaaaaaaaactcaatgaattgcctgaaagaatactattttcaacacaaccttacacttacactgaaacatactgttcctgtccaatcttaatagtgatacagtcactcttaacccccaccccagccatacacacatacatacacaagaaaaacatgagatatgtgaacagtgtgtaaagattacattttccgctcctttttattaagcatcaataaaattcttaagttcaaagtgttgaaaggttcatatacggaaaagtgataggccatagcacaaaaatcatacctcaaaaggtgcaagaccaggcagtccatctaaattcagcactgaaaatcccattatcaatctgaacagaggctcagcagcagaataagcagccaacaatgccagcagataattataaagattggatttcaaacggaaccgctgaacagtaacatctttcttaatcctccatattcgatagaagcacaaacccagaagaaccagatgagaaacagccaccacaagggagtcaacaccacatggtgtgtaagcaccaaaggcattctccactgctttagtccaaaacccattttccacagggcgacaataccacaccaacggcccaaaagccatttctgtttaccaaacctctctaaagggaacaagaaaaaaccttcagttgaagctcaaatcaccatagccatactgacccttcttaatattattactctaagaaggaaagattgacttctcttacagctcccggattattctaggactcccacctacccctgcaacagaaccaaattcaaaagaaataaacaaatgaaggaaaaaatctatttgctctccatgggcaaccccaaaggacaaaacttccaggaagtcaactgtgagcagcacataaatatatatatgtataaacagtggttgaaaggttaatccaattttttacttgggaagaagagagatagaatgaatcaaccatgtataatatattaattaaagcttactttgaaaagatcaaaattaaataaaaaaaaaataagaaaacagatttacatcagattcttatctcaaaaacagagaatcttaacataatggtcaccacaacacaattccactcacaatcctactttacataaaatatacaaaccaataatgaacttgtgttacccaataaaaaaaaaaaagaaaacagtccattcaacgcattaaatcatccttagttgaaagtaccaacttaaccaaaacaaattcaaacacaacttaatataaaaaatacccaaaaacacagcatctctttactccaataaaattgcagtgagcttaaaacctcctatacttccagcaatccaaatcaaatacgggaataatgaaagaaaaaacaaaaagtaagaaaaagtgtccacgacgacgatgttgaataatgcaaaaaaaaaacgaagaaaaaggaaatccgggaaaaagtttctcgggaaaatatcgaaaagtttctttccgggtccctttccctctcggtagttggaaaaagttaaaaacaagattgagtggaatagaatcaatgcttactgagtgccttattacgttcaaaatccagtggagcaaagagagagagcgaaggtcgtcgtctcatttggcgaaatgcagagctctcatactgcgtcaccgcttacgatgcgtcgataaccatttttggtttgttttttttttatatttaaaaaaaaaaaaaaaaaatgggatggggaccatggaaatgaaattggaggttgattcttttttcctgggattatctcgatattaataatattattattctttttttaattttatttttatttttcataattactttatatcaatttttttatttttaattttttataattattaattacaactactgtctttgtttgatgtgatttatcaagaaaaaaaatatttatatatattttgtgtgtacctaggatgttatatcaatttcttaattctttttctatgacaaaaattattaatttcttctacgttcatttttagaaatgtaaatggattttagtggggtgtgtttagaaaaaactctaggtatctagtgagagcatctcgaatgggattgctc

SEQ ID NO: 46940 - DNA, 2141 bp, Cannabis sativa
attaggagtaaaagtggatggatggatagtaaaataaaaaaataaaattaccattctactatttttgatacaattatattattatatattatttattgaagggtagcagaggcatttcatatatatattttttgtctttttcttggattcctccaattttggagggattaaaatttgtttacctggagggggactttctccctttatctctcctctctacctcttgccaaacaaaggaatacatctctccctctatccctctccctccctccttccttctcccttctaccaaacatagtgtaaaagaggaagacccatgacacattcacattttagcaagtgtactggattggagaccctggtccacaacataggatgctaactaactaaataattgttaatattaatatataaagaaaaattctatggcagggttaccatttttgttcctatcggtataaatgtttttatttttagtacttagagaaattataattcaaattttttatatgactgtttacattatagttacatttcacctatttttggaaaaatttaaaatgattaataataccgaaaacaatgttcagacattagttgtaggcatatatttttttaacacgtgtaattgactattttaaactttgttttcagtatcataaattatttaaaaaatttcgaaaacaggtgggatgcctgctcaaactataatgtagactgtcatataaaaacaattaagttataatttcttcaaatgctgaaaacatagttgtactactctattggtagggacaaaagtgatactcctactatagttgcatcttatataattaataatgtagttcctgtctgaattcccctcttgtctcttctatcatatctacatctacaatttttaactgttaattatttttttaagtatacataactctgttgttataattattataaatagtagatttaacatcaacaatctcttggcttgtgttagacgtatttataatacaggagttagaagcaaaggaaaggtggcaatgcttaaattcaattcaaaaattctgaatttccgttatagtgtcaatcgtcaactcaagcatatagaaatcaagtattacagtagctatatcattgatggtgtaagttctactcattctgcatttgattcgaataggcttttaaatgagctgtccaaatctggtcgagttgatgaagctcaccaactgttcaacaaaatgctcattcgagatgaatttacttggaatacaatgatagctgcttattccaattcaggaagattttctgatgcaagacaactttttgaggacaccccgatgaaaagtcccatcacttggtcatccttgttgtccgggtattgtcgcaatgaatgtgaaattgaagcttttgaactattttggcacatgcagctagagggccagatgcctagccagttcacgttgggcagtgtcctacggttgtgttcaacattgggtttacttcaaagaggtgaacagattcatggatatacaattaagacacgatttgacttgaatgcttttgttctcactggtctcgttgacatgtatgcaaagtgtaagtgcatatcagaagctgaatatcttttcaggatgtcccctagtagtaaaaatcatgtaatgtggactgctatggttactgggtactcccaaaatggcgaaagtttaaaagcaatcaagtgttttcaagaaatgcgaattgaaggggtagagtcgaaccattttacattccctggcattttgactgcatgtgctgcggttaatgcaggtttgtttggggctcaggtgcatggatgcataatcaggattggatatggggcaaatgtgtttgttcaaagtgcattggttgatatgtatgcaaaatgtggagatttaaatagtgcaaagagggcgttggagaacatggggactgatgatgtagtttcttggaactccatgattgttggatgcgtgagacaaggatacttaaaggatgctttgatcttgtttaaagaaatgcacgcaagagatatgaagactgatcattttacttacccatccattctaaactccttcgctgtcttgaaggaaatcgaacaagcaaaatctgtccacggtttgatcatcaag

SEQ ID NO: 46941 - DNA, 3684 bp, Cannabis sativa
  modified_base (1171)..(1174): a, c, t, g, unknown or other
tatcatatatctgttactatatatcgtttatcgcttataaaatggactcattgtcgttggctaaaagcgaagtcaacatatataaatatataattatacaaaaaaaggtcgggatctcgatcgcttttaaactagtttacatattcaaaataaacaatttacagctttgtcgcacaacgactacaaaataagcctaagtcatcctgataccgaactctccaggtcgcaccatcttgacattcatcctcgagcttcgaactcattgatgctcagccttagccttacctacacatacaagcaataactgtgagtcaacagactcagtaagaaaaacatataacatacaatataacactgacttgtatttagactcccatatacttatttacaaggcttaatagatcattaagaacattcttaacaatggtacgacctctgtatcacatgcactatgtgttggaacttgttttactaggatctagatttactaacatgtatgttgattatagagctataatctaacacactgaatatgaatttcctaaaacaataaaataaacgcatataaaattatagaaaaccttacattggtggcagcggaatataatgtctcctttcgtttagatcgctaacccttaatcctttctgtcacagagtatgatcaaaatctaaacttagatcttcttctgttattagaattcttcacaatcttccacaaaggcatgagtattaacttaaattgtgtaggtaattactcaactcacttaagaaatttcgaaaataagaagaagaagggaagaggatggattcgaaatacaatagaagctctctctttattttctaagttttctgacaaaatagtatgatgaaggatctagaaaataagagtcacctctttctatttatagaatttcaaagggttaggatttgaattatatggaactaaaaaagataaaataatggcttaattgaaccttaagtggtcgaaccctatgtgggccctacaagttttaattatgccatgcattttatttaataatttatcttttctttcacaaatgtcacactttaattctaactctataaatgtcaaatgtagctatttaataattataaataattatcaaataaaatttccattaaacttatattaattagaccttacaaagtnnnntaattaataaataaaccctaaattctctctttcttctgaaataagcccttacttagtaaaaaattttgaacgagacatagtcttatttagaattataattgattaattaaaactaattaattgagtcaacaagacaatactatctcagacaatgtggggaccatggtcctatgtaaccaagctcccaataaacagatctaaaatttactaagtaaatttcctatcttattaattcctcctgactccattatagattcagaattgcactcttgattacatagaatgctctatatgttccaaatatagatacactattaactatccattatttcaatccaaataatcaaagatcttctatagatgatttacatcgagtagggtccaatctgtacaattttagaaaataccgagtcctatctatacaattttagaaaatatagggtcaatattatcatttaacaaaacagatagtccaattggtaacttttgtaaaacacagggtctaaaatggtatttacccattattattttgataattcaaaatagatttttctcaactttcatatacaatatttatcccaccccttgaaattgtttcatagtggcgggggaccatgatcgatcctataattctaagctctaataaactagatttatttattgaatctcatcgatcaaataatgttgtttattagttctatgattactccactataaatatggaattgaactcttagtaattatataattatatttattgaggtttacgtgtctattgatataatcaattccattaattagccctccttgtgtcagttcataattagtttttgttaaaagtgttgtttttacctttctaattatttccttatcctttagtaccattgattcactagtaaaaatataatttagatcaaatctaaatttgtgcacaattttttagtccagaattaacaacacttacttaaaaggaaggaactaacattcgattcgttaagaacgtcagtattccataattgtagatcatgttcccagccccacattattagattctaagaacataagttgtaagaatcatcttctttgagcaattttaacgagtaaatgaaaaaaatctaataacatgaacaggagttcatgattactcataatttaggtcgatctactattgatcatcattattatatgaattaggtctttatagtaaacgttaagtttaatgaagataaatttatttatattggtccatgtcatatataatctctattagatgtcatactacataagtaatccgaattgagattacttgcaccgaataacgggtatcaatgaaccacactaataatcattgattaaaggttcttaaattttaatatgttgctgactattttattcatggctaagtgatcttaattctccgtacaactacaagttatagtctcatgtatgaataaggagtttttcgatatatataaattattcaatattacaatgtttaacatttatgtatatattaaactgtccaactcttattaataatctgaatatctttaccgacttttcgaggcataaatcctaacagctcatgcatgaatgcaaatgcatctataagaacctgcttggtttacataattgttattatgggatgatcttctaagaaacttgcaatgtcagaaaaatgacgttcaacataagaagacattttatttaaagaatgtgaaaacatgcaattataaaggtataatatcaatctacaaatgtgggctaagtctacttttagttctccaacacaaaataagtaatactaaagaaataggagtatgcgttaatgagataaattttccctctcctgcgagaaggattgcgctaaaagagatctcacaatattagaaaagggaccttacatatctagtaaaactatggtattaacataaaaggtgcaaatacatacccaaccaacgaaaataaacgcccaatcatttaagcacaataaattcagaagttatattcatttataacctctgtaattagcactcctattatcatttgtatctgtttcattatagctagattttgtaagcatcacctactacctacaagtatgggcatctacgtttattcaaatgggagctaatcataataaaacaatacaaagagatctcttcaaaagtgaactaggaaggttaagctactacaatttctttgtctatttacatactcagcatacattttatattatattatttgagtacaactacaataacttgacttttaatcacaataaaaattgtgactaaaagtcaaaaatatcatgactaataattttagatacacttttttttttttcatgtaaggttgtgactaaaaaagtttaagttttagtcacaataaaaataatgttgatgctaagaatcacttttagtcaactaaattttcatgactaatagatgtccacaattagtcataaccaccatttagccacaacttattgatctttagtgacaataaaa

SEQ ID NO: 46942 - DNA, 2000 bp, Cannabis sativa
tcacctctacaagttgtcatgaaggtccagtaagaatgaaagcatgtagcaagctctgagctgcctgggtttcatcgggtgtaccagagataactatgatcctatcacttgttccaggacgtggttcgtgcacaatgaccctggcacctgaaatctgatttgagagaggaagcgggagtaaggtatggacaaatgtgtagatataaatgaggattcctgataaatttaaatgcttctagcagcacagtttcgaatacaagaaggtagtaataaaaaaaaacaaattaaggaagcatcactataacatagatttcgtttagtagtgcatcaaaaatcaaattttgatgtcacacagtgggatcctaagcaattttttaatcaatatctcaaagttaaatgtgtgcttgtcataagttcaaagaattttcaataattctttactgtatttaactataatgagtgccaaatgaatccttagtctaaataaccaaaaacttaataactttcttggagataattaagtataaagtattccaaatcttgacgtccactttttatgattcattttgataatcataattatatctatataccagtacatccataaacatactgagtacaaccttttttaataaacttgattatacaattcgtgcatatatacacataaacgagagtatctaattaaaagtgatatatattcactgatataagtcatttagctataaacttgaaaggagactattaatccaagtcccaacattgggcgggccatttaactaagacctcccagtttctttgggacttcctacttttttgtttaatagaactactatatctagaatggtggatccaatggttaggccgcttaatcccatgatttgctcccatgaaatctgggcttcaattttggaatattttaagagtttctgcctacaataaattgtaggatgtagcaaaaagataagtaattaaaaaattccattataaataatggaatttctatggagatttctaaagctgcagatagttatcacagagcgaaaagaaaaccatagttttaatggtgttatttcaaatacaacaagctagaaatctagtttgctaatgtgaagatacactagtgcaccgacgctcaaggatcttcaattccagcaatttcctaataatagtgaaacaacaagcttgcagtaaagcatgcttgcagtctctcacttatcattttagctatcactaatgggtagcgtgtataagcacaaaacagtgccaataaaggagtatataacaagtttgtaagataagtacctgtcttagtcgagtcaagttgttcccattctccccatacacagagccaatagcattttcaggaactatgatctctacggttgtatttgttacaatagctgatttgcttccactgctgatatggcataccaggaaaaaaacaaagaaaggcaatcaataatagaagaaaaagatgccctgtatatttttgtggcaattatggcctatgctacttcatgaaacagatagatgttatgttgaaatgactactagttgtaagatatatggactctacagaaaagaaaaaaaaaaaactacttgattccatcagaatctgcaaggggtatatatttcaatgaataatatagatgcaagtatacagaataaaagcaccccaagaattgtatcaaagtaattataaatgattttgatacaccatttttagctatacgggcattttgctctacccaaatattatcagttgagattttcttaaagacaaatttacaataaatgaaataaactcaatccttcacataccattacattacttaaatactactagattgccagcaccaatatataatataattcatttgtcaaaaaagagtgctccacacacttcatattcagataaaaattaaacaaatagtagctaatatctgaaatcagtgttatccaaaccaaagctttaaatttataagatggtttccttg

SEQ ID NO: 46943 - DNA, 791 bp, Cannabis sativa
cttagaagaaccaaatcaagaagctaagagaagaagaggatcattcttcaaggtgcttcgaaggaagtccaactttagggaaaagactcatccaatggaagttttaacacaaactttagtctataaaagtctgtaattgtcaacagtttgtatcatattgccattggcatagtgaaagggaattcttaagggagttcaaagggaattaggctcttcacaattgtgaggaagttcgaacctttataactttgtgtgtgtgtattttaaattctgtcattttcattcttgcattcaattctgttgatttttagtttgtcatttgttatttatgctagttgaggttgttggctaagcccaacaaatggtatcaaagcaaggtttcaatcgagagatcagccaggaacaatcaataaatcatgaagacttggcagagtagagaaggtgtttgatcacagttctgaatcacaacttcaagaacttcaagattcagattgtaagtgatcaagaaagatatcaacaacaaagatggacaaagatggacattgagaactacaatggcaaaaatgacttagggaaaagatgaaacctcatcttagaaacatttgactggatgaaactttgaaaggagaagttggtatgtcagatacattggagaaagctaagaaggatgacatactaaaaaaaggcaagaaacaccattgtgttgagccttgaagatgaaatctcgaggaaggttttttgagaagagacaactgttcacatgtggaagaaactactatggcacaagaaat

SEQ ID NO: 46944 - DNA, 1520 bp, Cannabis sativa
aagttgaattagtgcaatcctctccactaatgtattctagctttatacccaagatctaaaggactctattagtcttgtgatgcgaggcttatgttagggtagcataaaagttaatatttatatggcttgtaacctaacctcatcaatttattgaggacctttcttcctctcttaagctctcacccaaaatgcacttttaacccaaaatgaatgatttgattcaaatttaattctctttctattgttactttccagcaaacacataaatacagagagagagagagaacacaaattacaccccaaaattagtttcaaggaactctctatcattgataatgtatttgttttttctgtactatatataatttcttttcctactattttttttttctcttttttaaacctgacagatatagtagatgcatgtatatatatttataacaagagaattacgtatatagtcttgtgagctcattcccacacactccaaacttaaatcccatcattgtccccaatgtggctatgcaaataaaattaggaagagctcaccacaatattcccaagaggaacccactcatctaaccagccgcatctaatttgtccctgataaattttagagggtaggttcgtttattgaaggataaaagaaatcgtgggtacgggttataatcattgatggttgctaagaacaaatagaaaaattgggtaaaatatgggtgactaagggaaattactattcaacgggatagcttgaaaggattaatcgtccaaaaatggcctagatcatttctaaggtttaatgctagctagatttcacctctctaaatccaacaaagtatggattagatcaagtgtggtgttctcatctcttggatctaatcaaggctttagaaatcccctcaaagttcagaaattaagtgtggcatccatacactggcaaaaatgatcctctccctcacatatatatctttgaagtacaaactgacctgcaagacatacaagacaattctcattgtcgcgtctctctagccacactattagaaacaacacaaccgttgtatcttaagctttccctggtatctagacactcaagaaagcattctatctccttgctcgaggccaccatgaagacaaagacactcagtgaagattacaaggtcatggcaatgacagttggactaacagtaatgagtctattttggaaagacttgaagctcaaaccagtatacaccatttaagagcttctagacagagctgacagtttcatcaagctcgaagaaaccgtcaagaaggtcaggggagttgctcaaccagaagcaatagattacattgctaatttattttttaagtctcgaatagacattgactatgaaggtgaaaaagaataaacaactaatgcctctactaaaatagactcctcttttgtttctcaagatgaacttgagcaaggagatagtgacgatgaatcccctgctttttctcaagaagatctcgagcatgaaagcagtgatgaagaatct

SEQ ID NO: 46945 - DNA, 1455 bp, Cannabis sativa
gaagcgaagcaggtgataaaaacccgtacactttcatggagtttctcttctctcatgattcacgcagagtctttaagaccaggaaaagctgacgtaggactgggaagaagatctgtcgcatatccctatctaacacgtggcaaaacaatctctatcaaacgatcttactatgagtttttactatgtcacacttgactgatctaaactacgtcgtttcttctcatcttaaaaaatatgctctcaatctcacgccttctgcttcttctttaattgttttgcttttattggaatttttacaaatttttttattattatttgaaaagttttttggtggaatattgtgtgcgtggcataatgtaactttgtttagcatttcttttggtcttttggtatttttcatcttttctttttctttaactttttgtgtaatcacatgatgcacttgctttaattttagtatctcgtatttttgtgtttaatttgaagtgacaaaataaattaatgcatcccatgatgtttcacaccacatgggttaaattttttcaacaagtgattttttttaaaaaataacttattatagagttatccacatcacacaaaaatattcaattatatatattgcccatatagcctccaatcgaatgtgatgatcaaaatcaacctccatttgttttgtgccttgtattataagttttagttcaactgtcaatttaaacttgtttaaaaactcactatattgatttcattgacttacttggttatccaataattgcatgaacaatcaagcaacagaaatcatatattatctatactaggtgttcgagaaggtattttccgtcaaatttaattgtttaatcatattttttatttttattaactatatttaaataaaaacagataaaatatataattaaattagcagataaaatgtataaaaaataaattctaagttaataaagatttgtacatattattaataaaaaaaatattataatagcatacgattattagtgcatttcaatatcaatttctataaattttaatttaataaataatttaaaactgcaattaatggcgtgttacatagcaataatagtacaaaacaaaaatagtacaaaaattattcataaaaagtaaatttaaaaaaaacaaaaaaaaaatactaatcaattattgggtaccacactcatatagtattaatggtgtgtttactaaactataatttgaatcagaataatcaatgggagaaataaatcggtttaaaatagaaaataatcggaaataatattttattatgctgtttactaaattgtacagaaggaaaatcataatcatataattttatttacataactacgaaacgtaattagaatactttaatttgataaaattaccattattagaacatgtaattattttctatttataaatttttaaagggcatatttgtctttt

SEQ ID NO: 46946 - DNA, 1234 bp, Cannabis sativa
aaaaaaaaaaaaaaaaagaagcaacaatggtcatacaaaatgagtgatgataaaacttaaacaaccccaaattgttataccagctcaatcaatattaaagcctacatctatttttctttcaaaaaaaaaggcactaattatttaattaatacaccataatcccaatgcattaaaattctacacaaacacctagccttcaataagctaccctatgctgtcttgctcaaaccaacaattttctcactctatgatctctacagaagttacataaaaatcaccctcaacaagataacaagactttaagagagttcaagaattcataatatgcagcagaaagaaagatttggtaaacctgaaattaaacaagattaaagatttaaactctcatctcaacagattgaatggtaaaagaatttctttattggtcttcacaatcatcaatacacaaaatgagatataaatcttttacaacccacaatggtgacttgcatcagtacaacaacctcacactgagggaagttacttcacagagcaacactctctttcacagccctccacacacacacttactgatgtttgacactagagaagatagaaaaaaaccctagagagtacagctcactccacaacactcgtaaattaatgtatatatagttgttaggtacacttaaaaatttaaatatatattttaaaaaattaaaaaatatataaactcttcaataataaccatatgagtttaatacatcaatataaatgataaaaaaatattcacccaagcgaatttacaatttatactaaaagcatgcacaactaatttataagcactccaacatataatttataataattaagcgaaaaattcccttcaaagttgcccaatattggccttgaaattttgtgacggcgcctacaacttgaagcttgaaatctaatgacaataaatcagaccttcttgctttttcgagacgggagagttcgtcaagaatctaaatcagacctttgttgttctgattccgaagaaaatgggtgctaactgctttgatgatttccgccctatcagcctttgcaattttacttacaagatcatctccaagttgttggcaaatcggttgcgccctctcctcaaggatttaatttccccctttcaatcggcttttgtgcctggaagatggattgctgagaatagtataatggctcatgaagttttagattccttcaagaaactcaagggccg

SEQ ID NO: 46947 - DNA, 2542 bp, Cannabis sativa
caataaaattatccattcacattcaaaaaaaaaaaaaaaaatgtatgtatagtataaggacaaaaacatagtcactaccataaaattattttatatatatatatatatattaaattatgcatgatgtatttgacacctagtctcttaaattgtttaaaaaaaaaattagtgtcttaaataaatatatattgggttaaactcaaataaacaactcggtgcctaataaaaaaaacaccaaattgaaaagttatgcctcatcgtttttcttttccttcaaattctatgtgagggcatcgctaggccatcgcacgacatcgttttgcatagtttttggcaaattatattttgatggaatcatcgagcatcattcattatcccaaaatgaaatttgcacgttggtcaatacgatatggtcaaaacccgaaatcaatgcaattggttgtcgatgaatttttgtgtcggtttgtaattgacgatactttacgtcaattttaaataggcacaagctcatttgcgtcaattttacaaaaaaaaaaaggcctaatttaaaaggccactaaagaaaacattactatatatagatattagtgcattatttcttcacttttcagccgcacaagttgagcctctcgctttctctctctctagatcacctactcttgccaccatcatgccgtcgtctcgtcaccgaaaagctctctctttctcccttgtctcgataccaatcaacgccaccccaacaatatgtctctttccctctttctcttgctctctcgtttggatatttttagctcgtttggtgaaaatgtactttttttccttggtacagggcaccgtcgattttgggttgggaatgaagaggaagagggcaccatcgatcctaggttttgaccgcgcgatttggtgtatagatttggaatctctaatgtatttacatatatattttggcgtgtatagctatgaaatgtgctaatgatgagatctggaatctaaattttcgtggtggtgagatttggttccaaatttgtaattttctttttccatttttgtttgtgttggtgtaaaaccgacgcaaacataataaaaaatatttttttttgcaattgttgaaaccgagggaaccacttatatatattggttcccaaccgatgtaaatgccctcttgtttgcttgcgttggtagtatatacgtcagtttttaggaccgacacaatagacaagcatatcaatttaaaaccgacgcaacacaaaggctttttgtattagtgatttttagcatccatagtcattagtcgtgttgtgatgagaccttggtagcaccatcacaagactgttgttggacaatgttttgctcgaaattctttgattttcatctctattatgcatgtgtttgaaacctataaattaatgtcttaaatatgaattgtatagttttaagtattgaattattaatagtatagggaagtggccagtggcggaactaggtaaatttattaggaggggtgattttttttgtcaagtgtacatatatatgtttaatttttatatatgtacatatttttataaggtttttttttagagggggctaagggcactctttggccctttttagttccgccttttggagaagtattgctttgccatcggagtttgaaaggaagagagaaatttgacacctttattttaatgatatatttcaaaattatacatatttcatatcataaatttaactttgagattaataatttttattatattaaagagtttaatagtgttttaaatacttttacttctatttctttaagtagaatatttctattatgatatttatgaatatagtgatggtattatattttatttgttttattatattatgttatgttaccgtataaattttattttattctataggtatagagaatctttataccacatcttgaattatttgtagcagataaagttttttcttttaaattttaaatatttattattgttgatattacttcaaatgtatattactattttaatatgctaatttacttttatttattttataggaaagctcgcaattacccaagtttgctatgacgatagtgttggattggtctttgacgcatggttttccttcacacctttttttttttaaggttgacagtttatgtcaaaaaagattgacggttggatttagttctttgtattttctatgagatcctttatttgtattgaattaattaagatctttaatagagatttttactagattatttactaattttactaaggcgtccctaattcatgttcatattcatgaattaacagtgcatgtactctgggtggataataaactatttaggatgaattttctattatttttttttcatgatttactactctcttatagtttttcaatgtttgttcattattaaaaaataatagggcattttacataaatgtatacattttcttaattaattacaaaaaatatgcaaaaaaaattaattgttacaatgtacacatttaaaaacatttttacataaaatcat

SEQ ID NO: 46948 - DNA, 1326 bp, Cannabis sativa
aagaggcaagggcaatttttttttcttttcgcaaagcaaccgtaaccaaaaaaaaaagcataaattaaatgtaaaatgaaaaacattagggagtttgagtgaaaatttacaaacccaagaacaaaaaaagaaactgctaatcttgtgaatctacctttggataatccaccttaactgggctataatagttcaatttcccaactgcaagaggttttatttttacaactatagcataaatctcaccatctttctacattttctcagctaacaaacgcaaaaaactaacatttttattcaaattagagtccaaaaagtaactggagaaccttaaaaatcaaaacggtgcagcacccagattctaaaaatggctaatttaaaacaaaatcagaaaagtaaataaaacaaaaacccagcagaggggtccaaagaaagtaagaaaggaagaaacttgcttacaaagaggtagatcttaaggaaccccttttgttcacttccacagatttggcccctctctctctatcttcaaaacaaaacaaaagaagatattattgaagacttgagaagacaactaaggaagtagtagtcaagactctctctttcttttctttctctaagccactttgtaaagagtaaggaagaaaatgaaaatcagatctcagcaaaaaaataaaggatttccattgatggaggaatatgaatatgaagaaggccagctggttttgttaaagtgtccccactccctttggtggggtccgtttcttcatttaattcccaacagtaactcttcctcttaatttggatcaaaagcccctcacacacatactataatactcccactctctctcccatcccatctcacttttcacttacagctaaaaagtggctaaagacacccgtcctctttttttcttttgtcaatccatatcaaactagataactatatcactaattaattaactgtcttaattaatgttccactatttaaactttgaagccttgtacaaaattattttcaaaaaaagttatatgtcccctttttcattagtaacttgttagttttaagagttactgattagggctgcacattttgatccgtcaacccgaaaaacccgaagacctgccccaaaccgatgccaaaaaacccggctaactaaaaacccgtatagaacccgactaactaaaaacccatatagtcgggtcgggttgaacccgaaaaatgactgtaacgggtttcgggttcgggtcacatattaattattttcggtggtcgggttagaacccgtaacccaaaactattaaaagttaaaaactgtattttttttatta

SEQ ID NO: 46949 - DNA, 1154 bp, Cannabis sativa
gtgttttaacaagcaaaaaagtctggttatccactttccaaaggcaaatggcagatcactgggatgggcgttttaaagtgaatattaaggatcatcactcggacctatttctgctatgctttggatgtgagggggatcgtactcgggtgttggaaaaggaaccgtggcactttcaaaaccatcacattgtcctcattgatccttctttgtatctgaatcttactccagacatcatgattcatagtccattttgggtacaagcttatagattgccttttctaagtaagtcccgatctttggctaaggctttggcttctattttgggtgagtttcttgcggttcatgatgattctcttaatgagggttggggccctttcctgcgttttagagttaatcttaatctcaacaaaccactactgcgtggtagaatgatttctctcccaagaattaaggatgaattctgggtagagtttcgttatgagcggttaccggactattgtatggaatgtggattgattggtcatctctatcaaaaatgcccactttttcttgagaagttagatctaaatattgaaccagaactgccatatggtccagaaattaaaggctctaaacttcctacatcatcatatgatcgatataggacggatttccccaaaggaaatgcctggccattgctcactcggttggccagaacttctatacattcggctgtccctaaacttcaatcactacctcttcctcaaccatctcctttgcttgttggtgagtcctcaaattctgcccaaataactgatcgtgttcttcatagccaaaccgctcacagcaacacttctaatcccattacacccttaactactctaacaaattcttccatttttgttccatccacactgaatcatgcctcttttagctctcctcttcatctttcttccagcatttatccccacacacactctgaatctgtgaatgcacctatggacaaagggaaaaaaattattgggatgagtacaaccccgtcttccactatcttgcttgatgttttcacaccagaaataggctccagtgttacaaactcaaacacttttgcttcatatcctccgctcattacaccaaataatgttccaaggttcccactgcatcaactgtcaaca

SEQ ID NO: 46950 - DNA, 2475 bp, Cannabis sativa
ttcagcataatccaatcttgtccagtccaatccaatccttttcagtccaatccagtccaatcctacgtaccaaacgggccctacaaaaatattactctttaatgattctcaaggcactgtgaaaatacagtcaacagtatagttttgagattattgttccgacataacatttattgacttctttatcaagtttgatgtgtttgataattttgacagaacagtcatatcttgacagccctgtaatgctagttgttgagtattttctggtttatcaatggaattcgccttactactactagagagattgtacatgcttctatggatattggcaaaaagcttaactaaattgtagtatgtttatttttatttacaacgtatttgtatgagtatacaaagtcagtcattattatgagtgtaaaaatttaatttaattcaagttcctttttaatacttgcatattaattgctattattattgttccttaattgctgtaggcttggtaaggagtccagttttaaaaaagaataataaaatacaacaattgttaattttactgtgattgtattttttgatcaatacatctcttaatgcaaattttctctaaccaaattaaatagtcttttcgaaataaatatagtacaaaaattaatatgtaattaataaacaccagatattttacgtgattttgaaattaaaatctgcatactctatgagtccttattattagggatatttttgagtatagatttcgatcctatttataggaatataagtaggcagttattctttttaggactggttcaactataactgttcataaaacatggacaatctccacgttttatttaatcacacataggattatatcttaaaactaccaaactacttttcattcttatcctcttgacggttattattaatttggaatgttgtatctcattagatgtgagttctccttcttgtccatcttattaggagaaaatcaccaagtgttggaaaatagttcacctcgttgcattccttcattggaatcagtaatgcgaggtgatcttcttgctatgtgtagtgctaggttgttgtgtattgttacatttattctgctcgagtggatgaatatcgtcttcttgtctatttacttgtgtatatcccgaggcagacatatgtctcgtcaatatcagtttaatagttattatccttgtctcgcttaagactacacagtcaacgagtttgaatattatctataaaacttttattttattgtaacgagttatttaatttgcatttaatgatataacattattatatcatcagagttgattcatattttttctataggacacgtgtcagcttctagtgcatagccaaatttcaggtattacaattgttccctaaaaagtactttttaaatgattacatgggtataatcgtattaacctgattttgaaaaattgcatgctttgggtttttggcgattcataacttcaaggcacatcattagcatttaatgctctggccgttctcattcgcaatgttcccatccgttagataagatttcttttgatcgaacagtaatcagtatttgggtataaaattggaagtgaaagttcatttcaccattttttcatatttcgaaccttcaaacctttctacagaaaatttctccgattgttatttttcaaccttgcatgccctttttgtcccttacacttttcttgtgtatcacatctgaccgatcttccatttatagaaatcgcaaggacccaacttctcaatcttcaaatttacacttgtaaagttctttatagcttagaaattcagcaagacagtaaatgattcactcccttcttttaaatgcttttcttttctgtattcgagtctcgtcttcttgattgatatctctttatctgtattttttggttcgggtagtattttttgggttgtttggatagttctagggctaaggaaaattataggttattcaatttatagacttctgggttaaatcgtgtttggtttttccagaaattgagataacacttattcacaagcatgacccagtatattcttaaaactacgattccggagttcttagaaacaaattgtcctcaaaatttagccaccccattcagacccataacaaacaatccttaaactattcttgagataaacaatgcaaaagttagggatcatcttattaaaactaatcaggacgagatttcaggttgatataagaaattttcgcaagaaataatagagggtaaatgccattttctgtgagaagcagcttggcccgaatcccaaaatttatctattattcctttagcgagacctttgttttttacctccagtcactgttgctttttcaccaggtgacttaaattttgaaattatgacttcaaaagctcaaaaatctaagacccttcaagatcccacaattactttcgaggcagaacttatagaatcaaatgttagatc

SEQ ID NO: 46951 - DNA, 2107 bp, Cannabis sativa
aaattataaaaatatgattatacagaattttaaatatttttacgatttttataattttatttacagaaaatacaattttttgatgtatttttatattgtactctaaattaatttattatttgtatgctattttttgttgttgtttagatgttatttttctattatttttatgtagttctcttgttgttttcgtattagttttatagattaccgcaaaaatgttaaagaaaatctttgagcataaaaagtataaaaattttacaaaaaatatttatatgtaattatctttgaatttttcttatattatttactaaatcaaaatatgtgagacctaatattaaatttacagtatagttgctctaaatgaaaaaggtcttcaagaatttcttatcattcttggaaagcagttgacttgtggaagccagtcctggaaggcttattcttttaggaagggtcttcaagaaagctagtcctcttccgaaaaagagtttcagatggctagttgtttctcccagacagtcaactccagctgccccgttcctatccgagaaggtccttcagcaagtaccttggtctgtgactctaggagccctcattctcactcctggatgcactcttatttatggtgacatagagttctcgtttaaataagagttggttaagttagttattacctaactaacttaacaacctaacttcttgcaactactgactttaggatcttgatcctagggcctataaatatcacctacacttatcatttcagaaatatcgataagattcagattgagaaatagagagagaaaagattgagatcggtagaaagaggtgcagagaaaaaagagagattgattttgagttttataagaagaatcttatgtaaataaagaaaattcttagttaatagtatgagagttgaaacactctgagagaactcattagagaatcagaatcgatctcgaatgtattgtattggtattgtactgtacatattcttgctcaatcaataaagagaattttgtggtgttctagaactggagtaaagtcatagatcatattgatctatcagtcttgaaccaatgtatatcttggtgttgattttttttgttttctgctttaattgttttctagtttttctttactctgttcatttccgttttcattcgattattgtttgtgaatttttcaatcttgttattgctaattgtttgatttttaaagtttagttaatttaattttggaactttaattgtaaatttcccacaaaattatattagtaagggtatatatactttgatactttaagatctcccatagcatttctcttgaaagaaatttttttctttaagataatgcacattctaattaaatagcggattataatttaaatacaaatatataaaatcctatattatatatttttacaatttattccctaaaaaattatttatatatatatattacaatttattatataagtgttcttgattattatttatctaacttaaataatccaattttaacttcatttaattttcattttcacaaaaaataaaaaataaaaaaatatatggcacatggacttctcatctcaggccctttcctcataaagtacgtatgtgctttgtatttgtagcacatggatttcatttctttcccttttttaagaaatttttttaaagaaaaaaaaaagtttacaaaaatatcatttatcattaccctactcaagtgaaacactttattatattgaatattctccacatatttgaaaaaaggtttttgatgataaaattatcatccttaaaatatataaaaaaaataaataaaaaataaccgataattcacatccacaaccttttttaagttaatttattcttggaattcttttgcacatacacactcacaaaattcatgtttatacatattatcggatgaatgaagtaatggcataattgccaaattttaggtaaatgtaggggtgttcataaaataacgaatccaatccaattcgcacgacccaatctaattcaatccgcacaagtgcggagaaaatttaaaatttgcacttgtgcgaattggatcctgattgatatgtaaaagtaatcga

SEQ ID NO: 46952 - DNA, 1635 bp, Cannabis sativa
atttcatatttcatgtcatgtctctctaatatttttattttatttattataataagaaccaactagaatataaccagtactattggatttggactcaaatttagtcaacaaatttattagtatgttcaaattatccttaactatatctaattaagtaatttaagtattcatcttgaaatatttgaaaaacaatgcatatgcataaatcattagcatttggtgaaataagcattgctaggaagaaaactcaaatttataggataatatttttgaattttcattgagaaaaagagatttgattatataaactataaagtgggtaagaaaaaaaagaaaaggaaagatatgaacatcaaaagtcaaagcttgcaattgaagtttcaagagaaattaattagcagaaatagtgggagatgcataggatgcttaagaaagccgcatgggcattatataaatcataacacaatgatattattatggtatgttatgttgtgttagctcatgtgtaattgtttttgctttcaattttatactttgatccacaaatatttatgtggttctaatggtcccttttgtggaaagaaaactatttatactttcatttaattaaagcaaaacaatcattttgtaatatttatataaatattgaacaagatttgtgattaagaataattatagttttaagttaggattaaacaaaagtcgatatgtccgagtggttaaggagacagacttgaaatctgttgggcttcgcccgcgcaggttcgaaccctgctgtcgacgattttgctttttaatttttctacaatttattattaattcacccaaagtatttatgtaatacaaatttagtttaaataaaacaaatgaagtgtgcaatttgaaatcttctttgaatgttagaagtgtaaatatgtataaaattggatttgagtaatatgattgcatcaccattggtccccaatttcagtagaattgtaagactattctaaatttcattttgggattctttgtttaccagtctaatttggacgatagcaataaaaataataaacaactaactttattttcaatactataaactttattggactaaaaaattctcaaaaataaatggtataccaaaatgtattatagatttttcctaaagtttcacatatattttgcttatctttttatgaacgttgttctactaaatgatctctgagactcactctctaataaattggcgcaattataagaaaaaataaatttaatttgatgaatatataaatttatgagataaatatatatattacacagcataatgcacattgctctatatatatttggattgaatttcttctgcacattaatgaaatcaactacacaaaatacaacttcccaatttcacaaatgctctaaatctaatgcaataatacaaaacaaaaaattcactatcattcaccttacaattcatcacttttgcaatttaattaaaaagctatttgattcacactagattaaataaagtcaattagctttacacaaaggcctggtgataaagttcaataggaatagatgatcataataagtttggagcttttctttaataaagaattaaagaccaccaaaccaaagagctgtgttctgact

SEQ ID NO: 46953 - DNA, 3907 bp, Cannabis sativa
  modified_base (3391)..(3417): a, c, t, g, unknown or other
aaaaataaaatgattaaattttaggtttttttaatatattatatatgtaataaaaataaaaaatataaaaagtgatcgggttcgggttcaactcgaaacccggtaattataaagaccaacctgcgaacccgtctaaaagtgtacaaagttggacccgacccgtctgaataaaatgggttttttcaattttacgagttgactgggtcggattcgggcaggttggccaggtccgagtcaaacccgttcaatatgttcagtcctacctatatatatatattaattgatgctttttctaagtaacttttgttgagttaaaaataattaatctttgttaaacttagcccttcctacttttattggttggttccactaatacttacaagtgataattgctcttacaactagtctattacaggaatttatgttgcaaaaatcttaattaagaattgaaaacaaaaagaatagggccttaacttgacacaggttatgcgtgcctacttatctctgatacctagggcgactactaagaaaagtgggaaacatgacttcaatacaattgataatttaaagtactacatcgtgcttaaaaagttaagggataatatgtgacatctcttatcagcttctgttgacatcgcatttaaccaacgatgttgagtctttaaagtgaggaaattgaatgatcaattaataataacataaagcaaataaaaacacaatttttagagattcgactcagtatagttgtagtaacctactccttttagttgtaatacttagagaattattaagattacaaggtctgaccaagtagtttcttaatattctcgaaaaaagttacaagtatttttgtagagtaattgctcttcaaagtgtaaaaaaagcaaccccttcctcagtgaatgacctcactatttatagagacaatgtaatacatttaggttctaaaaaataagagcagtaaattaagttccctattttggtgggagttggtgaagatcggctctaagctggcaatcccacaaatctctgtctgcctagttgatcccgaatgaataggattattggttgctattttcgtggaaataatttaagaaataatctgggaaagatatgcttcgcattatatttagttaccagacaattcattttgcccaatatgatcagttgcacgacatatcatgagatactcgctccgtctgaagaatagttgcaggatagcttcacttagatgaaaccgactttgagatggatctagtcagcctatttgagggatatgctctgaccaactcttaacatacctgccacgtgttaccttgtgaaatgtcaagtcatcttgtgcgaaatttgagataacatttgctatccaagtctacataggaattgttgttcgcatgggaactttcaaggtttgtgcattactcggattagtaacacatgttagggctcacgtgttgtttaggatgtgacgtttgccctactcgaggtgagtgtatcttctttagtgtcttcaaatctccgcatttaatgcttattcaaaaactgagaaatgaggaagcgtgttttgacggttgcacacccctactccactcctttaataattggaattttgggcattttttggaggaaaactcattttcaattacatatcgagattgccctttagtgggtctataaaatgaattttcaaattcattctaaactttcaccgattctccaattcataaggtcgctaaaagaatgagatttggttgaatgattcttctcctcacaagtaagcttcttcaaattgtgaaccttatacaagctaagttaagtgcattcaatctcacgacaagcttgaccttcctatttatgtaagttatacgttatttcttgtgatatgggagatgcaccttatcaatgatacaatcgtctcgtcgatcatcttaatacatttgatatttttcaagaagactccttttatgttttctttttacaaggagatcatttaatttttgatacacatgtcacatgaatagcccacgcatttaaatgagtataacaattctaatttgaaaattactatcattttaattaataaataaatatttattattattattatcaaattattgaactttttaatgcatcatgcttttgagctaatttattcatatttatgtgttgtgtttttagacttgtcgtaccttaacttatattttctgtattatgtcgtacttaaacctatatatttttttttctctacagtgttgtgttgtgctaatatatatttttttttatataagtaatgctcatttcaattttatgccttgttagaaaattcatatgtattgatgaccaacataacaagatagtacgtataacattattttcgagaaatagtactattataatattcttatatgataattatatgtcgtctttttacatactgttgtcacgtcacatgtatcatgagttcatgacccattagcttgttcccctctaaacaatctcattaaataattaaggaatttgtttcgtagtaatacaaaaagaaattatgttttacagatggcaccattggacacctacctaagattttcctctttggataataatagagatttaaattttattattatattatcttcaaagtggggttttagtattattatgatctaataatcaatgatttaattaaaggacttttttatttcaacactttaaaatagtttagttttttttttttttttttacatatttacaaaattctatatagaaatttctattgcaatttaaattgtaacaaaaaaatgtataaaaacccctattacaactagtgctacaatcactttaaaaattcaaaccgtaaattttaaaaaaataattagtaatttcgctttaattaattagattaattcaaactctcttcttcttataacttttattgaaaggtgggatatacatacatgatatagggggtaatacaaatttcttctcagagctttcatttaggcttgtcagatgtaacaaactgtttgcaattttattttatttttcttgacaaaaaactgttgcaattctaaatatgtattatcaaagtaaaagaaaagaaacctctcaaataaataaataaataaataaataaaagaaagaatgcaagtacttcttatttgtggccaatagggtatttttttttttgaaagaaaatagggtatttactcttttgatattttctattatacatggcaagacctagtgacagctaaggggttatttgggttgttattgaaaattatgtttttttatgtgaaaaatggtttttaaaaatgtactagttgtagtgtaatttaatgtttttgagttttaaaaaatgattattttaaaaatatacaaaaataataannnnnnnnnnnnnnnnnnnnnnnnnnngaacttttaaatatttttacgatttttacgattttatttacataaaatacagccttttggtgtatttatatgttgtattcttattattttattgttatttatatatttatttttatgttattttataaatttcctttaaaaaatttaatttgtgattcattattaatctcaaactaaaaaagtaagaagatatttgaagatttttttggatttaaaaatgaaaatagtgtttttttattattatttttttagccaaaaactcaaaataaaatttaaattttatttttcaaaacactcaatcaatcaagaatttttacgtggactcccattttttaagttttcaaaaacataaaactgttttcaaatcttaaactaatcagaccttaaggtggcgtttggttagagataatgaaatggaatgaaaaaaaaaggaaacaatctttattctattcttttgtttggttgcatatttgtaatatccagattaaaa

SEQ ID NO: 46954 - DNA, 1233 bp, Cannabis sativa
actacaattcttgaataactttctagtcatcgtgataaaaagtaaataaaattgtcacctgccaccgctccacggatccaaaagaccattggagaaaataatgttacttccaaatttttgtaaagtagctttgatatcctacaatatgacaagaaaaaagatcgatgaataaccatactatttgatgaggtacaaatatggaatcaacacattcaaaatctagatacattatctggacaaagagattcaggtgcaaacaagaaagcacactctgaagacagaagaccagtgttcccattaagttctggaatttaaactatctttaaatgttgggtttatattaccaaaaacatttggttctttaacttaaaaaagaaattaaaatgaaatagacaggagagagtaactgctttatttccgcatcaagtccttgtttttcattcatctaatttccaaatactccactagagctatttcattagaaaataataaaaagattgtctttccttttacttttggtacccaaaggaacaaaaagaaagttaaaagtgataacactatttcataaacttatgaaaactaaacaaggaagatgaaagcaaatatgaagacataaataaatagtcgtttccttacatgtccaccgaactctgttgttatccatctaggccttggttccacattgaaatccctcaagcactcctctttataagaagagaaatcaaaatcaaatgttggaaacatgcttgaatcctggctactagacatcggcataaccatctcagtacaagcctacaataagaaaacaacgggaaagctataactagtgaaataaatatgaattttcattttctctataaagacaaacacgatcaattctataatacattttttatacctgccagttccaaccgtccatgccatgaggatcatcatccaattcaaagcagtcaactttcccagtatagttgtagtatacacttatgccttcaaatattttttctagaatattatccccagccatggaatcaatctttctgcaaacctctctaattgggtgtccaggcaaaggcattaagaattccgaaggatatgggtagttcaccattgccaaataactataagcagaatctaaccagttgatcagatcatctgtattatttaatgtcctgtgaaacaactttgattaatccaaacccaataattaagtcccatttcagaaaagtaaaaaga

SEQ ID NO: 46955 - DNA, 767 bp, Cannabis sativa
tttataaaaataattttataaaaaatacagtatttttataaaaaattttgtgtgagtaaaattataaatttttattcaaaatctagtatttttttgtaaaagctcctatttctaatttgatgaactttaggctttaaaatttagttcactaacttcattcgcaaatgaccgaccaactctatctccaagtcgagacagacatgggtcaaatttattgggcttgggcctagggttgtgcttgggctagtctattgggctttccttgggacccacattatccacaatgacatcacagagagagagagaattgcataattttttattttcttttggtaaaaagagaattgcataattaaagagaattgctaagagaatgctggagattgggctgtcagtcaagtggctaaggtttatcgggttccatctcaaaattatttagctataagagtaataactcataaatcttatatattctattatcttcccacaccttagtaatgtaagaatctctaacatatcctcaaggtagctatgttttgcttaccatattagataacttgatcacaatcagttatttttatgactcagtattcccgaattacaagtgactcttttagctctattttgttagacttttggtggctctttttaactcactatcacaagtgttatttatttattttttttttttggctctactttttgaatcagttttggaaagtatgaacatatatagacaatagtatagagatttacaacaaaaaatt

SEQ ID NO: 46956 - DNA, 2212 bp, Cannabis sativa
  modified_base (2031)..(2033): a, c, t, g, unknown or other
  modified_base (2170)..(2179): a, c, t, g, unknown or other
tatagtaagagtatataccttaacaagaaagatctaaaatcaacggttaaaaaaaaagttccctaccggtagagagtttttaataggtcctaccataatattaccctatatatttatatatcctttacgtacttaaatcttattacagcattaaatcatgatttattctgctaccatctcttcaaagttactgttccatgtatattttattttcagtaaattcatgtgaaacgcttgcaataaatttatgacatacttagttgcatgacatatttaatataaaaaaaaatatagtttcacaatattatgtatctgtattttggtagatagatgatgtatgtatggaggagttatggtatctataaacattatttattgtatactgactattaactcaatttatttttttctctgtctatatatttatttaacgttttctttctttttcttttgagagatattaaacgttttacttgtccctatatattgagaaccataataaatagtaatagaatgtggtgagattttttttattatggtcaccatatactcgtccaacgtaaaactaaaactgattaatataaatatatatctatttattgatttaattaaacctagcataacacactataagatagaataaattacagctaaaatctttaacataacacaatacaagatatttacggagtttctaaaagtataacagaaagtatttttattggcaatattttaatttaagtattaaactacaattgaaagataaatttaggtatttatactgcaaattacttatatattatacatatataaatttaattacacacagtaaactgattaataatgattcgaaaaaaaggtattttactaaatatatataaatagattcaattttggaaaaagaaagtatctaactgaaacaattttaccatttattttatattataatatatatatatatataaatgactatttaataattatattaaaaatataactagttacatttttatataacctactataataagttagactttaaataattataattaattatatatttaaaataaattaattttttaattaaaatatttaataaaaaatttataactaatatttataaatatttgagtaatttgcggcataagtacttgagtttaattttcagttataaataaatacctaaatttaattttttgcggtaataattcttaatttatatttctggaacttctgtaggtacttggctgttaagtgttaagtaagatcacgtggtaatccctgattagtctaggttattgaattttttttttaaaaaaaaaaaatagtttaaatataccaataagaaattgacacatggataatgaattgacatttagcgatcaggtacctactaaagtatcagaaatataggttaggtattattatcgccaaagattaaacttaggtatttatttataaccaaatgttaaatttaacacatgtgttccacggacagagagttgttctctatctcggagtcttcaatgaacaaggagtggattctcgattctggatgcacttatcacatgtgtccaaatcaagagtcattttttaattataagtcagttgatggagatacagttctaatggataatgatcattcatgcagggtcattagaactgggaaggtggccatcaaatagtatgatggcgcaatcaaggtgctaatgaacgtatggcacatcttggaccttagacgaaacctcatatttctgggtgctcttaaggacgaaggatacagatacaagtccatgcatggaagtttgaggatcaccaaaggttctttggtagtgatgataggtgaaaagattaatggtttatatgttctccaaggagagattgtcccagctggagaagcaagtatggtgaaaggactagaatcatatatgaaattgtggcatcacagacttggacatatcagtgaacaaggcctcaaagaattacataaacaaggtataattgaaaatttaaattcttgtgccttannnttttgtgaagcttgtgttctagggaaacaacataagttgaagttcattctagtaaggcacacgactaaaaaaatacttgagtatgcgcatgctgatctttgggggccatatagagtactgttggaatttattttacnnnnnnnnnngatctactcacaagtatgttgttcaacacccta

SEQ ID NO: 46957 - DNA, 1099 bp, Cannabis sativa
gactcagatcttgattatactcggtaataaaaatgaacaagggtcagagatttgagcggaaagagtcatttgattccgttgcaaccaatgtaaagtttttcatactttatatgtgtttaattttcatcgttttagaagttcatttttaggatattaaaaaacatacttgttagtaaatctaagtcctggtaaaatatattccaacacatggtagatccttgtcgcttgcttcgcaagaagagcttggttaaacaaatacaaatctctaaaatccataccactatcttttttatgcatgcacaatttatactaagtgcaccagtgcattttctttttcaaatcatttccccctcccctaaccaaaaacgagcacacatcccatgaacattcttgatgaaacatttagaaagtttaaataacttcatagtgtaaggaggaatagactgaatgactgtcttgattagaacttctctacccatcatggaaaacattttataaccattaagttttttccatacacaaatagagttaaacaaactagctttgctatgccccgcaaagcaagggaggcccaagtctcatgacaatctactccaacaactcccaataacgccccaaactttctctctcaaggctcgcaacattgggattgaagcacactgttatttagcaaagttgacaagttttcccgaagcttcaccataccaccgtagaagttgcttgaatctcaaagaacacacttctgaagccttgaagaggaagaggctgtcatcggcaaacaggagatggaaaatcacaggaccacctctcccacaaggaaagccaaacaacaaactattgacacaatcacgatttaccaaaccagacaagccctctgtacaatgcaagaacgaataaggagacatggggtctctgttgttttattaattttaaattatttttatgtatgagtgtatgtgtacatattaatataatatattttatatatttaaaataaatatgtattaatagataaaaaataaagaaaagaataaaaaatataatatataatgtaatgtgaaaatataaaatacacaaaataaaattttgatgatttatt

SEQ ID NO: 46958 - DNA, 1765 bp, Cannabis sativa
agatgaattcattgattcaagaaaatgaattacagagttacttatatacagcagaccaaaacaaccaaaacagaatacacaaccactaactacttaacagaaaacagttaaagtaattaactaacaacagcttaagtgacatcatccttgacacttgtcaagtatggggttatgattgggatgaggtggaggagagaaattaaaaattatgtaagttattgttgtaatgtggttactgtctagccacactgactaacattttttattctttttaataaaaatatattgattggttagttttttttatgtggatcctttatagtaattgattatatcgcttgcgttgatgatagccttatcataaacaatagaccttgaaaacaaatagtatgtcatcattattcaatcaaaaaactccaaattaactaagtgaatcagtgaacataattagtccaaaaaaagattaggtaggtacacaaaaaatatggatgcagatacttttatagggacacgattttgtcccgtgatgtactttcacggaatgtattctgtgatgtacgacagcccttagattggggagttatttgatctgagggttggggttgatctaggggttattagggttaaaaaatagtaacgtatcctgagactcatttaatgtacatgagacccatctaatgtaccacggaatacattctgtgaaagtacattacgggataaaatcgtgtccctacttttatattctcgtagcaattaagttgagccagatcaactaaagagtttaaaacaatcacactccatttttttcccctagctaccattttagtcattttgattattatttttgagtactttatattcatgtaagaagctggtcataagagcaaggtatatttaaatatcaactttgaaaaaggcgtaggttttggggggactttaacacttggtagtagctagccagctagcctgtataaaactacaatgttcattagtcaaaatggcacaaaggcaaaagagaaacccatgaataaagcacaaacactataactaattaaactaaaatttgtgtaaagagaagaaagaagggagaataaaggaaacaaagaagaaattttgcacatgactatatatgtgtgtaactcttactctctctctctctctctaataggaaaagagaattgggattgcttgcattttaagttaattatttatatttatataaatgctatgctttatccaatattatgctaaaacctagagcttgtgaagtaagaaaaaaaaaatcaattaaagggtccaaatacttgccaacaagatgaaaaaagttgtacatgtaaaacttgagaaagacaaagatccaaatatctagtgatctaatgacaatacacgtaacccaaagaaaaagaggatctgtctcatgaaaaagaaatactaaacttgtgttttacattctgttattggttggtaaatttatttgacagcttaattatattgtgtagtggcaagttaatctttctctatttcgatagaacacaggttcgacactcagcttttgtacttttatttgagaaaaatattaaaattttacaattattaaatcttgaaccagagacgtggtattggtataaggagcttaattttactatgctaaaggttcagtaagtatgctaaattaattttagttaattaacaaggttatatttaactcttgtaaaactttttgggtccgcgccctaacttctatcaaaattgcaacactcaactc

SEQ ID NO: 46959 - DNA, 1760 bp, Cannabis sativa
agggacaacttggatgtactactggccacttgattgagaagttcagcagcaaagggtgcggcttcccttcccaccttgggcgtgatccgtctttctagagcctcaatatccaccattggcacattagggatggtggcaaagagaccttctgatgtcttaaccctttgcacggcaacaagcctagtcatcctcgttcacaaaatactcttctcttccttgtgtgccaccttctcaaggtttctttagcatccatcttcttctgcatagtatcaaaatccaagggaattgtccgcgtgggaaattcaaaacctactgttgggatctcaggaagagaggaaggccactggcacaacaaccaaaacgagtgatggaggttgttgttgcggttggtactagcgtagatattgttgatatatttgtggggcagagggtgacgagtcaagtggggctagattgttggcttgttgagagtcgatgtctagcctcctcctcttccccagggaatttttttcgcacccaaagcttgtcgagctagattccttccaggacttaacatttcaattgttgagaaggtacctacagacataattaacatgggatgttacctggcatgcaataacaaacccttaagcaggcgcacgtgaggggatgaggtatccttctaaaaaagatccacctcttatccctattaaaaagtgaagggagtgggtcagtctaataatttcctagcctcggagtcatacaagcttattcagaattacaacatgaccatactcgacccattcgaataagacctgtaagataaaggcatagagatacacatgcaatacaatcttaacaatgcacatctatgaacaagtgtcctataagtctgacaagcaataagtatcgaatccagcttgaatttagcatttctacctcaaacgcgagattatgcaaaggtcggcagccttgcttatagaattagaaggcaggtaaaggaagggtgttggactctaagcctaagtgtgcaaggcttacccaaatgtccagctacaacaacgtgaatggcctaagtcttcgtcgaacagggggtaaggtgagttgagatttatgagctttgagttctaagaagatagaagaaacttgctaaggttgaagaaaaataaaccttcaaaatttacttatgcatcgattgatgtccttaccctttgaactggacgaccctgattatctcaaatacagagtatcatccaatcgaatgacagagaagttaaaaagttatcatttaatgttcagccctaacacttgacgttcatcattgcttgctttgagtaatgtgttcattaaaagaagagttgttttaatcattcagttgtcactatgactacccttgagggacacgctcccacacgcgcgtgacgctagtaatcacatttaaggaactgcctacatgccacgttaacaatgcatacatccagtgacttattaactacaacaactcttggaatagaaaaggtctcagatagtcacacgtcccattggtttatttcgaaaaattgataagggttgcaagctctcggaccggccgtgtcacgtcctgaaagctttgggtaaatattatctgtgttgtacacaagacatagcacttggcatttagatggaaaacgctcaatcgaactttcatgattagagtcttttaaagacacacggactttaaaagatcttcccgagcctagggccaacaagggtagaagacatgaggaagcttacttacggta

SEQ ID NO: 46960 - DNA, 1820 bp, Cannabis sativa
tgtaactatccagaataaagcaaacaacctcaaacacataactacaagttacaactcactaaagtgcctattcagaatgtcccggacattaaaatactaattagaaaaaaaaaagttttacgatttatataaagatacaaaacaaaagcaataaggataccaaacatgtgaatcattccgtcagttgccgcagctgctaaaatcttcccgttgtgattgaaacttagggatgtaatggcaggtggatctttaccaagaggaagaactgtcttcatgacaaccaatgattataaggcatgcattacaaaaatgaaagttaaatgtattcgttatttattacaagggtctcggtcaatcaaacacataccatagccttccatgtcttcatgttccatacagttaacgaagcaaaacccaaattatctacatagcttgaaccgtatctacaaaaagacaatgtcccttatttcatcacaccacttgaatacaaaatataaaacaattagatttcaacctttccaattttaggatgaaaaaaatgtcaaaactactaacccaaataaatatctagttcaatataatgtcatttattaaagtgttgtacttaaagaaaatacataccctcttgatgctgctgcagaaacaaaaattggttctacaggactacactttatatccaagacactgcaacagacaacagagtgggagtaagcagagccgacatattagaagcattggtaatagttagatacataagtttgatttcggagaggaccttggaaatgcttcagttgtcttgaggtcacaaacaactctctttgcatcaacattccatgctttaatgcctccatcagcagtgcctatgagaagcttttgtcaagaagaaccacaacacttaataaaggtattttcaatttaaaatagttacatcatctttctgatgtttaaacatagatagactttagtttaaaattccaattttacataccaatcggtcagatttacattcccagtcaagtgacataatctctgctccgcaataaattgttgcatttcttgatgctggggtagatgagtcataagtccaaatcctatgtttgacatgggacagcaatcattaaaaatgtatttactaagaaaataaattcagagtttaaaatagaatgacaagttacgccttctctagacctctataataataagtaataacctagtcaaaactgtgggacagttgcatgagttcaatccagaaccatcaattgaaccaactacaaatattttacatgtctatacagaatattgattataattctaagaataatgttcaaactttacaaaatatagctcatcaataatgtttgaatacccattaaagcattgtgagcttttatatcattttattactgatatgggtatttaaattttaatggtatttttaatagattgagttttctaagttattgtttgaattatattcaacatactgtacatacttgtaaaaaaaccctttagatttaagattttcgtacatgataaagactagaaaacaatagatattggtgaacttagttaatatttatttttttcacggtgatcttagttaataatgccatcatttttttttctctcacgattagaactttacaaaatgtacctgactgtcccatccgtagaagcactggctatgttgttcccagaagcagaaaagcggcagcgactaataggactagtgtgacccaaaaatgtctcctacatatcattatctccaaaaagttaagtaaacacagaaaaactagcaaagtaaataatatttcaatcta

SEQ ID NO: 46961 - DNA, 2867 bp, Cannabis sativa
atcttagttcatagtaaagaagaaactgatgattaattgctcacactactctgacatggttcatgcgcaagaaaagaatccatgaaagcaatactcttagcaagaagctttatggttgattgggctcttcttgaccattctccatcgctaccaacaagctcaattgacggaaatagctcatcgcatggtggctggaaacctccacaacgatgcaaagctcagcagtaacttcgatgcaaagctcgctttgtctatggaacaagccaaagtaagttgacctcattcgtattgattctggcttctgcccttagtagtaatgaagcatcttttcactcaattagaaaacaaatgaaattcctcggcactcagcttaagctaaaaaaaaaagggccagcatattgcataatttgaaaacaagggaggataaaaatgtcattttcaattgtgtaccaacagtgttactttaacaaacacatgctagaaaacctcatttctgggcaaggaaaaacaaattggtttatagcatcctcaaatatccattggagccgcaccttcttcagctgcagcatcctctgctggtgcagcgccctctgctggtgcagcatcctgatcagcatcgggaccaggttcagctgctggaacctcttcttcctctgtcacaatctcaaatgcatcaatcaacttttgcacggtctcctgatctaatatgtggaatgcctctccagctcctaccacagcaattgtacagatggaactcctcagcttttcaccctgcaaggtctccctagttgcaatgagtgcatctttaatcaactcctcccgtgatgagtccttgaagctctcaaacctgcgttccaagtacgtttttgcagcttgtgaacgagaccctatggcaaaagcctgatactcaaagtagttaccacttgggcagttgtaatagaggtgagctccagattcatccaatccaccaactagcaatccaacaccgtaaggtcgtttccatgagcgttgagtgcacacctgccataaaggtaagcgactaaattaaggaaatgtatcttgcttgtaaagtaacaatgaaaaacaaatcttacacaatggtccccattgttcgttttttttttcataaatagttcaatgaaaaaattaggtatgcataaatatagaacagagaatcaagaaaaacaatgacgaagaatcaagaagatgaagatgtggaagcaaaattttttgatgaaggatactcgagagagagcaattaagaaatgatgaacgattctgtatatcgatgaaatgagctctggctcagtatttatacaatctaaggctagcagaattaagcaataaatagctcatatagagctgtataaactaactactgtaacaataactaactaacttcactaacactaaacactttctataagaatttggggacaacatacgaaatgttcacatagcgccaacaacatagataaacacagataataagtccaccaaatcatgttgcacaaaatccacattctcctataaaaaatatatattttcagggtgctcatacatgcatatctaagagagcaccagatggtttcaaaagaataagatgtcacaaaagatagaatgatcagttcttgactacacactaagagtaaaaacataattaatgcatctagggggataaaataacagttaaaaaaagaacttatgcataaaaattatcaagaaatcgtagttcctattctattgtcacacagcagtcgtgcaaaagacatggactttcagaagaaaaaaaaagcgccaatatgttcaatacaagtccgattaatttcactccacagagcacattggtttggttgggaaccaaaaaagaaaaatactgaagcacaaacaagacccctagctaacatgtacaactagtgcttaatgggagtcttaaataacccatgagacatgttgagcttcagaaatgatagattccacaatcagactatgttacctttagatgcaatgcgaaagtttataaatgcatcatttgtggaacattggttatgcttggatagagtggaaaatggtcctaagagttttgatcctggtacgactgtgttttggacttactgctgagactagcacccaaattttagttgatgtagccttcaaagtggagatcccttcggtcgggtggtggccaaggatggcggtggtagagtgttcactctctactctgagagggttcgtgccttggatcctttggaaggtgaactgcatggctttctgttgggtaccagagtgctgagtatgcttaacattgaggagggtgagctagtttcggatggtcaggttctgattaaagcttgtcttttgtttttggacagttaatgtatgcttcagatagttgtaatgtgggagttgtttggtttcctaaaagctttaacaattatgctcatgaactggcgaactggggcaatgacaatgtgtgtgttggtgaattcccatgtgatcaccaaggttctttttttctttttctttttttctaactaatgatgttttgaggtattaagcaagaaaaaaaaactattaagaaataaggttactggcctcaactcaaaaactatatcaacaatcatttcttttaggccaaaatcaaatgttgacacagatttaaaaaccctaaattaataaagaggggaataaatgccgcaatttcttagttctactaaaacctaattcccaatttcagataatcataaaaccaaagcaacacaaaatgaatgaaagtcagggtttttacataaaagaaaaaaacgaacctgggctttatcggcgagttgaacaacgagtcggccaacggggagaggggattcgtaggt

SEQ ID NO: 46962 - DNA, 1368 bp, Cannabis sativa
ttataaaatttatgctaaaaattagactaatttatttttcgagccaaatttagtacaaaatttacactattaattaatttattaaagcacaatgctaaaagtttatgcaaacacattataaagtcttattttttttgttgccaaatatagtacaatttttagtataagtgtaaactcaaggataagtttgcaagtttatgaggttgaaaccaggcaaaaaatataaatacaataaaatgaaggggtaaaaattgaaatttaataggctgggggttggtgacaactgactacaattgagaaggttacatcaccaaaccaaccataaaattacactttgaaatccaaatcattcatctcaccaactcctcctcctcttcttcgtctctctcttttgatatttaaagctttctggagtgtgcgcggcacaaactcagatcaaaagcatgggaggagacaaaaaagtttacacctttgctgagtgttctgagttcaacaaccgcgacaaatgttggctcgtcatccgcggaaaggtaattgattttcgatctgggtttttgttgttcttttctggggatttttcgtttagatttattgggattgttcgtattggatctgggtgtctattgttttcaattgagtgtttggggaattgtacataagaacttgatcaagtttttacttttgggatttttttatttgaattttgtacctttaagtttgatttttgaagggctttgtgaaattggtatctgattcttaggaaagtgttgacttcattaatacaaatccttttgtatttattattaattcagatctaagtacccaaaaaagggttggttgaaattgacataaaatggtgagagtaagttaaattccaaaacaaaaaaaaaaaaatcttgttactaacttgtttgttgtgacatgaataggtcattttggcaatttacaagattgttatggctgttgtgttgttttcttttgcccctttaggaattagaatcacttacaagatgtataaaagtttaccacttaattgacccaaatttccaagcaactttagtggtcatttagtattcacttaatttatgtgccatatatagtgttatgtagagccataggggtctgtggtttgacttcaaaattaggccaacaacatggaaatttgtcacatggcttgacttcaaactcagcaaccaattatgttatgcctagacatttatattcatccatttacaatttcattgatctttaactctactctcatttgtcatttgttggggacaggtatatgatgtaacaaaattcttggatgaccatcctggtggtgatgatgtcatactatctagcacaggttcattagagctatat

SEQ ID NO: 46963 - DNA, 898 bp, Cannabis sativa
  modified_base (469)..(476): a, c, t, g, unknown or other
aaaataagtgttgaaattaacataaaataatgtgagaattttttgtaaaaaaatattaaaattaatttttaaaaattatttacgtttattttttttaataattaatagaatgtatttatcactttatgaggtgcaaatatattgaccaaattagtaacaattttaatttttaagtcttctttacttatttttgatgtcttttgttaattaaaaataaaatcttgtgtataacatctatattttaatatcgttttcccataaactaatgtcttctaaattaattaagttgtatatctttcttaattaataaataaattagtgttgaaagatacatgcatgattttccattgagatgattttttcatatatcaatatatatataagcattgctattaggtaccaagggtgtctagcaccttctcgacatgtcacgttgcgattggctagcgatactctctaaaacctattnnnnnnnnaattatatgggactcgatacttagatgaaccaatagattattgacatataggagaatgctagacacatttctctatatatatacatagattttgaatagtattctttccacaatagataggctagaacttataatgcatgataaaagaatattgaggtattaaaatgatattttgtctattttcaataagttataattacataaaattcaaaacaaaataatgcatatctatctatgtagcactatattagagtatgaatatatatttaagagagtccattttcaaacatgatgattatcattaatcttatgtataataaataatggatacactttcaaaggtcttatatgcttaaatattataatcaaattagttatgttagtacttcgattatttaaaaagcatatacaggataatatta

SEQ ID NO: 46964 - DNA, 1947 bp, Cannabis sativa
taagcatcaacatgccaccagcatgcaccacaacatgcgccaccacttgaccaccacttggccaacttgtgggcatcacttagcttgtaacgtaccatcttagcacgcacgtaacactcagctacaggccctctcaatgagaagggacttcattttcttcgcttgctttaattggctgcatatagtagaatctcattaactttatatattctcagtcttttgaaaaaattgaacgagtaaatagccaaataggtcactgaccaaagtgagcttactataattttttattttctttaaatacaataagtgttagataattaaaagaatcaccaacagtattctcatagtaatatatattttgagaaccaaacagattttaagacaagggagaagcaagagagaatcagaggaggaagatgtgatctcaattccaacttcaaaatgggcataccaaataaaaaacaatccacaattttaccacatttgtcgtagacaaatctaagaggaccacccatttgaagtagagctcaaaatggcatatgggtttttttttttttttttgaggggaatggtgcccatcagaaagaaagaaactccttgagattacatgggtcatcaccaatctaaatttctacttcatctaaccccttggcccaagaagccaacttatgcacgaacgtatttgctgtccggttgacgtgtgagacataggcaccggggaggagagacaaagctgcccgaatttgattaattatatcaccaaagcaagaaagatcttctttgggatgcttaagagcatccgagatagctttacaatctgtttccacacaagtaacatgaaagcattcttcaatacaccattgcaatgagagaaggagggatttggcttccatagtggtgacatccactcctcccgcgtaagggaacgcgacagctgcaaccaccaaaccatcgctttttcgaatgactccaccaaaacccgcttttaaagaatctttagtgcctgcggcgtccacattcagctttatacgaccgggataaggaggtctccaagatgagatcgggggaggccgattcacaaggttcatggggtttttgagctgatcctgatgatttgtagttcgccaggaagctctgcgctaggttcactactactttggtctgatccactgattgtcctttgatagccttgtccctgttatgccaaataaagcaggcaacacataggaaaaattcttcatcttccttggttagagtagcataaatattataaaaaatgtcatgaaaagtggtagtagggggagaagaggaaatatcgtcatagaaaatagtacctttccagactcttcgaacacttttgcagaagaaaatggcatgagaaatagattcaacgtgggttccgcatcgatcactggttgaggactgaattattttcctaaaagctagatttttaagtgttgggagggttgagtttgaggcacgaaaggcaaagtgttttatcttaggcgggatattaagatgtcagaggtgtttccaccaaggtgaaggggaggaagaggaagtaatatcatgaggggaggtagaagagagactaatatggtagccagaattgacaatgtaaacaccagatttagtgggctcccatattaaagtatcactagagggttgaaggggaaggggaattgaggtgatttcctagacaatgtgaggcagaaaatagtttctaataaggcttaaatcccaggtcatgtcattcctgataaaggaacacaccttgtcaggaaccgaattggatagggtgacatgtcgatatcccggaatccagtaatcacggtaggtgaatgtgttttgcccattactgattttggagatgatacccttctgcaacaactctttaccccaaaaaatgcttcgccaaacaaaagaatgttggatatattttaccag

SEQ ID NO: 46965 - DNA, 1932 bp, Cannabis sativa
aatgtggtgtccagaaccacacctggctaggtaaatgtgttgtctcctcctcaacatgtgaaaagcggcatctatatctgcattaaaagtgaagaaaactacaattagaacaaaaaataaataaatgtcgacatacatcgatattgttcgcgacttttgtcgatgcccaacacaccagaacaataacagcaagtgataccactttcacgatatatgtcaacaccattatcgatatatattgacatctaatgcatttcaatgcaaaaatgtcaactatgtcgacaagtgtcgcaaaacatatcaacaaacacacacaaatttgctgtaatttttcattttatcaataaaacaaattaacagattaaaatttattataaaaaaattacttacatcatcttccagccattgtccactcaccaacaatttcgtaaagaatgtcacattaccgacgccagtatggagattctggggacgattgtttgggatgtcaccaaacaaccacctcttcaatgtgcgtaccaatctacggtctggtggtctttccgggtctacattctccggaagaagccgcttcttctttttctcctctgtgtagtccagtaaatagcagggcttcttcctctttctcacaaatggtacccctttgggggatccggttaggagcaacacattgcatgggattgtgtgtcagatggtgtgtcaataatggccaacataatggcatccgtcggagttgtcagtgcatcattatcatcttcttcccaatcttctgggaacacatcttcatcctcattgtcatcagttggttgggatggtgcaggtgccccctctttctccttcaacagcattatcatgttcgccaattgagttgtaaaaaaatctttcatctctttctgacaatccagaaaagactgcctcatctctttctgactttcttcaaaggagcgcctcatatttggtttggctagtcactaactcagtctatgagagaataatggcagcatgttaagcctcaattttattcaacctctcaataagtgctctaatgtttgatgtattagctgcagttgtcggagcggtcgaagtggatggctcctctagttctgcaggtggtggtggcaaaactatatttgccttccagacagcttcagcaatggtgttggcttgcgttttaaacaccgaactttgtgtaccatcggtgtccaccatctcatcaacgtccatctcaaaacaaagagaaggtttatcttcattgatgaacttgaagtactcctcctcactaggtcgagagcacaaacacttctttataacgaactgaaaacaaaaatattaaaaatgttaatttttgtaaattaaactagtaaaaaccaaaaaactaagaataatgtcgacatatgtggacattgtttgcgacatatgtcgacatcaaagagttgtttcaataaaaatggcaatattgactttatcgatatatatcgacattgatcgcgacatatatcgataactaacatatcttgtaatcaaacatttaacaataaaattatcgatatatgtcgacattaatctcgacatatatcgatatctaactctgtaactaaacatcctaatattaaacttatcgatatatgtcgacattaatcgcaacatatatcgatatcatcaagatccattataaaaaattcagttaattgtattattatattataaaaatgcattataaaaaaaaataccatttggttgaacaattgtgcaatgtcaactgcctttaagtcctgtttccgctggccctccttggttttccaatttatcatccgagtgaaccttgtgcaactacaatcaacatacttctttcccactttctctatggcttcatatgcccaatattgtatggtaggtacatagccatggacggtataatttgcctcctgagta

SEQ ID NO: 46966 - DNA, 1422 bp, Cannabis sativa
attcgaaattaaactacaatttatcttatatatagtattttattttcatacattagtaatgtgagactgtcaattaattagtgcatctagttgtagcaccaaaggtttattttgatagcattcttgagctaaataaattacaattatgaaaaaactaaattaattgatcaagaagaaaaaaaaatgtttctctttcaaatgcagcatctgtttttccttgtaaaagaaagaaaaaaaatggaaaatcatgaatattattacacttgtggcaatatctagtaaaaatttggcctctttcataaaattataatataaatatatatgcactctgttctcctaaaattctataattttatacattaataattggttgacacctgactagaaagtacgtgtgtgtatgtacgcatttcaggctgaccataggaaaagtaattttagacttgaaaacaatgtatataatatatatatatatgatctcaaacatagacatactacaccataatgttcttcccgtaccaaataattctaaacggattcatataaattctaacttttctagcaaataattttaagtcatcatgatcatgttgcttagaatgtatgttgtatcaaacatgtaaaatggaattatatcatgcgagtaccgaaaaagaaagaaagaagaaaaaaataatagcaataaaagtatgcatgtaatgtcctttacctttttcgccaacccataaaataaaacaaattacaacgtataataagactctaataatctatgctatgcaatgcaagccaaaattcctttgcagtttttgcaaacccataaaataaaacaaattacaacatataattagactataatctatgctatgcaatggaagccaaagtttacataagtatgataaagtattataggattccaaatattatttacataaacaaatacaattgatggcataaattgatctattatatgtattatatatatttttttgtaggaagtatggatggtggaagtggtggtggtggggattggaggggttggagtgggttcgccatgtgatatgcatacataagtgacattatgacgtgatgcccccctcccatgtactgagtgagagatgatatttattggtgataaaatatgttctaaataaatttaaattaatttttttattttagggaaaaaaagaaagaaagaaagaaagagagagacagaaattagaatacgtgagaatgatttgattgtagtatattgcacgtgaggaggcaaaaactcacgtgcgcccatcccttaccgttcatctgccaagtctggccccccttgcctctttcgtatgctattgtgcttaggaatgtcaatggggcgggtcggatctgatccgactctgatccaacctgatccaggtcatatacggatctgccccg

SEQ ID NO: 46967 - DNA, 2463 bp, Cannabis sativa
  modified_base (67)..(67): a, c, t, g, unknown or other
ggaattttttacgaaggtttttccaaacctctcacaatagttttctttcaaggactatcaacctcancggattgttgaagtgccaatctcactaaccgagttgtttttccattggtgtcaaattcacctcaaccaatagttttccaaaagactatcaacatctttggattgttaaagtgtcaatctcactctattcaggttgtttacaaaatcggtgtcaacctcacctacaatcgaattttttttctaccgttgtcaatctcacctctcaatacatagcaaactctctctaacaagatgaaatacaatgtgaaatcctaaagagaattgcaaagacactagagaagacatgaacaaggctggctcaagtgtgtgtagttggagtgtttatgaaagaatgatgccaagtaagtttagaacacttttagagatgtaatatgatcaatactaactcaaccaaccttaatttttgagaggaaatagagtttataaaactagccgcttttatctgttgggtacaaaaacctaagaaaatttactccaattcgaaatccaaaaattcaaatctgtcccaactggtcgtctgattgccatctgaaagccagataaggggcagtggcaaaagtcttaattttttgacttaaaatgtgcataactctttgctcttttaaccaatttcaaaaatttcaattgtgctctcttaaattatatgtgatcttaaaaatcaagttagaaaaattatatataatttttatgaaataacatgtcgcataagttagtgattcaaattttaaacttttaaaccctaatatgctatacaaatcactttaacaagactaaactaaacctatattatttgattgtgtgtaatattgatgtaaatgaacttcctagctccatttgcatctttagatccaaagttgacttttattaaaagttgactttgactttcagtttgacttttgacttttagctcttaaaatcttcttttggatagggtgttgagttcttgatctcttgataaaacttttgctcttatgaagtatgaaatagttgaaatacttgttgaatccatttatttgattatgtttgactttatcgagcaaatattaatactttataaattgcttacaaaatgattaagaaatgatttgtaacaaattataataaaatatttatttatcatcaaaataaataagtgatttgatgatatcaaaatatttgattattttaaaaaaaaaaataataaatttaaactagttgagtttagctcccccttaatgtcaaaagaatcatgttaatacttgaaaacatgatatgattaatgtcaaaataatcaactcaaatatttcttcccttttgattttatcaaaaagagtggcataggaagcaaagtcaaacaaatatacttctcctccttaatatacaaggtatcacttataccaattaagcacaataggtaaagagaaacttcaaaatgcataaaaaaataaaaatttatatagtcaaaataatttaaacattcaatctactaaaaatcatatccaaaaccatgaaagcatgagagacaagtaaataatagcgtagttataattttaaatctttacccatatctcgagtatgataaaacaaatatttttatgcacttatatcaattaaaagaaaaaaattgtaactttttgctaagtattttaaaaaattaaacaaaaacaacatatgtaccaagaatgagttgaacccaaaccagaaccctagacccgaccccgacataaacccaaacctcaacctacccttgaactcgaagccagaacgccaaacctggccccatcccccacccagaccaagatccaaccccaaaccccgacccaaaactagacccgagtcagaattagaatcaagtttaataaagataaaataattttacataaactagtaatacaagtcaataccaaatataatattatattaaataatattaatacaatgcaatccaatataatatcacacaatacaatacaaacatattaaataaatcttaaatgtaaagcataaataataatttttaacgagcataaaagtagaggaagataaaacatataggattactcgcatcaaattctgtatttttttttgtccacattaaaatattatatttcacaatatatattaattcattttgaatataatttatacgaaaaaaaaaaaaaaaacaagcattgaatagtacttcacatgagaagctttacattgatccaaaaagaaatttaaaatacatcatgacaacttttttagccattttaagatgcaatttaaaaaaagctaattagaatttttttaaactttttttgccatcaaaaattctccccgaactattgagattattagatttaacgacttttatctaattttagtaaaaaaaaaacttttctctaatagatgaaaattcaagaagcatgatttagt

SEQ ID NO: 46968 - DNA, 1695 bp, Cannabis sativa
gttgttgggaacttagataaaccttctaagtttttgatgatgttattctcagcgtgcctttgggtgatcgttccaaagatgactgcctcatttggggttgcattagtcagatgttttcactgtaaaatatgcatgtcatcttgctgaaaattcttcatttcctcccacttcttctaaccaaacttccatctaaaggtggtggaaaactcttttgaacttaaaattcttcctaaaattaagtattttatctgaaaaactttcaccatatcctctcttgtgctttaaaccttttcgatagaagttcaatccaaagtcctctttgttcactatgctccaatagaattgaatcagttttgcatgccctcttagagtgttccaaaactaaacatgtgtggaggatactatttttacgaacttttatgctaaaaataagaattttgatattaaagtatatttgttaagagattttgatagcataaacaaagatgatatgggtttgtttcttggtattgtattgaaaatttagaatcgaggtaaccaatttctgttcagaaacggtatttataatagttccagtgttgaagtgcatgtctactctttattagaggaatattctaaagctcaagatggtagactggaaaatattgacgatcaaggatacttgattccttctgaagacatttgtaaaggtgtaagtgcaggtgaaatgttacagaaacaaaaattctacaaattatcagttgatgcaaccattgatgaaaggaaaagaaagataaaaataggagggactatctaaaatttggaaggaaatattgtggctggtttgttgaattcctatcatgctaagctttctcctgttcatgctgaggccaaagctttattgtggactttaagttggtgtgaattggttgaatttcctttagctatggttgaatcggatagtaaacttctggttgataaaatcagcatgatgtagaaatataattcatctctgtctaatctgttacaacatgttatagcctttgttttaaaattttctaatgttcttgtttcatatatgtatcaagatataaaaatatgctttctcataacttagctagacaagcattaggagagaagcacacacgaggtcgtttagaatggtactattccaaaatattttcatattttaacttgtactttaactcttattaatgtagttacaatattaaaaaaaaaaagtaaaaatataaaacatcaagataaattaagagtaaagatttgaaattaaagttgagtgtaaccgtctgttcacaagtgatttttaaatgggtgctgggtactcatttcaaagcttatgggatcttgttttgatacttctaaggttctagaacttgaggatgaggtctcctacctcagtttttgaccattccaaattcaatggtcaaactagatttgacatttgagtggtcaaaaccagcgcaccagattgattgtcaacttaggcgctaggtcttgtttctagagtctcgggattatggttttctccctaagtttgttggaatctttattatttctaatgatggaaaaaatttcaaaaacacattttcaagaacttgattggaaataacccaggctgacaatctattaatctgggaactaggcccagtgccatgtgtcaacctggacactaggtcgagtaccaagtgtcaacct

SEQ ID NO: 46969 - DNA, 1212 bp, Cannabis sativa
aataaaacgaaattaaatataaatacctttgatatagaagatgtgttattattagtacgtttactgtggtctagtttcgaaaagtgatgcggtggaggcgaaatatttgggatcttactagaagtgacgttggtcttttcttccttcagcttctcgaatatgacagtaaatccatctcctgacctcggatcattcacatcccaagccccaaattttggtattgatgttgttctatgctgtcatatatacaaaattacatactataaatcacacatacatgataatgaatttcaatatttatatgtatactaacttacgtgatgatgatcatgagcagtactagctgtgtgtcgcccctgccctttaataatgtccgagactgaacaagagctactgtcatgacttattactacttgagccgaataagaagaagaagaagaattagaagtagtagtcttcttcttatgatgatcagataccaaattaatattcgcacgtgatgatctttgacgagactggtgatgctgatcagaagtactgcttttctcagtataactattattattattattgttactcttataactaccactgcctccagattctgatgttgtcatatgacccgcgctagctcctgaaccgcttctgtgatgacgtgtgcggtggccgtggctccgccgtgctggttcgtttgcatgggatgatgatgaattgctatgatggtattgattgggtgcttcgctttccagaggcttatggtgcactaccctattcgtagctccaatgaaggcctcgggattctcttcggggtcgttcgggttgaacctggcatggcctcctttgggtttctctttgcgtgcgtggtcaaagtaggctgtgtatggtacgtcgtcgttttcccagttgccaaactttgggacatgtgatgtctttcgtttcatatgtacatataaatttgaaataatattagtgatatataattcttttaagatctttattaaaatatatatatatataggtaaagaaaaccagcactgctctaccaaatcaggaaagcctaatataacaattttagataagtaagtagaaaataaaacatgtaagatttgtttgattattatttgagcttgatctctatagctaatttgaacaaaacagtacaaactgctatattattgatgatcatatacatatgtaaattaatttccatga

SEQ ID NO: 46970 - DNA, 697 bp, Cannabis sativa
gttcgacctcagtgagtttactacttgattaagtgcacttgcgtattgttctataattttcgtaacacacgttgtctccaataattctcttctttataaagaagggcatcaagttgggattgaagacattggacacgaaactgatcatccctagtgcaaaaagaaaggtcgtgagacctagaaatttccttttggagataagagatgcgagatttgagagagaagttggcaactttattccaagatttaagagcagaaatacacagatcctgtttggacagaaaaacatgaaagggatcaggagaatcctgactagtagtaccactatcccaagatgttttaacaacagaaaagaattcaggattttcaagccaaacattctcaaaatgaaaacgccttctactcctaagagaaagattggggctattgtcatcaaggaggagttttaaaacacgatgattagacccataaaaagaaagatgatgcaaaactgcattaggaaagagagcacaccaagaatctgatccaagagcccaatcaattcgttcacagacgaattgcgccaagtgaatttatttcccacgaaagaaagaggagaaagttgaaatttattaagaaagttggaaaagttatccatatccttatgttcataatatgtactaccaatttcatcatcataggataaaaaactattaaa

SEQ ID NO: 46971 - DNA, 862 bp, Cannabis sativa
atgaatgcctaatagataacatatcagtaagggtggtattagtgcacatagagttgcactgaataccgacgaatatatgtttgacagagtacgaattgatgctatcacatcagtatgattagagtactgagtataggctgatattatggtcaatcatgtagtcgtacgaacgttctaaactcagtacgtgtgggacgtagaataagattgtaattgggtgtatggacgcctagttataatcgggtttatgttatgttatgattatgcttttcctacttaactcacaaatattacttacatgtgtaggtaaaggcgaacagaagactaaacagcagtgggcacgggctaatgaagattgtacatattagggtggttagacctagtgtgttcaatcttcaagacaacatgcttattttgatagtcgctgggaaacaacttttgttattataaaattatgtaaaacaggatctcgtattctgtaaattattatttatatttaagattaatgcttaattatgaaaattttaattattcacgttttgctataaaaatatgattagtaatggagtgcacagtaaattaaaatcacgataacgtgcctaatctagtggggcattataattcggtatcagagtcttaactcagttggattattccaagatactctaacctttatcatatgtgctcatgtcatgttttctaatatcatatgaatcccctcagactgtccatctatttgagaatgaaaagttgtgttgtttttgctttaatatccatggttcccaataaccatctttatgttgggttttatgccctaaataaagctcatttcaatataatcagatttgcttattaatataga

SEQ ID NO: 46972 - DNA, 1960 bp, Cannabis sativa
  modified_base (72)..(76): a, c, t, g, unknown or other
acgaacagatacaaaaatgtaaacagttttgtcatatagcacttttaaatcggattataattaaactttatnnnnncaaaaaatcaattcagggtcctaacaccctcctacatattaatattagtccacttaagtatcgagtctcatataatttaatttaataatttttaatgaatattgctagtcaatcgcaaagcgacatgtcgagaaggtgataatgtccaatagcaatactcttaaataaagagcaagcataagcaagttgagacaaacgattaattgtcaaaaaaattagtaatgagatgtaccagacaaccatgcaaacttgttacacattaatatatataaaatttatatgagtacttgtaaactggggacgtataatacgtatgataatatttaatattatatatatatgtaggagttaactttacgtatacatttacattaaagcctggaaaaatagcgagtggcatggtgagaaggttggtagaaaaattaactagtcagtatactgatcaactcatgaatactaattaggagtagatgcaacaacgcacaagaagccatatttattcttcacaattcattaataaacaaaattacgtaatatgataaaatatttaccaagctggaataagactcttaactacaccttggtacgtgtgtccaactatagaacatattatattttatatatacaataactagtatatatatattatatttatcaaggatatcattccttcactatagaacattgtaccctttttgtctaaatatatatatatatttcttctactctctatcatcagctgcatgtagtgtctcttctcatgtaacatttcttccacaccattatatatatacagtcaaaccagtccgacacatgtagttgaggtgttgcaataatactctatatatagtactaatttaaaagcatatataattatggtgtgcagattatatatacctaaaattatatataatatttatctttaatggtaattgattagattgtcctattttacttcattcccttgaatattttatccttttctagacgtaataatatgtaagaaatgcatattgtatggagatgaaactttttgtgtgaatatagataattaaggagtttggcaaacaattcctttatcatatcatccccacaaatataaattcccaaaccgaaatgtcatttggttataattatatataagcaagtaattttaagtagtgtttttgctaaaacagagaattttcttcctctacttttgctttaagctatatatataatattatattagtcctagctagctagctatatccctttattcatcgatggaggtttcttccatagcttctccaccttacacatgtttcgcagttcagtctcagaatagactgatcatcagccaacgagctcaaagaaaaaagcttataattccaacatgttgcatcaatggcaatggtgccatttctgcttctaaaaatacactttcctgtgcttttgaacaacataacatagagtattacacctccagaggactttatgcaactttacctgtctttggtgacaatacttcattccccatttatggatcaaagagtactgtctccataactggaagaaagaaaactaggctcatgagttgtgaagctcattctacaggtaatttctttatacagagaatatatacatatcacaccatatattgctttatgtatggtttatatgagtattgttttgacatcttaatacagacaaagctacttgtactactgttgaagctgattctaaggaaaaaacaaggaaaagaagagtagttgtgacagggttgggtgtgataagctccattggtcatgatccaaatgccttctacactaatcttcttgaaggtgtcagtggcataagtgagatagagggctttgattgttctgaatttccctcggtatgtat

SEQ ID NO: 46973 - DNA, 2105 bp, Cannabis sativa
ccgaacccgccttactttgacaagagttgtgaaaccagtggcccgattctgtgtcaataagaactgcccccaaaccagctattcccccacaccaggatgcgtctgtcataatcacgtatcgacacgggctagctataccactgtgtagagtgtatgtcggggccgactttaacttatgcatcagagcattaatactttcagatttcccatgtactcttacaaaatttctctgctgccagataagagaaaatacacaaccagcatagaccaacattctatttcttgaattaatcaaaattgagattagattttccaatatctgggccaggtttgctcctggaattgagtgtatcagccaaggctcaggacccgcgaaccagattaaagaagaaggtttgggagttatgcaaaaagttttcaagaatgtggattttctaatacattttttttcttttgacaaattttctaatacattttttagcactttgttttaaaatttttcaattctcactcttttcaaacgtttttaacttttttttttttaaattttattctttgagaaaaacagcctcattaaaacctcaagagtaaacctaataagaaaaattaaggttaagtatctgatctgatccaattaattgaatttagaaaatcatcatccaaccaaatccaattaaagctcaaaattcaatccaatccaattactaattgaattgaatcgattttttaattggatatccagttacacgcctaatatttaatatcaacttaaaaatacgaaaaaaaatacagaaaaataaaatatcaccttttatttaagtttaatacttcataaatatattattcttacaagtttaatgcaactaaaagttttaaatacacaaaactaccaagtaataaaataacattataaaaataaatacacaaaacaactaattgttacaaatttaagagaaaaaaaaacaaccactataaataatcaaaatatataatatttttatttttttaatatttcttataatatataaataaatgtaaatatttttttaatatatataaatgtaattagatttgattaatttttaattggattttgggattgacatccaataaccgatccaatctaattagaatctaacttttgacatccaatccaattgtaattagatatctaattttttgtaattacattagatcagatcagttcggttcaactggattgaattggatgtttctcaccaaagagggaaaaaagtgcaagacaatatcattaatcataaaaatctttctgtaaagcaacatttgcagaagcaatacattctggatagtcaggccaccaaacataatgatatttaaggaaaaagctaatttagctaaagtgtgagccacactattagcagtcttagaacaatacaataaagaaatatcaataaaatagttaccataaacaaggatatctctaacaatgcaacttagataagattgatcaaccttgttatgaataataacattgatagcaaaaagacagccagattctaccaccatcctctgctaaccaagatgacatgcatgcatgattccaatatatacccatggccatagcaacatcaagagagaaacaaccataccaagaccaagtactagaagctagggcaaaaccaatatcatcacgaaatactgcccaatcccaagtacttacccaactcagatttcaaccatacatcacaattgattttcaccacctcaaaaggtggtttagaccaactaacaatcaacgtagactcaggagaaataccatgtgtaggtaagattattagtagatgagtaccgctgtagataatccatactccaatcatacaaaaggtcaccattcacaccaaatttttcattcacccgttcattttgtcgataccgaattctctaaacacaaacaatgagtttttcaaaacaaggcaatagaaaaacatcaagacaagcataaaagaactcatagatatcccaaccaggaaaattaggtacttgaagatggaaggaaatgacctcccagataggagaaagcttatcacaaccccaaacaccatgcaaagttgtctcgaggcctttta

SEQ ID NO: 46974 - DNA, 1253 bp, Cannabis sativa
  modified_base (440)..(441): a, c, t, g, unknown or other
atgaatatgaaaaaaaattagactaaaatttttttctggatgccgaaacaagttaagggtgtatcagtacatcctttttaaaggggtgcactgtagaatcacccaagaagattttcttttgttgctttgtttgctgtaaatgaaatgagaataattaacgagaataaatagatttaaataaaaataattaaaaataatattttattttgttatttactaaattgactagaaataaaatccaaattattttattttatttacatcactagaaaagataattaaaatggtttaatttgactaaattattattggaaaatggaaaagtatttcttataaaaatgaggagagaatctttctttttatttcttccttaatttgtgagggccctattagtttttctcatgggataattagtaaggtactatttttttgtaaaaaannaattatatttttacatttaaataaatttttatatatatatttttacggtttttcataaaaataacacaaaaattacaagaaaactacataaaaataacatctaaataacaccaaaataacaacaaaaataacatacacataacaaaaactcaacaacaaattaacaagcgtacaacataaaaataccatattttctataaataaaataaaaaaatcgtaaaaatatttaaaattccgtgaaatcgtatttttgtaatttttttgttatttttgcgtatttgtaaaataatcccttttcccattctaaaatttagtaaacaaattaatgggaatcagtcttatataattgattctcattcccctttagtaaacatgtatctgaacatgcattctaattgtgcaattatttttagcggtgtggataaatagatccaatccacttataaccgaccaatctaataataaccaatcactaaatattagatatccaattgtaattggatcagatagattgttatttttgaatatacaattggattcgatcagatgtttgatgagacgttaaaaaatccaatacattcaatatccaatcgaattaattaatattttttttagattgtatgaatccaattcaatccaattaatattaaatttaatacattagatatatctcattcgatccaaaaaaaaattatatgcttaaaatatttgataaatttaaactaattcaataaatatactaatatatataatacatagaaccatccaacttaatatattggatgattaaaattaattagatcggattatat

SEQ ID NO: 46975 - DNA, 2785 bp, Cannabis sativa
aaaggaaatgaaatgtgaataaaataatacaatgaatgaattaaataacatatgattcctatagttatcatcgtctataccatacttgtaaatacgagagtattgggtcgggtcggcctatactttggaaatcccgtaataatattggttgtattgtgttagccatatagattatattgtgccaatataaaattatattatatactcactttattttatttgttttaatttttatctctattttcatattttttttaagatatatctacttttatagataatgtcctcattagaccccttaagttaatgtaaattatatgttagacttatgtaaaaggtgagggtatattggacaaccatatcacaaaagtaggtatgtttcaataaaagtagagagtacgagtatattgggcaacacattcataaaagtaagtatattttaataaaatataatattagagtatttttttaatttatctcatattttaaagggtaagcctcgcacgaattgtaaggacgaaattacattatatacatattttaatttacatgttttattttttaccttcattttcatatttttttaagatatacccacttttataaatgatgtccctattataccctttaggttaatgtaaattatatgctagacttatgtaaaaggtgagggtatattcgacaaccctctcacaaaagtaggtatgtttcaatgaaatataatataagggtattttttatcaaatgatacaaagaagaggtattcctcaacttatcccaattgtaagcccatattttcgtactatgcttggactcgtatcgttctttacttatgccgacttgttttttttttacatgtgttagttcgttttctaatatgtgctcgaaattggattttatattttattagttttttttttttacaattaataaattaatcacaaaattatatgtatgttttatagtttagattgtttttgtataattttactataatacttaacatataaccatataaacaataaattcaaataattataatttaaatattcattagtaaatacatatgtagtattattataagaatttttaataagttgtgtttttgagttagtctgttcgtgctcacgtgtcgtgttttgtttaagtttattttttttctgttgtgtcgtgcttaaatctatatttttttatgtcgtggtgtcatatttaagcccatattttttcgtattaggtcatgctcgtgcctcctgagctcgtgttgtatcgaaaatcccaacctatatttacaacactagtttatactattaagaaaaaagtaaaataaataaataaataaataataataataagtaaaagcaattataaaaaacaaaaaaaaagtagttttaaattaataaatgagtgggtagcgtatgtattgttttagttagcccaatatgagaaaaggccaggcccaggcccaggcccagttacaaaacccaaagtcttggctgtctctccctcaaatctctccattaccctaaatatcttatcaaacctccttcactcgctgatcggagaccggagatcggcgatctgagaggaggaattccgttttactcattgaccgctggataagcatttacttcactcacaacacaacacaacacaacaggtgctgtactttacttagggttttaagttttgaggttgctaactaatgcttgcttgagtttcagagttcaagttctacaaggatatgatttagcttattatcaaattctcttttttaataatagttaggttttatatttgaaaagttacaatatgcatatctgttaatagaatggtatgagattttgttctaataatttggatagaaagatttgagaaataagggccagggccaaagaaagaaagtttcataattttctggttttgtatggtatttgtatattttgtttctgtacactgtgtttaagtttaggataattctatatattggtgttgatgaagtgtttggtaacattgagaaacttttaagagagagaatttgattgtaattattttaattatgttcgtagtgacaaataagtttgttggaacaatgcttgttttgttgattggagagatagttcgcagttgtttcaaattttatccggtatttcaataggagaagcaagcaaaataggcaatgcttcgttcactgtgtttaagttttggatgattctgtatattggtgttgatgaagtgtttggtaacattgaaaagcttttaggctctcggaataaaacctaatttatggtgtttctaggaaaatttgaattgtaattattttaactatgttcatagtgacaaataagttggttggaacaatgtttgtgttgttgattggagagataatttgtagttgtttcaaattttatccggtattcaatgggagaagcaagcaaaataggcaatgcttcgttgaatagttacccaaatgcttcattggatagctaccaaactaatagtctgtttagagaagttgtggacaatttatggtttatttgattcatttacatctctttctcttcagcattgttgttagtatttgaaagtattctgttaagccacaagaaattttgttgttaggtaggcatttactcttaagtctatattttttcatgtcgtgtttaagtctatattttttcatgtcgtcgtgtcatatttaagcccatattttttcatattaagtcatgctcgtgcctcctaagctcgtgctgtatcgaaaattccaacctatatttacaacactagt

SEQ ID NO: 46976 - DNA, 1225 bp, Cannabis sativa
  modified_base (66)..(66): a, c, t, g, unknown or other
aatctcaataattcagaggcatttttaacgaccttaaaaattcaggagcataatttaatacatgtnaaagttcagggggcaaaaatccttattaacctaacatgaaacaaaaataaaaatataaaaaaactcattaaataatcgtatgtgcggtggatcttttgaaaagtaataggtacgtatacaatacagtataaattccaataattaattcattttataaacgtttttttttttctaaacatatgtatttattatgtaaataatttgtaattataataacaaaaatatattgagtaatgggtcatgttttttttttatattaattatagtttatttaattagttggaaacttgattgtcttatatatcagtctaaagcttattatattttttaatgaagcctgttaatgttgtcatacattgattcatgagctgcatgtgtttgaagcgtgattgatggtgtttaattaagagaaagattatataattaatcatccgagaaatgctaaagggtaccactggtatctagcaccttcttatgtatcagtatcgctattgattcaactaagtatcgggtcccatataacttaatataatagtttaatataatagttttataatagtttttaagagtttttaaggagtatcgctagccaatcgcaacgtgacatgtcgagaaggtgctagacactactgttatcttataacaatgctcttaagcatgcttatatataatatttgtggacaatatgctgccacgtgtatacctaacaaaataatatcgatcatctcatctataaatataaaataacctacacatggagttaatatctgttataaagtccacttgaagtataccaaaatattattttttttaaaaaaataatttacacgtaaaaaattaaatttaattattaatgttaataaaactaaaattatatttgtagaatttttgtaggtatttaactgttatttatgtgtattttttattttatatttagattaatttttaaataaaaataaaaatttaataatttggaccaactaagaactacaacgtagtaatttacttgacacttgtaggtctacacatgtacgtttcacagaattataactttagtaatattaactattgaaaattaaatttaaatatttatttataaataaaatttaaatttaaatatttatacagtaaattaaattttaaaaataaaaaaactaat

SEQ ID NO: 46977 - DNA, 1064 bp, Cannabis sativa
atttttgaggttggggattaatctggattaaccctaagtttttgggaacttttaccgcaattatcccaattataaaacaaacaaaattttgtaatatttaaattattttttatttattttaatgaaatataataatataaaaatattacatttcatgtccaacaaaactagtcgtaattattgtattctagtgggttcccattatcacgttcaacaatgttagacataaaattgttaaacttgaaaaatacctatttaataatcctgatatcatttccaacatgataagaatgtgaacgggtatttcatgaccaactttgatggtcataaatgaccaattttgtagtagtgaaggcttggtttgtcagccttaaagtaattgaaaatcggtttatcaacttaaaattaatggaggatttggattcagagatatagagcattgaaatgtggaggctttacgcagaaatatatgtttagggtatatagccaccaaaaaagttaatttttgaatttgttggattcacttagtgtatcaaggataaagattggtggagatatgaggctctacagagctccagttggtactagaaaaaaatagtcatgatgaagaatctcatcaaggaaaaaataaacgattttgaattaactcgaatgcgatttagcatctccaacgtgttttcgattatggccaaaagatacgtagtgaaaaggaagtggttttccttcatctaggacaggtagagcgcgcccaaccgtaaatttattgcttggctagcttgttggaagaggctacgtacagacaattttcaacatttatttatcgagtgcaagtatagcaaagagattaaagtttctctattcatcacttgggccattttgaagactaatcaaaatgagctttgtcactatttaaaacgggtgaaaaggtataagcactcaaaatttagatagatatttatgttgttgtccttaatactttagtttataatatttcggaagctagaataatattctttagaacttatatatacatttaggcatggcaaaaagatccattcattcgg

SEQ ID NO: 46978 - DNA, 2407 bp, Cannabis sativa
aaagtttaatttaaatttattattcaaatctctttaaattaaatattatttatttttgattcatttatttctttccgaactcataatataatacttaatactagtatattcaaaaaaatataaaataaaataatttaattagtttattatgttcataaatattattaaatatatattgcaactaattaaaatatatataaatttttttcttattattttattttattttttttgtttaaaaagagcaattagcacatctggcttctatgcttctatgtaagtctgccctagttatatatgtatttgtatattgtatatatataagttcgtgctcatcctcctagaaaaaaagctcagtcatcttatcttaaaatacgtacttttgtgatgagtagtttcatgagattgcattaaagttttgagaagcaaagcaaagtacgttatttcccagctctgccaaagctgccttcacttctcttcctctatataactcttgtggtcctctcctcacgtacccttaatacatataacatattaattatttatatatatatatatatttgttatattttcaatcatttcaaatgcttaataatgtcaccattaatattaaaaatttatggaattttatttcatcaaccatgtagtgatatgtagtgtttgcactgaaaatgttcatttagatcataagagccccaaagctttgggacggtttaattgtaaatgttgtgtaatgttaattcccttttttaaatcaattgaaaaaaaaagaaggtaaaattgctttgccctttttcaattattaattttttgtttgttactcttttttggttccactttaataaagaaaccaaacactaacagtacctacttagcaaaaaccttaaaagcatcaataaaacaatctgtagtgactatatataaatatatatatatataaataaatatattgatgatatatagcatgaaccatgatcatggtgcagaaaaataattggattgagtaactagagtagtccgttaacagattatttattcatgtaatacagaagaaaaaaattagattaattcaagaatcttcctactgtttttttgcaatgattttattaacagattatttattcatgtaatatatacagaagaaaattagatccattcaaaaatcttactaattaattagtactacttaataactataatattataaaaaaaatcctattgtggcccttttaaaatgattgtatggatgtattttttaaaaaattattttcgatatttagagagttctaattttaattttttaatatataacactatgcatcgtaactatttaagaatttttataaatttttaaatttttttgaataatataatatgttaaaagtaagattcaaaccatttgttatgcatgtcttttttatttataaatgtgtgaaataaaccgtttaaatcctaccatttgattgtaaattgttgtcttaaattactacaatgtatattattatataaaataataattaaaattacaactatttcgatatcaaaaacacgaatttagagtgtattgttgaagcaccacataattattgagttttcgttgattttctttcaaaatcctacttttgtccccctcaaaaaatttctacattttagcatgcataaatctttcaaaatagaattagaatatataataggacattaaaaaacaaaaggaataaatataataaaataaatatttatatattattgggagatggtgatattaagcaattggatttgatgatgatcattgatgatgacaacaatctataaccacatttggggatgaatatagcaaccactaccccattgctaaaccccatattccaaagtgatatataaatatatattgtgaaaatgacaagtgacaactctttctatctctcaataaccatacaaaaagaagagaaaaaaaaaaaaaaactaagtgtcatcaacagcaaaggcacaccaaattgagggtccctcgagctcttctctaaaccaaagtgtgccagtgttttatttatttatttttctttcaacaaatattattggtatgaattctaaataaaattgcaataccaacgtacgattgattaaggatataatttgagtaattgattacctttggcatgagttgtgttttggcttcaaaagtcactttatacccaatgccttgctaggttttacttttactcactaaaggaggttttttttttttattttatttgtttattttgaaatcaactaaaagaggttttgagcatagaaaagtgagatgtctaattaattcagaatttgctataaaattggtatttgtaatgtagctaattaaatgcaataggcaaaatatgaatatagggggtgtattattcatatatactta

SEQ ID NO: 46979 - DNA, 1323 bp, Cannabis sativa
ctagatgtgcaaatgataaaacaatgaaattaatggctggctttagatttatttcgcacacaacacgcacgccataataataataataataataataataatagaactagaagtgccatgtgcgattgtcgaattttgcggtttcgtggatttttccactcttggttggatcaggaaaatcgatcaagaatatgatctcttatttagagatccttctatctatagtcgaagtacttaactgaaaggattatgtttttctttttttttttttaagaacagggaattgaggggatatgttagatacattgaataatctgaggatatatacttcggtttagaaaattatatggtgaatgaatgtatgtatgtacgcattaattacaaattaatcaaaatgttcatcaagttgtctaataatttgatcatagttggtatgtgttcctaactagcaatcttcccattaatggaagatgcacctcctcaaatttcctattagttgtattaataattaatttatatcccacttgtacttccattaatttggtttcgagctattttgaatattatcttgtcattatatataatttggatatatatatatataccctgtttaattaataatgtatattggatttagctcagaaataatgggagatgaccctcaagtatatatttgtctgcattattattgtatcttttttaagtttattgtaggtagcaaaaatcatgataataataactatgtacttattaaaaacatctaggtctttccctttgaaccttagtactgttcatatatataataatatagcagatgcatgcacacgtgtggttgcaagccaaatattaattaattttgtcttcataaattaggcatgcaggccatgctggaaaaggaaacatttcatcatcatcatcctcatacaaagcaatttgcatatatagatattattagtaataagagaaatatcctaaagtgcattgatggtatttagtaacattttcttataatatattgttgctgctctaatttagtatatcgagtcccatattttttagtttaataattattaagaaatattattaactattgccaagatcaagatgtatatcatcaacttaggaccggtctgagttaaaatggacgatgggcaaaaaaaaaaaaaaaaaaaattgaacccttataataaaaataaataatatttttaaaaattattaaaaaaaaatatgtgtattttttaaaatatatatttttatttggactcttaaaataaataagccctaagcgcgggtctagtacgcctatacttaggaccggccctg

SEQ ID NO: 46980 - DNA, 1386 bp, Cannabis sativa
tttttagatgccgaaacaagtcaaagatgtatcagtacattctttttaaggggtacattgtagaatcaccgcatgttaattatcatataaaaacaacaagtattttttttcaaaaggaaagtattagtatttttttcctcggtaagagaatgataaattagtacttttctcaataattcacataactaaatatcttcatgaatcttagggtgcgtataataatattttttttaatttttttaattaaaaaaataaaaaatatttctcaaatatatattttataaaactgtttttatttttctttttaattgtgaattaaatttttattttttttaaaaaaatcactttcacaattttttaaagagtttttttttaatcaatattttagatgtcgaccctaaccttgacctagggacgaactccggccccgaccccaattccgaactcagaccacggccttgtacctagactcgatttaaataaaatcaaaaaataaaaataaaaattatataacacacttctgttttctgttttacaaattaaaaaacataagtgattatagaacacatttttatcttttaaaaatacacattttactttattttagtaattaaaaaattttaaaaatatattactaaacgtccccttaaaaatttagagaaaaaaatcaattattagagttgaatcataaaatcaactatttaataattcaggacaacaaagcttgattagcaaataaactaataaacattgataaaaaaagcatcttaatttaatcctttacaaaaagaataattaatctcaattcagtttcttttacaagaaatctaatttcagttttaatcttttattgaaggcctaaattaagtctttcaaacattaattaagtcaaattatagccagagagatcagttaattcaaatattaaattatcacgttaaaatgaccatctagcccttacagcagtaaccactaactcccacaactaacggcttttaacggaccactgttccaactaaaaacgtcgtcgtataaagatcaaccgtcgttatctatcccaatagcgtattcccatgtatcgtttccaacgagtaaacgataaaaaaaataagattcaccaatgaaaacaaaacacgtgtcccaaacagatgacaacgaaaagacaatcctatccctcctggactcctttctcccacgactaacggcttttaacagaccccaccgttcaaaccaaaaaaacgtcgtcgtatagagatcaaccgtcgttgtctaatccaatagcgtatatacacgtgtatcgtttccaacgggctaaaaaagaaaataaaacaaatcaaccaataaaaataaaacacgtgtctcaaaataatgaaaagacaataatgt

SEQ ID NO: 46981 - DNA, 2894 bp, Cannabis sativa
aagcttgcttggcaatcaaagcttggttgtgatgaataaaagaacgaaaactaagaccaccaaaaaatttagaattgcagatagtagaccagctctcccagtgaattttgttgttattactatcagaaccccaccagaacttaaagatgagacactagatggagtgacaagtggttttggggatcctgaaacatgacatggcatatgaaggaatagcctagacaacctccttaatgaaagtttccttacaagctttggaaaagaacttagcattccaaatgttcaatttggaagcaactttttgaaccaagtgatgaaactgctcagaattgagtctgcctttaccatgaggaaccccaaggtagttactaggaaaaccctcactgaaaatgcttagggaatttttaaactgggaaatagagtctgagggggtattaggcgagaacataatagaagattttgccagattagccgtttgcccagtgcccttttgataaaggttgaaaatgtcaattatggcaacactggaattcttggacatagtagaaaaaaggatactttcgtcagcaaaagaagatgagaaatgacaggggcaatgcgacagatccttaaaccagtcaatttattcctgtgctcttgaacccgaattgcagcagaaatcccctcaacaaccagtaaaaaatgtaaggggaaagagggtctccttgtcttatagccctagtaagagtgatgggatcagagagggtgttgttgatggagatgcgatagtgaactgtggagatgcatttcataataaaggagacaagatttatgggaaagcatatatgaatacgaatggctttgacaaaactccattcaactttatcaaaagctttctccatatccaatttaatggaaacccatccaatttttcccttctttctatgatggatagcatttaggagttcattggcaataaaatttttatcaaagataagcctatccgaaagaaaagcactttggttgctcgatatgacagagggaaggacagttttgagtctattggccagaacctttgagactattttgtaaagggtggtacataggctgataagtcggaaatcacgaacattggaagcattctttttccttgggattaaaacaattatggtaccattaattgcagagagatcagaatgattgtttaaaacatctagaatggcagagcagaggtccttacccatgatttcctatttttttttttttataaaaatgagcattcagcccatcagacccaggtgctttatcaccagaaagagcaaaaagggccttttggatttcatcaaccgtgaaaggagtggcaaggtcagagtattggctaggagaaagatggctattgatcccagacaagatgtcatcgatagaagcatgattctcaccctgtgtaaaaaacaagttagaataaaatctagtgaaaagagggattatagaattggttcccctaacaatagtaccatcctccagggtgataaaacgaatggaattgtttttcttcttggccgaggctttctgatagaaaaactttgggtgtttttatccccggacttaatccaatcaatcctggatctttgtttccaataaattttgtttttatgcaacaaagcatgaagagaggattccaaagctctaatctgcgagaggtcatccctactaggcaaattcttttgataaaacttctcaagggaagcctgtgtggaggagatttgatgtttaagagagttttgaccagatttccactctttaatattagcaacacaagtattttgattttttaagaaatcagttaaagaaagagtggtagaaggatgattgaaagtattccaagaggaattaaccactctgaaaaaaaatgttcatcggaaaaccagtgattttcaatgaagaaatgactaggatttatcagattggtggtattatcctcaaggatggttttgatagcccggtggtccgaaccaaaaaaccccaggtgaattagagtggtagaaggaaaaagcgtttgccatgagctgctaacaacacactagtcaaggcgttggaagaggctgccatgttttcaagtatatttactgccaccatgaggaagtagcaaaaaattaaacttttttaagaaagatttaaagtcattcatagcataagtggggggtctggtttcagtgttacgatcattaatagacaagtaatcattaaagtcgtcattgatacaccaaggcaaattaggagcagaatcaaaaatacgattaagaagtatccaagtgcaatttttagaaacaggagagccatagaaactagtaaaatgccagacattgtcattactaatatttacaatacagttgatatgattaaaggagaaagtaaaaacattaacattaataatattgttctaaaagagtaaaagacctccccctaaaccactccaaggcactttaaaaatattatcaaaacctagactagtcttgatacgcattccgtggactgccaagagcttggtttccatcacaaaaaataaaacaggttggtgttgcctcaccaacagggaaagataacggaatgctcaagggctccctaaacctcgagcattccagctgatcagattcattttcctatcagagtttgagaaagaaggaaccacaacatcctcctcattcgcagcacgcaccctcttaaggatacttcagatcgagccaccaacttgagcatgttggcgagtaaaaggtcgcttgacccccgcagtggtagcaacaggaatactggatggctcattgatagtgatgcctttgctgggaggcctgacagttttggaagggggcgtacaagggtcttcagggttggctatgcccttccctttatccgtatgg

SEQ ID NO: 46982 - DNA, 1935 bp, Cannabis sativa
  modified_base (1450)..(1457): a, c, t, g, unknown or other
aggaacaccctgggatcagcaagagcgagcgaaagagaatatgcaaattgatggactgcaggaagttatcagctgaggcctgcatgcacgcagtacaaaatgagcggctgccacttagaagcgttgttcaagtccttttctttgagcaggttcgagccactacaacagccggaaacagaacgccagacttaccaggatccatccgagccttactccctcctagtggatcccatggaagctccaggtcaactaccactaacacagaagaggactgggatactgtgccaacggccgaggatatcaaagccataaaaggggaacttgctactctaaggctaggaactggggatcatggtgaaattggaagtaagaggagtggttgtgatgggaccaaaatcattgttgcagatagatctgcatcaaataagaaaggcttgatcatgtcaaagaaactcttctctaaactttggtcaagcaaagaccgtagtggctctggcgatatcagtagctcggaaacttctgagagcccgggttctacaaatgcagaggagactaaatctagtactccctctgccagaagtgggaggcattcagtatcataataataggttatcttagagggcaaggcaacttgtgtgttgggaatattttgaagtgttaacccttgacaaatagaagggctgctgagcctagtctggcattgaagaagaaagatgagccagtgtaaaatcatctcattcaaattgactttaggggattattttagattgtgctgacaagtttagttgattttgggggtaagaaagaaggttatgtctattgttagagaaagaagtgcccaagaaacagaagaatgtatctttatatatatgatatataaatatttataagaaaaggccagcctgtgattgagctttgtaatgccccaaagaaaaaaaaagattggtctttttttcagttttagaatggattttgtgataatgagccagttttgctgtatcataatcaaaaagggaatgccaattttctttttgtgcgtatcaattcttattttccaacttttcccgtcaaagttgaaacatctaagaacactcgtagggtaccatagttttttctaaattctctctatgaatacatctgttcacagtgtatatattattagaatttttcttctttgtaaatttaaattttacaaaaaccaagtttaaattttcaatatttccgtaaattttccaatgaactttgaacaaattttcacgataaattatggaaaatgatccaaaaatataatacagataaatgtcattattttaaattttttagttaaggagccctttacaatatttattgtttaaactagtaaatttttcgcgtttcgcggcggatgtattaagtattttaaattatacataaaaagtaaattaagtattttaattaataataattactnnnnnnnnttatattaaaattttaactttattattaaaaaatttgtgacataaatacttaaaatgttaaatttgttgctaataaatatcggaattcgaaaaattgtagcataaatcctcaaatgactaaatttagcagttttataattttattggtaccaaatttaatggtcttgaacggagaccaagccaaagaataagaagaagacgaatttgagtttagattcgattcatttaaggtttaatttttattttgatgagtgtatgttgagttctaggttcaaattttattgtgtgtgtttttaatgtttgagttttagtgttttacaggggttccactgtttgagtttgtgtttatgagatttatttttatatttatttatttatggataaatattattttggaccctgtgttttacaaaagttactaattagaccatatgttttgttaaatgacaaaatggactctgtattttctaaaattgta

SEQ ID NO: 46983 - DNA, 2517 bp, Cannabis sativa
agagtgctcatattcattgtaatctcttaggcctttctagccaatctcataataatactggctcatggactaaggctcattaacgccctaatcacgtaaaaattctgggcgtcttcttcatatattgttcttttgattatattttctttagctttactattaaataattagttttccgagaatctttgtaaatattttagtactttcgttaagagctgaagaaagcagtgataccatttaagattacttttaataattatggtactcatctgaaccaagtctggtcttccatttaatgaccctacaaaggttgatgttggtaccaattctaagtcgggatacggagaagatctaactaaggcgaccagttgccacaagaaggattaaactgacaagaagcctaaatctgaagatcctatgaatgaaggcaatgaatgtgaggagaatgactctgttgatcatgaggataatccttaagacatgcctgttgttgatgatgccaaaaaggaaggcaatccaaatgagtcaaatcctatggtcaccatggccagagagctaaaaatagttggggacaaattataaatacaagagcaattctctttgttgatgcacgaaaaaaatggcgagaatggaggccataattgtggcactaaccactacacataaaaccaatgatactgctccaaaagataacactcttgggaaagctaatccctaaaatcctggaacctacgatcctcataaggacaaagtaaaagataaggtaaaggcgagacttaaaagaaagatgcccatactgaatgatagaagaaatctaaatctgccagccaacttcaaaagaaaaaaaaaaggaacccatacctcatggtaaggtgacctaattgattcaagaggtagagttgcgtaggaagagaaatttgatgctagagccaagaagcctactacccaaaaggacacaaatcactgtgatgattctgttagttgaagtgatgatgatgtcgaagatgtgtatccactatcagatgacaaaagtggaagtctttctacgaatgatcttcggacaaattgttgaacgacaaaagagaaaaggccaaaattaagagtcagatctcacggagaaaacctaagaaaccatatcaacgatcgcattcacggaaaagaatcatcagatgttacgactcaatgtttggagcgtaaaattaaagagttaacaaagctcacagaaaagatctcctaaaagtaaaatgaaactgtgtttaactcgaaggatgaggatacggaaccatgttcatctcgccaattttatcaatcggtagttatcattcatagctttctcttatgtttaaaagggtgagtttaaatatttttaccacatgtatttttcgagacgagtttattgaatgcattaatcgctttatagatcgagctggtttctttacacgtgtcaatactatattgccgctcaaaatatgagtataacagagacataaaccaacaataatttagtttattttgttattagttatgtgaaaaagaattaaaattttaagtaattcaatattaaaaagtaaccaatcaaaaataatgcattcaatatgtacttttactgattagattggattcgagctattatatagattagattgaatccaaaaaaataaaaaataaaattaattaatataatatgatagaattttaaaattattaaattaattgaaatcttaaattaaatataagaaaagaaaagaaaatattacttctaaagtattgaactcataatattttaattattttaaaagtgattattataaatttttatttaagtttaatatgttataattttctataagtataattattatattaaaaataaatgtaataaaaatatttttctatgtaaatttgaaattaaaaaaaaattattattagaatcaaattttaaatagatataaaataaaaagtaaaaaataattaagtttagagtttgttagttgaacctataaataagaatattcaagattggcgtcaacgattgaaacaactttgacttcaatggggagactagaatagtaagttttttcattctaaagctagtgcgagaagacgtaataattctatctctagtttaaagaatgatgttgggtctaaagttacttgggaagatggtttaggggatgttatggtaaactactttaaaaatattttcacttctaatggtgtggatggaaatgaggttctggcttgtgttaaccctatgattagggcggagcagaataatatgctgttgaggccagtttgtagtgaggaagtaaaggaagtggttttcaaaatgtacccagataagtcaccagttcttcatggaatgaacccgactttttatcaaaagtattgggatattgtgggggttgatgtggttgaaatgatcagacaattcttcaatgctgaatctatgcctactggcatgaacgacacgaatttgattctcattccaaagaagaaatgcccagagaatatgag

SEQ ID NO: 46984 - DNA, 1053 bp, Cannabis sativa
acataagagatcaagattggtggggttacaacgcttctatacactctagttggtattggaagaagttggttaacctcaagaactgcctcagttctgtcactgatgttgttgagtttcagagatgcaagtataccatagctactaggtataaaatgttcagcaacccacaaacaaagaaaacttggtgtaaagaggtatgggctcgattgaatattccaaaacatagtgttattttctggcttactatgcttaacagatcaaaaacaaaagatagactggggaagatgggcattaaggttctcgaaacctactgcctttgtgatgaatacaaggagaatgctcagcacttgttctttgagtgcaagacaaccagctcttggcttgttgaaattaaaagctggctgggttggaaagcaagaacaacaaacactcagcagctggttagatggattgagaaggcaaagatgtcaaaatttaaaaaacaagttttttgtgcagcagttgctgcacttgtgtacagtagctggaaggttcaaaataaagtcatatggcagcaagagcagattaatcaacagcaggtggtttgcgacattaagtggagtctaaggactcggattcatgttgttctaccaaagaaaatctcaagtgtagatagagaatggttcttagctttgtaattagagaaatatagcagtatagtgcagaaagtattgtatagattgaggaccggctggttgctcttagtgtgtattcaaatttgttttgggcaatacaattcattgatttatcaaaaaaaaaaaatatatgaaaacttacagaaaaaaaaaagaaaaccaacgaaccttcgttctccgacgaaacccttacctccccttatccattttcttcaaattttaacttgaaatttagcgatcgaagctctgatagtggcaggatagtgaattctcagagcgggaaagcttaaaggaaaagtttaattctgttttaagtttaattcaattagttttgtataggggttttgcgaattagaatagttatgaaggttctgacctt

SEQ ID NO: 46985 - DNA, 975 bp, Cannabis sativa
accgagtcttttcacacctttgctctgccttgagtggctcagagaactagaaacgaggctacttcttctggggatggaaaatggtaagtatgagttgatgggacacagaatagagctcagttccatgtctttattctcgtagatgattcaactcttcacttgggtgcatctttagcataaaacccattactctgaatctttcataggattcagaaaaagaaaaattaaagctaataatggagaagctatcatttctaaaggggaaaaagttaatacccagatgaagatactttgagaatcagagaaaagattattatgataacaccaaggataagaacaagattacaaccttgaaaacgacaacaaatgatgacaccaatgtttcttatttatgtatctcaaaaacgacaaaaaatgtatcaaacgacatcaatattattgcttgctcttccaacatttcgttttaataaaattgaaagcattttctttactggaaatttgaaacacaatcaaagaagaaaacaaatataaatgtaataatttgaaatatatatttatagataaagaaagacacattcgaccatataacacaagattaatccaactactaatatttcattaattagataaaatagtaataagaacataaacacttagcttacctaattagccattggattctaccacaccattttacagaaacccaatgttaagaaaaagacattacaaaagaggaaattatgatgaaattacttaacagaaattttcaccatctgcaaatccctaagctctctcgcccctaatcctacgagccaactgaatatccttaggcatgattgtaactctcttagcgtggatcgcacagaggttagtgtcttcaaaaacaccgaccaagtaagcctcagcagcctcttgaagagcagacacagcgctggattggaatcggagatcggtcttgaaatcctgagcgatttc

SEQ ID NO: 46986 - DNA, 2254 bp, Cannabis sativa
aaaatataaatatagatatatataatgaaaatagatgaagagaaatatgaagactctagagttcgatgggctgggctgggctgggctgggctgaagtattaattgtagaaggcccattttaatatccgaggccataacatatcgcttaccttaacccaaaagtcaagcataaataagtaaataacatcaaagtaaaaagaataatccctcaaaataataaataaaaaaaaaaagtaaaaagaatatgaataagaataattagcataaattatatttatataaaaaggaaagtatatgctgctatatactattttctctcctacccactatgtaaactatattttcatacccctttattcccttatctttcatatatttctttgtcttctttttctttatgtgacaccaaatatcaaataaattttagttttttttaatcacttcaaagtctagcgaacttcaaatgctactaacttatcaaataggatcgccagagttaaaattggacccctaaaatgagtagactctaagcgcgggcctaaccccccttaggctagagccagtcctattgttggaggagtgtgcccaactatctgagaaacccagactcaattgaataaattacactatatacctcttttaatttggtgtctctaatttttaccctctcctttaaaatctattatatttacctctttttttaattattgtactagttttacccttatcactttacgataattttcattcatctataatcaaaattttactttaattttcccacaaacctacacatccatcttcaaataatacaaatttattgtatatgaaattatatcttaatcatgtgactgtgtaagaataatttaaatataatactcataaaaagagatatttatgaattaaatttaatttgaaagtattcttcaacttcttcctactcaattggactcgcaatctaattcgaaatgatcaaaaaaagacaaaccatctaattcaaatttaattatttaacatgtaattaatcattgcaatttagggtatcaaataatactatttactctaataattttaataaatttgaacacaatttgtatgatggaacaaattagtatctattttatattttaatataataattataaataactgttaattgttattaaaacgtcacctctagtgattttggatacgacagtatctaatagtaatgttagcaatatttaagtgaaaagaatgtagtaatgcactctctacctgtttctagatcgaaaaatttttttaatctattttttttttacatttgtgtacattataattatttaagacatcaaacaaaattttaaaaagttgaaataatttacaacatagaagcagtgttcaaacagtctagttcacccgcatataagatagaataatcatgtgtgcaatacaatatttaaatactaacatgtatatgattatgagaaaaaaaaatttactaaaaaattattttaaatacaaaaccaaatatgagtacattagtatgagtattgtaaaattttcttataatttaatgtctaattttacataaaataataataataataataatttaattccaaaacaaatttaataacaaatgtctacattacaattacacaaaggataaataaatacacactaaaataggaaaatcacccttaagaaaaatatagtaattgtctctttttgaggaaattttctcctttcatagtatataaataataaacataaattttttagtactatttataaattggaagaagaaaaaacaagtctagtggagcaaatggtgcaataaaatttggttttaagtttgtgataaattggaatacaacaaagtaataaatgggtatcaaaattccatgctaagacaggtcctccacaataagggcaagctactccaactccttttttacccaaaacattttctctcaaattaaacactttcaaaactcccattttctttatctttctctattttgattcatttgagtcaccaaaacaattcttttatatacacacaaaacaaagaccaaagtggaagagtgtttaaataggaaattcatttattatactctgaaaatttcagaacaagatttctgagttgttgctttacaagtttttggtataccaaattgtgggtccattggaaaatcacaagaaagttgcaagacataaatgttattgttaaagacagcaacaaatgttgaattggtccattgccccatta

SEQ ID NO: 46987 - DNA, 1448 bp, Cannabis sativa
caaacatgatttctttttatttttcttattttttttattttgtttatgaaaattaaactttcaaatataacctaaatgaataacttattcatatattgaaaatacttacaataagactgaagccggaaacagctgagaaggaaattgcaatagctgtactagaaagagcgagtttaccgtgatgaccaaccatcattacagaaactatttgaagaaaatattgagatatatttacaatcaccattggtcctccaatataacccaaaagcttcacttcatcaaatattttactaaaaatacttatttctttctcttctttttctaacaatcccttttccatgctaatttctctcttctcttccatggcttcaacttcttcttcttcttcttcttcaataaactctctcttctatatatatgtattaaaaaaaaaaatcaatatatttgattatttataatgacacatagctatgagagagaacacgtggtcacatttaattattatattttataaaatatagttggatgaagtaaataaattaaattctcttgtctttattattgagctatcttctatatcacattttatctttttataatgatcctaaaatctaatgttagttttagtttataaatgcttttttcaaaaaaaaaaataaaaaaaaaatagagatgacttttattttttaaatatatatttatatgtatatatattaatttatatgattttcttttttttaaaaaaaaaaaaaaattagagatcacattcacattcacatcatcatcaaagaaactttctcaaaagggccatcaagtgccattaaagtcaaaatctttggagtttttttataaaaatactgaattttaagtaaaaatttacaattttactgcgatacaaatttttttttataaaaatactcttttaaaaacaaccttaaaacaacaaatcataacaattaaaaacaacagtggaacaacattgaaaacttaacacaacacacaatataaaaaaattacataatatttttgaaaagaattccaccccacagtaaaaaagaaaaaaagttagaaattccagtatgtatcccatccaacaaagtgggataaataatatcatacatgtgagatttttttaattgtttttttttaattctgattttgtaaatatatttaaatttaataagaattttaatgaaaaaattattacaaatttatttatagattttttttatcaaaaacatatttattaaaattagtgaaaatatataattttgaatatcatacataaactttcaaaatttaaattaatattaattaaacaatagatacttaaattgattgtaagagaacaacatgataataaaattatatattctttttatattactaaaaaaattatatcattaatttagataactaatatgtatattaaattagtggttaaatta

SEQ ID NO: 46988 - DNA, 1934 bp, Cannabis sativa
atattataaataattgaatcgttacttttattatttctttataaaggattcaattttggaggatcattttggatattaagaataggaaaaaaaattaaaagcagacactaactgagactctttcttttatttggaatgaacagaaaaagaaagagaaaaaattattcgtattataagtggttgcccaagtgggcaatactaatagaaaattttgtgaaaataatgaaggaaataaaattgaaattatttaattatcagagaaatggctcgacagtcaaaaactgcattttggtctctcaatctcatcatcatgaccagaacttacgtatgggtagatatttatatgtatgtgtgcgtggtgtgtcgtgcaattttcttagaccgctagtactttttgtagctaaattatttaaaaggtataaggtcaaatgattcaacatttttactaaacccaagaatccaagatttaaaaatataccctctttatatatagcttatgcaaaagaatttatcataatcgatatatgagataactacatagtagaagtgttcgggtatctgatttggttatggtctaacttgatgtaaatcatgtaaggatctattctgccccactccactagatcagatactcaaatcagatcagattcgacttgacttatttgaatcaaagttgatccgacccgactattttttttaaagaattttaatattaacttataattgtatatccattttaattttgtattattattaaatacaatatatcatgtttggtattgacatgtattaatagattgtgtaaagaatcgagtctgagttcgggtccgggtccctagttctggtctcgggtccaagtccgggtcccgagtctgggtccgggtcccgagaccaagttccacggtccgggtccaggtctgggtcccggtcctgggtcccgggtcccgggtcggggtcccagtcccgggtctgggtccggatttgggttcgggtcccgggtttcaggtgcgggttcgggtcccggtcccaggtcccgagttcgagtttgggtctgggtccttgtctggatccgggtctcgagtccgggtccgggtctcgggtccgggtctaggtcccgggtcctgatcccgggtccaggtccgggtccatagacactacaagaattttccatattaccggcagagacatccgccggtattaattacattaacctccggtattaattggtcgctattaatgagtattaaccaccaaaacagacttccccggtaataatattaatactggggaattaataacggtgggatccgccggtattactgtctgcgcttttacatactgacacattaatacaggcagaccacatttagtgttccgccagtattaatatatttttatataaaaaaaattattgtttttaatatttatataataaaaataattatagttatatataataattataatattatatataataataattataattataataattattttaatatattattaaaataatattttataataattacaattatatatataattataattataattattttataaatatattattaattagaatttaaatttaagaaaccaagtattgatattaattgtccataacaatatacactactatctaaaataaaattataaatttatctttaaataaaatttaaaacataaaaatttacataaataaaaaaacctaattatcattattcagattagtaaattccataaaatcatctacattcgagttaagtcttaaaccgtcgcgattatcacgagattgaggagctggcggggtaggataataataaggttgtccaatctggggcgtaggtaagatctccacaaattatcgagtctgcggacgaaccaaaataggttgttgttgttgctgactctacgcactg

SEQ ID NO: 46989 - DNA, 1380 bp, Cannabis sativa
tttttttgaaatggtgaaaaaaattacacttgaaattgaacaaattattaattcaaattacaataaacttcaaaagaatattactgttacattttttctgaatgtaattgaaataaagattctactatttatataactatattactgttacatttctctacgtgacggttaatttgaaatgacaccacgtcatttccttcctaaaaatataaaaaggccaagtcaaaaataattttaatttgatataatattatgaaataaataatggaaaatatatatttgtaatgacatgatgtaataatctttatttaatttgatttttaaaaggatgtcaacagaaagcatctaaccacttgtctcacgtcataactaattattgttgataacattatttataactaatccaatataagttaggtatataaaaagtacctgtgttccaatcatattcttttattaaaaacaactcataattttaaattgaaatttatcaaccaaaattacaaacttaaaaaattaaattttgaaagtaaattagtgctattcttttcatgcattcacaagtctcatcctcttgaagaaacaagaaaaaaagaacattaattatgaagaaatagatgtaacaaaaacctcaagtctaatataaacacatatattaaagctaactcaagtaaaaagaaaatcaaacaatgagagaagtttatgatttattagattttctatgtatttcttttattataacttaaaaaaaaatcatgtattaacataacgatcaataacttattacttttttgaaagaaattaattgacaaataaagaatttgaatcaattagaagtcctttccaataataataataataagtaattactacaaaatcaaacaacttgtaatcttcataaccattcataaccatatataggatatctacaattaactatgtgacatttcttccatatacataataataaatcattctctaagctaaacttgaccatatacactatgaaaattgtgagtaatttgctaaattaataatgaaatactaaaatttacaaaataactttatttaatttactttatgtgactacaataatcaaaatttatgataattttacgatcgattataatgatcgtttatagctttacaatataatttatagtttttttttttcaactatataaaattattttgttaataaattttttttataaaattattttactgataattaaagaatttcataaaaatgtgggcaatatttaaatatattaataataatgtcatctcatctcttagtgttaagtttgacaccttagtatttttccatatgaaaatatgaataatatatactaacgttcaatcatgcataacatctca

SEQ ID NO: 46990 - DNA, 1652 bp, Cannabis sativa
  modified_base (1528)..(1529): a, c, t, g, unknown or other
ttgcttagtcaattacctaagcatatagatataggtggttattagtctttcataaatgctacaaagactttgcaagtttattataactagttaactattagctattaatgttgcgtattgctatgtgatatgaaagtgtttaggactactataagattacgtcggttttttatattttcatttaagttaaataagtaaaacttgatattaaattgcatttgttttttttagacctacaaaatttgtttaacatttctttcttgttataggtgggttaatatattaaatattttatttaggccatctccaataaaaaaatttaaatttagtgttaaatcaacactaaaaaactactatttatcaatataataagtttattttaatactaaatatatataattatttaattttttctcttaaaagtatcatttaattattaaaaacttaaaaataaaaaaataatgtggtctatagtactccactaaatttggtgagacactatagacaaaactatttataagtataattttagtgtccccttagagtaaatatagtattaactacactatatttagtgttttgaagttcggttagagatgtctttataggatttttgtttataccagggagcctaacctagtgaagttgacaattcattagtattggaaaatgaactattattttttttaaaaaaatctcactatttttttttttcacaaatcccttgttattatttgtttcacaatattaaaatgtatttatgactaattaacaataccaaaagtctaattatcaaaacttataaaacacttcaaatttgcattgatttggtctagtagtttaaattttgttacaagaaactcttagtaaccaaaattgtcttgttcttctttttcttcatctagatatagatttctagaaatattaattattctgagtttttgactttttttttcttcttattattattattttataaaattggtgtaggaatttatggctgatgtggaagtaagagcagcacacaatgttctagaagcatgtggtcaaacagatacaattgagaaagtaatcttctcatcttcaatcacagccgttgtttggagaaatgatcgtacatctatgttatctgatttggatgaacgacactggagtgacgttaatctttgtcgtaatttcaaggtacataaatatgctgaatttcatttttatgtttatatatcataaaaattaaaaaaataaaataaaaataaatatatagcgttttttttctttcaagaaaattattttatagatttttttaaaaagaaacaatataaggtaattgattggttcctcttctataattttcaactttttttttaaaaaaaaaatctcataaactaatttttttaaaaaaataataattacataaatcataaatttgtgtaacatttttatatttttaagttcaaaattttttttctataaaaagacaaaaaattagataaaagtaatacgaaaataacataaaaaataatatacaaannacaaaaaatcaacaacaaaataataagagtacaatatacaaatataccaaaatcctatattttatgtaaataaaatctaaaaaactgtaaaaatattaaaaatttcgtacaaactgtattttt

SEQ ID NO: 46991 - DNA, 1005 bp, Cannabis sativa
aatagtacaaaacattagcgataccctaatatttttctcgtgctattgaatgattgatatacatacttgcattgaattatttttaagctataatgccacctattaaagttaaaattaatctgtcttttttttttccttaaaaataaagtttaaaattctactgagattttaagtttaaatcatttattgtcggttgaaaaatgaacgagtatagatataaaattaggtatctacggaaacaaatttgataggataaggatataatttctagactgatcaaattacttcgtgactttcatcctttaaaaaaaaaaaataataaataaggacttcacttcattcatttgaaaataaagaaaaaaaaagtacttcatttcttcctaaatggatatatagggatattgaaataaaacataactatcaaactcacatctaattatattttacttttcaactaaattaaccaggattttgccgtttgcctcgagtacttatcctgtttatgaatcctgtcgatctttatgtaagtactttgatcaagtatttttctcttttgtccctggtctagctgatagtttggcggggcgggctagaagtgctttggtttgtaattctggttctctcagggatgtagctccctttgtggcttcaacttttatgcaattccttctgtttgctaataaaataccttttaatcaaaaaaaaaaaaaattaaccaggatttttgccttattaaaaaagaaaaaaaaaaaggttttttatttttaattttcatttaaatttgttaagtagtttcttttatttgaaaagcactgtaaataagtaaggtgttacacccagctcattaaacaagctataacttttactaagaagataccaggactgtctttttacatcttgacgcgttgtatagaaaatatttaatgtatatattaattaatgataaataaatataatattattataataatattaaaaactaaatgaaatgaatagtcttaactt

SEQ ID NO: 46992 - DNA, 6149 bp, Cannabis sativa
taaggctctttgtgccgagattggcaacatctctgtgagttttgttaagcggtctgctaatagggttgcgcattgtttggcgcagtcctctcttcttgaggctgatcgtatttttaatagtttatctttaccttttgtaatttcttctttagtttcggaagatttgaattaatgaagtttctacttttattcaaaaaaaaaaaaaaaaaaactatggggagattttatgtctaaaaaaagttcatagattaaaaattccttaaaagatgttatttgcaaaaatcttctaagatattattctttctgtaccaaggcattataacatattgagatgttgcatgtgaggagataatatcacagactatgaccagtgaccacattataagtcaataaaaatattatgtttcaatattattatttggccctttaaaaagtatatatcattttttaaaagcgatcacaatgctccacttttatcccataccaaatccagtgttacaaaataacttaaaagcatcaatccaaatactattctaaagaacttaacacaaaataagattacaagaaccacatctaataaagtaataacatcatcaataaaacctgtccattaattaattattcaaattcaaaccgtatcaaaaactgaatccctcaagacttgataagcctaaataattgaaccatatttttacaattgtaatgttttatcatcagttgggaaaaaggtcactctgttaactataacattctcatccgaacaaagctaataacataatttgaaattcctactatagtactctaagaaattgtgaaaaaatcaaagagaaatactgtttcaattaaaatcaatcaaagggtcaaataataatgagagatcataaatatttatatcacaattgaatacgttttcatttgttaaatagaaaacattacatttacaagtaagccagcaaaatagaagacatgataatttaacatataatttctcttcctacattcttattttccaaaaaataaaaataaaaaatgaaacttgagaaataaaacaaaaaggagctcacctctttagaataacctaaaagccaggcaacactgaaaggtcagcaatgcctctaggaaggtcagcaattttgttgagcagagcaagcctgttattccgaattctttcgtcctcctgttcataaaatatgttaaaactctttcatttcattttcaatcataacttgcaacatgcaactctctaagtgatcggccacaagtttatttttgcaacaaattctgactaattaaatgatgccatgccggttgggtcttaatttgcaagacaacttgttaaaatgtgtaaccttttacttggacaatttattacttacaggcaaggcaaggatataattcttctatctacaacttaggtcttagggtgacaaaagtaaagttgattaaaattagaattgcataaaaatttcgtaagagaatgaaaaagtagaaatcataattgtatactcattttatctttcttttcatttatataagaatgatgtcagtgttttagctagaaagataagtgtaagctctaattacaagtactcttgtactattaaaatcccatatgcataattttgtaaaatcgacacgagatgcacaatctaagctttgaatcttgtacttcaaaatcagtgtgaatcttagtactttctccttgctaatatgccatagaggggtgatgaaagttaaaagggacctagctacccaagtggagtttaggattcctttgaattttaagtatttatcttgaaatagtaggttatgatcttctattctctccctcgaatacatacaaaacaaatgagttgacagtgaagaagacgtaccaccattacaaagacattattgaagaaatcctcaagcggttgaagaagctctgacgatgcatcaataaagtcatcaacatcaacacctgttagacaagataggtgatgtattaagattagttcaattcgccaaacattattttgttacctgatgagctttgaaataaaattgctctgcaaaaagttgaaaatgtaaattacaagtacctgtatatattttgcttctaactgacaagaaagcactccatagagctttctcctcttttgtctcaaagatagcctcatccacctgaattaacaaaccaaaaagcataaacagaactgtgactcatggcagtatttgttgaaactagatgagcaaatagtaaccatattttgcttttctttcggcacaatttagataacttgtggagcagcataaaagaaaacaagattgtagactcgttctaaaactttaatagaactaggagatccaaatatgcttgggatgatgtgtcattttagcaacactttctaatcacatttctagagagcaaggttgcttttaatcaaatgaaaaaaaaaaaccaagaacaagctaaagacatgcacgtgcataacttttaaacacaataaaatcagaaatggtacctcaatttcagtgtcaacattctttccacgaacaattctggtggggcgagaatatgcttctattaccttaggaaaaagcttcccttttgacaaggtgtccatctacaaccaatcatttggattatatcagattaaaaattgttagcgaatgaatttgtcaatgatagtattcaatgatttagtgcaccccaaaatctgatcctacactatgatctttgccccagtcttcatttaaagttaagaaaacataatctcttgcagaaatgcatggcatcagtcccttctgatactaatgaagaaatgcatggcatcaatcccatcagatactaatggggctctaaaactctcccagtggggaacttaataattcagacaaggacctatgaacaatagaaattcaacacccaaggagtttaagaagcccattaagtgtggtgcaatgcagatgtcaccattatagaatactgataggccttgggataaataaaaggggtagaatggtaattgtcatcgggtattgggagtatatataagtgagtaggaaaggaaaaaagtgtgaagaatttgagtttgttttgtaactgttttgggagagaaccaggctctcaaaatcctgggaattaatgaaaggcattctgctattttttatccaaacactactgctctctcttttctctgctattcaactaatttggataggtcgttcctatcaaatacttaaccttagaaaacttgcatcaagcaactaattacgaaaaaaaagaggaagcaaacatagtcacttactttaattgcagacttcgctgccagagaaggaatgtttgctcgctctgcgaggatggaacgaaccacttcagaacttatacccttatcaacctgtatccaaaaggtaaccaatgtacatgtaaatcatatcatggtccaaatatacgtctccccactcagaatgcatctatacactaaattagagagtgaatagaggcagctttccaattataaatcacaatttgaaaaatacttcatggtttatatccattttagattgagggggacggatgctgggggggaaatcagacagaggtaacagaagattggtattatagatatatctttatgcttcctttattatatacacaatagcttaaaaaaattcatttaattttcactcataagatttcaactccatgttcttgtagatgtatgggagaaacttgagtttttcagctttgagacacatcattaaacaattggggaataatattatttggttttggtttgaaatgaggtagcctatcgaaagcaacaaaaaaaaaattctgagctccaaaaaccagactttagatcagccactccagtactatgataagatttttttgttttaagaaacaaatcttaaataattaatatgtaatttaaaaaaaaaaatgcattatgtttagatattaataatggggctctaaaatggaaaacacagcagtggttaaaaagtgagagtttttacacaccaaaaattgctctaatcttcggatgacaaattgatgcgcctgcaagaaaataggaaaaaacaatgagtgagcaatcattggaattgaacagcatgaagcatgacaaataaacacagtaataagcagcaacaataaatttaggcataccgcttaaacttagggtgaaactaatctcctacaatgacaggctgagaagcaatgaccatcatattttaaaaactaatcaaaatggattcatcgagaagacaatttctaataggcagagtagtgcctacctctgtcctacttctttctaaaatatagttgccgaaagcattgaaattaaaactaacaatattgggtttcacaaagtatctacaatagtccatttctcacattatctacaatatcagcttctactttaaaggactgcacatctgcagcaagttgcaaagcttctttcaagttcagatctttatctttttcaaccaacacttggacctggagcaaaaggcaaaggatttgtaaagtgtttaattagtttacactcaaaatatcatgaatatcataactactttttttaaaaaaagagaaagggtccgcttgtcttggactggcccccactcaaatatgaatatcataactacttacaaggccatatgagattcttcgcaggccaaatgggtcattgctagagctaggctgacagccagcagcaaatagaccgactagactatctaatctgcacaggtattccacgttaagattagcaagcatctcatgtgtgattcacaaaattggcatttttcactccaataatttatccaagaaaaaccacaaataagtatttaaataattagctaataaactgattttattaggaataaatagaaccaaaagcttgtaagacatgtgagcgatcactaaagtttacaaataaaacatgttttgtaaacaatgaactgttaaaatcaaggattatagaaggaacctattaagtaggtattacctgtcagcaatagacagaacaatcccaacatcagtcttagggagtagatctccggagaatctaggaagagtgatctcaaacaaagcctctgatatctacaattaggaaatacaaaatcaaagaggattaatcctaggctacagatatacattaaatacatataaacaagaatattagtgataaacaacctgctccgaatagccatctctaagagcataatgacgggccattattccagaaagagacgtaaattctgtaacgactgcagtagcaagatcagacatagcaagtgatgcagcatctttggcaacttgaagcatattgttatcaattttcagggccaaacttagtttctcaaccatgttttgtacacgaatcatcttgtccagcattgttcctagcttctcctgtttaatatcacattttggaatataatatgagaagttagatacctttattctttgttttaatattcattcaacatttaagctatgagaaaatatgtttccacttaaaaaggaaaatagcttacatggaaaagaatccccttaagttgacttcggaattctgaaaatcttttccgcgtgtccaactcgtaaaagaattttgcatcttcatagcgcgctctgcacacagttattgatcgcgatttattggtaacacctcatggattactcagccacataatccaataatgttgaaggttaataatacaagccaatccatttcaataatcttgctttgaagtcaaattaagtaatccagcttctcaatgacccaaaacagaattaagatagtgaaacagtttaatcttttaaataagcaaataaatggttttatgaggtccaaaacttttggctgaaatatgaaatttcttttatattggaacaaacaaaagatgttgcgacacactgtttacctcagtacagcttcatttccttttctcactaccttttcatcaattactccatttgccacctgtgagaaaatgttaagcttttaccaccacaaaggcaacaataaagacattaagttgactcatatacaaagggtgagtaagtctcacagcaatgaagtaaggcaaaagctttccatttgcatcagttaaggcaaaatacttttgatgtttctgcataacctgcatcatgttaa

SEQ ID NO: 46993 - DNA, 2036 bp, Cannabis sativa
attactattttttgtttgtgttcacaaaccctttatatggattgtggactaataaataaaaggtttatcacgggtcttttttcttttaaaaatatttggatactatttccatgtgaatccaaaatattcttctctaaattaattaaatatatttatggtatagaatgattgagtactatacatctatacattattatttgctaaattggagcctttgaaacaaacaaatcatcatatgatgatattattgtactataaataaataccataatatatagattcatgacaaagtaaaaacaagttaattagtttaattatatatgtatgtatacatatatatatatattattaacacaagaaaatatttgaatgagtcgacagcccacgttggaagctaagataagactcgtcacccaataattaatatattttcattgaaccaaacactatatcatcattctcgtgaacataatcactttacatataacccataatataatcataaatattatgtactagtattatatacatgcatgagattcagactacacgtgtaatcaatcaatatatatatatatatatacacattctaccatcaatttatataagtttttcttttttctagaagaaatgggatcgagttaggtgaaaattccaaaattaattatatatatagcaaatacatgtaccaggattcaattaattagttaattaatgaataaatatcattttagataataatacgttgatgagtttaattttaattaaatttgcttcggttaaaaataaaatagaaattaaaccacaatttgttagcattagaataagaaagttttaaggttcatagttaggataaaaagtaaagttcgaccaaaaatcaggcacatggtatgattatgttctcttttatacaaattacagaatttaattaaatatcatttaacataatactaatttttctcaaatataagatttaaataatatttgtatataaatataaatataaagtgcagcaggatatactaagtgtgattattacatagacttttgaatcattcaaaacatagatctagttagaagaaacatctctatcgtcaaaccatctttttagtaaatagtaatatcataatatcattattcaatgtgcatttaatttgtaagtaaataaaagagattattatttttttatatatttttatttttttaaaaaaaagcataatcattaaaacgtgcttggaaaagagtaaacaagagtcagcaaatttcacactaatatgcaaattatttattttcaattaataaagagcaatataaatatatatttgttttttaagattattagaggcataaatgcaggaaaaagaatggaccatataagtactaataaaatcatttatgtttgcacttcccacatatcctatttattgactcgacagtacatcagtatcttttggatctcattaaaaaaaaaaaaaaaaaaaaaatcagtgcatgggggcatgacatactactggtcagctatagttcaagatcctatgtttaatttttaaataataaataaataaatatgcgtgcattatatactaaggcagccaattaattatgattgtacttgtgaaactttgaattaaaaattacctgattataatgttaatttatgttaacatgaaggagttaattgagtaaaaagaggagaaacctttttttatatagcttaggcaaaacgacataatcaattactgatgctgacatgtgtttgttagccataatgattatattatatagagttaattatgtatgtttaagcgtttacttttgcttaacaaaatattaacccaataatacaaattattttttgttaactaactcatcaatgattacacatagtaccacataaaaactatgtgtatttgttgaagaggaaactaaaaaatattagaatttgggttaacttttataaaaatattgttatacggaaattttttcaaaaatactgtatttttataaaacatcattaaaacacaaagcagtataac

SEQ ID NO: 46994 - DNA, 711 bp, Cannabis sativa
agagtatcgctagctaattgcaagtcgacacatttagaaggtgctaggcaccactggtgcccaataacaatgctctaatagtaatattatactttataatgatattaagcagtcaacatcacaagtatgccttttattaatttttattacttagactctagttgcctaagcttttaaaaattgtttttttggcttctcaaactccaaaaatatttttatttgtatttaaataattagtaaattttagcttcgaaatctaaaaaattcttctaaccgaatttaattttagtaacttttgcattgcacatataatttgagtaaaattttcaaacttcaccacactgcattgaatgtataagaaactatggtaggaggttgcttgaaaacattatctaaataaaaatatctctcctatcacaccaaataataaatatatatatatatatttatgggtagtagttaatatattaatttataaaatatcaaataggtagtatggtcttacctacgtactgattaagtagtgtcactaaataatgttgtaataataagtagtagttaatagcacaccaatatcaatattaacacataagatactgctagatatcaccaatatcttttaacatttctcttatttttttttagtaatttttaaaaatatcacatatccttagaaaaagactcaacaattattactttctcaataaaatt

SEQ ID NO: 46995 - DNA, 1023 bp, Cannabis sativa
tctgcaatctcagaaattactgaaagcaatcttttgctttattttttgtagatggagcaagtgccccatctgaagatgcaaccgctaatgaaggtataacagttagaaatcttgttggttagtactgatgctataagctttttattttctgcaatctcagaaattactgaagcaatcttttgctatatttttgtagatggagcaagtgttccatctgaagatgcaacccctaatgaatgagagactgccggctccgtttgaacattcatatcattagtatcattggctgttattctggtatcattgactttcatatgattaataaaccaacgatgtttgatattgcgtataagaaaatgcagataccaatgtttctgcaattgtgatctagaacaatatggatcgttacttctatgttccaagattttttttcgttagtggaacattacgaccccattttaacgaagagctatttgaaaagaatagaaagatatgcatttttcaatatgttcccctgtcttcatgcccgttatgttataggactaaatgattacatcacaaaaaactgtttcgtttacataaaaggttgttctttatgaggttggcaacgtgtgtatccctttccacgtttacatcattgttttcctatactatctattttctggtgctcatacataatcgtttttcaatagtctttttttttgtgaagcaccatgggctattttgatttccatctcatattctcatactatataattattatgtttttccttccattctaacattttatttgaatggttttttttttgttattttctttggtgcgtttatatatttatgtattgttaaaataaaaaaaggtgaatattttgtaaaatcatattttataaaattgttttcattttttaattaaaattaaaattaaaattttgaaaatcacttttaaaattttttaattagtttttttccttaatcaatattttagaaccctgactcggattcggattttgtaactgactcggg

SEQ ID NO: 46996 - DNA, 1290 bp, Cannabis sativa
ttattatggtataaatttagtacatcctatatttagcatgtgccaaatttggtctatactatacacaagtttaattttaggaaattattctccatatactatttttaacttttttttaaaaaaaaaaaaaaaatacgatttgggttttgcttcgttagttattatattagtttttgtgtggaattccgtaaaaatacataaacgtgatgttttactagaaagaaaatctaatagaaaatgactttggacatttatgtgtgaagcagatacttttcaaaaccctaattaatgatacaaaaaacaaataaacaaataacacaaattaaaactctttctttgtataaaattgcacattgccttcgagaaaactactagtggtgcctagcaccttcgtgtcagtatcactattaatgtaattaaatatcagatcctatataattcaatgaaataacttttaaagaatataactaatcaatcgcaaggtgacatgtctagaatgtgtcaatatcattactgatgcccgataacaatactcattgtcttccttacattctaaagttcaagcacgtttaagaaattaataagaagtttgaccaccaacactttaagagataaaatagcaggaaaattgagaacttatatctaaaaaatgtattatctcaaagtttggtgggaagaataatgcgttaatagcaggtagttacattaaattcaccatgctgtctttgttagacttggaccttgaaaatgtacgacgaggagtcggccatggccaattctgtcatgcaccatggctttcaatcaaagtagttatatatattatataattatcccataataattttaaattagaaatagataataaaagtcattatattgctttgctggcaagcagtatcatcatgggccatggctacatataaaaaacttcagcttttgaagccgaggggccaaggagaggaacttttaactaggagacaaaaaccatgatgttttcagattctaaatacaataatcccagatagatagttctaccaatatggcaatattagatagtaatgacgtttgctgacaatacaagatgaactctttttcaataatggaaattgtattcaaattccctttttcttttcctttgctatttgatcgacttggttgaagtgcatcaagttggtgaatgagtaagagacaacttcgattccaagagtgaatgaaacgaacttacaaatcagcattgagagttattgacattttcttttacaaaaacgaattatacagtctaatgattga

SEQ ID NO: 46997 - DNA, 867 bp, Cannabis sativa
gggagttttgttccagatataaatctaaagattttggttgccgatgtgttacctgatcaattaaacactaagatgctgagtgctgacattgtagcataaatgcccttcattgatgtttttttgatggtccagaccctgaatgatatgttgagggcaatgataacgtaagagatgaccaagatacagaagtccctactactgtagctttgaacttgactccactattgtaccaaatatcacccaggccatcgacacggaaaagaatgccccgtagagaaaatcgccaaaacacttagtactagtagtagtcgtccatgcaaaaccagtaatgatagaggaaccactgatggtagaggtcctaatgaagctagaagaaccagtgaagttagacagaccactgacggtacatgtcctattaatgctatagagaccaatgatgctagtggtcctaatgatactagaggaaccaatgagactggattcaacgatccatttttttctttgacaagttactataaattcaaggagaaaatgtttacaagagaagatattgaggattatagtcattatatatctatgggtagcacaccaggcggggagttacatgtaggaaagttttttagagacaaagaatatttaaaaatggttgttggcttgtatgcaatgaagaaagggtttgactacttcgttaggaagtccggtactactatttggtacattacatgtaaggatacagattgtgggtggagattaagagcgaagaagaacgtattttctaacatgtttaatgtgactacatttcgaggaaaagataactgtcaagcatcacctttgatagttgcgcatctaattaaggataagttcgca

SEQ ID NO: 46998 - DNA, 2061 bp, Cannabis sativa
atatctaaaataatattaacattatttataataatgatctctttttagatattgtgtgtggttgtaggtgatatatataatgtccattattacactagaatgtctaatggaatttttacctacttccatgcttgcctccaccttttttctctaaaacacatcactaaccactaatgatcattaattacttggaaccctagcttttaattatgtttaattaattattaatgggatcattataatttatttatttatttatttttgaatgtggtgatgtcaagtgttgggcttgtaaaatttgacaaaacatggtgatcatcatcatagaatataaatagtataatttattcctataatatttgatgaatatatatttatttatttattttattttatttcaaaaaagacattccaagatgtgtctttctctcactgctcactgttttttttttttaatttaattatttatttaattatttatttattattatttcttaaaaattgtctcttgttactccaatctcaatcgttgtctaatttgagtggaattcctaggtcaaatattatgtcgcatccaaattatttattaatattatcatgattaacatttacaagaaaaagatagtagggttgcactatagcaaattacaatttatttcattggtaatgtttgatgattttttatttaattttttttcctaaacaaaagacattttttggttatgatttatagttattattaatattaacctctctattttgattttttttttttctttataactataatagtatatatattataacttattgtgtgatggttaataataataattaaaaattataatattattatagcttttttttttttaaataaaaagatatgtaacttgattaacttaaattcaaaaaagcatcacgtaaattatttaaaattgtagacttcgattaggtacactcagcattaattaattaggaagttctaattaaatgatgagcaacacaattaataaatcgcttgatgaaaattaaaaaaatattattcaaattaaaaactctgaaatgcaaaacccaaaattaaagctatatttaacaaacttcaaatagcttagatcgtgaccaaattgttcgactccactgtcacatcatgcattcctgtttctttcaaccaactcaacaccttcttaattctgataacttcagcaaaaacaaaattaaccatgcaaccccatttaacttactgtccgagctataataaactgaccagaagaatttcacgctacccaatcatacctataactgtaatattattatagttagtgcatagaattgtggtccactcaacagtgcacgctatcaagttcaattgatttcccattataataattttttgccttatttggtgttatattaacttttacaaaataattaaaagtattattatatattaaaataatattgtgttatccttttaatttttcattaaaaaataaatatcactcttattctgcatgatgctcgaccagcttaagacaataatagtagggttgtttacattgtcggtggtgcgatttttgactattttttcaaaccaatctgcacatgcaattttttcaatttctcaaactgtacgcacatcgcgaaactaaaaaactgcataaactacactgcaaaaaatggtgtgatacggtttctacggtttggactatcatcaaataattaaactaccacaaatacaacaaaatttgagcaatacttgtcaaaaataccatatgacttgaaaataaatatgaaaaaaaatttcaagtttcaacaaaacaataattagtgtgcatggggctgtgccttcacatattggacttaaataaatataaaaattaatatttttataatatgcggtgtggtgtagtgcgatttgaactgcatattaacaatttaaaactgcaaatcacaccgcattgcgcgatttaggaaaaattcaaacagcgaccgcaccgcaccgcaaagaatttaaaaccgtgttttttttgcggtacaagtaatttgagcagtttgatgaac

SEQ ID NO: 46999 - DNA, 2097 bp, Cannabis sativa
ctcgccgcggcgactggagcttccaaaaacttatttttcttggctccacttgtcttttattgcacttttgcatcctgatgcctccattactccgagaaacctgaaaacatagaaaacaagcataattccgccctaaaatatcaaaaagtgaacataaattgatccaaaatataggctagaaataacctaacatgtacacgtaaacgatccagtatggcacttaatgcaccaaagatggatggaaatggtaaagtggtaacagaacatgaattttggaagttttaccgccaaaaaataagttttgggaattttgtcgcaattaactctttctaaataattttttaaatttattttttttaaatatatatatttatgtgaaccaataaaattgtgacgtgtacactatatttatgtagacaatacaacatagcacttaacaactaaatttggatgaaaactgtaattgctaatgttatcgtaattttaggagttttaccacaaaaaaaaaaatgttgagattaagtacaaacaaaataaaagtacggacgtgccattttttggttagtttgtgctattttaattggctattttgtaccattttttggctagtttgcagtatgttattggctcatttgtgcatggattcaacttcaaagagtgttattataaattttcacagataagtttttattttgctttttaattatatttttaataattttgaaagaatttctttctattatttttatcattgttgtcttatcatttatttgttaggctattgaattttgttatattttttgaaaatagttaattttaattaggatttgatttattaagtttaattaatatctcaaatccttgtttggtagctagtatagttctacctcggaagacttagctctaataattagacataacaaattagtttcgattcaattgggatttttgagtgaaaaaatgattcaaagataaattttattttgttataataataattgtgttttatccttaatttaaaaattcacaacattatcattgtatagtgtgctaatccacattttatatatctattagttttggtccaatggttgtttacatcagatgcctcatgaattgaaggtggtcttaagttgttttgtctaaatttccgatataacttggtctaatataagtcgctttgtctgtagtgacttatattctatctttgaatattcttggctagacaattaacttgttgattagaagtttttctatatcgacagttatcatagtgtgatttagatcactttttcaaaaaaaaaaaatatcgacgattttgcagcgattaaccctttaaataattaaaagtgagagtatattgtaaataataaaatgttgaacagttaaatgacatgacatatcaactcagtgtgtatcatcactaatatacatatagctcacacattggagaactcacttatttatatacaaatattattttaagaatgcatcttttcaatataaaagaaagccacatgatttacgtgaaaaactttatttataaattagctaagagcaagattataaacaaaagctaattccgttaaactagataataatctttgcataattaattgtataatagcaactaattaaatacaatttttctgttttatcaaattaattaagactaaatataataactaaagggtgtaactattctagcataataatgctgcaaagagctagctggaacaaacggtattgctcctcggggaggaggcggcggcgatcgctttctatctgtattttgggttgagaaggtctccaccatggacggtggcggtggctgagatgaaaacatggctctcgtcctcctgtgatcgtatgctcttattatcatctcaaacttttttttcatttgatcacttctaccaatattattattattattatcatctgttgatcaaacaaaattaaaagagtataattttattaaatcatatttatgaagtgaaagtatttaaaatgtgttatatattatttttgaaatagaatacaaaatttatatgatcaatatcaattcaattgttgattgaacagtagttaaaattc

SEQ ID NO: 47000 - DNA, 1562 bp, Cannabis sativa
gtttatcttagcataattgactttccctctagcaaaaagggcaatatcctcttggcctaagttagtctcgtgctggaagaaccctgggaagtaaattttactaagtatgtccactctaatgtgatgatgcgctggtggaatgaaatgattgggactccttacaatacaatctactttatctataaaatcgctgcaaggatatctaattggatctaaacttaaaaaatatgggtcaaatccctcttggtcagtattatctaagtctgctaacgagggagccctaattatatgaaagggtgtctcaccactaccggaagtgcttgttctcggagcaccctcatttgggactacgtccctaaagtgaatagtgagctctacagcttcactaaaatcctctggtaattctctcctccaatcagcaagcccttattcatcagccttcattgatttgaaggcctcttcaatggttatgaccgcaatggcctccttcacctcattaagatctcctctaattgattcctagacggtttctttcaccaacattagatcgatgttttgatgaggagtgatgaggccaaatttttgaaggttttcgatggtcaccagctgagccacctacaactccttaggcagtaacgacttgtaaaagttaattctctcctatagctccagagtcaagggtgattgaggaagataatctagcagacataaattacacataaagatataacaaaaggaagaaaaataaaagaagaaatttgggaaaagatgaaacacttacttgttgtattaaagtccaagctaagtgtggggactttcttcagcgggaagctggaagtgtagaaatagtagtcccagaagtcatgagtatactttgtagaattgatggggcaggctacacgcttggaatggggctccagcctgtagaaaccaacttttccttatggactatcatgggttgagatttaatcttgtagatgtacaagatgtctttcagagttggtgtagatttgttgtgttgagcacaaaggatctaccatcctaacaaaagatggcacacttggagaaggaatttgaaaggtgccactctggccacggcacataaatttgcaaagtaacacctaaatggaagatgggcacccatttatacgtgagcccagctccagatgacgaagcctccatccgcgcacttactgggcctctctccatgaacagagagcctgttctaatatacacctagaaaacttttgagccctcgttaggtctcgtacttccttaagtttttgtatattctgaatttgttgacgtgttggtccatctcccatggaattaaggaccaattttagagcatcctcttgctccaagacttcctcttccatttcgacctcttcttgctagatcttcttaggcataatttctataaaaagaagaaaacccaagtatttagctacccaaactacctaatataaaaaggaaacaatggattcctcccccataatttgcttggagaggtcctaatgaaacctaccatccagaagcaaaaacctttaggggtcattcat

SEQ ID NO: 47001 - DNA, 2159 bp, Cannabis sativa
tttgtcatttaacaaaacatagggtccaattggtaacttttgcaaaacagagggtccaaaatggtatttacccttaaattaattgtgtatgaattttggcgatcaattcaacataaagtttcagtttcttctatttgttctaatatttacaagaaatcatcttctaggatttccatttcccttttgggttacatttgtagggtacatatctgaagtaaatcaatgaatgacacagagtccattgtggcccatcttcacgtggatctttaacttctcttccatcaatttttgcaatgggaatcttcccaaaaaaaaagttaaaattgtttatatgggcaaaagttggtgtccccattttagaactttcctatcgtatttgagatgaggaaataaacataaatgacttttatcaattgttttaatctgattacgtaagattctcttgtataaataagtaccccaggacctaaattattatacattgaagttaacaaatgcttatacacaaacactagttttgtatatataatccaacgtttctatcatgacacaaaacatcgaaacgacatgaactctagctagctagctagtcaagtatagtcagctgacctcaccaatgtttctcattgcatatcaaaatgcttccgacccactttttctattcatatctcaaacaaaaataatataatatcttacctttttcttttgttggtaatgtaatatcttacctgatatttttttaatgctatcaaaatgatttaaagaacatttattgaaacaaacaaatatgaggagatttgattataaacttctattataattttttctcaatttttgtatttaaattattatacttacaatattattttttaaaatttaaaaaaataattgaataatatacaatattaacaacaatgtttctaatattctacttcaccaaacttgttcaaaaaatttcaaatttatttttaacaatgtacactatttagaatttcttaaaaaaactacagagatgatattgtgattataatgaatattatcatgaaaaaatgtaacaacaaaaaatgatttcgacatttatttttagacgtgaagattgagaaaaaagttgtaataagttatcgtaattaacactcctcaataaattatgtatggataaattgtcacaagtttagaattaagcaagaggttaataagttataaaaatataaataatatcaatataaacatcagtgtttatatttatacaagaatgcacaaaaatattaagataacatcttattttttttttcttttattttttaacttttgtgagagtttcacagtttatcattaaaaaaatatatattcacgataagaactcgtacgtcaactatatcgtgactagaaatcttgtattttaaacaaaaataattataaagaaatatagaagagattgtgtgagagggaaaattacagatttctttctcttcagattaattataatcttcgaaaaaggctcttcccctttctaatgaagttgaagggtatatatagtgggactttattggccttgtttataaaaggagttgtaagtggtccctatgggaccatgtactattatgatggcaggtggtaatgggatatgatgcattgtttgtcaggtgtcaggttgtactgacacgagcacgcgtccactacttgtaccaaatatatgcccttgtgtgtccactactttgtctaaacttttgcagacgtcgtgaccataccatttgatccttccttactttggtgtgcctttgattccctcaaaaattcatcgtcgtatctcaagatgcttgtagtttggttaagtctctctgatcttgtcatgcttagcaggagtactatgtggtatacctttgacaagcttgagtccgggtctatacaagtcgtatgaatgaaacctccaactatttggttccgtgtgatacgacatggaggctgaaagatggggatagatcgaaggggtagtgaggcccttgtcctgctatgagctaggatggcgcggcatgaggtgtcaacaaggcaagagccttgctgtggttagaagcggcgcgactctcgtcttgctcgggtgcatgtggcgcggtgtgaggaaagacgctcctgtgtggcacagtccaacactagggagagag

SEQ ID NO: 47002 - DNA, 713 bp, Cannabis sativa
aaaaaaaaaagcaaattctcaacggttttgagtttgtttgttatacatagatatatatttaaattaatctttttggtataaaatttattgtgctcattttgttgtttgaaataaaaaatagtaaagaaaatataatagcaaaaattggaaagtttttaatgtattatttaggttaacattagagaaagacaataaaaaagaaaaaacaaaaacaaatccacttgtaacattgaaatcataaataggtgaaatagatgaaaaatgataatatattatttatatttatatatggtaatttggctttgttttaatcgtagaagatgatagtaattttaaatatttctgtcataagaaaaaaaaatgaaaatgaaaacttgaatgtgagcttactaaaaattggagataaaaaaaactgctatacacattatacaaaaatgactatacatgtatttatagttgaaatagaaaaatttgaaagcaaaagtcctatcataagcaaacaaatcaaaatcatcagattcaaagtgaaaggctataaaaatactcttatgtataatgaagaatttgcaagtgtccataggttttagtaagaggaatttttaaaaatactatttttaatgttttatttataattttatgtcttaaacatttgtaaagttttaaatttagaaaaatatattttgttcaataaaaataataaaataattaactaa

SEQ ID NO: 47003 - DNA, 1715 bp, Cannabis sativa
attccattccatttcaaacgccacttatgtgttcacaaaattgtaagtaaactattccatcttttagatggaaaagaaaagtataatgttatttcgttgaataggactacactactaggcaaaatattgaatttgaatataaatcttcaactgcatacttacataaaagagtttaatgagtccaaaccgtaagaaggaataaaatttcaaaagaccaccaaaagagcagagttcttgagaatcaaaatgtgagcaatcatcaggtaatatccattgtagagttgggactataactgaatttaggataaatatactgcataaaagaaaaaggatgaacatctctaatcacttcactcatcacttaaaccaaacccaagtaaatagattaaacatatgtaaacaatttacaatcttcttaaggtttcaagctctaaagtagattaacaatgtacattctttaactaattcaatccaaacaattgacagtttcttcgtaccttcccaagaaaataaacccatttagaagaaaacattgaccagtgcgtatcaaaagcttccttgccctgccacataagttcaaaacaaacctgtttagtcttatcaaaaagcaagtctttcatttttttattttttttttctctctaattttctcgtcaaccaaacagaaaaagtaataagaaaagacaataattgagagacctgaagtagaaaacaataacccgatgaagacaacaagcttctctaaagccttcaatccaaagcatcgaagcttgtttcattttcgcaaccgaagctaatccaaacactttaattgcttccatttttgatcaaaactgaaagacttcgaaagcaacagaaaaaagatagagaagaaacaaaagcagtgaaattaccaatcaggacctcttataaacaaacccatattcggatccccgacccgacccgattcgaattaaaccatcgaataaaaatgccacgtggcggagtacgacgttgatttagctgtcgttttgtgtagtgaaattgtataaatagggttggctacgaagaaggtatgagagagagaatcgaattctggagaaagagagagaaatggcgaagcaagagaataaagagccgtgcaagaaggaagcttgtgatattcaagcttgtttatctaagaataattttctttctcaaaagtaagtctaataaatcataaatatatatacacatatttgtataaattatggttccttaatcaattttaatctgaaacgctatttcaatttgatttcagttttgcttacattgcttggtgagattgaaacttataaattgacttgttgaacttattttatgttacccaaaacttgttcttaatatgtcttaataccaaaatgggaatgggaatattgcatcaaattctttagatgatgataccaagctatactaggtgaaaacattggattttaaaacataaaacgagtaaaaagttctttgtctttaataattggattccaaattgaactttttatagcagagcaaaagtagagcattgttataaggtactactagtgtctaacagcaataataataattagttagtaatattctatatgtaaaacttaatatttaattataacaaaagtgtgatataaaatttttaagtggtattagatactactgatgccttttaacatttcacgtgtgatagttagatttttacaaaaaga

SEQ ID NO: 47004 - DNA, 1647 bp, Cannabis sativa
gcggttttttcgagttttttcgattttcagttttttcagtgttcggacggtcggtttactcggtttggtcggtttcttaaattttttgctcacccctagtttgatatgtacggtagcatgaaatttaatatgcgatcttacaacttatatctacatttctcattaatattgttgtttaagttctaatttttattaagggtttaatatatattgtttcaggcatgtagatataaattttatttttccttacatggttgatatattaaacttaattaagattagaacttaattggtaatgttaataagaaatgggttacaaaatttaaattgttacagaacatattagttacttgatatcaagtttgctgacttttgctgaataattagaattttggatattcatatagtttaaatttatctggggtattcgttggcgtggtcgctctagattgaagagggagttgtagattcatccaagctaatttattggtagaatggagtatggaatcttactatgccaccaaaggtgaaagtttttgtttggcgtatgttctatttggctttaccagtagcaacacaacttatctcccagaaagtttaggtacctcgttactgttcatgttgcgaagaagaatcgaaaacttctgagcatgctctattttcctgctctggtttgactctagtatggcatcggttaggggtgtggtcggtgctccgtcgatgtgtgtatagacgaatctaggaaattctcttatttttctttgacaggctatcccgtgaggcttttgaattgatgatgacaaccctttggtggctgtggtatgatcgaaattcaattttatttggcaataagcagtccaaattagatgttattccagagttagcccataattaaccatttgtcgaagtttaaggagtatggtcggcaaggccttcatttggtattgggtcttgcaaacccagttgtaagccgacctaatcgatggatgtcacctcctcctgatttctttgctctaacgactgatgcttcggtggttctgaggaggggctttgtcggtttagggggagtgatacgagatacagaagggtgtggtttagttggcgtgatcatcatgtgtggtcgatgatttttttgctaatgtggcgaaactgcttgccattcgtttgggcttgatgtttgcgcatcaatttagttttagtatctccattactaatagtgattctgctgtgacaattggttggattaataagtttcacacaaattttatttttcaatcaattttattagatatttattctttattagctgttggtggtggtagttcttcaacaccattctgtgattggtgaatagtattgcccacacacgaccaacctttgttactagtgtaagagattgggtttaaatagatatgcttgtacattgtaatagtagatttatcttaataaattatgtctttctttaagaaaaaaaactttaaagaaaagtaaaagtcacaaattatttaacatatatacaaactatttaaattttatcgaagtttcaaaatacaaatttaaatcatcgcactaatggtttagtttgatttatttggtttcggtttaaaattattttgctttcctacatctaaaaaataagacaatttt

SEQ ID NO: 47005 - DNA, 746 bp, Cannabis sativa
agtgagacgttattttatctctcaaattaattagcattcctaatcttaatcgagaacttcaaattttgggcaacaataactatcaatgtgttctttaccaattacaattttaattggtaataatattaacttatttgtacattggagttttgcatgactccataattagaagaaaaaaatatcccctattatagaattatataagaatttcatcatattttaatttatatataaatgacaaattaaaatttataaaaatcaaattattaagtttttaaccgtgtcgtgcctacgacttagtctgttcacgttatgttttgggcttctcgtgtcttattgtgctcatgtccatgtcttatcaagcttggcccaagtctttttttttcttttttgttcatgcctcaagggcttccattgatttcatgttgtgccaaaattttttgcatgtattcacaacttttgtcattcctaccatattttaaaaagttaaatattaaatataaaactgtaacatcttaaaaatattagatatacttaccatggaagaaaaaaattatcaaattataacaataacttctctcataaaaaattaaactagtgtttagattattcattattgagcattgttattaagcattaataatgtccaacatcatcataatactagtatcttgggaagttaataatttttgataataattattaataaattaaaatatataataaccgatatttaattacaatac

SEQ ID NO: 47006 - DNA, 1528 bp, Cannabis sativa
cataattttgtagaattgggcgtagaataaaagcccaaagtttaaattgaaggaaacccaactgatcaagtgaagggtagctatccataggcaaagacatcaagcatgtgggtacaatactactagtctactactactcaatatcatgatccttccaaatatgtacgttgattatgctttaagggcaacccaaacccaaaccccataatcccttccacgtaaagcaccatctattctatatatatctacttgatacacacttagcaaaactctctccattttcatcttccaaatacaatcaaatcattccaatttgggctgactcatttggcccttaaattcaaataagccaatccaaataacttctttaaggaccatcctctttccaattctctaacaaaattaaaccttttatgtatgtgtgttattatatatgtctccttcatcccaacagcaccaagggtcccccttcgctttcccctcacccccactccaaatcactctttaaccatttaaaatgctcattcatttctcaacgttttttactacaaaaagttcaagtatggaccagctagaagaacaacacaccaaatcagatcccctactaggttcacacacactcatacacacatatgaatttttctaagctttcccatttgtgtagttttttatttaatatttttttttatgtgtgtgtgtttttgcagaatattcaggctttttatcgaccgagtctctggactatttcagcaataatgagaaggaaatttcttggcctgatgacccaccggtaattagctaagacatatatatatattttgaataaattcgtgttaataatagatagcaaatcagttaaacctctcggtcggtttaggatttagggtttacagagataattgaaagtggaatacaagcaaacctcttgtggtaaaaactcacttagggcacaacaaaattacaacatctattaatattagtaaaaatacaactaacaaatgatggagaagacttagaacaaaaggaagctaagacaaatttattaaatcggacgtagtatatactacaaattaaacttctgttattatactaggaaggaagtgtgtaattacaataatttttttttctatatatattatatttaatttatagagaatttacataagtacgtatgaatatattaaatgtttaaagtgtagatgatgaaggtaaaggcagaaaacaaattgttgagggaagaagatcatgatgaagagatcatgaaaattcggcacgagctggagtcggatgtggagagagacttggaagaagagattaaggaaggaatttaccatcttgccctccgtttgcataggcttcatcagcaccggaaacagaggactaaaagagaatctaaaaataataataatattggagggagattattcgaaaaggaagagacttattctgaggtgaatataaacataaaaatggaaggagggaccaagatacaaattaaagagaccaagaaaaatgacaataaaattac

SEQ ID NO: 47007 - DNA, 1243 bp, Cannabis sativa
acttcgacactacctgcttttcttcgccatgagagaaggcagagagagtcattactaaagaaatatggaccaaattcaaatcaaaccaggttaggactccttcgacccatttgaattttactgaatcaatgaagattggggatcaagtagttgctaaacttgacatagataaagtagaaacagaaccaacttactgggaaaactctattgtttgcattgttttgggagcaaatcctccttttagggtgtttgaggggtttatcaagagagttcggggtaacttggggattgagaagattgttagtatgcactcggggttcactttggtgagttttagagataaagaaactagagttctcataatgaagacagtagttattcactttgttaagaaacctattgtgcttaggccatggtccactgatatggattctatttgtactgtgaaattgataccaatttagattcgattgaattgtcttggactgcaatattggggaaggataaccttagtgctcatgtgagtacaattggaaacccaatcattgtggacaaggttacttttagtagaactatggtgaagtatgctaggatgttagtggatatggaaatatccgaccaacctcctaaaaccatatctttcattaatgaaaggaaacaacttgtagaacagagtgtggaataagaatggctcccctcaaggtgtgcgacttgtgacttcttgggacacatagtagcaaattgcaacaaaggaaaaggtgtagtgtggaagaagaaggggattaaagaaggaaaaatagaggagattgtggataatattgctgaggttaatctggctgataagacagcagaagtatctgataagaaggaggaagaaaaggaagaggagagtgttaagactaatctaaagcttaatgtggagagtttgacagaagataaaacaactgtgtgtaaagagggagttgttaaagaccataatttgtgtaatgctaatgaggaaaattggataacacctaaaaggaggggtttcaaacagacgagagaggtttctaaagtggctgctaccaacaaagggtatgtagttcttgaagacaatggtggtagggtgctagtgacaaaatcaaattagttttttttatggatgtttgaaatatattgggattgaagtgaggggaatgaataaaaaggagaagaaaaagtcgattctggaagtttgtaaggagaatagggtgggatttggggc

SEQ ID NO: 47008 - DNA, 2662 bp, Cannabis sativa
tttttttaatacaatatttattaaaaaaatttgaatgcgagcattgagtttattgagtttataaagtatatatacttttttttaacaaaaaatacataaaaaatatgagaataaaaatatcacaacaacaataaataaaataatatacacataataagtaggggttataaaatgaatacactgattatttttttcttcttcattattttagtaaatgttcaaaagaaaaaattacaaaatagaatattaatataactatattaaatttatgaattgttaaattattcttattttcagtagtttctatataatttttacatattaaaaaaatttataattttgtaatcatcattattaatattatgtaaaaaacaaatatgaacatataaaaaattaaaaaaaatttagtgactaacaattaataataatatattgtatgtttagaaggtaatgaatatatagtcatatctgaatcctaatcttttatataacaaataaataaaaatatactttagtaaatttcataaatggataatgaaaaagaattatatcatcttgattttctgagacatgatgaatttgtatctaaaaaatcaatatatatgtcaaatacgtaattcattttattatggttgaagattacttaaaacaaatatcatgatcaaaagtacataaatattctcacctatataatagtatgtttaaaaatatgtcaaaaaaatatgaaacctaaaaaataattatgtatagattgacaaaatgataatatttcctctcatacatgcaagagattgaaggatatgaagaacaatgtaattaaatgaaatcaaatttaaatgcatatatatatattataatgatagttttagtgataatcttccaaagcaaaagaaaaattacctaatagttttgttgtaaaatattgtcattgaagataacatgttaattcatagttattgccaagtaatcgttaaatagaaaatcaataattaacaaaatatttaacaaaaacttgaaaataatcattgttgccaaataatatgaaaataaaacataaagaattaaggagagagtgagagacaaaagaggataacaaaaacttgaaatttatgagtgaacacaaaacttcaatttgagtttggaccactatatatataaacataataacctatacaaagaatacaaatagtttaattttttaatagaagaatacaactcgtattgataattaatattagaatattaatataaagataaatgaaaaaagtattatataaagaataaaaatagtttttttaaaaatttttatttttgataataataaaaattaaataataatagtaataacgagaaaattgagaactaagaaaataagtaagaaaattcatgtatgaggtcacatttagatggaaaaataaatttttagctaaataaaataaataaataacaaaatttgagaaaaataaaaaataagagataaatactttaaggaaaaaaatacgttcaatttataatataaattattttaaaattaatatatcatatattcataattagatatagtcataagtttatccattaacaataattgatatattattaatgtggatgtgagttatattattataatactagcttgtttttgatcaactcctcatggggtggttgtatggctccatagctgaaggaatagcttctgaagtcatcggttgtcaatcagcctatgctctttagaatgcacttgaagaactctatggagctcactctcgaggcaacatggatgacatcaggatcaagatccaaactacttacaagggatctcaatcaatggctgagtatctgaaaatgaagaggatgtgggtagaatatctatctattgttgtgcttattgaatctcaaccccatacttcctggcaacaacttcaaagtaccttgctaagttttgatggtagacttgagagactcaatgtcatatctaccaacaacaagcttgtgggaaatgcttcttcaaaccttgcacacaagccattaggatcaggaaatatgcacaatccatgaagctataagaggcaaaaccctcatcagaacagtggtaggggaaatcagaaccatactatgagaggtggtggatacagaggaagaggtcgaggtggaagaggaaatgggtctaaaccaacatgcaaatatggccactcagtagttgtgtgttacaacaagtatgatgagagttacatgggccataaacccaacacagagactactcaacacaaacaatactcagccataattgctacacctgagatgctcaatgatgacatctggtatgctgatagtggagaaggaaatcacctaacctataatccagataggatgcaaactaaaactaaatatgggggtaaggaaataatcactattggagatggctctcagctgcctatctcacacattagtactggtatcatcaagtccaattcatacatcccattattactacataacatgctcatgttcctagtatttcaaaaaaattaattagtgtttcaaagttaatagcagttaacaatgtctcagttaaatttttctctgattgttgttgtaatgatcgctttagtagtttaaattagtaaagacaattagcactaatttcagttatttttataat

SEQ ID NO: 47009 - DNA, 1182 bp, Cannabis sativa
tggtattattgatattactttttttttaagaccaaattcaatctttatctttctatctttagaatatctattctctcaaaacagatctacttctttttctacttttaataaacgggtccgagcttttttcagttattctagggcccttcgacacaattttttttaaatttcaaatagtcttcaagatcttttattttcaattacaagtaatctcaccacaatttttcccttttcctttttttttttttttgagtttttttggcaaatatcactacaatttatggaacagattaacaatcttttttataattgatagctagccataccttttaactcctatattcttactatattcatgtcccacctctctcccatcctttgaaacctctactgttttccctcatctttgtctaaccgttcattgtaattgatcattatgtcgaaatacgtataattgtgttgtcgtttgcgtatttcgatgaaataattatgcttgataatcttttctcgatcttgctctcttattttattattttttttaatatattttctatactctcatcttaatctaattaaaagaaagttttcattttttaatatatttacttttcttccaaaaattcaaattcttaacaaattaagagctaaaatgagacattcattaatcaaataaagttgtatacatttatatttatggaactacaagggaggctagaacatatctgcatggttagaaactctggcactcttagccaaccatctcccatgttatgtatggatatgatattgtcttcatcattaatgaaattaaaattacattggcgctgtaaatttactgcagagctcactaagacttggggctgatcctgtaagttttttaactttaggaaaaaattaaattattaggcccaaatatatggtatttttaagagatcaataacttgtaattttttggggtccaaatatgggagcttggcccaggcttgacatgccaaccgggacatgctaagacatccatagaaatgacccatattgcttccaatttggatagcaagtaatccgtgtacatatatatagggaattttacaaaaatactgcttttggaccaaaactttacatttatactgggacacggcaaaaacaacatttatactgccccagcccaatttcattacttttgta

SEQ ID NO: 47010 - DNA, 1382 bp, Cannabis sativa
tttttttttttttttttatgatctaactttgtaaaattttcacatttaaaaatattatagttttttatatgtaaattgtaaataaagtttttatttgtttaataattaattattattttttttttttacaaatttaacattcgttaaaaacgtaaacttttttattaatgtatatagtttagaattttttaagaccatgcaacgcccgatttttatttcctagttgattagcaataccgaagaagttcttcattagtatacatgaaaatcaactataaatatataacatatttagaatcaaagatgccatcaatttgtaaaaatataatcttaaactagtgttatcatgataataacacaataattagcctacttgttcttaatttgactgcattcacacacagcatgcgcatttgcataatcaacaggacaatttcttttagaagtagacaataacatttttacaatgagattgaatacagaggagttgtacaatcgaaaaaaacactttaggaatctgaagatgctatatggacacaaattgcattagatgcaatagaattaattgtagcagcaatcttggccgatcagaattcattcttttattaagagcggtacgacctcaagattcaccgatgctcctcctctcatcattaaaatcgaaagaatagcgagatccaaacaatcgaacgatcagtaccaagaaaacttggttcaagattctctccaaaatcgctagagatgcctcaaatgtgatttggttcgagtcgccacaaactttctacttccatctctggaacgcatgggaggtgctggagactgacgaagggagatgaccgacaacatgtttaggccctagtagttatggaggtgatggcttgaggaagaagacgaggggtagagagacgagaaaaacacgagtctatttttttttgaaaaaaataattataaatttaagaaaacgttaaaatgtagtatttaaaataaagttctacaagaatatagtataaaaaagtccataaaaatatatataaaaataaaatcaaaatccacaacccaaatgcattaaaaaatataaaaaattacattgtctatctattttactttatttgttttaatttttaccttcatcttcatattctttaagataaactcacttttgtagatgatattctcattagacccattaggttaatgtaaattatttaattatatgctacacttaaatagcgagtgagggtatattatgcaaatactcataaaagtaggtatattttaataaaacataatatgaaaatatttttgattaatggatacaaaaaaaacaaaaacaagagacattctccactttatccctaaaaaatatgccatatagaataaac

SEQ ID NO: 47011 - DNA, 1981 bp, Cannabis sativa
  modified_base (771)..(773): a, c, t, g, unknown or other
tgcaataataaatttttttaattaagtaatgagttgtatcatgcaaatttgaaggggagataaagaagattttttgtaaaaggaagcattaaattatacatttttatggacaaaaaggcttttcccatattggattacaatagtattcagtaatctttgaaacttacttttacaagctcccaaattttgtcccttctgaattgctcaatacaatcccatgtttgaacattcaaaggagcatttgaagtatttttcaaaagcattccaagttgagtaatgaaatattgagcaattttctctataggttttcccatcttgaattgtacaggtactttcttatttttgaattcttctaacaccttaagattgcgagtttcagaacaaacttttttcttgactgtatctattttttgaaatagcacatgttatttaatataaataacctaaaatgatgaacaaaaaaatttgaatattaatttttcccataccatcattttttcccagtgtgttttgttcgtctccacgtacagttggtgaagaagtaatactctctcttgtagattgttctacatgtgaagctccatctcttgttggaaagacttcacacatacgctttcttttagatttctttatcatgcttcctgtaatatacaaaaacatataaagaaaatgaaatacataatatactaaagtaaaactaataattttaaaaatttgtgttgaaacatgaataaatatatataccttaacagtctctctctctctctctcnnnctctctctctctctctcttcaagtggtatgagagcctcccgtggtcggtgtcatcaatgactagtggagcatcccgttgtcgttgtagtgtggtttcttttttctatctgtgtataatatatagtaatatattttttatttttagtcttttgttacctcaactcaaatctaccacgagacatgttctttcatcaagtatgagaaacagagagattggagaagaagaagagagaagtagagttaatactctgttattcctctgttacgttcttattaattgaattagaaaatgaattacaatgatttatatattgaatagctaaccgacatttaaccaaggtgtaaaagaggattaggcagttgtaacagtagacaactatcataactaacaactaacaaatatcctaacttcctaatcttgacagcccccttcaagatggagtgtatatattagatacattcatcttggctacaatgttttgaaaaggagaaggaagtaaagccttggtgaaaatgtccgctaagttttgttgagattgaacgtgaagtaacttgagtgtcccttgctaaatttttttccgaatgaagtggtaatcgatttcaacatgctctgtgcgttcatggtaaacggtgttgtcacagtatagagtcgtaggcttgttgagggagacgccaaaatccttcagtagagctatgaaccaagttacttcagacgttgcattggccattgcacggtattcggcttcggcagaagatcgagaaacaacttgttgtttttttgacttccaagataaaagggcctggctaagaaacacacaatagccggatatggatcgacgtgtgtcttggcatgtgccccaatctgcaaaaaaagaaagttgtacatttgaaggagataaactagtttcagcgaaggctaaaacatgtggggtggtgttggatggaaaaagaggccttgtccaggagtgcgtttatgatattgtaggattcaatgagtagcttggagatgacgcactcttggacatgttaagaattgactgagatgattgacggcataagaaatatctggccgtgtaatcgtgagatatatgagcttcccaattaagcttctataggtagtaggatcgggaagaacctttcctttgtccttgttgagtttaaggttaggttccattagagtggaagctagtttagctccaaggtaacct

SEQ ID NO: 47012 - DNA, 2208 bp, Cannabis sativa
  modified_base (1482)..(1482): a, c, t, g, unknown or other
aattgtggcaaacctggacacttaaacgataagtgctactttctccacgattttccacccggttatggagataaaaagaaacaagaaaagggcaaagctaaggcaaacaatacctcttccagcaaccccaaatctgagttagaaggaccatctaccactgctgatctcacttctcaatgtcagcaattaatttccctcctcagtcaacaactaaacaatcataccaatgctgatctcaataccctgcctgctgcagcatccaatcttgcaggtaaaatttctaattctaatcctataccttggataattgatagtggtgctacacaccacatgtgttctaatattgcatgtttttctatattcacacctatcccattccctaagaatgtgctgctactcaatggacagcaagttactgttagaaatattggaactgtccatatcaactcccacattactttccataaagtactctacttaccaaatttcaaattgaacctgttttctgtttctgcatatatggtcgaaacacctaattctatttggtttcatgatgattcttgtttaattcaggatccttctcggaatgtggtgattgggacatctgaaaaacatggaaatttgtacttgcttcaacaagtccaactccctactgcagctgccactatttcctctttttttttttccaataaaacaagtgtaaaccaatggcacaatcgccttggacatccttcaatgtgtatttcaaatttcttcaataaaaaaaaaacaagatttcacataagagttcttcttcatattgccatatttgtcatttggctaaacaaaaacatttaccctttatttcaaatcataatttttccaaaagaatatttgatttgattcatatggatatttggggtccatttcacatcactagcatagaaggatataaatacttccttactatagtggatgacaaatctcggtttacttggacttatttactaaagaataaatcggatgtccaaaatgtgattccaaattttttccacatggtttgcactcaatattcaacaaatattaaggccatccgctctgataatgcaaaagaattcaatttacattctttctttgcatctaagggaataattcattaccattcttgtgtggaacggcctcaacaaaattctgttgttgaaaggaaacaccaacacattctcaatgttgctcgtgctctaggtttccaatcaaacttaccattagtttattggccatacctagttcaaacggccacttacctaataaatagaactccttctaaattgttcaaaggtatgacttcttttcaaatgctccatggcactaatcctaaatatgatcatttaagaagttttgggtctcttgcctatggctccactctcaactcaaaaagacacaaatttacaccaagaagtagagcttcggttttcattggctatccccaaggcatgaaagcatacntacttcttgatattgaaacaaaacaaatttatacttctcgggatgtagtcttctatgaaacaatatttccattgttttcccaaacatcctcttctgagatcaacacattatttcctgatgtagtgcttcccactacaaaacttgtgcaacaaacaagcgttcaccagactgtgaaccataactacaaggtctctggttgcccatttgcaccaatttctggtgcacacgacattgcaagttccaggagcaatactcattcacatcaccctgctgattcacaaaatactgctcttataccagcagctcccacaccagcaacttcatacagttctggccccaaatcagcaaccacacctggtattcacacaccagataaaaattcccaacagaccctagtttccaaccctgctggcacacaaattcccacaccaggtgcttctaatacagtccctacattgggcaccactgattttattacagcagtatctaaaccagcccccatacctcatgttcctgacccttctataacatctacaagggctggtagaaccattacacaaccaaaacatctcacagattatgtctgtcatgcttcttctactaatcatcccattgaaccctttctctcttaccttaaattgcatcctcaattcagagcagctgtacttgcagcctattctgaagtcgaaccacaaagctatgccgaagcctcccagttttgacatt

SEQ ID NO: 47013 - DNA, 1012 bp, Cannabis sativa
tcgaggttaagattcataaatttttactttaaaaatttttatttttagtcacaacaaaatttgtgactaaaaacaaaaacaaaaaattgtaattaattataaatcatcgatcgagcagcaaaaattctaaatagtctaatttattactatctaaaagttttttttatttataacttgcctaaattaagatttctttttgacaagtatcacttaagaatatacgatgatgacatcactaacggcgcatgattctcttcaaccagaatagctcattgtttagccaaagtgcacgcttgtcgacccatgggctataatataaaagccacgtacaataaaacaacccttagaaatttacacaattaataaagctatagcgaaaaccaatgaccttttgagctcgtaaaaaatacataaaacacttacatacataaattaaattaaaaaacgaattaacacactaaataataaaaaaaaattatagactaaagtattaagagcactcccatctcatatctcatgaactaaaataattaaaaaaggtaaaaatatataaaaaaaaatattgttaaaaataggctccatcaagtgagctaaaatagctcaatattttagatcatgaatagagagaagcactatttattcttcaaatattattttaatagtttctctatattttttaattcttttgcatttaatatttttggtttatataataaatatattaaaaaattaaatatataaatgatatatagaaaaataaaaaatttgatgtatgatattgttgacactgtttcttgtcaatagatctagcaagatcgtacacgagcaagatgaacacaagtaattatcaatcaaagtaaatcggtttgtagaaaacaaaattaacgagatgaacacaatgttttataatggttcacccctttcagcgataataggttagtcaactttgagttttattaatctcaatgtttaagaacaattctccagagttatgttctctaaaaattcagtt

SEQ ID NO: 47014 - DNA, 1661 bp, Cannabis sativa
  modified_base (828)..(830): a, c, t, g, unknown or other
ctttgactttgaatctgtagtgggggtggatttgatgatgggctgtctgagattgaatgtgagcttcttctagggttcgccattttcaaacataacaatctctctctcttacaaattacaatctttatatataaaaaaaaataaaaagcaaaaaatctattaaatattattttagattttttttttgaaaataagtttttcattaatgaaaaaaatcaattgttacatgagcactaataaatgagggataagtatttgcccatattaaaattcctaatttagacataatagatttaactagtgcatgagttatatcccagaacaagaaccaccaccaccaccagcaacaattaatattattttagattttaaaaatttgaaaaagtattaattgggttctttgttttattaaaggttaattaagatttttgaagttcaaatttaaaaagaacattgttattgagtactagtggtgtctaatactttctagacgtatcatttcatgattggttaatgataccatctaaaaattattacattaatagcacgtttactacacaatatttataatcggaataaattaatggagaaatataacggaacaaatgaagaataatcagaatcaatatttataatatgttgtttgctaaaattatttagaaattgaataataataatttagcttgtttactttatcttaaaacgtaatcgaaatacttaaattaactaaattaccattttgagttaaattaaaatatatggtagttattttgtaagacatattttaaaggacaaaattgtcgttatatatttaatattaaaaaatannntaaaaataaataaaagtcattaccattttggaaaatacaggtccattttatcatttaacaaaacaggaagttcaatcaataacttttagaaaacacaggtccaaaatagtatttaaccaatattctttaaaagaagatttaaaactagtgcaaaaagaacaacataagtaaagctaaaattaaaagttaaacgaagtaaagaactaaagaacactcttggctaagagagaaaaagacaactatgtttgttattatagttatcaccaaaaatcattgcatgagcaaatcccatccttgaaatgatgatatctattagcatctctaacaacaatctccctcccaacaatactacttatgaatttcaaaactgtatgacaatctccacaaacccgaaggttcttcactacccgaatcactgtccccgggacagccttaagcaacccgaaagctacagccaacctctcgctatgcgaaaacagttgcctttccttctcttgctgttccatgtcatgtaaaacagagttagtgtcaggaatgtaacctcttctcctcatttcttcatctagttccttaagcaaaccgaaaatctcatctcttatcggatcaagatatgtctctccagcataaaaaactcgcctttcttttccaaactcgatggagctataccccggtttcttcttaacatctagagaagtcattagctttctcacttttgacacattttcccacttattagctcctgcatagacattagataacattatgtaagtagaagggtctttgagtttagtactcgaaattcgattcgctatcctaatcgccatctgggta

SEQ ID NO: 47015 - DNA, 2197 bp, Cannabis sativa
tcaaaattaaattaaattattataaaacataagctgattattctgtaaattttcatttttatttttatttgttgatttatttaagttgggttcgggtccaaagtcgggatcaagggtcaggtccgggtccaggatcgagactatggtatgggtttggattccaaggtttaggttggagtgagagtccaaaatatttattaaaaaaaaaattgttcaaaaaaattttaaaattggtttttttttttcaaaatttttaaaattttaattttcaattaaaaaattaaaaagtgaaaacaattttataccacttgattttagaaaatattttcacttttttaattttaaaaataataaattaattaaaaaaatattactaaatgcactcatagaaaaaataaataagactttgaatgtaaatttagtatttgaatttggaaaggttttcttttggtagatctctttcttgaaggaatttatttataagactgtatttgtctaaattagtttaataatgcataaacttgattagggtgtgtttattgataagaaaaatgatgtaccttggaaaacattccattccattcttttctgtttaacaataatattcattttttctccaaaatcaataataatttcactaaaattttatttatttatacattgggtatagcaagttagaccttgttcttcttttcttataagagcatgtttagaaagtcgtatgaaaatttgaaattggatgtaattagaggtaattacacagtttgatgtatttatataactacatatttacactgtaaccatgtaattagagattataattgggaggcctcaattactctttccaattctcttacttctaatgagaattggatgtaattacactgtataattacatactaaaaataattttaattattaattaatatgatttagtcttttatttttattttcttttctcttatacataattttttttatcatgtgtctgatactattttagaatattatttagtgtgatttttcttgtattttttgtaacaaaaacttaatatacaaatatatgatatatgattttttttttttttaaaaaaaaataacattattttttgagttctcttttaaattagatatttaacagatttattcatgatttagatgaaatacttaaatttatttattattaattttcaatcaacataaaaatgacaaatatatactcaaacttttaagattggaaaactatttaccaaatggaatagctcaagaaaaattaaatagtcttaatacacaaaaattattttaaatatttattataaaattattatgaaatttgagtttattttaggaagagtttttgatttattttaaatattattgatagataaatttattttaaatctttgttataaaataataataattttatattataatattacttgttaacatgacaataaaaatttatatgtaattactacttgacatctaaacacactttgtattttaaaatacaatatagtttactatacattgtatagtaattataaagttactttcaaatacaccttaaatttttcttcaagcttgtagttttgacgcaaacacatcgctaaaactaacaatattaaaaattcacaaaacttatttctacctaaaataaaattacaattagtgacgcatatatcactatattttttttcttcccaaaatgagacctatttttttaattaaaaaaatgagtcttaatttaaacaattaaaaaaaactattaattagtcaaagaagttttttgtgtttaattagggtttgtttataggtaaggaaactcaaatggacacaagtctcttcgagtaataaagtaataagattggccaatccattcactaagaaataatgaatgtggtttgtttgtccaaccttatcccaagtgatgcaatagctgtctttcttaatataatatttcgtgttcttttaggaacgattaacattgcagaatccatatatctttaaacaattcttatgaatatagtccaataaaatatcagtcacataatcatatatatatttgtcttgatgtgatcatatatataattaaatcctactaaaactaaaatataaacagtcgaattagaatgattgttgtcggatagtaatgtgtgtgaagaaaagcatagaacctttgctttgctttcca

SEQ ID NO: 47016 - DNA, 2900 bp, Cannabis sativa
gtcattaaactggacacaaacacatcagtaagtgcagtatgatctgattccaccatgggattgttgtcattatttaaccacggctcaccaagggctggaatagaacagccactccctacacaccatctaatgcccctcttcaatagatcctgagcttcaataatgcttcgccacacgaagctcaggttagcgccaatttaggcagataaaaacgaaccatgtggaaagtatcgagctttgaacaccttcgaaacaagtgagtttggctttgtcaaaattctccaaccttgcttccctagtagtgcaagattaaagtcgtgcaagtcacgaaagcccattccaccaccacttttgtgtaagcttatcccatgacatccaatgaactccttttcgatcccccttagattgccaccagaatttattcataagcttctcaatatctcgagtgatatcaagaggtaggaggaacacactcatggcataacttggtagtgattgaaccacagccttcacaagcacttctttcccagcacgtgacagaaacctgccttcccaactttgaaggcgcttcctcacttttgtttttaagtagcccaatacagctattttgttgcaactcatagtgctaggcaatcccaagtaaaagctatcctcagttgctgcattcattctcaatatagagcacaattgattgcgaacattaggctccgcattggtgctaaagaaaatcgaggacttggcaaaattgacttgttggcccgaagctctttcaaaattttgaagcaactcaagaattctccttgcctcatccaccgtagcttgcaataaagtagctgtcatcagcaaacagcatatgtgaaacccaaggtgccccatttgcaactttgcaaccatagattcagccattattctcatacttacgcaagattgcagaaagaccctccgcacaaagaataaacaagtatggggataaaggatcaccttgtcttatccctctggttgggacaataggaccgatttcgtgattgccatggatgactgtatatgtagctgaagcaacacaactcataatgagtttaacccatctttccaaaaaccccatccttctaagaatagcttcaaggaaagaccattcgatgcggtcgtatgccttgctcatatcaatttttaaagccatgaagctggtcttgcctaaccttttccgttttaaataatgaagaacttcaaatgagataagcacattgtcagaaattaaacgaccggaaataaaggtgctttgggattcagcaatgatagtatccataaacggcttcatttgattagccataaccttcatgattactttataaatgacattgcacagggcaataggcctcaaatctttcatagaatcgggacacttctttttcgagattaagactacattggcagcagcacacgtctcctccagtacaccatattctaaaaatcgttggacataagctaccacatccgccttcataataggccagcacttttggtaaaatgcaggtgtcataccatccggtcacgggctttcatccggatgcatgtcaaacacagccttacggacttcttcctctgtaattggtccaacaagttcaaggttcatcatatcgggaactatttgattaacacagtccaaaacttcaacacaaaggacatcagatgaagaaaataactccgagaaatactcataaataacctcagccaaaccgtgttcccagtcagtccatatgccatgtgagtttttcagtttagtgatgatattattctttttacgagagcttgctgctgtatgaaaaaacttactgttttggtctccctcttaaagccacagttgcttagatctttccagaatacttctcgctgatcaaggatgtcaaacaattttttcttcatttccatataagcctgaactaaagcagagtctctcttattcttcaactggtttaaataataactattatcaaataattaatttaaataataataaaaaaattaaatcaaatacaattcaattatattttttaaatatattaaatatataaaatttaacatagctttaaatttatttataagaaaatatatctaactatttttattagacaataaaattagtaaatatttttagatattttaaacaatataactaatcatctaagctatatgttaataaataaatttaatttaaatattttaaaaaaatattaaaaaatgataattatttgattgatttaacggtgttagttttaaatgttacttcttaacgaaaaaaggaaatattaaaccaacaatttccttttgataatgttatcctattcactatgaagtgacatctatttaggtgacacatgtatcatatttcataacctgggcagatgattctactcctagtaggtcgtacagactgtcataatgctcaaaatcacacatagatagtaggatgttcagacaagatatgggtagacatctgaccagctctactaagcaggtagcttgcatgcaccgactagggggtgtgagttatcaatttctaagatatactttgtgtatttccaagctttcaaatcacggtacaatctctacatttgtggaatgaattcgtatcttcagagaataaaggcaatcaacctgaattttctattttcattattaaaattatggaaataaaatagttttctattttatttatcatcgattaagggaaactaatttcatgtaattaatccctaaaaatagtggtttcatctcactattcaggggcacaaaattatttagagagaaaacacttaagagtgatatgttgggttttgtgccctaatcatttcaatataatcagatttactagttaataaagaacagaaataacattttatgtt

SEQ ID NO: 47017 - DNA, 2462 bp, Cannabis sativa
  modified_base (185)..(202): a, c, t, g, unknown or other
tcatttacttgtatttttctttatctgttttctaactaatgtaacagtaatcaagattagttaataagtggttatatgtctgttgtaagtcggttaaactccttttgtattcatctctatataaatgccaactgtttcattcagttgagcagtattttccattttctctctctttctctctctcnnnnnnnnnnnnnnnnnntctctctctctctctgtttctttcatccattgttatttttgctcaagctcaaaaactgtaaaattcagtacttctacatggtatcagagccatgtcgaatcatggcaccaacccaagtgatcctggtactcgaagagaaccaccgacagaagaaagaatcgatccacagcaagctcgagctgctgaaccagttcttgaagctccaaatccaattcccctcctcaacaatcatctcctccccctcaaccttcgtttagacagatctaactatacaatttggcgatctcttgttctagccgccattcgagcttatgatcttgaaggatatgttctcggatcgattccccaaccaccagagtttcttgcaggtaatactccaaacccaacctttcaaaactggattagacttgatcaatttctaatgcactggatcatgaactctgtgtctgaacatatgctgggccatgtaatcaattgtcgaaactctcatgagatttggactacatttgcccaactctttgccaccagatctcgagctcgcctgttgcaacttcgtaatctactcccaaccaccaagaaaggttctctttccattgaagaatacattctcaaaatgaagaaacatgctgatcaacttgctgctgccggtcagcctatccatgatgaagatttagtgctttacattcttggtggccttggcacggaatatgaagcagttgtcatcaatttaacttcaagaactgaacctctcactcttcaagaagttcagttcatgttacagagtcaagaaatgaggatacagcagcaaacaaccgattcccttcacaatgttcaagccaatttggctaacaccagaggactttcctccaatcgtggatttcgtgggtctcaaagaggaggcagatcctataacaacaacaccaccaacaaaggtggccgtgggaatagaccaatctgtcaactttgtggtcgtgctattcatattgctgtgaaatgttatcacaaatttgacatcacctacacaggtgcatcaaatggctcaacccccaaccctcccaatactgatcctcctcaagcctttgtatctgaatctaatcccacatcagaaccctccactggttggtatcttgactctggtgctacacatcacatgactaatgatgttgaccaactcacctctgtttcggattacaaaggcaaagcaaaggtggttgtaggtaatggttcctctctttccataaatcatattggttcaagttctgttggcactaaatttcctaatcattcattagttttgcaagatattctacatgtccctaatgttaccaaaaatctctttagcatttctcaatttaccaaacataaccatgtcattcttgagtttgatgaattttcttgtctcatcaaggacaagacaaccaagcaagttcttctgcagggccatctcagtgagggtctctataagctacatgtcccagcattcatctctcaaagcaatgcttctgcatctgttagcaccaaacctaaggctctcaatcacaccaccaccagtaacccgattcatgacaagtccaaagctgtcaacatttggcattgccgacttggtcacccatctctgtcaattctcaataaagttctttcccatgttgttccaaatgttaaatgtaaacctttagatttttttactgcgtgtcaaactgaaaaactacaccagtttagtttcaaaagtactaaaaataaaaccactaaaccatttgatttgattctaattgatgtgtggggtccctcattttatgcttcatctgatggcttcaaatactatattagttttcttgatgatttcaccaaatttacttggttatttcccatgaaaaccaaatccgaagctagtactatttttatacagtttaatgctctagttgaaaggcaatttaacactcaaattaaatcagtccaatttgatcttggcaaagagtttgaaccactgtataaattgttcaagaatcttcgcatcgtccaaagaaattcttgcccccatactcatcaacaacaagggcgagttgagagaaaacatcgccatgttgttgatactggcctcacattactttcccaagccaatatgcctctctctttttggtgggaagcttttgcttctgcagcatacttaataaatagactacccactcccaccctcaattatcaaacaccacacgaaagtctttttcatcaacaacccgattataatcttttaaaaaaattt

SEQ ID NO: 47018 - DNA, 1101 bp, Cannabis sativa
aaattagattttatttaaagagaaatttctcaataatagatatttctcacaaccccatatattgaattaggggtggactcacatagaagcgaggagttgactgccatcgagaaaaaaatatatatgcattttagttagttactaaaagataatatttatagacatggtattagctttagtgtaatggttaatctaaattgacacaatattgcaataatatccattgatgaactattagccatgtcatatctagagtgattaaggaacaaacaccatgaaagaagcagaaatttctttaagattgagaacaaaatcttgtatgactattacaacaaatttatactattgattcaataagatgtacatatatacacaatttctaaatcttagaacaaaacatggtaaactaaaccattaaaaaaaattggatgtagaacagagagaatcacttagaaaaatcaaacaaccagataaagtttcaatcttttctctgcctgcataataaaaatacatgaatttggattacagcataacataatcaaatcagtatattagcacacttctaaactaaactatttttcagaagaatgagagaagtaattgtacctctgtgagtgaagtaattgtttatccgatgaatgagtgagtgagtgaagcgcaggtggtaatgaagggcaaacggaattcctcctcctctccgaccagctccgatcagtagggaacgaggttagggtttagtcacagtcacagaagaagaagaagaagaagagagagtgagagtgaactgaagttgtgaaactcactttggttgggcttgggcttgggcttgggcttgggcttgggcttctgatattgggctggggcttgggcttctcattccaacatcgctccctaagaaattccatatttataaaaaattcccaattcatgaatagttaatgagaaaattacattttatacccactttttgttttatatttttatttttacctttattttactactctttaatttatatctatttttataagttatattctcattatgtgcattaagaagtctaattttaatgatttttgtaaagttatatttggtactttg

SEQ ID NO: 47019 - DNA, 2005 bp, Cannabis sativa
gtgtcaatttgtaattaattctggtcaaattacgttttacccttctaattatttctttatcctttagtgttgttaactcactagtgaaagtataatttatatccattctaaatttgtgcataacttttatagtttcagaatttacacttaaagggaaccaatattcgacccattagggaagtcaagattccataattgtaaatcaagttcccagccatccacattattaacttcccataaatagaagttgtacgtaagaattatcttctctgagaaactttaatgaatgaatcaaagaaactaatagcatgaacaagaaatcatgattacttaagattcagaccgatctactattgatcatcactgtgatatgaattaggtctttatagtaaacgacatgtttgatattggtccatgtcctatataatatctattatatatagcaccttcaccgaataacgatgtcatactacatcaataattcaaattaagattgcttgcaccgaataacgagcatcagtgaaccgtactaacaatcattgattaaggattctataatttctatatgttggtagctattttattcatgagtaagtgatcttaattctccatacaatacaagttacaatctcatatatgaataagaaattttcttatatttatatataaattattcaacttaaaatattaataacattcaagcatatatccaattgctcaactaatatttataattaataatgtttttacaatctttttaggacataaatcctaacaaccatttcttatgtaatgtacagtttatattgtattaaattcttatgaaaaatacaacaataaataaaaggaataaatatttattgatgatgtatctttattgtacaaaaataaaagccaggccaaccgatattcatttttaagcgataaaatggaaggagctaacaacacacaataaataattaaacacaatttaatatatatgcatttttttatatgactttaatatgcattaatctaatgtgattttaattttattaattagtgatgatgagcttaacattggcgtgataagcagccccagccttccaaagctttggtatagcattggtagaatgaatccaataagtatagcctaaattggttgtagcttgaaacctcaatgtaatgggcccacttggtggatttgccatatcccaaactgctccaaatgctctacgcatggccttccattttttggtgtccttatgccacaattcaactcttgcgatgtcgttttggccagtaacatataaaagagttaaagctaagtagtaaggataattgctgtgttcatttatcttgtaggttatgacactaatattattattaataatgcggccttggtacttgcaagagatcctcttgtattcaacttcaacaacaccatagctcgtcaacttcttctctgactttggaatagctaactttgaaaaagctcgtgggctcataatgaagtcagttctatctccttctccataatcactcactactatgttgaccccatcatagttgcaaagttgagggtttttgcacctaacctgaaatatacatttttgattaaattaattattaactaggtgatatgtaaaaaaatatatatacaatacttgaattcactataaaatacaagccacgtgttatattatacttgacagttcccctatattatgacaatgctaaaagattagcattacagatgatgtcatattactattggtgcatacattagatcccacatgaaatgccaccttgcagtagttttaagcaatgcttctatattatattatatgtagaaagaggtggtcatgctactcatctaatccatgtattaatttgtatatatgtgtttgatcttgtgtggtatctagccatggtgaaagacaaagagaaagaaagaagaagaggaagaaagagagagaaagatcaaaacacatgtttattaattatgagagaaagacaatgtata

SEQ ID NO: 47020 - DNA, 2871 bp, Cannabis sativa
tctgacggctgtcgtacatcacggattacaatccgtgaaagtacaataacaagacaaaatcatatccctatatatataaatttatgtttaatgttaactcttttttttctctcataaattagtgtcaattacttttttttgtgcttcactaaaataccatatcaccaattaaatagttaaatataacaaaaagtaatataaggggcacgtttctatagttgtattatgttcaaatgtatttttttacaagttgcatattatatggacatcatttgatagtgtcacaaatttaggaaacaaaaatactaataatttgagatattatattaatgacaagattttttttaatatcttcatcttgagatcttcctattttgatggaagaattccaaatgaaaattgatatgtaattataaattaggccaataaattttttatatctctctttagtgcgagttcctgttttgatacttttaatttgatacataaaatctatatgtataatatttatgtattatttttttattattgttaggttgtaagattttgttctattattgtaaagttgttagttatgattattttgtgagttaacaaaaaaaaaattgaatttgagaaatgttagaggattattggtctttataaaaagtctaatgaagatatagagatcatatttgttgactcggaaatttagacacagatctttgagccatacccgctccctaaattaacgagaataaaatatgagttaagtataagtagagagaaacaataatttattgtaatttacttcctgtatcacaacagtgatggacttacgtctacttcgagttttatttttcacgagatggattacaaaaaaatggtgaagtctggatgctttaatttctagagagagaaactagagagagatactctgaccttatggctacttttctcaacttaaaaaatgagctagtggagttctctttttataggtgaaggaggtcctattaaatgggaataaaattatccaaggtatagaaaatacatttatgctatttttgaccgtagatgatgatctaacggtcaaaattaacttacggagttaattgttaatttttggagtttgaggcgcgctggagggacttgctccgggtaagttacacttaaattcgtaactcccttgggggtaaaatttagagtcgataatttcataattgtgattgaagtgtgagatataacttgatataacattgaaatagcaaaacgcaagtttaatcgcatcaattagatattgagtgagttatgaattttactgaaggttgttttggaccaagcgcccaggttgacatcccagtgcccagattgacatgtgatgtcaacttggatgctgggtgagtgggaaaatatgctagggatatagtttttgatgcctaagtgacattttgacatcatttagtccatttatgtgttctagcgaagctagtcaccaattctcaggcatattgctactttgaagaaacaagagacttgaaactactcgatttctgagttaatcaacttgttagaaaagtaaaatatgaagttgtgaaattgactcttctgaattcatggctctcagtttttatgaaaaattagaagaacggtcaagacagaataagaataagataagcaaaatccagtacaccaagccatttgttaacttgggtgatgaatgcttattttagagcttctaggatgttgtttttgtacttccaaggttctggaacttgaggacaaggtctcctaatccatttttttttaccattttggagagaatgcttggagcagaattgatgagggtccaatcaaagttcactgcaaagactagaatgattctcacatgcttggattctgtttcagaaatgctgcaagaggatgctgaattcctaatctcaattgatgggtgcagatatgttaaggaagtggcaaacatgttccttctttggcctaaatacctaattgcaacatctgaggtaacttttgttataaattaattattaatgatgtggagtttgaatattttaaatattcaactatagtgaagtaagttctgcaaatatatgtgttgtagtgggatggatgaataaataattgttatatctaagttatttgtcattatataggcatgtttaaatttttgggagcattaatttacagctgttatgctgccgaaaattaggtagaattaggataaaatttgataaattatggtgtgttttgtatagggtccactcgctcaaccaccatctcaagacgtgatgtatcgaaggggataggtcccatgccttctccacaaggcggtgctgacgaagaagatgaattattctcacgaaaggtcatggctttaacccctaagtcactaaaatagatggttgctgaacttctaagaatcaaagataaacgtgatataatcacaattccagtgccctgaggattcatagcacagcgtctctagatcacgttatctggagaggatttgcaacaggttgcattgtgtgacttcatcggcaactagggaatgttgtttggaatgatgtatacttttctttaatctaattaaacttatataccaaattctagtgaaattattattagacactaatacttagcaatttaatgcaggcacatctgggagagcataaaagatttgagaaaaaattttaagttttacgacccagagcttctcgcggtgaatggtattgttaacacaaattttcgttaactaaaattgagcctcacaattttaatctcacatagaaaaagtaaaagctatcaaaataaagaatatgaacactgggttttttacgtggttttgaagttaaaattctgcatagttcacgagtcaat

SEQ ID NO: 47021 - DNA, 868 bp, Cannabis sativa
ctcctcctcggtggctgtctgtccacctttctcgttgacgatcgaagatccccacgaaactccaaggttagatcattgatcctcgatttgtcatcatctctactttattttttttcttttatttgtttctctctctcgctctttgtgcaggatcttggtgttgacaacctttgaagctcgtccctggtcgacggcatttgaagttcgtcttttggttccagttctggttagtggtcgatcgcgattgaagctcgtccctggttggcggtgtttgaagcgtctgtggttccggttcgtggtcgcgattgaagctctatgaggggttttacaaagttccaattgcagcaagagtctagcgttttctaagttagaacgaacaaatcaaataatgttgatttggttgttctgtatacagatacagtactatttgggtttaattttttatggatcatatttatgcactatgtagctgtttgagactgtttatatgtgcatcttatctgcaaatgagaaaaacgtaaattctatttattgtacaggttttgctgaaatttgaggaatgctcattttgcagcaattatgctgttgaattttaaatttggtgttaaattaagtcgtatagaattaaataattagactaggtttctgttgacttcactggcaaagtgaggtttctcattgaggtttacatagatatgtaagtcggttccttcaattcattatggcatataatccatctttttgttcatttaaaaaaaaaaaaaactatattgatttcttttttgtatattattttaatttaagttaattgtatttattaaaaaataaaattaaaaaaaacctaatattcttttttaattttggtatt

SEQ ID NO: 47022 - DNA, 1261 bp, Cannabis sativa
  modified_base (953)..(954): a, c, t, g, unknown or other
aaacaaacaaacaaaacagagacatttcggggccctggaagatgatatgctctgtcatagtctaataagcttatccattaatttattcacaccattacttagcttcaaattaaggcattttcttttgatcttatccactttctctattttgtggatgctctctttgtatagtgttcatatatattcgaatcttcattgaatgacctaacatgatcactttttttaaaaaaatatatatattaattaaaaaaagttagtcattaatttatgcttatacagattcgaaacagtggcttatttacaacaaatttggtgggttgaagtgattggagagttagagttagtgttgggagaagggagttatagcctctactttcgactacaattaggaaaagcttcaacaagatttgggagaagagtttgtaatgttgatcaagttcatgggtgggatataaagccagctcgattcaacttatcaacatccaacggtcataaagcttcattagaatgttatttgaacaattatggaaaatgggtccattaccatgtgggtgattttcaagtggaaaatcctaatatgatcatcaagattaacttttcaatgcttcaaattgattgtacacacactaaaggtggtctctccttagattctgtgttcatatacccaactcagatttctaataagttgttgaaatcttagtgtgtgtgtgttttctgtgacaagtgtacaaatgtgagctgagcaagtaattcattataaattatattttaattaagatgttataattaaataaaattatacttaaacaaaaattaaaatattaaaaaaatatcaatgtaataataataataacaataaataattattaatactaaatcataatataattattttcaaataatataatatttatacatatattacaggttaaaataaaattattaattttacnnaaataaatttataaaatatatgtagatgtaatttttttgtatatagaagtatactttattaataagggacttagaatatgtacaactaattataatttagtgaaaattacaccatatatgagattctataaaaaagtttcataaatatggcttttttaactttaccactcttatatgggatttgtctaaatttaaaattttttatggtattttctaaccacatttttgtaaatttaatttttaaatcccataagtaataaaaggaatcattttaaacctaaacgctactttctctctctctctctct

SEQ ID NO: 47023 - DNA, 2055 bp, Cannabis sativa
  modified_base (27)..(28): a, c, t, g, unknown or other
  modified_base (59)..(60): a, c, t, g, unknown or other
  modified_base (88)..(89): a, c, t, g, unknown or other
  modified_base (116)..(117): a, c, t, g, unknown or other
  modified_base (143)..(144): a, c, t, g, unknown or other
attcctattcctattcctattctcatnntattcctattcctattctcatttctattccnntattcctattctcatttctattcctatnntattctcatttctattcctattcctannttctattcctattcctatattttcanncctcccaaccaaatgcctcctaagtgtcttgaggtcaatcaacacatagtttgagggtgtctcttatataagagttagttttattagttaaagtagcttgtttcctttgattgattaatatgcaaaattgcattctttcatttcttttcaaatctttacaatagacaccctatttcacgtcctgtggcatgggacacgaaaaatcaacgatgactcttactagataagagacatgaattatttttttttctttaatatcttctcccacaactgtcattgatgtgtttgaccatatatttaaggtttgcatatcagtgttaaacacctccaaatatatcactatatttacgttagcttttaacaaatgaaaagtacgtaccactataatttattgcttaaacttgtaacaaatgaaaaaccaatgcttgtacaggaatttgttatgagttatttttctgacattaagatataatgtattcaaatctttcctatagtgagttatgagttaaaaaattattgtgtatatatatatatgtatttccaaaaagaataagttctcgatgatgatcatgatatctatatatgtttgtgtatatagttgattttagagaagaataaagttattaatttgtcaatgaatttatcattgacaagataaaaaggcatgaaaatttaagtgatatatatggtttggtttataacatagtaaaaggattaataataaatatatagctatataggcatatagctaccgcactataagtctataagcattgttttatagcttaggtaggttatcaaatccaatatccaagtaaatataccccttctactttaacatgttatatatgttttagtaatatttcacgatttattaggttagagaaattaattaatatgtgagggaataagaagaagatataaataataaaatatatgattgatttgagaccaaataaaagtttttactatttattattattattattattaattatacgtgaaatagtagtcaaaacacaatggcacaatatatattatatatacataggtggacttacaaagtatttattcagtgtaattaagacaataacaaacccgacttatgagatatggagtgctgaagaaaaaaaattcacttaaaaaaattaaacattgtattacaatttaataattatatacaaaataacaaaatagccatcacaaataaattttttatagcaattaagcttctaaaactaaataaatttattaagaatgattatatttctcatttaaataagtatatatatatttaataaaaattaaacccccacatattaaaatttctgagtttgtcactagtgtattgtgggataaataatcccgatttttttttattatttttctaactttaattatatttatattttagattcaaaagtaatttaatgaaaaatttatttatagatttattatcaaaagactatagataacccattcaaagtatataatgctattatgatcaaacaataaatacatttttgaaaacactaaaaaataaatactttgatctaaataaaataatattatatagtaaattctttttaaattatttaaaatatttatcagctattaataaattaataatatttgtattaaattaattaaatgattaatttaaaaattgcttgaccataaatatttgtttgttatcaaactacttttattttattatttactattttaaagcatgatacattatttaattttattgcatatatatttatttatatatgatatattaatatatatttttgcaaaaacttgttaaatttatttattattttataattagccttttatttttttaataaaatcaaatccattgtaaaaccaaatagaattatatttaacataatcaaattcagt

SEQ ID NO: 47024 - DNA, 5919 bp, Cannabis sativa
  modified_base (5793)..(5821): a, c, t, g, unknown or other
  modified_base (5863)..(5871): a, c, t, g, unknown or other
cgatctcacttacctgagtattacttgttaaaacgatacgtatacttgcgtgttggatttatcacaacatctagtccaggtgtttgctgaaatccttttacaactaggcaagctttgtgtatgttgacacccccatttgtattgtatttaattctataaagccatttgttaggataatttttatgtctgttgttgagggaacaagaatccaagtctttttctttttgagagcttggaattcttggttcatggctttgttcgaatgagtgatagcaagggcctattttactgttgttggttctaatctattcttgacttgtgtaaaaaaaagcttttggtttaaacactcctgctttagatcttgtaaccatagaatggttgttgataggtagagtgggtaatggctatgtgaaaatagaagttgaggaatgtgactcttgttgaggtaaagggtatggaagtgttgagtctgtggatggtgtttgacttaagcttgactgagcagagtatgaactatgtacagaggatattttgtgttaagtttgtccaggtgaatgaacaatattatttgaattctgaacaaactgagtgttgttagcactttggtgtggtgtgggggcattgataaagttgtgtgcttgaggtacagaaaatgagttagagtagaccacaacagaagatgactaggaagaatttgatgcagggaaaagttgagtgtatggaaactcagactcattaaagtttacacttcaggctacatagacacgcccatttgggtgtagacatctgtagcctttttgaatgctactgtaccccaagagcaagcttttgctcgatctaaaggccactttgtgagagttatatggtgttaatagagagaaacaggagcagccaaatacttttaacatgttgtaatcaggtggctatttgtatagttttttaaagggagacatattgttgagtatggggtgggcaacctattaatcaagtaggtagctgaagcataagcttcccaccaaaaattgagtggcatattagcttgagctaaaagagtgagtcccatatcaactacatgtttgtgtttcctctcaacaagaccttgctgttgatgagtatgagcacaagattgtctaagtgtgatccctagttgatgaaacaggttgtacagaggtgagactctttaccaaggtctatttggacactttttagtttggtttcaaacatgatcaacaaattttataaatgagtgaacatatttgtaacttcatattttaattgcattagaatatccacacaaacctagcaaagttatcaacacaacttagatagtacttgtagccatctctagaagagtaaaaagagggggcccaaacatttgtgtgaatcatttcaaatggagctcttgttttattgtcagtagctttaaagctaaactaatgcattttgttttaattgacaagcatcacaaaacaagggttctttttttactccaagacacacttgagctaaaactcttgctagaattggcttggttgggtgtcccaacctacaataccatacagaattggttttatttttatcaagaactgaaatactagaagttgtacaattaaaggctggagaaatacaactaaaattaggtttacatgactgtaacttggatgagacaacaacattggaaggggcacatgaagtttgtagaatccatcactaagagagccctttagaacaacttgcttcgttttcttgtccttgataagatagcacataaagttatattcaagaacaacactattattagctagtaaacttagaaatgcttattaagtttttggtgatatttgggacatgaaagatatctttgagcattaaagatttagtaggagtatttgtaggaatagaattagaaccaacatgcaagattgggatagaggcaccattgcctacaattactatggcgttttctttataatcagtggtcttgttgagattatgtgtgtctgtcgagaggtgatttgtagctccagtgtcaagataccacgtgccaggtgattcttcaagaatagtaaattcagagatgttagcttggggattctttgtcggagatgttgaagtagaagcacctagaaattgaggactagtaaatgtgatatcgaatcgatgataacacttttgtgtagtgtgtgtacggccatacaattgacacacagatttattgcctctaccaccatgattggatgttgatcctctgcctcctctaacaccacctctgtatccacaactacaaccattgatggaaagattagcaatgttagcttgaacattatttaatgaagaatacaacaaacaccaacataaactataacagacttgtaactaattaaaagaaaataaaagccaaaaggaaaactagtcttgactatatctattactaataattaattacaaacactcttcatattataattttattttattgtttttggttcactttttattttttactttgtataataaatttcttatgctctaaatatatgcattgttgtatatcgaaatctatcaattatgaagagttattttcatagatattaaagtttgtggtctacttattttttaaaatatatttctttctcatatattagaagtaattttagtgttgtagtttatcactagtgagaatggtacatatgtattttcaataattggttaggtagcttataaattatacaataaaaaacaacacacaatgtgtataatataactatgaccatatggtctaatgaagtaaaagatatattaaatttagcaaaaaaaatagtaaattctatatttactatttagtatattttttataattatgctccaacacatataaacacatataacaaattaagatgcaaattcacataaaagataattatcattaatgataataaattaaaagaattgttaaaaagtattactggtacccagtacttttctcagtatcatattactattggtgtaattaagtattaggtcttatataacttaagaaaataacttttaggaaatatcgttaattaatcttggagcgtcgcctataaaaaacgctaaacactactggtgtcaataacaatattaataaattaaatatagttttattaaaaaataagataatatttatattataactaaaaagtgtattaaagtaactcattaatactaaatgaaaataatataaataaaaaaaatgcattgacaaaaaagtacattaatgctaaaattatattgtgccaaaagtacattaatgctaaaagtgtctcaaagtaacttattaattatgtgccaaatttgacacgaagttatatattgtattaaatttgatttaatttttaacatgtatcatatttggcataaattttagcacactattagagagtaatattttacaaaaatatcaatatatatagcattgctaattgcaccacttatttgatattaaggtggtgtttaattgaaggtaatagaatgaagtgaaaagagattaattttaattttattttgtttagttgtattctaaagtattataatttcatccaatagaatgacttttctaccattttggaactattttatttaaaatagaaggaaatatcatcctcgtgcaaaataaaataaaaaattattataaatataattcttttttatgaattttaaattatttttttggtcaatcagataagtgtattgattctacaacatatttttacaacaatagcatcaccaattattagggggtgttcacagggtcgatcctaggcatttattttaggggcccaaataaaaaaattacctatgaaaatatatatatacttttaatcatttttaaaaatatcatttatctttatagtacgggcccaattttttttttcctatggcccatttcaacttaggccttgctttgggtgttcattaaaccacttaaatcgcttaaatcgaccgcaccgcaaaaaaatgtggtttgaaattctttgcgttgcgatcgcagtttaaatttttcttaaactgcgcggtgcaaatcagcccacgaatgactacccgtgtcatctcgtgttgagactcgtgaccaagacgcaccacaacgtctcttagagattaaggccacatcctgttcgagtcataccggcaagccaagagaaacatacccgttaacctctggcagaattcttagacgcactaccgggccagcccgatagtgtccacgagtattccaactcatggagacatatgagtcccctcatggtcctcatatgcccgccctactagtcccactaactagtagtagctcacttggcaccaaggtgccctggggtggtggagagctaacaccaggtactcccccttaaagagcattctaagcttttagcctaagaacatacatgagtttggctctatagacatatggccaaaccatatacaaaatcacagagtttctcaaatctgattgcaccattgtattcgtatacccaaataaatggtgaataccaagtcccgtctgaatctggacaatattgaagatatttacgaaaatgtcactgccgtacaaactaagcatcagcatgaacaacaacatgcgccaccacctgatcgccacttggccaacttgtggccatcagatagcttgtaacgtgccatcttgacatgcacgttacacaccgcaccattttttgcagtgcagtttctgcagttttatagtttggcagtgcgggtgcggttcgaaaagtaggaaaatttgcatgtgcgggttggtttgaaaaaatagtcaaaaactgcaccacccgcaatgcaaacacccctaccaattatagtaggcctgtcactatctttacaaaagttccaagagttctatatctttttttgccactttatcaaagataatgctctttgctcttctctttacatcaagtttaattctttttacaataaaatatattgtgtatatcttcatattctatagagttccatttcttgtccaccaaatatgatatatggttgctgccagtgtagctatgaatacttggcacccaaacctatttattttagcatttgagatctatctcatcacgccatgaacactattggcacgagtagtccaccttatccaagtcttgacgctagccaatacctgattactaaagtaacatttgaaaaaaaaaaaagatgctttcctgtttctttgttcagcccacatattaggccttcttcttcttcacatatattgtatttaaataatctagatctcaatcttagcctatttaaaatcacaagccagaaaataattctatgcattggtatagacattcgatccaacactttcccttgccagtatacagttgggaacttagggtagaaacatctataagcatcattaatcaaatacgtatgtcttgaatcttttggaaaggtatttagctccatcaacttctttttgactcgaaccacttgtttctaataccaactactgttgggaggcacctcatagaccctctaattctcctcccttatgtaccttgtattcacccatttgacccatagtgtatccttctttgatttaattgcccatgctaacttttctgttgccgcttcattccattctttgattcttctcaaccccaagcccccttcctttttggttttgcataaatcatcccatgccaccaagcccggtccacttgtatctactccttttcatataaagcttttgcaaattgaattgactttttgcataacttgttgggttttatgccnnnnnnnnnnnnnnnnnnnnnnnnnnnnnatttacttattaatatagaccagaaataacatttaatgttgnnnnnnnnncatgatttatttcatgattatgtacattatgtatgaattcatctgaaa

SEQ ID NO: 47025 - DNA, 959 bp, Cannabis sativa
atttcactcactctttttatcaatcactttgcctacattatgtagtacacgcaacctgtaatttctttcaagctttctgattctgtctactgcagcatcaccatcgtcatgcagttgcgtttgcacccatttattcatccataaacctatcaaatattatatacatgtcaagtgtctcctatcaccctgtcatcacctattttcatttttatcataccagcatgacatcatatattgggtcaaagtcaaaaacatgtttcatttatttttatctctttaatccttcatgttatcttttttgctcactaaaaatgttggtctttgcagtaaattaatttttagctgaaatgataaaatggggagtggaggttttggtatattgtcatatgaagaattgtaacctatattttttttgtagtggaagttaaattacactctctcaatcatatcagatataacatatacattataatgtgtgcctatatagatcactaaatgtgcaattgaaatccataatttaagcactctactctgatttcccacttcagatatccataatttgcttcgatatagcacaatatttataatagctgacatgatccattttcagtaaagatcgaaagtaggaacaatgattttagtatgatgaattgataaaaaaaataatctaacttttcaagacgagtttatcaaaagattagaatctatgagaagaactaagcaagggaaataagggaggaaaagagagagagaaaggaaagtttggcttattaacttggcggcaggaaaagtatatatcccaacaaaactgacctatacacacgtaaaatatattgctatttaacgaagaattattgatcagaaaggtaagaattagattcactgtggcctgtgtcaaattcagggtcaaatctagtatcctatcctatgcctactactactaccaccaccacctctat

SEQ ID NO: 47026 - DNA, 1905 bp, Cannabis sativa
tggttatgctacaagactcaataaactaatccacttaattctatttaattgagattgggataaataacctattttgacaggattaattatattttgaattttgtaaatatattttagatttaaaaataatataaataggagaatgaaaaatttatttataaatttattatcaaaaacatattttttttttaaattgagaaaaaatatataattttgagttatcataaagtggttattaaaaatttaaagtgatattaattaaataatatataattttattctaacaaaataatacagtactatatagtatatttctttgaaattaaaaaataatatttagagaaaaatctaatagccatgatcaacaatttttgagttgtttagttattgcttttgcacttttgtagtgtgcattgttcagtactagttgaaataaaatcttttcttcttcttaaaaaaatatttatatcaaagtaatatttatattaaattaactaaatgattaatttaatatattacttgacataaatatttattattattattattattattattattattaaaatacttttattttattattacattactttttattatattaaagcatgatatattattaaggattaatattattttggactctgtattttttaaaaattactgattggaccctctgttttattgaatgacaaaataaacatgtattttctaaaattatatagatagaactctgagctcaatttttgataatttttttctaatataaccaacttgaacataatttctaagaagaaatactgttgaagtacacgtaaccagttttgtcgtaatacctctagatcgggttattatcaagttttattttgatagaaaattagttcatgggtactatttaatactattttagaaaatacaatatctattttatcatttatcaaaacagaaggtccagttagtaactcttataaaacacagggtctaaaataatatttaccctattatttaatttaattatcatatatatttattaatacatatgatatattaatattatttacagaaatttattatttaatttatgactcaaattttattatttaaattaaaattttatgttataattatatattattaaattattttttcaattttgtttatcttctttattattatttttcaaaaaaaaagaacaaatagtccaatccattttaaaatcaaacattgaattacatttaacatatttcaaatataatccaaaatcattttcagcccaatccaaacagatgaattatgattgacattctatcattctttgcactaatctattatgattggtaaaatttaatattaaatatcaaatattacatattttattttaaattaaatgtaaatttaatattaaactagacgaattacaaacagatggtgttagtatcaaatattgctctactaactttactaatcataagacactctttcaacattgtttcttataagacactctttctactagctttactaatcataagttcatttatctttttctcgaaacatagagaaaaaaaaaaatagttgcaataatgttttaataaaagtaaaataattgtgactaaaaaattatcattagaattaaaaaattcataactaaaaaaataaaaaaaattataattttttgtgtagcgaatgacggaccacaatttttattgcgtggaggcttaattatcatataaaaatatttaggtccactttaaatatataatttatttaattttgtgggagttattttaatattttccaatataattgtcaaattaatcaaagaaaaatatttaattttttagtgtattttttttattaggtaaagtgagtatgtcgctatttgtggctaaatatattttt

SEQ ID NO: 47027 - DNA, 2267 bp, Cannabis sativa
gtgatttttgtaactaataccttttgccacgaattttttagtcacaacatagaaattattatttataattagtcacgattttttcacgtttaatcacaggtttattgtgactaaaagtgagatattttgtagtgcaggcctgcaccatgatagtcttcagaactttaagatgcctgatagtaatgctcctaaattaacttagagactaacctggtgatgatttcggtgaagaatagtctttctttaaacttgattttacacaaaaatttgccattgccacttatttgcatggtcccatgatggtcacaatacacttttccaatcataagattgtatatgtttgttgtaacctatatgaacataaaagttattaaacatttattagtatatatatcgagcatgacaaaaataaaattgaccatatatataatcattaatgcaccttgctccactgaaaaatttcaccatcatcaaattctagtgtgagaattccaacagggtcaagctgaattgatcttccccaaaattttgtgtgaaggttgctgtcaccccaaaatttccaacctctaccttcacaatggcaagcaatcacagctgttgggtgatgacacacctgttatatataataataatgataattttaggaattcaataaattttttcattgtccaatgataattctcgaaagcaagagaccaagatcattatatcctaatcagtaagcatgcacttagaatagacagtgaactaatttagataaatcttctctatcatttcttcacgatgttttatatttttactgttgaaattttcaatgaagctccttaattagtaatttgtaaatcattcgttaattaatcttgttaattcaataaacctttgttctttgtcctaagaaaaattctccaaagtgagagatcgagatcattatatcctagtgaggatacatgcatttaggatagacggtgaactaatttagttaatggatcatttctctatcactttttcatgatgtattatattcttcttaatgaaactttcaatcaatctccttaatcagtaattagtacgtggttatgtacttaggatggacggtgaactaatatataccttctcaatgaagaattgaattcctttatttggaaaagtcaacttcaaaaagagagaaattattctatcccaatactataattatatgttgtatttaaagtggatggtgaattatatatataccttctcggaaaagaagcgaaatcctttatcaggaaagtcagcttcataagtttcccctaacaatggattgaagggcttgcaatgacgatctttagacgaaccatacgcagacactgcaaacgccgcaacattcaaaatcctttggatgctatccccctaacaagtacatgatcacattaatcaaacacataataataattatgatcatgtaataaatttcctaataagtaatacatattaaaaaaaaaaaagctatcataatgttttcatagttttaataacacttacatctttcccatgttggtatgcttgatccaaaagataagagtactccaattcttcacaacatttttgaagtaatgaaattggttcattgaagtacacaggtaaacaaactcttgtaagatcttttccaacattgtctttaatcaaagaccatagattaaccgctttctccttctccaccggatcgggaagcttttttcgcctttcaatacaaggcaccacttctttattctcatcactctgcattttccctttttccatgttatttacaagtacctattacacaaggatatttcatctcctcttatattaatattaagtaagaaatatcaaaagaatagtaagatccaattaatacatgtttgtaataaatagaagagttttgaaataataactttctataattgagtatatatataatatatgccattcattcattatattactctattctttatcgagatatgaaaccaatagaaatggtcccctaataataatgaggttaggtaggcaaagaagataagatcttcaaccatacttcatttaagtctttgtttcgaaagaaatatataataatatacactacaaaaaattatttgtgactaaaaaatataatatttagacgcaagttgtcactaatttaatttcagacacaataagtattacgactaaaaacacaccaaattatactttttatgatttatacttttcgccacgaaccttttgattacgacataagaatgatgatt

SEQ ID NO: 47028 - DNA, 1659 bp, Cannabis sativa
ataaaaagctcaattttaatcttttgcacaatgtccctaaaatgcttggaccggccctgagaccttcccctcatgcgatctagccaaacaccctatacaaaacaaccaacatcgttgaagagtgctccatcaaatatttaccttgatctgatttataatcggtgtaatccatagcgcaatatttttcaacccaacaaaacataggacaaagaagaatttgtccttgactgtgcaaaaatatattgatcaagaagagttcttgttgacagaacaacaacaacaacaacattgtgtatcttttgttgtttatttcatacatatgtaaaataatttgtttataaaataattaattagtatttttatctttgaactttttacactattaagttgtaccgttatgatataaaaattgttaataatactcctaaaaatataaattttacaataacgcgatccttctatcatattctattcaatttttatcttgagacaaataatgtgtacggtggaaagtaattgataaatgtatgcaaactaaatatatttcatcctttttactttaatgattaaaaaattaaaatatatataaattattataaaagaaaaaaaaaagtcttttattttattattcattaacgtaaaaaaagtaaaaattatttaatttgtatctatttattaattaccctccaccacttcattcatctcacgataaaattaaataaaatgtgatagaatgactatattattgtaaaaattatattttgaagggtaacattaacaaattgtgtactatatggggtacatccgtgccaatctgatccgccatacatgaaaagcactcaataatatgagttgtgccgtgctggcccataaaaagatatcgtacgtcgtgccgtgccatactattattttgaagggtaaacccaacacgacctgtaagctcacatttttcgtgctgtgctcagacttgtactgtgtttaattactcgggccgacccatttttcagcccgttttcttatacgagtcgaactcgggctttctttacttttctactattttttttacaattaataagttaatcactaaattatatgtattttttatagtttcaattttgtataatttttcaataatactttactcataattatataaaaaaattaattaaaataattaaaatttaaatatttattagtaaatacatttgtagtattattatagctataaatacgtgtgtgtcggtctggcccgacccatattttgaaaatcccgaaataatatgggtggaaagatatgggtcgtgctgtgctgtgccaatattttaaaagtctgacacggcctgtaagcccatattttcgtgtcgtgctcgaactcagttgtgctttacttgggtcaattcattttccataaatgagtcagcccgttttcttatactggtcgaacttgggcttcactttttcactattctttttacaattaatgagttaatcactaaattatatgtattttttataattttaattatctttgtataatttattaacaatactttacacataattaatcatagggtaaataccattttaaaccctgtgttttgtaaaagttaccaattggaccctctattttgttaaataataaaatggaccatgtatttt

SEQ ID NO: 47029 - DNA, 1377 bp, Cannabis sativa
ttaggttgcagcgctagttgtaataggggtttctatgtagaatttcgtaaaaatgcaaaaaaataagtttgaagtgtaaaaataaaaaggcccaattataaataaactatgattgattggaccactcagcaaaacataacaaaagaaaattattttatatgacatgtgttattaaatagtaaaaagataagataaaaaaacattattctataaagttaattgcggcaaaatctctaatacttttattttgcttgcatttaaacctcaaaactcaaatttaagtggtaaaacttccaaaactcgcgttctgttaacaattaaccatttccatccattttcatctgtcaactgtcaggttggttgtatccacgtgtacacattttacatgaggcatgttgctgagtgctcttttaacaggcatcacttttgctaaaattttgctagaaaaatgctgcagcaggcggaggttctccaactcaacgagaaattcttttgtgctctaaagaaatgctgcagtaaaattcaataaaaaattagcaaaacctctaaactcccaaatcaccccaaagctccaaattgtgctccaaaaacacctgaaatatcaaaccaagtgtaaaatccacccaaacacttaaaataaaaatgaacataaaataaaaatgaagaaaaatgaagaaaatacttttttttttctgttttttttttctgttttttttttctttttttcacatttttctttttctttgttttttttctttttttttcaaaaaagaaatattgacaatacttgttcttcttccaaccttgggttgcctaaaaatgggattagcaacccgaacacaaggcaacccaaccaccttccgcttcatgcatcctccaaagtaattgaggtctttactcgatcgacctcaccaccaaaataatgctttagacgttgcctattcactttaaattcccttccgaattgctcattataaacatccacagctccatgaggataaactttggttatggtgaatgggcccgaccaacgagacttcaatttacccagaaataacttcaaccgcgagtaaaaaagcaaaactcactgcctcttctcaaacactcgatgttgaattcttttgtcatgctacttcttggtattttctttatagagcttagcattctcatacgaaaacaacctcatttcctcaagctcattcaattgtaactttcgagcttcccctgctgcttggagatccatattcaacttcttcatagcccaataagcattgtgttccaatttaacgggcaaatggcaagccttactataaactaaacggtaaggagacatgcccaaaggagttttgaaagcggttctataggcccaaagagcat

SEQ ID NO: 47030 - DNA, 1536 bp, Cannabis sativa
  modified_base (1491)..(1497): a, c, t, g, unknown or other
aaagaggctactttaggcatttctgaagaagcttcctggcacgctaagtataaagattccgcctatgtttatgtcggaggtattcctttcgatcttaccgaaggtgatcttcttgccgtgtttgctcagtaagtaccttcactctcatatgccttttaattttgttttcaaccgtttgtattctgaattgacaagtttttgtatttagatatggggaaattttagatgtcaatctagttagagataaggggactggaaaatcaaaaggatttgcttttgttgcgtatgaagaccagagaagtacaaatcttgctgtaggttagttgctctctctcaccatttgtttttttgaacttgtatgctccgatacactttgtgggttctttgtttgtggtatctaatcgtattttttggtggtgttgttttgaattttcagataatttaaatggagcacaggttttaggtcgaactattagggttgatcatgttactaagtatgaaaagaaagaagaagaagatgaagaaactgagcagaagaagagggaggcacgaggcgtttgccgggctttccaaaagggagaatgtacacgaggtgcgggatgcaaattttctcatgatgagaaggtaagatcaatcaacagtttagtaaaattccatactactatactcgtgtttgtccaagaaaatttcaaattgaccatcattctgttagatttgaaaagactactgttaatgatttgcatggccaagttctgcttttccattttaatgtgttaactttgccagttttgttcttaattttcttgaatattgtatggcttctttatttgtttatttatttaatttttttttttttaaatgaactagtatattttgacgataatgaaatgtagcaggaacaatctaaatcattattttggaattggatgtcatgtcacctgttatggtgaatattttgcctacatttagaactttttgcaaaatgtccttgtaattttatgaacttgttcaaagcagttattgaacgtgaaatttaaaatatgtgtgaatttgttctaagggagggtagcattatattcttggttatgtttagaacattttgcaaaaacttcaacttgttctagatagttactatctgtgaacttttggagcctgtatggatttgttctggggtagcattgtgaaacttaagagaaagtctgcttttatttgtgtatatggactctgttcagatcttcttttttcttttttcagagggttcatagttctcaaatgaattggatttcctcttaccgtctgggttttcttcccttttatatttttcctgcctaacttttaactattctgtctgttttttttttttcaatagcaaatttccatgatttatttttaacattttagatgtgctgggagttttgggtatctactgttgtttgtgattgtattcattaagggctcgtttggactgccgtattaggtcgtattgtattnnnnnnnattatattgaattgtattttatgcaatatttttatgtaa

SEQ ID NO: 47031 - DNA, 4545 bp, Cannabis sativa
  modified_base (2066)..(2068): a, c, t, g, unknown or other
attgacactaattttacgcaatttttttttttattttttgtgttggccataaaatgacacattgtgatataggtaggggaaaattgcaaatttctttacaatttcctcccctgcatttttagatattaaaattggctctcataacaatatttatacgttataaaaaaaataatatttatatgactaacaataacatttatatgtaacttaaaaaattatataacgataaagtacatctaatataatcaaaagtaacaatcataaaaaatagtatcctacatgtcataataaaaaattgatatatctatgaagtatatcaaaaaaactaagtatcaccaaaagtaacgatcatatagctaaaagttttatatcctacatgtatcataacaaaatgtaaaaaaatcgcatactcattcttttaatatataagatttcacaaaattgccccattcatttcatatttcgtttatctcttgattgctgtaaggcttgttatctatgaactgtacaaccagataatattaaatgtatttaaaataaaaaataattattagataaaaatcatatatgtttaattacctcattattcaaaaaagttgtgggattgtgctaagtcatgtagcttttaataatcttcatgcagtaatatccacattgtacatcgtcccgttgtcatcgacacttgtattgcctgatctttacctcaaccctgttttgtatatttttttgaatcttgtaggtttccaaagcactacaccaaagagaagttacttagtgaccaaattagtaacaaaagttaaattaatgaaaaaaatgatagaacttaccttgtgacacattttctaatttcattctgaattggcatattctttgggtcaagaaatggcactgaatgagtagcagcctgaatgattatcaccgaccaatgttcactacacataattcaaaagtttagtcaactccataattgatatatatatttacatatattaaattacaaatttacgtactgtggattccagggacaaatcaaccattgatcgggttgtatttccatcaatcgagcagtgagattctctgtacgtttcttaagatctttacaagctactgaggatactaaagcaggatttaaaaacacatatgtattgttcaacccactaatattgagtgaatgttcctgcaaataactgaatcacaatattttattaatataattctacaaatataattattaacttaagtattaaccactatacctgcaccaaatagtcataacattagttccgacccatcccaacttgcacacatccaaaacatcttacttgtctatccaacactcatggtcaggtccaaacaaatcaggtttaagctcatattgtattgttttcctcttgtgccatttctgcacaatccctgaaagtgtcgtcatcaacaatgtcttttcaggaggagtgtaacgtgactcatgaaatgtcactggcctctttgggtgtatcaatggctgagtaggtggagctagagaatcttgggtagctttcatctttcctttcccctacaacaaaaataacttcaattaaaaaaatttaaaattttcaacattatgtttaattaaagttacataaattacctggattaaatgagcaggaggtatttttattagtttctttggccaaaagacgaaattttccacagctaaacccactttgtagtagcctgcctgctttagaggacatggcaaacttgcattttcgttaacaaccttttctatgaagacacgtttaaagtcacagtacttcttcttttctccatgtaatgtgatttcaccattgtcatctgctttttcaaatttgacatacctcactcgaatttcttaatttttccccatggtgataccaaaccttataactcctatctataccattcttaaataaatgttcccttatctggacaagtttcatatgcttcatgttaccacaatgaagacatggggaatgaactaaattagaattattcgcattcttcgcagagaattcaagaaaaaaatcaacaccttccctatattttannnttaacctattcgcactcatccaatctctatccattccaatatttctaacaaaacaaaaaataacatccaattaattaacatttaaattaattttaaatacttcttgttaaaagtactaatcttgccaaaatttcgggttctaccaaaatttcggcagcataagagatataatcggacgttctcgaaaatttaaaacattcaaataattaaattaaaacaatccacaataatccaaaaaaaagcattaattaacaatacaaaaatttccacccatctgaccgcaatacatttattctcagaacctacttcactacggataaatatctaagatattcaaactcttctagataattgtaggtaataatactaattaacaaagtaatcaatatgcataaacttaaaaaataataattccactcactataaaatttaaaaatttaccttctctaaaatgaccttcaattagtcttccaatggtatcacgacgatcaactcaaatgaaatagttaaaacctatacaaactttagtcattgttggaaatttttatgtcaagtactactaaaaaatcatacaaaatagcataaacaactgtctttcatatttgtatatacacaaaaataaaataaaaactagcattaatcatattccaatgagcaaaaacaataaaatgtacttcacatccataacatgattgcatccaaaatgatataaatttcaaaattactagcacaataaatgatcatttcctcattcaatcttgtctactcaacaaaaaataatcttttcttaattttttaaattacactttgagaaacttttatctaaagtgaagctttttattctttttcctaataattgtctaaagtgaagctttttagtctttttaaagttacactttgaggaacttttatctaaagtgaagttttttccttctaatttacagagacatcctttgagttaacattagaaaagattttaacttgtggggtcaagtgttataaaaaagactctaactcaaacaaaaagctattcccaaaatgtataggtgttttgagaaagttttgagaccaaaaattaaataacgttaattacaagaaaaaaaaaggttatatatcatcgtaaaaattaaatcttatggataatgttaactagattttcgtctcaatggaacattttatttgcttcgtttttgtccaaaaaaaaaaaaaacaaaaatcagtgattcataatgaccttattacagaattcaaccaatcctaatagaagttatggacatagaagtcaaaaaaagtgttgtcctcaagtaaagttttggtactatgggttagatattgatatttgatgtaagtttaaaatttctgtatcacatttggagaaagaaaattttctttattatattagtttgttgtttcttattgatttaaggtgggaggtatttcttaacttcaaatttgatttaagactcactaatatgtaaaagtaaggtggtgtctggttgtgtggagtgattgtcaattgggtaattagctcacttgttcacgattctccagattaaatcctaaacaatttaactttgttgcctacaacttaccagaatgggctctaagtttcagtgcttcagttgggaactcaattcccaatcagttctattgtaataatggattaattatgaaattaataaataagattgagtgtgtgagtaaatatgatacaaaaaattggtgaaaacactgctttgctaggagatttattctcaagtctcaaaatagtaattatgagataaatattaattattaattaattattcaaaaattaaagtaattaaaataaaactaagtaggttaaacaatattctttaattataaataataattaaaactaacaatcatttaattttacgttaactatttaataaattattagtactttttacaataaaactaattagtttatataatattattctattattaaataataattgtatgagagtcaaatattatcttattttgcaatgagtagtctcttttaccatttctattttgttttatgttttcctctctccccaatctattttagtattttttttgttctttcttttaataaaattgtagaataagttgtatacatttgagactttcattctggatttaaacaagttggacgttttacagtagtttttctttcattttgatattcttagtcactcaaattttcttgcttatgaattaggaatgtatattttgatttgggttttgaaatcggtttcataatctgaactaggaaatcagtaataaattctccaaaatgtaccctacccgtagatcatccggagttaagactcggagtggaaggaagaggtgtaatgtggtggatgataatggaatgggtacaaccagaagtttggaggaaattttaagcaattgcatagaagtggcggttacttttgaacgggattttgggagaggcgaggagg

SEQ ID NO: 47032 - DNA, 2072 bp, Cannabis sativa
aaaaggtcaaattgtagtagtgaatgcaattagaaaatattctgtaggttggcctcctgaagtaatagcaaacatatcttatgtcttttagtatgacttgttaaatcaaagaaatgacttaagttgacatctactaatagcgagtgtactcaggtacttatctgcgagtctatctttaccaatgaaatgttggactttcatcttgcatctagtgctcatcaccctccacccatccactctacttgtttactatgattgttgattgaaatttccaaattaacgaaaatggtggaatggtcaaaagtgttgggcgataccaacacaaataataactacccctccccccatccccgcccccgcaaaaaaaaaaaatcttcaagagtttaaggattatctacccttacaatccaatagagtaacaatgaggaagcaccaaaaccatatcatgaaaataagcctaaaacgacttcagttggctagccaaaaaggaattgaagagacactttaagaaataatactatgcctaaaaataagaaggatgcctcgatcaaaaatataaactaataagagcatgactagctcattgggccaagacgtccttaggcataccaaaaaataagaggatgattggcccatagggtcgaggcatccttagcctggcccatatggtcgatgtatccttagctgtcaggcccataaggtcgatgcatcattaaaaaaagattgagactgttctaagagtcaataccccctcaaggaaatggtaatgacacgtcaaaaggttgagaaaagttcaaggaaagaaaactcccttacacctaaatataaagagtggtaactaagaagaggttgagactgctctaaaagttaatgctccctcaataaaaaggttattcatccagcagtagaggaatgcaaattgaaaataataataataaggaaattacaacataaaatgtatgcgaaagaacaaaacttttgagactcacatccaacatcatgagaactcattcaccctaagattctccatgaaggtattcaccaagtttcaaaaataagaagagagtttacaagaagagttgaaagaattcttatagacttggggataattgttaaccacgaatttttgcaaggtgaaatattaaaattattccaaattgagtaatctcaaactagggagacatcaatctatgaggattttaaaaggcccatcatgtgtttgtgatcatttaaggtatttctgatggaggtcagtgggcacgagtaaagttagaaagactaacacatcaagtaaaattttttgctggatttatacaatgatgggtttagaattaaatctggtcataaacatgaaagtcatagatatctttcttatctttctaaaacatcttgaattgtctgattttgagtcatatctagaaagttatatccaaaacactaagtccactgagggtgcatcaaccccctgcaaagaccccttctggggcaccagcgaagaccccctctggggcacctacaaacaccccctttaggttacttgcgaacaccccctttagggcacatgcgaagaccccctttgggtcacatgcgaagacccccattgggttacttgtgaagaccttctttgagggtgacctgcgaagaccctccaaaaaggggcctatgaagaccctctttgagggtaacctataattaccctctttgagggtgagacctagaaggactccttgagggtttggtcacctaaagacccttcattaccccttttttttcaacaatgctaaaataattcagctactctagatgtagtttactctagacaagaaagcttagtcaatggtaaaaaaatatgtgaaacaaggcatcaaacttggataacagcgatggtacaaggataacaagaccttgaccacgaaacgtggaccaagagaaagagaacaaccgcaatgtccaaccacgcctggatacaaggtctgagcgagtagtggtgttgctaccaccctgcagcacttggtacacccgaccaatatcaccctacaactactactacaccctaatgttgggttttatgc

SEQ ID NO: 47033 - DNA, 1412 bp, Cannabis sativa
taataataataataatattgattacttgtgtaaggtacaatcaattatatttgactgaggaaccttatagaaatttggccctttgaggtcatgagtatataatagaaatattgcatggtcatcatagtaggtgtgacaatttgttcagaatagatagaaacgtcttcatgttattttgtggtgttgtaattctttttttttttttaattgaagaactgtcactatctttctgctaaagaacaagttgttatgtttttatttgctatttattttatctttcatatgtttttctatcagatgtgtaattctatcggttttgtattatctcgtagatagagtcctaagatttcaaactacttaaaattttattaacatgcaaatgggcattttatttgttttttttttttatatagtttttttatttgatttaaaaataactagtgatattcattactttttgttaaagataagaaatataaaaattgaattcatattatttgttttgaaatttgataaacaaaagttgttactgaatatattttttttttattttataaattaaaaaataaaaataattgtagatttcgtttttaaattaaaaacaaatagttatagaacatgcttgaattttcctgggtgcataaaaaataagttcgtaattaattgtgttacctttgatgtgtttgaaaagtcagagtataacttctataaaattgttaataataatagtatttatacgagaaatgctaaactatcactagtgagtgatgcttaagattttttaaagtttaatatcggttattagtgtatgtaagtattgattcttatataatttaatataatattttttatagtgtatagttgaccaattagaatgtaccgtttttaggtaatgttaagcactactaatatctaattgaaatttacttattattatttataaatataatgaattaagttgcatgactcttactcattttctctaaggaaagtgacaattaattaattttataatttgtagtggacttcgtgaattttatgcatggattaagaaattaataagaaatatgatttgtgtctatgatatcgtttgaaccactagttaaatatagactgcatagtgttgtcattaatgaatattaattattcatcagcttggaggatcttaatgtaattaattaattaatgaataaattatgagaaattgccacttataagcagcaaaaggtcatatgacctttttttcaggttacaataaaaatttgtttggaataaaactattttaaatagcctcttgatttttttcctaatgctcttctagccataatatgagctaacatattagtatcttcaattcttaaaaactacattcactattgggtcttatgtcctaaataaaacttatttcaata

SEQ ID NO: 47034 - DNA, 1689 bp, Cannabis sativa
ttgaggttggggactaatttgcattaactctaaatttttggagacttttgccgcatatttcctttattttaatacatgattaaaatattattatttaataaataaaatttgaaattagaatattttagttagttgataaaaatgagtgaaccactcaactaattagtttttaaattagtttaaaactaattatatttaattattagttaatcgaataatattcaattttgaattaattagtatctctcattaattaaaaatatttatttaattatatatatatagatatatataaagagagaaagcaatcaaaaaaatatacaacatttttctcaaacctaatttcacacacataggttttctcttaaataaaaattagggttctaaatttatcagatcttatgtgttgagaatatctgataaataaaaatttcacattacattgtattacaagcctacactcatctttgggttgtgagactgtcgaggaagatctttgtgtgagatcttaaggaattatcatacaaaaagatagtagcgagaaatgacttcaagtttaatttctttctttctatcctttttgtttaatgtatatatatatatgtgcgtgtgtgtgtgtgtggaagtagatctaaacatgttgagcattttttcgctgcatatttctttgatttgatcactaaaaatcaacaataaccccacggtcaaccaaccctaccatgacctctttcccctattatccttttaataagcatctaggtaatctcacgcccaatcaacaatcaaggccaaagatgaagtgacattttcatggacaatcttattcctacaaaaccacaccctccaccacaatatgagaattttttccacaccagaataatggagaatagaaacaaaatgtttaatgtaactacaaaaatcagtcaccaaaatatttaggtccctaacaaaaaaaccattcgcctttcgaatattggcatgcgaagaacaaccccaaaagacatgatgagcagtgtccattttcttagaacaaaaataacaaatttgatcaatattcatgtcatgtttgttgagattgactaatgtaggaatccaactagatgaagccttccaagaaaatgcttttggaaggattgttaagactccaaagtaaactccaccaacttgtccttgcaacaaattaagaagttggatctaaaccaataaccactcttaacaaagaagcacccaaactcatcatggccccaaataaacttgtctttcgaaaggctaagggatagacaagatggtcgaagcctctaaaggaatgaaactagcacgaataagattccctcttctagggtaccatcatcacctctcaacacgtaccacaacaacttctttgtcatcaaatacacggtaggacacagaaagaatagccttcagagtaagagtccatttatccaaaaagatagataaaattagctaatacttttatttttagagtgtagttagaaaatcatgttgtaactagatttgattgtaattcaaagtaattattaatttgcaatatttgtccaactaaataattatatagtctacatataattataagtaattaaagagtgataattataatcttcaattttcatagcacctataagtaggggtgggcatcatccaatttaatccaattgaaccgaaccgatc

SEQ ID NO: 47035 - DNA, 1756 bp, Cannabis sativa
gtgattttttggcatatttgactattatgtgtgtttatttatttgaacatgtcaaattaagtgcatttagtatgcctaaagattttttataactgaaatatgcattgaataaatgtttggtatgctacatattgattttatagattttaggcctaaaagagtgtttttcaccaaactttctcatttttaattttttttttgattttgtatgtgtgtacacctcaaatttaagatcctcaaagtactagaaaaataaattttcaattttgttgcataaaattcatttttggtaaggttcttgtttttatggcattttcccaaaagtataccgtaaatcgtcagttttcaacatttttatgattttcttggttgagcatttgttttatcatatttaaggtgttacaaaagatttgaggtcaaatggttgcataaaacatgttttgaagcattttttgggaaaataagctgctgcaagaaacaattagccgttttttgcatacctgacaaaacggttaactatttcgtagaaggtagcgatcccaagtcctttttagtcattttaaacttgcactttttcctttaaaaccctaccaaaatgttttgtaacccccattcagatattataaccctaattagaagccttctacccttcttctctctaaatctcactctctaaacctaatttcactattccctttcttcaccttcaccatggatgcttcttcttcaatgcaacaaagggaacaaaggtccaaggcaagtaatgacctctttttccatggaaatatgcagggaaattcaatgaagacttctccacaagggttacactcaatggtaagcaatgtgatctcaaagttcttgagtatgttaattttaattcaatttttgaatctatgggatggaaaaccttgttggaaattcataccactatctatcctaggttagttagagcttttatgcttgcattgaaactaattgtgattcatatagtgttaaaggaagcctcaaaggggtatcttttgagttaactgttgataaactaaatgatcttctaaatgcacccaataatggcctcttactggatcctaaactttgcctaagaatgatgacaccattaactatagccttttcaataatatcgtttgtgtaggtgaaaacttttgtgcaaaacaaagatgaacatcccttccccttcaagaaaaaatgctccataatttcatgtgttctaaccttgttcctagaaaaagccatcaagatgaagtgagttcacttgaccaaataattttatagaacgtcattttgaaagaaaaccaaatcaacctaggctaccttatccttaaaaccatctattaattgaacaagcctaaccaaagaaaagccttaccctaaggttctcttcttacctacttgttcccacttttagaaatcccaatcgaagatgaaattgagttttatgaacctaagaattctgatagtcttggtgagatcacattcaagtatgtacgctaataaagttgaaaaagaactggatttccaccaaacaaggtccacattcccatgaggaagcacttcggcctcaagtgaaagttaacaggaaaaataagaagcccaagctcaaagtgaaaaggaaggcaaagaagaagcgccgccaatgcctcattttccctaacagaacattgaggatactttcgatcgccttcacacccccattgcttcaaatttcaccaacttgagaggtaaaatgaacaatcatttt

SEQ ID NO: 47036 - DNA, 773 bp, Cannabis sativa
tattattatttatttattttaattggggaaggaggtttctagctattggaccatcacattaaatattgttagcaccaaatgttgtctctaaacaataaaattaatatatttatatatttattattttttcaaaaaaaatattagtatttacataattatgaaaattttatatggatttaaggtctattaaatttaatatattgaaacagcaatttttgttaaggcaacatgtgaaatattttcatcaagtattatttatgtatattttcaaaaaacaaaagtattatttatgtattaaaattgatttttgattatatttagctgaatgaaatctcaggaaatgtatccagtttggaaaaataattcaaaacatattatgacccctaaatcaattggagtatttatatatgtatatatatatatatatatttatatattatctcttaatctaacatgatatagatgattcataccataaaatttatagaactccgttaaggtataaattttgaatttgtactttagcagagattgcattttttaataccatatttgtaaattttccacctttatggttagcaagtaaggttcagtagaggtttggccaacctctaaagattatgtagtaagatctgagcaaacatcaattattattatttatgtattttttgaaaatgttattattattgttattaggtgagactataatgaaaaattaaaacttaattaactaattaagtttatgggttaattagctgtacttaattattatt

SEQ ID NO: 47037 - DNA, 1663 bp, Cannabis sativa
  modified_base (1372)..(1372): a, c, t, g, unknown or other
tgtaataaatgtgggacctaccagattttaaaagttagttgaaaaataaaataaaaggaaactgtgtagtctaataaaatagcagcatattcaatataaaattaaattagttgagttggccaaatttaattggtttaacatactatgggatacaattttctaatagaggatctcgattcgaactttctaacaaattaaggtgtaagtcgtcctttatagtgcaatggactttttataattattttgttttttttattaattttactattcagttacaacattttagtcaactttcacgcccgaaaatacatgtcggaatattttttttcaatttttttttcacggagtaactggaatatcaggaactctattttcggtacagtaaactattcggaacttttcaaaaatttacaagataatactgaaactataatgaataccgctatgaaaaaaaatatttcggcatgtgattttggacgtagagattatttaagagattgtaataggaggttgtaattagcattcctcttttggtaatcggtgaaaagattaattatggggtatcaaaattttaagctaagtaatttttgagtcgtatatcttatcatttctcatatctgaaaaagatggtcaaaacaaatagatttgaaaaattcaccatttttctttggattttttgagatttcattcaagtttcctttaattgcaacactcaatgttccacatacataacaagcaacaacacatagataaaaattgcaacagagaaagaatttaacaaacaaactatataaaattgagaaaatatcaggactgatctttcatagtaaacatatattagtagtgttttgttgtttttgtctcctaaaacgtctgtaattgtaaaaataataattgaacagtcaaaagtaaatacattgacatctgtttttagctagttttaccattaaaaagttgagaaattaataagaaaaccaactgggatgcctggtcactcgggaaacaacaccattctatcgtgatatttagcattttcttattgaaagtctcactagatcataaccgctaattcagagaaacatggatcgtttgacgtaccaaactttcaattattatatataaatattacgtaaaaagaaaaacagaaaactgataaaaaaatggccctaggtttctaaccaagttaacgctgcaattcgttgtatattaaaattattcttaataattaaaatgtccgaataattaggcaaatcagctcagacttcagagctgttttgaaagtttcttgttgttgagtattaaacagtgaaattaaacccttcatattgaaatcgaggaagagaataaataattaatttttgttatttttttntttaaaaaaaaagaaagaaaaatggagaagggagacccttcttcttcttcttccccaaatgaccagtactgtgcaatttcgtctcctcctccatctagtgggcatgaaagaaaagcaggaggatggagatctatcaagtacattcttggtatatacataagaagtttttaatgcatgcatatataacatgacatattattatatgactattcagcttatttttcaattttattttctgggtgttttgtaacttttgttttgtttttttggtttttcctttttttttttttt

SEQ ID NO: 47038 - DNA, 1163 bp, Cannabis sativa
ttttatgtgattatatgtcattgatgtttatataaatatttaatgtaaatgtaggctcgcattaggccagaaaacttgaagaagacatgtcattatcctttacttaattggaagcatctcagagttattactgacttaaagcctgagagaatgtacgatttgaaggatgccttattgtggattttaccatctttagaaacattgtctattaatggaaatgacatattttagtttcttcacaatattgagtaaggatgattgtgttctattggttttctttgttaaatggtattgagtccttttttcagattgtctttactcaattagctggaataattaatagggtttaagaataaaacagtcaggaacatattaaagtgtgagaatctttaatcaatggttgctagtacagttcacagatgtccgttctttaatacaaataatcttgggttgaattacaggatgtagtatgacatcaaagtgaaggtattatatataatagagattatatatgacaaggactgatatgaataaagttgtctttattaatatgttatttatcataaagacctaattcatattataacgatgatcaatagtagatcaacataaatcttgagtaaccatgaattcatgttcatgttattagtttatttgattcacttgttaattagagaagatgattcttatcacttctgttttgaaaaactaataatgtggatggatgggaacatgatttacaattacgaaatcctgacttttctaacagattgaatgatatgttccctttatatattaattctataactggaatgttgtgcacaaaatttagatgggatctaaattatatttttactagtgaattaatggtactaaaggataaaaaagtaattagaagagtaaaactgtaatttaaccaaaacttattatgaaccaacacatggaggactaatcactggaattgattatatcaatggacaatgaagtaaaactcagtaaatataattctacaattactaagagttcaattctatagttatagtgtagtaatcatagaattaataaataagaattatttagttgataagactcgataaataatctagtttattgaagcttataattataggttcatagttcccgaattgccaccttgaaacact

SEQ ID NO: 47039 - DNA, 1170 bp, Cannabis sativa
aaagacgatctcaagatttcagatccaaaagagaaagaaaaaaacttacaaagcagtcatcgtcaattgtgtagatgtacttcttcttggagaccatgtatccaagcaacgacaagcagagtccttgaaggaaatacaggaggacttaggacccagaatcctgttaatgtcgttgcggttgtacaactcgtagtcgaagccttctgggacatgaatggtcttggtgggatcaccatcttggacgatgatcagatggtatttctcaaagaatggtctccacatctcaaggaaatcaaggttcctgatagtgggaatcacaatatcaagttcatctgtcaaaaggggtgttgcagcagtggacgctgcggcagccattgttagagcagagcaagagagataataagagtgagaagagtcggtggaatggttgtgtaaatgggctatggaagatggaaatatatacggtagagtacgtcgtggcacgtgcgaacccactgagtccggcacgagtgagggttaacgttacgacgtgtcgggaaattgaagattaatgagactttttccaaaaaaagctaaccgattaatttgtcacttttttgtatttgtttattctataattaattgttataaatcaattgttcattccaacgtgctattatttttattccaaaattaaaaaaaataaaaaatccatcccaaattcgaaaaaaaaaagagaagaagatattgggtgaattaaatatggtgtatttgctaaatcagttgatttggtcagcttcaccacttgagcaaatggtaaatcagatgagtaatttagacaacaaataaaataaaatagaagttttgctgaaattgagatttttttgttgttttttttttttttaaaaaaatggttttggattttttattttattttgtttttttaaggagaaatggtcttgtatttcggttaccataataacattcataaatgtgttatgtgagaatgtagcaaacttttatatatcacgtgagaatcattaaagaggaagatccaaaagaatagaaaaggtaagaagatctaagaatttatggcttaattggtatagaattaaaaataattttattttttttggaaacttaaaatatgtaagatctaaatattttaaaaactaaatccatattgtttaa

SEQ ID NO: 47040 - DNA, 1716 bp, Cannabis sativa
  modified_base (716)..(716): a, c, t, g, unknown or other
  modified_base (878)..(879): a, c, t, g, unknown or other
aaacttaattcaagactcggaccttggacctagactaaacccgagatccaaattcaaacctaggacacgggacctgacccagacgggaacccaaaccaatctggacccgaatttaaactcggaaccgaatttagacccaaacccagatgcaaatccgggaccaaacccaggagcgaactcagaacctgaaccctaacccaagaccggacacagaacctgacccaagcctgcaactaaaaataattataattattgtgtattaataataattcagcaaaacaacactttttttttattatatatatgtataagctatatatatagtataccgagtagttattttctttctccataagatgttgataagatttttttttttgtttgtttcagtaaggccaaagtttggtgggtcaggggtcactcatcttgaacgtactactggctgaaattaacaagatataaaattaattatttataatgtaattaataacaaattataataatattacaaaaaaagtaacaaattatttataatattaatataaatactaaattattaatgattcaacaaaattcatgtaatatatatggtgtttaatattattgtagcttaaaacgtaccacaataattacctgaacaagaattatgtggaaagaaagagaaaagtaataaaatcaagactgacattttttgcagatatatatatatatatatntatatttatatttatatttatggaaaattgaatatattgagaaaatatattatttttttacacacaatttattaatatatgttaatattaaatatagtattatattaataatactaacataaaattataaatttagatataaaactaatttttttttttttnnaaaaaaaaaaaaaaaatcgggtcgaatcaaatcagatccaatctgaataaattgggttagatttgatatgatccgagcatctgatctagtggagcgagacggaaaagatttttatatgatttggataagatcggatcatcgtcaaattaactctaacctaacccaatgacattttgaacaaaatattcttatatcattaaaatattttgttaaactaacaaaaattattatatatatttacactttatatataaacataaagatataaataaaaataaaatattaacacatattttaatggagtagttggcctcctatttttttctttcaaagtagtaccataaatatttgctaataaacaaaaataatttctcagtaaatagttatagttcgttcattctataatttggctgtatcctaattattatatgcttaaaataaataatatgttccttgtttgacttttaaatgggtttgtgcaaaattataactcgaatataaagcaaacatatacatataaagtttggttttatatatatgagccataccaaattttcctagctagagagacatttttagcttagtagagtacatagctaatctatgtatttaattagtgagttgtaactcaaatattagttataaaatatgtacttatttttgtgtgtgggcatattttgataacaaacgtataatttgaaattcacaagtttctctcgaacgcaggagaatttggaatctgacttgagaaaagttgattgtggtgggaaagaaaaaagagacttttttgtttttaaaaaattgatattgatttttctcataaatcttaatctaata

SEQ ID NO: 47041 - DNA, 1581 bp, Cannabis sativa
tcagtccgccgctattaatgattaataccgaccaagcattaccgggggaacaataccagcggaactccgccggtaattacaaataccggcggatttgggaattaataccggtagatttttccacctttatttattggtattgttgtagtgtaactcccgagtcaggcaaataaattcactctaacagagattgtcttagtgcttaattagagagcagaaggaaatacaattttagataaaagtcttcacaagtgcttagtgatcactaatacgtactttacacttagttgcgtaaattaataagagttcttttgagtcttcttgttctcaatttatattaattaatgtattcttattatttacgtgtaacctattatttccttgagtttgtgactttgcttctctccatcttttattttctttatatttaattgcaatttcaaattttgagttataactttatagctagttataataatatcatgattgatgatctatttccatttaaaatattatatcttctctaacagctatgccttattttaatttcttgaaaggttttacttgactaaactaaacaaattaatgaaaatgggaaaacgtgtaaacaaaaataatttgatgttgtcattattgttatactgctattgaaaaataaaacaggaataatattattgaataaaatttttgaattgagttgcggactaaattgtgttctttaagatgttcgtggtactgcttaaaaatgtgcaagcagtcagaaattttcgatcgtccccaaaataaaatagcacagtcaaaatactactgtatcgaaactctactgcacgtacgatagagaaccatcgaaacaccacacccaaaaaaataatgctcgaactacttatataatataatcgtaaataataaactgtaaaataatttttaataaaaaagagaacacttctctctttacaaattaattaatatgtttaaaatttgtttcaattaattaaataaaaataataatttaataaataaatttttttcaaaaaaataaagtatcataccactctagccagctcggtacgatcggacgacacacctatgtggtgggttaagtgtgtgtgtgtgtcctcacctattcgcacaaaattagttacctcaacttagaatgtgcaagtagttagaaattaccggttatccctaagataaaatagcccagtcaaaatactactatattggaactctatattggaactctattgtagaatggaaaattgttgaaataccacacccaaaaaccctaatgcttagattacttactcatataatataatcaaaataataaattttaaaataatttttagtgaggacaacaaatctttttttaccaattaagtaaacatgtttaaaaactattttaattaattaaataaaaataaaaatttaataaataaattttctctaaaaaataaagtttcacaccacaccagctcaatacaattagacgatacgcttatatggttggtcaagtatatttccttacccattcctacaaaactaagtactccttagagccttatcccaaagtactaaggt

SEQ ID NO: 47042 - DNA, 1688 bp, Cannabis sativa
  modified_base (1549)..(1550): a, c, t, g, unknown or other
tttagccgccaatatccctaatttttatattatcattattgtttgttaactttataaaacatctccaattagtagagtaccaaaggtacacggtgtcagtatgcattgttatataatattagctttttttcttataccatataataaacaaaaatgtgtaaaatttgagatttactatgatttttaattgatgattactaatattaatttgaattatgtgtattgtaaaattgagctaaatataataacagtatattattatgattagtaatattaatttaaatttttgtgtattgtaaaagttttgaaaattttatggttcaaaattaaaagtttttgtgtattgtataaaattttgaaaaatttattgttctaaattaaaagtttaaaaatatgttttttttagtatagcgtaatagtattttacaatcaattaataatagctttatagcatcttgagttcaaactccctcccttgtcactaaactaactttagtggcttgtttaaaaatatgttcgtgatataaagtatcaggttgtagttttcgagttagtgccaaactttcaaacaatgtcaatctcctggtaagaatactcctaattgtaatttattttcatttatttttgtaaaatgtaaaataattttacatatttatactaattagataatactaacaatttactaattaggctttataccactttcatgtaacaatttgtacacatgcatatctagtttcaaccatcttaaagacaaaaaattgcaagatttttaattataataaacaatacttaaaataagatcatctctttcactgatcatagatacccaaaagaagataagctaagctagctaacatagactcacacccatatacattatatacatatatatttatataatatgcaatgtatctatacatatatagagaaattaagtagttagtactgatgtcttatcattaattccatgtgtagagaacattaatcaacaatcaagatgaatgaaattaagagttgattttcccatatgttttatcattgattttcatgtgtcatatttttcttccacgtctctcctcattttttggattaattagcggaggtagctaagtatgaattctcaattgaaatattttaatttacacaagaaaatgattgaaggcaaatataatttatatttatatatatgtactatacatgatattgatatatatgaacataacgaacttgactcttctgcaactactgttactgagattaccacttttgactagcgttttaattatatataaatatgtgtatataatacacgttatataaggttacgagcatacatatatagggagtatatatctgtgttgtggatcttctaattaattattaaaaatcaagtattatttatagtaaattaaaccttaattaacaaagaggagtgttaccgtcaacgtcctgttacaatgtcttagtcaacttctacgttcgaaaatatatgttggtatattttttttcattttttttttcacgggagtgttcgttatgcttacannatcatccctgtaaatttttaaaaattttcgaatagtttacagtgtcaaaaatacgtttgaagttttttgaacgcgcgtggtaatgtggaatatcaggaaccctggttttggtattgtaaactattcggaatttttcaa

SEQ ID NO: 47043 - DNA, 627 bp, Cannabis sativa
aaaatacattcccatggcataaacagcgaggaacgcaacatcaagttccccgagaagcactgttccatccgatccactaaacggtgcccaaccatctccaagagcccaagaaagctttctgctttctgggggagcatcaacgtatgttatcctccatggtgcaaaattcaagcccaactttgttgattggggatcaagggaactcttcacaacacttgtggtttttctggcagcatggtagctagcgtatgccaaaaatgtcacaatcagaacaattgcttggtgggttttaaaggaaactggagacctttttatgtactccacaaacttaattcctgggggcttgttattgcaagtttcttcaggtgcattctcagtcaatgaactcatgctttactttgattgcctaaaatcttcaacctgtaaataggagggaaagagaaaaaaaaaaaactacagttatggcatggttcatttgtaaaatgcaggttagcaattatcattttatagcagtttatttacgtagttattacgagtaaattcatcatcaatttgtttttctcatctacttccgagaaagtgtagaaaaaaactgttaatttaaaatcgtcttaaaaggattatttc

SEQ ID NO: 47044 - DNA, 1162 bp, Cannabis sativa
tataaaaacacagtatttttgtaaactttttcgtgtgacagtatttttgtaaaaattatttttgtaagtttccctaacaatattcttttatctgttatatggtaagttcagttgaattgtccacgtgtaatacactcgtgtacatatagtacatttatattggtccacgtgtccgccatatttttttatatatattttatgaacataaaacttatgtaacaagatatgatttattttctaatacttgcttgtttcatatatgtgtaatttctgccttttcagatttgtttttttttcatatcaattttttttttttaaaaaaaaaaaaaattgtctaagtgctgagttaccatattcaattgttattttgatagcggtaaccagttaccagattcttcttctgctaatcaattttattagtaaccattatcaactagttgttacttttatagtggcaacttgactaactaccttctaatacttcttaaatatatatatctatatatatttttgataactaactttttatttctaaatttgtctgactgtcttagtaagtaattaccatttagttgttattttgataggggtaaccagttaccatctcttcttctttctttagtggttatcctgatctattctgtttcttcagatgtagcagtaactaggtacaaatcattcctacatggcagtaaaaattgataatgataacatattatatcaccacattactaaaaaaatttaaaataataatacattatattgtgtataatttaaaaatacataaaaacaataaaaaaaattacaaaaatacggttatatgaaattttaaatatttttacgattttatttacaaaaatacatgtacttttatatatattgtattcttgttaatttattattgattttttgttattagtattatttagatgttatattattatcttgtttcttttatttttatataattttttttattttatattgtttttataaaatatcgtaaaaatatatataaaaaaaaaataaacgtaaaaatatgtacaaaatttacaaaaataattagcattttatgttaattattcctgattataaaatgtgtacaatttaaatttaagtgtgtaaatatctatttacaagtgtatatatataagtgtatata

SEQ ID NO: 47045 - DNA, 2712 bp, Cannabis sativa
ctccttattgattaatggtgagatagggttagtgattattgcttttctctctgtatgagatgtggtaaaaccaactgatacgcttctgtatcttttctccttcgtcttgaagtttccatggctggggagaatgaaattttgcctactacttcggaggaggtggaaaaccttcggcttcagttcctggaggaagcaacactggaactggaagcagattttgagctaaatgctgagatagtgaagacagggcttgtggtgaaactgctggggaatcggactatgtccaaaaacagaatcaaacagatccttactgagatatggggcttcttgaaaggagcatggaagataaagacccttgagaaaggcctctggggcttctttttcgacaatgaagacgacaagaaggagattctaaaaagaagaccttggttaatctctaatcaacttctcaatattagagattggccggaggatggaagttggcagaatgtgaatatgtgcaaagcttcggtatgggttcagattcatggattaccaactccctaccttgtggctcaaaactctgctgtcataggggccaaggtgggcgaattcattgagcatgatggtgcggataacagagttatctctcggaggggcttcctaaagctaagggtggatattcggacggacacccaaataccagcggggttttatctcagcataaatcggaatcgccgggaatggattcagttcaagtattgtaaggtgccggtcatttgcttcaactgtgggtttctcgatcacaacgaacgaaattgctctcggccaagagcttttgcctatcctcccgtggggaaagctgtccctctttatggtccatggttgaaggcttcagtcccaattagggattgcttcgacactcgacgtcctgcccttcatgacaatttcggccccaaacccgcggtgctggaaaaaagaactcattctggtggagtggaggcggtgaatcttcctcgggggcagaatattcagggcaatcgtactgttgacgtggccatgcaaccgttggagaatacgaatggtacgagcagtacaagtggtgtggcggccactaccttgaattgtcaggagaattttggggggacccatatgagtttgaatgagacagctgtaatgaaccttggtgtcaatccttgtaacaaagccctgcgaagggccccttcctcaggcccatctcacccaatggtaaatttgggtaaaaatccagatgatgctaatatcataatgagccttatgcccaacgtgggcccaactgcagcccaaatgatagatataccccaacatgaattgtgtaaatcccgtaccccccaccaccatcccgagcccataatattacaaagcccaatgattccatcctcctctggaaccaaggctttgactccgattaaatggttccactcagaccaaggagttgaagatacgggtggcaagaaaagaaaggcgggtggaagtgtaactccggtggtcattggcgatggtgagaaggaaaaggaagttggcatcacatggatggaagatggtaatgtcgataaacctgtttttgcgatgggcagctgtgatagtcttacttcagtggaacgggggaagaaaaacaattcaaagaagaaatcaagtagtcaaaggcagaaaaagaagagtaaaggagcgaatccgggtaaatcttcctctccctttgttgttgatgatgctaatgttgctacttccttggggaatatggtcattgaaattaaactcgacaaaaattttcaagtgggcgaggaggcggcccttaccaagcccccccaatccccatgaggtctctttcgtggaactgccggggtctggggagacccgcggcgcaacaagcccttcgggcttgggtgggtaagttcaaggtggattgtgtttttcttatggagactaaagtggattgtgatgttatggcaaagattggtagagagctaaaatttcaatttggcaaattcattgcttcggagggcctagcagggggtttttgcttattgtggaactcttctgcgggcatcaggacggtgaatgtttggccaacgggtttcgaatgttgggtttttgatgagactataaatgttgagtggaatctgtatgctatctatggtccaccatatgatgatcgcaagagtgacttttgggaagatgtggctagatatgtaaatgatgacaataaggcttgggctataatgggagacctcaatttaattcataagaaggaggataaatctgggggaaggacctttgcccctcgggatggtcgagtgatgaatgactttttgtttaatgtgggtggagtggacattgggttctctggatgtaagttcacttggcgaaacaaaagggaagcggggggaatggtaaaggagagactagacagagttctttctaatccggtttggctttctcactatcctatgggtagagttcggaatcttcctatggtggcctctgatcatggccctatactggtggacacggcgcctatgcgttccaaaggttgttatcctttcaggttctacgaagcttggttcaatgaaaaatcaagctttgatatcattaacgctgcttggaagggggccgactctcggtctagtaattgttcactgttatccaaattgcagtgcacaaaaggggagctacagaggtggaaaaaagaggttt

SEQ ID NO: 47046 - DNA, 2582 bp, Cannabis sativa
aaattaaattaaaataaaataagtaaaataaataaattggatatacaatgtaatttcctcatttttaaaaatactgtgctaaagtttcaaaattacaaaaataaatactgtcttgcttttaaaataaaataaaaaaaaaaaactcaaaaaaaaaactctagaaaactgcaaacactataaaaaataataaaaagataactacaaagtaacagaaaaataacaaaacaatatcaactcatcaatatgtttttgtactacgatttttttaactagttttgacaacttgatttattttttgtattattatattattctttcatagaatttattgttacaactttatacttttattttttctctttttctttttgagttagtacagttaaaataataatttattttttaaagttaaataaataattacattaataatagaaataataaaatcttatgatttcaagtatttaatataataggtaaaatataattaatatgttaatatctactactgcacattgtgtcaattaataaaacacaaattttgtcattgttttttaataaaatttgttaagaaaataaattaaatatatatttaaattacaaagcaacacacatacaattaaaaaaattcttacaaagaaattaaaaatatgcaccatcaaaaatacacatgaataaaaaaacaactaaaaaataactgttgaacaaaaaatattctgaaataacaactaaaaaatatcataaaaaataacaaaacaaatacacatatataaaataaaaaaattacgtggaataaaccaaaaatattcatcataaaaaatacacataaactaaacaacaactgtacaaaaaaaaatacataaaatcaacaaaaaaataactataaaacacctaaacaataacataaaaataactataaaataacaaaaagacaactataaattaataaaaaaataacaagacattgacattgttaaaatatgcaaatgattcataactcaaattcgaataaactataaaacataaaaaaatatacttttattaatcatgtgaaagagagaaagatataagatgcatgagctacttctctcatagtcaattagttttcagatggaaccccttccaccttatcaaattctaacatggtatcagatcaattaaaaggcttccgcttctctacctttgacctctatttgggaccattttgccaaagagtattagtttctagtgttgggatctttgacctattttaaaaaatctacaaatttctcgatgtgtacacctacaaatttcttcatttggccttgtgggatctttcaaatattacgtttggccttgtagtctattaagtttgttcattatatccacactttttaggctcaaatgtgaggaagatgtattagagttagtccacattgctaatgtgtggaaacaaaatattatatataagatctatgagctactcttctcattgccaattagttttgagatgaacccacatgtacattaccatatgctcaccctattatacctttcaaccattcaccttcatcctaaattctaacatggtatcaaagccaaacgaaattctaacgagtatccaatctaaatccaataactggtccaaaaagacaagccaaaagagccatttgagatttgggatagtgagtcaaaagtaccgcaagtcgaaaaagacgatccaaaaaagagctgcttatgatccattgtgagctaaaagtattgccggtccagaaaggcgaactaaaaaaagagccgcttgcgattcattgtgagccaaaagtgtctttggtccaaaaagttgagacaaaaaaagtcgattgtgattcgttgtcagccaaaaagtaccacttgtgatcgagctgtccaatattagtaagcaaaaattagtaacgctggcaatatggttcacgcacgacaaaataattcaaaaacgatcaaaataaatgggtttgggtgacacgtttaagaattgtgcatgtttgtgtttgagtttctacctcacgtttaataattttgccgtgtttgtgtttgaatttctaacacggttaataatcgtgtcgtattcgtgtttgtgtttctgacatgtttaataatcgtcttgtgttcgtgcttaccttaatcgtgtcatgtcatagtcatgttgacatatttaataatcatgtcgtgtcataatcgtgttgacacgataacacgaattagtttccataaattttataaaaaaattcaaaatttttgtatttataatgataatcgtgttatcgggttgtgtcgcgtgacctactaattaatcgtatcgtgtttgtgtttgaggttgcgacacgtttaaaaaatgtgtcatgtttgtgtttgagattttgacaatttgaataaacatgtcgtgtttgtgtttaccttaatcgtgtcatgttataaaaattagacacgataagaattgtcagccctaaaaattagccaccatcttgagggaaatgttagagtcccacattactaaggtgtataaatataacactatagacaacatatatgaactagtccactcatagtcaatttttttttagatg

SEQ ID NO: 47047 - DNA, 2392 bp, Cannabis sativa
aaaatattgtcaatggtattattttattttttaataaagtattattttttttattatttgtattggactacttttaaaatgggcttgattaaaataagagtggactcatcaatcatgattaagatattgagtgaggacttttgtgaattggactttaataaattgaacaaagtgaattaatatatgtatatatctacatataaaaaatttgatgtatatatttgagtgagggctttagcctacgtatgggctaaagtccctccgtccctggtcctacactcacattttttgtaattttgttagtccttattttaactagtccattaacttattcaaaattatcacatgttgaagcgttattaaaaattaggaactaatgtgcatcaaatttttcctaataatataatccatccatttgtaatatgccttctaattaaagtttatttatgttaaagtagctgtggtatagttctattaaataaaaagatctccattagtattattcttggaaagttgttcttgaaaagttaggtgtctcccggatgttattccagacagctaacttgtccattgtgaaaggaatcttgtggaatgatagctgagtatagaagggagttcctggataactagctgagtggaatgaaagctagcctcactgtgggatggagttctagttaggtagttgtctctcctggaatggtagttccggataatcgactctagcaggctcaatcctatccgaaagcgtcagcgagtgtcattagttcgtgagtccgaaagctcatatatgttcccgaaggctctaatacttaagttggcgttgagactggaggcttttctcaaagaggagttggttaagttagttatttctaactagcttaacaacctcacttcttgcagccacccactttattaggatcttatcctaagtctataaataccacattgagttgttattttgagatgagattgagaactcggttctcatgagattgagagtttaagaaagaaaaattgagaggtagagagagaggtgcagagaaaagagagagaaattgagtttgaattttgtaagaaaaatcttttatagatgaagaagatttttaagtgcaagtgtgagagttgaaaaacttagtgagaactcaacagagaatcttatctcgagctgtattgtacctattcttgctcatcaatcaataaagaaagatttttgtgatgttttgaaattagagtagatccataaatcacatcgatctatcagacttaaactaatatatttttggcgttaatttctttatttttttacatttataccaaaatcaaattttatttgataaatatttgatactcaataagctttgcaatctataattaagaaacttaagtcttaactataaatattcactttgttctgtcacttttcctttttcctgtctcaaaaaataaaatatgtaatattatttaaaattacagttcatacattcgaacttttaaagatatcattccactatctccagccaattgtttaacttttttttttatgttatttattttataactatataaaattctttcataaaaactcaactctctaaagtttgtttcttcaaatataattatttttcattattagttctttctcatgtgttattttacgcctaactaattactttaagtagccttctatcattatcatatgataaagataaagtaaaagtacttatatataaatgaatagatttattctttttctttttctttttcttttttctcttttactttttctttttatttgtatatttttagaagaatataaaactagaagagtgagatcatccagtcaaggttttttctttaatgttttatatatctatacatatatttatacagagaagaacagatcatctatatatatttattgggttgggagtgaagaggattaagccaacatctttctccatcttctcttgatttcttgtaagtattcttaattacttgagattttttgtactttaaatttgccccatatactatttttttcattttttttttcaaatttacagtttaggtttctaaagtgattgcaacgctagttgcaataagagtttctgtacgattttttgttacaatttaggttgaagcgcttgttgcaataggagtttttatgtagaattccgtaaaaatacaaaaaaaaaaaaaattaaagtataaaaatgaaaaaatccctttgtttttatggatattgagccactatttttattcttattggtagtttgtttttttatttttagaatttatgttacattctattcgttttttaaaaatttagaataatttacaacatcgaaaataaaatttaaatattcaatttctttattgtaatttagaattt

SEQ ID NO: 47048 - DNA, 1470 bp, Cannabis sativa
  modified_base (205)..(205): a, c, t, g, unknown or other
gagatataacgttcatgtatttttgtttgttagaaccattaatgaaaaaagattatttgtttatggatcttaatttatttcttataaagttatttgaattaaaaaattgaatattatttttttttttgaaaaaaacaaaatttaggtcactatatctataaaataattatctaaaaaaaatctataaaataataataaaaaattnaaaaaaaaaagaaaaaaaagatatagtgacgttttttgggtgttgttcttactgttttagtctaacaaaacctgactctaaatgctttcagtgacgcgcaattagtgattgtgtaaaagggtttagtgacactcgctgagtgtcactaaaaactgactttccagttaccctcattagtaacgcgcaatgaagggtcactaaacacttttagagttactcaacgtgtgtcactgaaacccatttttctagtagtgaatgtcttgataaattccaaccaggataagaaacacattcatagtctaagccgggagtgcttgcacaactatttaataagaatttccttaccggcacgagagagaaatttattgccccacaattaaatacgtttctgaaccttttctttcaaatagacaaaaatcacatttttatttcttccaacagtactcggcagccccaagtacttactgtgctcagaagcttcaaggatgcccaacctattacatatggactgtctcatggtggaggaagtattagtactgaagactagatagatgacttaccaaaattcacatgctgtcccgtggttgtagcgaacaaattcaacagctgaagaacatggttaaacttcccatgtgtcgcctaacaatataggaaactatcatccgcaaagagcatatgagatacactcggtgctccattttccactttaaacccatgaagccattttctctcctcaaatcttcgaataatagcagaaaaagcttcggcacacacaagaaatagatatggagagataaggtcatcttgtcgaagtcctctacttggcacaataggacccatggtttggccagtacttacgatctgatacttcaccgaagacaagcacccaaaaataagccgaatccatttatcagcaaatcccattcgagtaagcattgcacacaagaagtgccaatccactgtatcataggctttacttaagtctaatttcaaagccataaacccatccttacccacttgcttcctcttaagataaagcaagatttcaaaagagaccataatattatctgtgattaatctcccagggatgaaagcactttgatgtttggaaataatttcagataataaccccttcattctgttaacaagcactttagtaatgacattacaaagagaaatggaactttagcaatgactttagcactttagtaatgactttagcactttagtaatgactttagcaatgacattgcaaagagaaatag

SEQ ID NO: 47049 - DNA, 1339 bp, Cannabis sativa
gtaaaataatttccaacacaagatacttatccaggtgattggtagaaggtatttacaagtagtcctaaataagagtctggtaagtgaggctggtgtaaggggaaaaaagatggatgatttctgaaaattaaccaattgtcatgatattttctggtactgggcaagggcctctttgatagcattgcaagcttggatatttgaacgaaaaaaaaagaatgttgtcgtcagcaaagagaagatgagaaacttttggggcagaccgagctatttttagaccaaatgcatcttcattgagttcagaatgctttaagatggaagagagacgcttagaactgagaaagaaaagataaggggagagagggtcaccttgtctaagtcccttagaaggaaccacatgcccaagggaatgaccatttatgttgaacttgaaagtatcagtggtcagacatttcatgattaaagaggagaactttagagggaaaccacatttttgcatgatctttctaagaaagatccattcgactctatcaaaagctttagccatatcaagcttaacaaccatccaactaatcccacatttctttctacttttgatggagtgtaagatctcttgggccataaggatattgtccaagatgagacggcctttaagaaaagcactctggttaggggagatgagagagttaaggaccaacttgagtctattaaccaagaccttagagataattttgtagacagttataggtttgtagtccttaagagtaagagaatttttaattttgggaataagagtgacaagagtggtattgaaatgggagatatcagaaagattgttgagaaaatttagaaccgcttcagttagttcccttccaaccacactccagttcttttgataaaatttgttattaaatccatcaatacccggggatttgtctggggccatttaaaacaaggcttttttgacctcagcaggagagaaagctttgtttagagattgatagtaggaaggatcatggctggggaaagggccagagagggcagtgtcgatatcagtttcttgagggcattgagaagtgaagagttcagagtagtaggattaaatgagggacagaatcaaagcagtgtcctcaagaacaaccccatcctcagtggtaagggagttaatacgattggcccgttttctatttgaggcaaacttgtggaaaaaacaagtgtttttgtctccactaagtctcttctttgaaaagaagggtgtcaaggttattttgcaacattttttgatgaagtaaggcctctggggaattgtcctcagatttcatggctttttcgagggcttttt

SEQ ID NO: 47050 - DNA, 4598 bp, Cannabis sativa
aatctaaataattaaaaataaatttttaacgacattaaaatttattcatataaaaatatttaatttaaaagaataaaaagagataagaaaaggggaaaggaaacatgactaattacctaatttgtctagctatatatatagaaaaatgtgttattttgttttacatacaatacaactggctttactaataataaggacgtaattgcaaactttgttttcatttttatttcaattattataaaattctatctatatgatcacatagtgatagtactatgattaatacatatgtactcaacaaaagtattgtgaatcatataattaaaaacaaataaaattagggacaccacctcttgatgaatgataaaaataagtggatatattaattaattaggaagaagaaaataaaatatttttgtcctatgacatatcttaatatatcaaatgtcatatgcatgtgttgtggtacgtacttgacaattacttgagtttttcttaatttcttaacaacttgtagataattattaacttgaatacatgcatgtgatatacacacatatatatatatatatatatatatatcatccttaacttttaagaaaaataaatagataagatcatacaaagtcatatatagatatgattttgtcttgtgatgcactttcacagaatacattcggtggtatattaaatggatctcaggtatattaaataagtattagggtacgttttttactttttaactctaattacccttatatcaatctcaaccttcaaatcaaataacttcatcatctgacggttgccgtacatcacagattaccgtaaaagtacaataataggacaaaattatatccatatatatataatatatatgaaaagaaaactctatagtaattaggatattaattatttgtccttgttggtagtaaggtttttattttttgttataaaaaaaagtattattataaactacacaccaataaatacatatatgtatacacataataccaataatatgtaactaatattaattaaaccacaatttcaaaaaaaaatatatatatatataaattgattcaaacaattctaaatgtttagatactcacacttaaaatactagaagttaaaatgatttacccatcaagtttctctagaattgttagccataactagagtatttatttttttttttgaaaagaagcctaattatatataaataaaagttaaaaatcatttattgtaaaaagaacacatttgttttttttttttttaagtttgatgagatttcaaagaaagtgatgatgaattggtcaatgaatgtactacatgaatatatatgttgggaatatttattataagggtctttggaatattatcacacaaatattatcctataataggttataataacaagattggaccaagtcagacctgtttcaattctaacatagacaagactcagtcaattttaacactagaaagaaagaaaaaaagtcacctaattcaccagatattcaacttgaaacccctttctaattcttaaaccagatcataagacatagattcaatctgtcagaatccactcctctcatgacttttccaaattcccctttattgttattattattgagacaatattttccaagagtatagagaattaatgatcacctatcaacaacttcattagaaagaaaaaaaaacaaaaaagattttcacttatacctacatttttaggcccaattactaatttttgatttctggcccaaatagtaagcccagaccaccactaacatttgtgacccgtactttcagccttctacatagttagcaatataacaagggatttttactgcttaaaattacaatttttatttatatataagttttttacttgtattttttgtcggttaattaagatttttaccccctcaactttgacatataccaaattaagcatcctgaacttttaaggtcattaaaagttttgttggatttaagaacttttatccaatattagtaaggacaatctaacattcaagaggcttgatttagtacatgtcaaagagggacataatttgacagacatcaaaatttggaaagcataatttagtacatggacaatcacaaatttagtaaaattgaacaaaaattcttaaatccaataaatgtaatagttcaaagagaatttttaatagtcttaaatgttcagagaacatgatttgttacacgtcaaaatttaaagggtaaaaatctaaaatcctgcttaacatttttttttttcagaaaacatcattgttttcacattagtttcatgtagcaccaacgtgaaaacaatgaaaaaccaactgtccatatctctattaatagaatattaaaatttgtaaattaaaaaaaaatataaatttgtattttgtaaactttttgacatttttaagtatttatgaaaatatcccacatattaatatgaaccaaagctaaaatttatgaaaatacaatacactaatcacctacctaccctcatctttcttcatccattctcaaatcattatttgatacacacccaaccttcttcatattttcatgaagatcattaagcaaagaataaacaactttattacattgattattagacttatcaccaactacaaatacatgcaccctatttccaacttcaatccaactacaaccaggttgcttcttcaatcctttttccttcatttttgacctcattttagcagcttctttccattttccagatgaagcatagatgttagacaacaatgagtaagtgcctgcactaagtggctctagctcatcttcaatgagtttctctgcagccattttcccaatattcatgtcaccatgaacattacatccaccaagaagagctccccaaactgttgctgatgccttattagtctctagctgttcaatgaaatcatatgcttgtttaagcttccctgctcttccacacagatcaacatagcatgtataatgatcttctctaatttgtattgttctatctctaacaagctcatcaaagtaaagtaagccttcctcaaccaaaccagcatgactacatgctgagagtaaccccacataggtgacatcattgggtttaaaaccgaagccttgcatttcgttgaacagtttgattgcttctatcccgaaaccatgatgagcataggcagcaatcataccattccaagagactaaatctcttcggtttgtcaaaccatcatcgaaaatctttcttgctgtgcttaactttccacattttgagtacatgtttatcagggcagataccaatgtttcagaatcgttatgattgatcgttttacttatcatctgatgtatttgttgtccctcaccaagaccggataagttactacaagcactcaaaacactcacaaaagttgcttcattaggtttcaaaccttcaactgccaccattttagaaaacatcttcaatgcttcttcattttgtccatcttgtataaggcttgtgatcattgctgtccaagagattgaattcctataaggcatttcgctgaacaagtaccaagccttctttaattcaccattttgaataaaaccagtaatcattgtattccatgaagtcatgttcctttcaggcatcatctcaaacaattcaaaggcctcattcaacttcatattctgtgtataacccgtaatcattgtgttccacgacaccacattccgaacaggcattctatcgaaaacttctcgagcatcatcaatcatcccatttctagataaaccagcaaccattgttgtccatgatataacatctttttcgggcatcgaattgaatatccttaaagcatcctcaatcctatctactcgggccaaaccagtgataatcgtattccaagaaacaacattctttacctccatcttctcaaacaaatctaaagctaaatccacctgaccatttcttgaatacccttcaatcatagtattacaagatataacattcttctcaggcatctcaagaaacaatctttctgcttccttaaccattttcatctttttataaccacaaatcataactgtccaagtgatgacatctttcttagcatcaatcctatcaaacaacttcctagcctcatcaatcatcccacatttgacatacccagtaatcactgtggtccaagttataacatccctctcaggcatttcatcaaacaccttacgtgcatcgtaaattttcccatttcgacttagcttagtaatcaaccaatttgaccgtgcaacatcagagttgaggctataatattttctgggcaatgtgatttttggggcattcttaatacagtctgtagagaaatgcataactctagtgtcatactcatgtttggtaatcggagcaaagacccaaaggagatattttggtctcattgtcatacatttcttcataacaacaattgtgtttctgtttgggttgggagaaaattactaaggacaatgtagtagtattagtatttatataaacccaaaattttcaacatatatatttatttcatatctctatttttctacatatatacttagggaaatttacacctattact

SEQ ID NO: 47051 - DNA, 1436 bp, Cannabis sativa
ccttgcacgtaactttattctagttgatagaaaagtagctaagactacaaagaagtaattccgttttataactttaataaattattgttaaattttaattttaaatgtgttactatttttttttagaaaaagactagttaaatttaattatttttaatcttaattactttttataattataattttttttttaatttttaattattttttcatattaaaataagatgaaccaatgagaacataacacataacaacataacaagtccaatcaatacttaacaaattgacaataatagaaataataagaatagaactttatgtatttaatttgtaaaaaaacaaaatggtatataagtgtataaatttgaagacatgaggtatttatactgcaaataattttttttgtttttgcttaaatttgaggttgaaatgatgtcagtcttcatctgaattgagttattataaatttaattttgattagtataagtgtttagctctcaactttgtttgatctaagttattttactttattactttgctatttttgaactactattaaaaggatacaattcaatttggttaattatgagtttgacatagaatctatttctctagacagtttgaattctctggtgctaaatgattatttggagtggcatattaatgttgtttagctcattagatggtggagatgttaggagtctttttcattttgtttttgtttgactgttagttggttggtttaagttttttgttcacctttggtttcgtggtagttttgccattgtaatcttttgtttatcgatctatttgggtgtctctgtcaaccccctttcataaaaagaaaaaaaaaatataagttaggactatcaaacataatttaattgatgagtttgtcatctaatttcactagtgtgatgtgtaatatcttaaataaaaattaactttataattgttgttttaatttttattagattttaaattagtttacatttaatttttaatttttaaataaatttttatataaaaaataaaagttaaatatttaagtgtaataattttttttttgaataaaaattataagatctattaattaataaattcgtttaaaagaatagaatgcacttcagaggaataatcctccaactaaagcacacgactagtatagaaacaagagtctcttgccaagcaatgaaccaacttatttgcagatcgttttacaaaacacaaattgtgaaagtatattaatatcgctctgaatcgcttggacacacaccaagctatttgtttccaacatgactctatcccacgaatgagttgcaatccaactcaatgtttgtttactgcctattatctcagtaatttcgggttgaacacatccaatctttccctttttgaatgcttctaccatagcaccatgatgattctgagctaca

SEQ ID NO: 47052 - DNA, 2354 bp, Cannabis sativa
  modified_base (441)..(442): a, c, t, g, unknown or other
cggttaaaattcaacaaaattattcccaacgacaatgttgttgttggtggatcttaaactcccaacgacattgtcgttgggagtaattttgtcgttgttgattgtatttttgaaaaaaaaaataaaaaaaataaaaaaagtcccaacgacattgtaatgtcgttattgataattgtatttttagtgaggactttatgtcgttagtaataggggcgttggtaatgcccctaattcttgtagtggcagtctctatttggtctacgtcattagttatttttatttgaaattaaattaaatatatttataagaaaagattataactgtgacctatacattactacaaaaaaaaggctatctttagtgacaaatttttaatcacaacataaattttttgtgactaaatgacttttagtcacaataaaaagttacttgtgactaaannataatatttagatacaagttgtcaataatttagttttagtcacaacaaattgtaatatttgtgactaatactttattcacgtacttttaagtcacaacgtaggaatgatatttataattagtcacaatttttttacttttagtcacaaagtcttattgtgactaaaagtaagattttttgcagtccattaatgtgttcctgaactttttagtctgttaaaaattatcattgaattattcacaatattgtaaattgttctttcttttaagtttgatcacacatgagaaataaaatgatgacatagctgcttagttagttatcacatgagtgttatgtcaaaaccacatgtgtaattaatttttaaatttatttttacattatttttttaatcattaattgatttttagtttaataattttttaaaatatataatttttatccctaatgtgacaattgattaagcaattatgttattattttatttgtaaactagacaaatgatcaatttataatactatgaatagtttaaaaactatttgtaataggttgaaaagctcatgagtaaaataatgcatatattatagtttggggaacaaaaatcttaaatagccataagaaaataaaatgtggataataacttaacaattaactgtgaggtattcacataaattttaaaaatataacttaaatattattaccgtaaaaaatttaaatttatatatttattgcaatagagagttaaatttaaatatttatgtgataattttttttaatatttaaatagttaaattaataactattatctttctatttttttttttatggaagtactctttgtaattattggctcaatgttactaaaatttcaaatttgagtatacagagacagctctgtctctttatttttctttttaattttgaatttatatttttttaattaaaaagttgtacggaaactgaataaaaaataaaataaaacacctgagttactattattaattagtaaatagtacatagtgaagtactgaagtacacaccaacaacaaaacttatttccaatgttcactatttattatttatttatagtaataaaaatttaaaacacatacgcggctccgcgtcgccgcacacctcggacaactcgacaacacgtggcacttacttgcctgccatccaaaccaatcatatctttacacgtgtcaaaatcaccactcccaataaagaaagaaaattgtaaaacaagcaaagctacctctctctcatctttcttgttccccaatctcaaatctcagtcatcacacaaattacaaaaaataataataataataataattaattaattagttttaattttaatttaatttactcgagaatataaaaatgtcgtcattttttttctcatgctttattctttttctttctctttgttttttttactcttttttagaaatgagtgactcgacaaaatgtcccccttagaaatgatataatattccaatattatacttaaagctttagttttagttttatttatttattttttctcagaagaaactccaatgactactttagtagaaaaatgaataattacattaatagatatagaataaaaaaagagataaatataataaaattatgcctaaaatgtacaaggattaaactcaaataaaaagccaaaaaaatctaaatattaaagtttattattacattcaaacattcagatttaaaaaaacacatttcgaaaactctataaatttacattttttaaagctaaaatttctcttattttaagagaaaaagtacttaaagttataatctcacatgtgactcacgaactaccatactcaaatcacatcaaatatcacatttcgctattttactaattttatttcgtaattagcttctttaattt

SEQ ID NO: 47053 - DNA, 902 bp, Cannabis sativa
aaaaaataaatcaaaataattaaacaaactaaaagaaaagttctaaaaaacaccttaaaatttaaagtgtcaagcaccataagaggtactcggcacttttagtgtaattcgatatccgtgtggtctttggcataagattagaattatctaactagttattactatgccttgtcattattagattagttatagaacattctagactacttactatgcttttgagacgaatttacttggactattactgtatgagtccttttcacatgagtgtaatatatagttaattagtaattgtacaatttctcttcattatctatcaattaaaaatattttttttaaaaaaaaaacctaccttaggttgttgtttttcaacctcaatcaagagtttcatattcttcttcaatccggattcttcatattgttcttcatctatggacccaaatttttaattaatgtttatttgtagtatgtctaatcttgattaaatattgaccattagataattattatgttctctttaatttgattaataaagctttttgaataattttcaacatgtacgtgcacttttatttatatgtatagaaaatgaaaataaaacagacttactaacttttatttggactgtaaattatatatcattatcagatgatcgtatacatattaaaccattatttgaatttgtttttgtttaattgtttatttgtttcttttgtttaacaaatgtcacttaatataactaataataaaaaatgtccatttaaaattaagttcatttattgatatatgtatttaataatgtttttggaattacaattaattaataataattagaattaaaacctagaaggtggcaaggtagtattatgattgtgggagagaaaatgagtgaatagagaaag

SEQ ID NO: 47054 - DNA, 1414 bp, Cannabis sativa
taaagagtttcatttcaggctttaattgttgattacatataaatgccattaagaatattctgtgacaattcaactgttgttttcatggctaagaaaaactaaagtagatgtcgaagcaagcacattaacattaagtatttagatgagagagaacatgttgaagaagataaagtgatcatttctacacattagcattgaattgatgattatcgattctatgaaaaaagacttgtcacctcataattcaagaatcatgtaaagacatgggattaattagctcccttatgtaattttgtacaaataaaattattattaataaactcttattttaatattttctcatatttatgcacatcttaattttttatttgagaaaattttagaagattcgaataaacataaagcttagggtttatctgcataagtacattgccacataaagtatattgttatgtaataaatatatcgcgatatatacttctcatatattgtggacctatcgttataattcatctgtttataatgcaacgagaatcgtattttaagtgataaatttaatatattgaccaattggaagaatattaaaatattttatgtatgtataaaatcaatctgattaattttatacatgtataagaatcagataatattttatttgatttacaaattaattatttgccaattttgaatattctaattatgctcatctttttattcaccaaatatttcattttttggtttgcttttttaaattaattgttaaaatattttgataattaaatgtgtcgcagatattgatggagtatctcacctataaatatagggttccggtctctaaactcactactcattctgtgaaaaataataaattcatctaagagagttagagagagcattaaaaacccaaatatccacactaactaagtttttttttttttttgtacatctaaagctcatgtgcgattgaagctgaaaggatcaataactggaggtatttcaatttatttctttgtacgtgtatatgtttgatttttggtattatttcacatttcatatcgatcatatatgcttcatcttgtacctctaatattcttacacaaaaatatctccaattttatcagcaaattcaagattaagatgtgtaactctatcatttacacacattaaaaatatttaattttataggagttacaagaattaaaaatatctagatttatacttttcaaagaaatgttacattttgacaaataataatattttcacacattaatatatctgttacattttatttaatccatattcataaaacttattatatagataattattactaaaatatattccatatgcatgcaagaattttattatgataatattactctacatttgattcggcttctctttcttgcaacat

SEQ ID NO: 47055 - DNA, 2181 bp, Cannabis sativa
tggtacaagactttaagctctcacctccatcccatggtgtgtcatcaggtctgcaatcacagcaacaagtaagaatacaggatacaattacaactaaatcatcaaaacgaagataagggaaagacgtgactgttttgattctagacatacccaaatataacagcattccatagcataatattattatcttgaggagcaccgcttattcccgcaggtggatcatgttgcaacctcttgaaatccctcattagtctcttccttgcaggagtcgacattctcaccgcttatatcatcaataaaaagatacccaaaattaaattcatttttgcaaacacaaagttgaagtgtgatcaaagtgtacagagtagaaattcaaagaaagcaaatattcaagcaattaagtttgaaatgatcctcgtaaccaaaaagcaatataaaatgaatttatacttaaccagctgacggaaatccaattcagtgtttcccacacaagaaataaaatcttgaattgtgagctggatttggtataccgatttaatcatctagatcacatgttttggatatagatgcatctacctcaatatgaaccgcatcacatgttttgcatataactaactaacatacttaaggaatagaaaacccaattgaaccgcagatcgctagaagagaatcaactccaaagcaaaggctcttaattataactcacctaggtgactgggtcagcacaataaattttcccacaacctttatcctagaacagaaccctagatccacaatacaatccaaaagatatttaaactagcacccgaaatccccggtgaaagagaaaattagggtttcttcgtaactaatcaactaacacacaaagaacttcattcatttcagaatcaaattattacataacaataaacgaaaatcgcagctcaaagggcatacctgaaaggaacggtgcgaacggcttcaactacagagtgagcagcacaagttgttttgaacaaggaagaaaattttccaatttccccgagaaagggaaaacaacacaacaaaagaaaattcgatgagaaacaacaagaaattattattgttattattattaggttaaaattaaataatatgtgctatatatatatatatatatatttagcccaccactggtcaccgctctctctctctactctcagtgttaattccataaatatgtattataatatatgctatccatatgtgtggctctcacaaactttcattttaattaagaattaaaagatagttttatgggtttaaaaaaaattgaaaatacatttcaaaagtagatatttacagcacaaatatttaatattttcaatttatacatttatataacatttaattgtaatatataaacgcttaaatcaaaaaaaatatataacatttaattgttttttttatgaattaaatatctaaagttattgttgaccccaaaattctctagaaaagaattttgaaatcaccatgaaagaaaaaagtcataaagaggaagaaagctccaaaaaagatctcatcccgggaatgtaagcactaaggccttgtgaggccctttaggcgcacagtccagcaagccctggactccgaggcctgttatcgcacccgctcgatcccacaaggagaccctctcctcctatcgcgcctgcccgaacccctctcttgccacgactttatggcctgactagtcacccaatgttgtttcatctaacatactattagtatctcgcacaagtgttgtgaaaattatgtacgcaagtatacgcagtcacacaagtaataaagtaataagtaagatcgtcttcacaaggattgcaaacaaaatacgatgtaaaaccaactaattacaacttaaagcaaagagaaaaatacgagaatggttgaccaatgattcaaaattaaaatgactgtaattaaacttattaaaattaatgctactgttgctagaaaattgcttgcaagaaatgtaatatggtaaaaagtggcttgaataactaatccccctagtcaggttttttccagttactatagcattacttaagtattttcacacagagataacataatttttttatgtgtttatgagaatttttcaaaactcacaatttaagttctaccatctagattcacatattcctatatcaaaccagattgcaaaac

SEQ ID NO: 47056 - DNA, 3651 bp, Cannabis sativa
  modified_base (1203)..(1210): a, c, t, g, unknown or other
gtaaaatttgacgaagatgctacatacaactgggagacacaagaagttgaaagaaagacagtcaatattcttctaccgccaagacaagaaattaattaaaatgaagttccgactcagccaaccacagaggaactgacacaagtcatagaatcctgccagactcgctaataaggcgaacaagaccacttactgagatctatgagacatgtaacctagtgcttatggagccagaaagtttggaagtagctcaacaacaagaattatggagacaagccatgaatgaagagataaagatgattgaaaagaatgagacttgggagcttatagatcaatcacaagacaaagacattgtaggagtcaagtgggtatacaagacaaagctcaactcaaatggctctatccaaaagcacaaagcaagattagttgcgaaaggatactctcaataatattatatggagttgactacaatgaaatatttgctccagtttctcgcctcgatacgataagggcattgatagctctagttgcacacaagaaatggaagattttttaactcgatgtaaagtcagcatttctcaatggctatcttgaagaagaaatctatgtggagcaacctcaaaggttcgtggtgcaaggacaagaaaataaagttctcagattgaaaaaagctttgtatggcctaaagaaaattccgcaagcttggtacagtagaattaacagttacttcactaagcaagagttcaggaggagcaagagtgagccgacactctacatcaagactcaaggtagaaatgaaacacttattgtctccttatatgttgatgatctcatgatctacacatgcaatagtgagaagatgataaagaagtttaaagaagacatgatgaagagttttgagatgaccgacttgggcttaatgcactactttctcgggatcgaaataactcaaaaagaagatgggatcttcatctcacaaaagaagtatacgaagacactattgaagaaatttaaaatggaggaatgcaagactgtacgtatcaactccattagacaacaataaagctctcaagaaggaagatggctcactgaaagttgatggatcaaaattttgaagtctaattgacaacctactctatctaactaccataggagctgacataatgtatgcatttagtcttctatcaagattcatgcatgatccannnnnnnntcactacggagcagccaagcgaatcctttgatacttacaagaaacaaaactttacggaatctggtacgaagtcacgaatgagtcaaaactgattggttacataaatagtttctgggtaggatccatggatgacattgaaagtacgtcaagatatgccttcacacttggatctagaatattttcatgggcctctaagaaacaagcaacatttgcgcaatcatcagcggaagcgagatatattacagcaacaatgactataaaccaaactatatggcttaaaataatacttgaagacatgtgaggttcaccaaaagaggctacaaagatatattgcgatagcaagtcagctatagtaatagcgaagaatcttgtattccatagcaggaccaagcatatagaatatcatttcatcagagaagttgaagcaaacaaagaaattgagcttaagcattgcaagaccgaagaacaaatggcagatattttcactaaggcgctaccaatgagtaagtttgagctactacgagacctggtcggaattaccaaaatgtgtaccaaggaacagtattagaatgtgctacacatttttacaaaagtttagtctagaaatttctatacatttaaaaaaaaattccctaagaactttagtaatttatagaatagattaatgtagaatatactagctaagtgaagtctagaaacatttagatgtgtatagatacaatttcttctagtaaaagaaggatctagaagaaattatttcaactacaaagtgtaaggggtaagcaactataaataccccattaaaaattctaaattctgtaaccaacatccaaactatcaataaagcttactattttcttatataatgctcttctaagtcaaaccattctctacgaaatacacaaccaactatcaagttatcatcgcactacactagtcactaaatacattacaaaactatcacctaaaataaatcacaactatttactctatctaatttaacaaaccatcaagtttttaaaacatattgcgtgacattgattatgacattagattggaacttgttatcaggatttagcaataataaatatttttactatcagagtttcctactctaatgattattgttagaaatttttgcaaatttattatctaaatttttaagagtgtccctaatttatgttacacatggattagttatgcgttctttttggatatagatgaacaacttgtttaactagatgattatccatattttatttttgtgagatgtatattattattttgataaacatggcaaggcatgtatatagtatttgcttgatgaacatgcaagatatatagtatttatagctagtttgtacgctgttattatatttttaatgactttgttcatgctttaaaaaaataatattaaaattaatctaattaaacgtattttaaagaaattactttgcgactctgtatgaaaactttatcaaaaccgccataaacatgccaatctttctgttttacctttagtagttagtgcttaataaagtagaacaaaagccaaaattagctttagtaaccgttcttaatttcctccaatatgcattccaagagaaggcaagaaaaacctactacgtaccttaaagtactataattaattaattattctcaccaccaccacttacccatcaatattggaataaagaacccacataaaaagtaagctatagctatagctatagctaagataatctttatgactaatactaattatatatttattttttaaaaagtaaaactatgatcaaaaccaacacgttaatccaattttatcctttttggtattggataccaatatgccactgccaagatttgatttgatttaagaaagagcctattaatatattttttaaaaaataatatattaaaaaaataattgagacaaatttgttgctagttgaatatgtataatatatatatatatatatatatatctcaaacatacacagcaatataacatcttattagcaaataaattaatttttagtttcatacgtttatggagtatgaattattcatgtttactaatgggaatgaaatttgagtataattattcatgtttgcataccgaataactttagaataattatgctaaacaatatataaggtaataagtacatgaatatatatacttaaatctcattcctatagttataaaacacgaatagtcatatatactccaattaaaattaaatttgattgtaatcattctaattatgtgtaagtaaattaacacactattaaaattgtctttgagctttcatgaaagtgatagatgatgataaacccattgtcaattacatcgatcattgaatacccattgtcaattattatatattatttgatttcttaaactgaaagaagtgttttttgagagagagagagagaga

SEQ ID NO: 47057 - DNA, 1404 bp, Cannabis sativa
  modified_base (33)..(40): a, c, t, g, unknown or other
  modified_base (1362)..(1371): a, c, t, g, unknown or other
gatgttaaacaatatacttgtgagtagatctannnnnnnngtaaaataattccaacaaaaattctagaagaagatgttagagcgtgagaaagacttaatactgagcaacaaaaagtatataatgcggtaatggacagtatttcatcaaaaaaaagcaacgcgttcttcgtggacgagcccggtgggataggtaaaacattcctatataaggcgttgcttgcaaatgtatgatctaaagctgtcgtggaactcacaactgcttcattaggcgtgataggatctattctgcccggaggtcgtacgacacacacattttaagcttccactcgatgccgatggaaaaagcacacgttgtttcagcaaacagagtgcacttgcaaaactactttgtccagtaaaattaattatatgggatgaggcctcaatgaccagaaagaagcacagagaagtgttagataaaatgctacaagacattaacgatacaaccttaccatttggcagaaaggtcattggttatggaggagatttttttacaggtgttacctatggtacaaaaaggaacgagacaagagcagataaatctcaactaattcaatatatgagagccaggctggatccgttgttttcagactatgtgttgtcggtgggcaatggcatcccaccaaacacaatcaataacaacatcaaaattccaaataaaatgcttgtaccatacgatgacgatatcagttctttaaatatcttgatagaaaatgttttccacaacattcagcaatatctagaaaatgtgtctaccatgatgaaccgtgcgatactaacaccaaagaacaactttatcgatgaaataaattcgttgataattggaaggttcccaggagaagtccacctctattactgtagggatgagacggtagataatactgagcaatcggtaatggaagacttcttgaatactctaactcccaatggacttcccccacgtgaattaaaaataaaaaagaattgtcccatcatgctgcttagaaacattaatccttctgaaggtttatgcaatggaacacgtttaatatgtcaggcatccgaccaaaatgttgtagatgctgaaattaccgtggaacaccatatcaaaaaaagagtgttcattccaaggatacccttcttgcaaaatgtggatgaaaatcatggttttccattcaaatgaacgcaatatccaatcaagtttgagttttgcaatgctataaataagtcatagggacaaacattggattacgttgggatctatttccacaacctgttttttcacacggtcagttatatgtagcaattgttggaaattgttttacgaggatcttagatctactnnnnnnnnnnttgattaacaccctaaatataaactttctaaaa

SEQ ID NO: 47058 - DNA, 1551 bp, Cannabis sativa
ttataagcatgaaatgatatttttatatataatatttttgatgtattaacttaaattaacgttttgacacagcttcgagtgcttggggatcatagaaatacgtaccttctgagtatagttggatgactgttgaaatttcagtatttatgactgaattgtaatgtgtttaaaggtcttagcgtatacgttgaaacttatatacatatatatagttattactaaataaggaattttcatatataaaagttatgtaatccatgatgatgatgatatatcgactttatgatacttgtcaataaagaaattacaaattatatatatttttatttttattaaataaaatatcaacttcattaagaaattgagagtgcctagcaacataaataaaacgtaaatgaacatctggtagagaagaaagtaaagttttacaataattagtaatcaagccaaagacaggcaatacatttgttgatcactacgaattgcttgaatggtgagcatgctattgtccacttcttctcctttgcccaactaagcgcttccttcacacccatagcttcaatgacctctgctggataaatacctctatggtactcggccttgaactgcaacaagtgaccaaagctatatcaagccataatcctgaaattgtaatagttatctttctcaaataaggcgcactacaacatttgactgcggaccactccgtcgttaataccacctaaattgcgcgacaactatatttatcttgattgtattaatagctggtttagtccaaaactcaatttatcatcaatactttcaagagacaaagatgataaagcatatttgtcttgatgagctttcctttaataagcaagagttgttacaagaacctcattaacagaaagtgctttttgcttccaaatcttagtatttctagctttccataatgcccaacatatcatcgcagaacgatcaacggtttccacatcaacttgaaaactaattgctccaaccagttgcaaaatacaacagtaggaaacgttcctatttttccaaaagcattccagtaacagagaggaaagggacaggtaagtagtacatgagaagtggtttcagcatgtatatgatagttggggtagattggagagacacttacatgttttgtggtcatgttaacaaaagttggaaggcaatccgtagcagcagccgtagaatatttttacactttggaggaatttttaacaaccacaaattgtgccaaagacctgaattactatcccctggccgagatggtttttgctgttgcagcatcttgtaggcacttttgatagaaaaatcactatttctctcctttgaccaagaccaacaatcaattgttacattcagacttaacgggactccaaggattaagttagcatcacgaacactaaacatgtcatggattaaatcatagtcccaattgtggctattagtactaagcaaagaacaaacatttcaatcaaccaaacctgggtgaaccaaagtcacaaaagggttggcatttcctggtagccatggcattctctt

SEQ ID NO: 47059 - DNA, 1794 bp, Cannabis sativa
tcttactttttaaattaaaatagtagtaatgttaattctctcaaacttatagatttcatattccctctaaatctactttctctaactttactctctctaactaactgaaactcacataataaacactctattaattaagtgtcatttagttgaaaagaatgaacacataataaaaataatattctaatatattttaaaataacactaaataaagaaataaaataaaatttattttctttcaattttatttcctccgaccaaacgttagcttaaggatatttagatgccagccaaataacgcatagtaaaataattctcaattattgttttcatcatgtttctcctatttgtgtttttgaacaagtaattaggaattgtgtttaattaccgtttaatataatattataaagtactgtaaatatatcaccgcgatcaaaagacctttttcgatacattcttatagacaacacataaatatctggtgatatatattttaagaaaaattacataaattattatttttggtaaaatatttacactaataggaaattaatattaaaaataatatataaaaaattaaaaattaataacaaaataacaaaagtacaacataaaaatatattaaaagactataatttttctttttgtatataaaatgataaaaattataaaatcatatttctgtaatttttttttattatttgtgtatttatgacatcatccttttattttattgtattaatcattctcattaatgatggtaaatactttaagtagctcaaagtgataaaattatttgtacataaaaaaatctaaatatatgcatggcatatatattttacctgtaaattaatttagcttaagccatctccatattagctaagaagagaggacataaatattatgatttttctagttcttctgttaactttaacatctatttataaatataatatataatatattaaataattatattatttaaataatataatgaaaaacttttgttcccaatcaaagttaaactgtgtccaacatatacatgtatatatcaggtatgcttttgttagatgattttttttttctattattataattattgtgttatagaataataatgtgtgtgtagctacatttctctctctgtctccatcgatctccctctgtattgattagggtttctgatcaagtgggatgagtggggtgtccaagtggccttaagttgtaagtgacagcttgtaccaagggattccacatcagtattacttccaatattgtgttccacaaagcactccatgctcacgtggctattgtttacaaggacatgtgtacacaaatagctatatatgtacaaataattactagaagaaatagaaatggtgcttatatatatatatacaaattaatatacataatataatataataatatatatctcttatcccagacataattatacataatatgagcggtctgtatttgcccaattgtattcattcttaataggtgtttttttagcagtatcaatataaatataaataaattaatttaactggttttaatataattatgaaaagtaaattcatagtgttttaaatatatatactctatatattaataaagaattatatagagaagaatctgtacgtatcaattatagcgcgcatataatatgggaacatatatgtaattaattaataagtatatttccttcaaaaaaaaaaataattaattaataagtatataaattatagcattgttatatagatatcatatagatataattacgtatta

SEQ ID NO: 47060 - DNA, 1685 bp, Cannabis sativa
tggtatatattacgacaaaaataattgtcttatttatatttatatttatatatataccactttcgatctcgagacaataaaccttaatcatgtgtagttaaatattgcaacgaaaccaatctcattaattagtaatatatgttttagttttgtcttttggtttttacaatattaattaatgttggaaaaaaaaaagttgatttattttaaaataaaattgatcggtcaatcattaatgtagaaattaaccctaaaaaaccaaagtaataaataagtttgctcactattaagagacaaggtaaaatttgtttgagcattaatagtgagaaatcatatataatagtcttttggggaaattatttataagtaattaaattttaaatttttttttaattcttccgtcttttataagaaattaattattttgaaagagataaataagttagctatagaggctttaaaatataacaacatgacatacatactttgaaaaagcaaatagtaaaagatttggcttgaataattaagaaaaaaaattaacgcatattttaattgttttttagtaaaatttttatattttaagaataataataattaaaaaaaaaatcaagtcggctagctctcactttctttttaaagatgaatatttattgaaaataattaaaattttatacatcgtattaaaaaaaaaaaaacccactgatcatgcctagttcgtcatccactcaaagtgtacaaactactcataaatttcaaaatatattatgtattaaagtttaaaaattgaaaataaatttctttcaacatttttgtttttattttcttttcaaaataatccgagattaataaaaatggtttgactttatttaatttatataattatttaaatctttttatagcaagaatttgttaaatttgttttgaatgaatcttaaaagtgaaaaatgattttagtagatgtttatatataatataattaattaaaatttcatataaactttacattccaattttatatttatttttgaaaatgaatgaactttgttgatcactagggcaaaagccaaatataaaaacagttttattttacgaaacagtaataaaaacatatatatataataacagctttttacattagagattgatacaacacatttatttgcacataacacgtgggtttccacctaatccaataaagaaggaaagtaaacaacatgagttaattctgcttataaaattaaggtaaaaattaaaggtataattgtgatacacgaagtttaataattaatttgcatgacgcaaggcacagtccaaacttaattaaatattaaagcactttcaattaatataatataattgaagatgttggttcaccaaccatgccgtagatcgaccaatgttttatggtgtactctatattgttcaagattttatacgataggttaaaagttaggaaggtgtaaatgtcaaaaaatttatatagaaaaagagaagtgcggaaacataaacatattattggtgtcttgcactgtttaagacgttatattattattggtgtaattaagtattagtttctatataatttaatttaataactattgtaaaatatcattaatagtctcataatagtagcaccactagtgactaatagtaaaatttatataaaaaatattaaataataaaat

SEQ ID NO: 47061 - DNA, 825 bp, Cannabis sativa
agtggtaaggataaactcacagttggagatggtaatcaattgtctatttctcatgttggttcctcaattttacagtctgattgtggtaacttgctgctgttaaatgatgttctacatgtccccaaaattgctaaaaatctcatcagtatttccaaacttactgctgataataaagtctttgttgagttttactctgatgtgtgttttgtgaaggacatagcaacaaggaaagtggtgctgcaggggagacttaaggatggtttatatcagctggaagggtcaacaatcaggtccaattctcacgatccatctgctgccaatactcctaatctcgcacatgagtcatttctgtcaagtgttagttatttttctaatctagttgagtctagttcgaagtctgttttctctgtcaatcaaagccatgttaatcaaaaagatatttggcatagaaggttaggtcatccttcttccaaagtcttgagtcaagtcctaagtatggccaatgtaaaagtgcacatcaatgaaaatcagttgttttgtgaagcttgccaatatggtaaatctcatgcattacctttcaaaacatctaataatagagcaacaaaggttcttgaactaattcacactgacctttggggtccttcaccagttatgtctaacacaaacttgagatattatattcattttgttgatgattttagtaggtatacatggatttatccattaaaggcaaaatctgatgctctaggtgcctttatccaatttaaaaatcttgtggagaatcaatttgacaccaaaattaagaaatttcaaactgattggggg

SEQ ID NO: 47062 - DNA, 2567 bp, Cannabis sativa
aaaatacatcaataaagatttcttattatttttacgttttcaaatttttatttacaaaaatacttctttcgtaaaaataataaatttttttagttgttttataatttatttatagttgttatgagtttacttttctagttatttttagttgttttatagtttatttataattgatttgtaattattgcaaatttgatttttttgttatatttaattattttcttaatttttgttgaaaataaaacgtatttttataatttaaaactttattatcttatttttgtaaataaaaattttaggccataaaattacaaataaaacataaaaattattatttatgaaaatttcctaaacaaataaaaaatatgtgtgtaatatttgggtatgcatcaagactcatcaaataaccaatctcaatggtggaaacaaagaataattgtaatatggtggaaacaaagaatatcttacacaatggttcttgtactcttgctagcagtggagagtctattgatatctggtcttaccatggatcccgtggcttagtttcaatgatttcaagaatctaatggagagaatcaaagagactaatgaacacctgaagtcagtagctgatatctccaacgataatgagtgggatgagggagcgattatctctgtgtttgaggagatagagcgcagaagaatcttaactattcctaggctgccaacttcgagtggagacactttgatttggaagtctaaaaaaagtggagaattcttagtgaaagcggcgtatgtggaggaccaacaacacaggttcggagataaaattgacttatggaaatggatttggaactctaaaatacatccaagaattgctttgatgttatggagagtgcttaataatacccttccactcaaatccaatctccatttccttagtgataaagcttgccctttatgccatgattttgaggaaacaaacaaccacttattcaaggattgcacctttgcccgtgggatctggtttgcgggccctcagccttggatgattcactcaatcccaggagaaacatggcccagatattagaaaatctaatctcagcttcaaaaaaatcacgaagtcttatgctggtctatgctggctgtgttttttctcttatatggcagcagagaaacattgctagaattcaagggaaagctgaaaacataaatgttctggtgcataaattatcttcaacttttaatgaattctgggacgcagagactaagacagcccccacttacaccatgcagcgaggtattattaacccatgtcgctatgtgattatgacagatacatcctggtgtgggggagaggctggcctaggtgtggttcttattgacactgagtcttttttttttttttttgaaagaatattgacactgagtctggtatctggtttcaatcctcttgccatagccaggcgggctcggccatggaagcagaagcctctaccgttttgatggccctgcaacatgctacacagagtggttgggaggaaattcatgtcctctcggatgctaagatggtggttgaagcttttgcagcaaagaagtgtcctccggattggaattttctgaatgtttctttagttattctagacttaattaagacttttaagacatgtaatttctttcatattagtcgtactaataatagttttgttgatgagttagcaaagagaggtagattgtctagcctaaacactgacttggtgcaaggggagggaattccccctgtgattcccgactatctttctgttgtttaatgaacttgatgttctttcaaaaaaaaaaaaaaaaaaaccataaataagataatgagtagtttgatatttataataaaagttggcctaaaactttctatcaattccaaaaaaactaccaaggaaatctaaagtaaaatttctttgagatgatatgacacgaaaaatgttttagagtgagtgggttcttaatatatccttactctttatttaaatctagcatataatttacattaacctaagagatttaatgaggacatcatctataaaagtgggtatattttaaagaatataaaaataaagataaaaattaaaacaagtaaagtaaagtgggtatacaatataatttcctcaaaaagaaataatgtccaaaatactagcacgcgggcatcattttataattaagtggttaataatttttttttttaactcaaaaaactaaaaatatggaaaacctaatattggattataccaatatatatataacatatttaagtactagtgttaagcaataccagtacattttcttcttcatatttttgaaagacatgcgttacacttcaacattttttttagtcacattgctggttgtttggactcaaaagtggtattatccacgacctactcctcaagatagtgattttaatgtgtgaatcataggttttcttatggtctctataaaattgaccataatcaaaagtaatatttgaattttatttttgttttgaatttaaaacctagatatgttagttttgttaaatttatacactttcattaatc

SEQ ID NO: 47063 - DNA, 854 bp, Cannabis sativa
agatatccttgaagatggattcatttcagtcatgaaatttggctccgtaacaggagaaactttctcaacgaattttgtcttggtcttggaggatcttgaagtcattgttaaaagtcgagataaagcctaagatagcaaaaagggtttcaaaatttaagaggaagcatatagcgaaggataaattaaattagcgatttgaaggaaaacacgaaagttacaaaaaattcttttatctttcctagtaaaaatttttccttaaaactcaataataaaaatagtaataatattcgagaaattagaaagggcggggataattttttaaaaaatttaaatgattacccattaaatcaatcaacacacattaatgaaatgggacaatatttctagtaatcgattccatccatggtatcagagctcaaattaaagagttaagagctcgattcctatagaatcgaagggcaattaaaagagataaatataatcttaagaagaaataagtaatttcaggagattaaaatgaggaaaaagagttgatatattataatgtggcaggacataaagagaaacacacagtttcactaaagaaagtaagtagagcaggaagctcaaatactggagagcagagctctgaataatagagatgcaaaatagaggtcgggaagaagcataataatgtgattaaggagttctaaaggcacgaaaggaagcgtcataaacaacgaatgagaattaacacatgtggacaaatcagaaccaaaaaaagagaagaaggaagcatgcaatccttcaagcatataaataggagaccctctcatttaaaaagaggacagattcttgatcacactagactagcc

SEQ ID NO: 47064 - DNA, 1483 bp, Cannabis sativa
aaaaaaaagtatagtctttttcaaaaaaaattgctgggcaattagttattgatataatttaatctatttagtaatagtaagtttaagctaggtgaaattgaaagtatttccattaaatttacaaatcttaaaacatctataatagagtgttatatatagtgtacatatatttaataataaaagaattgactcggttgctccttagaacaaaaggtacaatgatgtgtacacacttaaaatttgtactaaaattagtttataaatgggacactactaaaagaaattcttataaatgtcaaatcaattatttaattgaattgaaaataattagtgtaataattttcagtttttgttaaatgataatttaaattttatattttttaacataatacaaaataaattttgaacttaatttttataatttgaacttaataataaactgatgatctaaaaaattacatcttttgtatctactaaaaattaactttatgtttgttatattaaattgaaaaaaaaaatataacaaaaattaagtttagggcttattttgtactattaaaaaatacggagtttaattttttttttttaattgaagcatttatgtatacatttcattgtacaacataagattcgatcttaagacttcccacacacacgcaaggccgactctaagcataagcgggttagacttgcacttagggctcactaattttaggggcccaaataaaaaaatatcttttaaaaaatatacatattttttaataatttttaaaaataccatttatctttacagtaaggcccattttttttgcctatatcccatttcaactcaaggtcagctctgcacacacgtaccctcccatattcccttatagctacttgagctagcttcaaatgactaggtctaaataattctttaacaaaactgataatttaaaataataataatatttactcttattattaaatactttgaaatttgaataacactaattattttcaattggatcaaattgatttgacattcataagaatttttttagaaaaaaaaaaagttcaataatgaaaggttatctaacaaattattatgttatgtgagaaaaggacattgatgtagattctcttctctctagtatttatatatagctgcacagtttgcagaacccataaatgtattgaaataatcaaaataggatatctttacccatttcaattaataattaaattttaaaaaaatttatcggatgtaattcaattaaattttaaaatttaattcaattaattcattttttaattaaatattcaattatagacttggtgctcgtttgtaacgtcgtattaggtcgtattgtattgtattgtattatatggaattagattatatattgaattgaattggattatattatatttttatataatactatgttaaattttaatttaaattaaaatattatacttttaggtgtccataaaagttaat

SEQ ID NO: 47065 - DNA, 3098 bp, Cannabis sativa
attaatcatcaactttattaatgacaatcatttcagattacatcaaaaaaaaaaaaaaaaattaagagaaatgtcattattttcaataacacgaccagcaacaagatagaatactctagttagataataagtaacgctattcacttaccgtctaataaaaataatagaaacatcatgcaattcttctaataatatcttacaatcagtaataatactcctaaaataagataatattgagagcagacttcgaatcgattgcacaactaagatactatctctttcaatacttactccctaccatgctttcttcttgacccaactcaatacttctcgcactcccatagcctctgccattgcgggcttcacttggcctgcacgatagcaagtaatttcctcaaccaacacaccagcagcattcctagccacacactcagaattgtaagtagcaggtcttgaaaatattgctacatcaatatttatcttcaagttggacacgatcaacttcttccattgatcacaaccatccttaattgtcaaaaaagctgcagtaagaaccaaattctaatcccgtgttcgaaaccactgatcgagagaatgttgagccaagatagacaccccaggatcatttgaatccttgttcgaccaaactagttcattcctagttttccaaatagctcagcatgtcattacaatgatctgtctttgttccccatcaggcaattgcaacatatgatcaagccaactagaaaaagaaccaacattcatactaaccaccccaattcctgtttgatcccaacaagctttggaaaaggaacacacgactaagtaatggaaaatggtttctctttctatctaacacaatgggcacagatctgaaatgttaacctgttttgttcgcagttgaactttagttggaagacagttagctgttgcatgccacaacaagtccttgaccttaggtggcacacgtatcttccacaacttactccaaaatccctcactaaccacctgcatatttgcttctttgctttcttgtaggaacctatatgtacttttgatagaaaagtggcatgaagtttcccaacaccagtaccaaatatctttgtctcgacttgaagatagaggaatactaaggactaaattagcatcccgatcattaaataaatcacgaaccaagtcgatatcccaagctaacattccaagaaccattaaagcattgactttcttattaaccaaagcaagatgtttagagctaaccattggttattctcatctagcagccatgaatcaagcaaaatgttgatttttgaaccatctcctattctgcagtgatcaccttttcgaaccacatcttgagattcaagaatactacacacataaaactcaaattataacccaattttgcagtcaagaagccatcagaaggatagtaacgagctttaaaaatacgtcccacaagagattcaggtttacacaacaaacgccaaccttttttgcttaacaaacttatattaaagtctcttagactcctgaattccattcatcctttcgatttcattagtctttacgttatattaacaaaattgtcgcaaattacttaattgagaaggatttccttcctactatttactattattactacctaggtaataatatccctatgtacttaaaagtgacactgctaacgtcacaactcacaaaccatacttattaaatatcatatctctcttttctttttatgaacttaaaaacttattctttattttagaaatgttttgaaccaaagagaaaaatttagtttcatggatgaaaaagaagaagacttggatatggagaatgtttcatctaattaaaataaatttgttgattttgtttggatttgagttattaaagttgtggcaagctttaaagaagtgaacttttcacttttaaatggtacattatatataaagttttggtttttattattactaacttcatcattttattgattctataatttttcttgttttgttttagatttagtaaaagcagcaccataaatttctgatgatgatttggataaaaatgtaaaagaaatagttgctttaagaagcttagatatgaatagtcaaaggatcccaatttttctaatgaatccctttattattcttagatgaggattgccaccaaaacttacacatcacttgttgtatttctttacaaatattcacaattaacaaaaacacattcataagcaagtactgtttggatcagaagctccttactcgcttttgaaagaaatttcccttcccagctttgaattttctttctcgttttttctttaagaaatccaagcaaggtcgatttatttctgcctatgatatttggtaaccccaaataggtgttattttcctctgcctctccaatacccatagttgaacatatgcccacacgtacagcactttgtgtattagaactgaaaaaaatagatgacttatgcaaatttatttgctgactgaggccaactgaaaacaattcaataagtccatcacactattagcaccttcttcatttgtcttacaaaaaacataggtgtcatctgcaaaaaaacatgtgggagataaccggagctccactagctaccatacaacccataatttttccaatcgctcatagtctataatcagtgctaaaagtccatttgcatataagatgaaaagataaggtgataatagatcgccttgtcgtaagcctctatagggaataatcgagccaacctcttgtcctccaccaataattttgtatgagattgaagtaacacatcatcaccaacataatccaatgatcgctgaatcctatctttctcaagatagcttgcaaaaaacctcattctactctgtcgtaagcattgctcatatccatatttattgccatgaagccatcttttcccaagctcttcctcttcaaatagtgcatgatctcaaagaaaattaagatattatcagtgattaaacgactaggtaagaatgcactttgggtctcaaaaataacattaggaaacaccaattttaacctattaaccacaaccttcaaaaaaaaatttgtaaatcacaatg

SEQ ID NO: 47066 - DNA, 1359 bp, Cannabis sativa
cggatcggattggatccaaaatatgaaatctgcacttagtgcggatttaatattgtttgaccaaaaaagtacatattggatcggatgaaaccccgaaaatttatcattttacaaaatcataagtacattctaatatttaaaaaaaaaataattttaaaaaattactcttaatatttttttgaattgtttttgtgacattattttgtgttaatttagtaattatttaaaaaaatcataattttttttttcaaattgttatgtatattttttttatttttttctaatagaatttcatataattttttattttaatttttttgtcataatattttttatttcatataatatttataacactatatatactatatatatagatatatagtatcataaataacaacaaaaaactagccaataaacagagaaatttgagagaattggatttttcaatcatattctctctctcatgtgtgagactctctctttatctcttcttacacgcttacacactattcatagagtgtgtgagattaaaaccctaatcttattacagtgtctcataattaagttgcgtacacactgtaatacctaaatatgttcatcctttaagatcaaataacccactttattcttgagtgttgagactgacttggaagatcaaagtgtggattcttcaatcatgttcttggattggatgttcgattgttatacgaaaagaaacaagaatacattgataggcatcaagaggtaattgaatttctttcagtagattagatttaatctatatacattatgttgagatccttgggcttatagttcatattggataaagattattttatcaaaattctgcttccgcttttataactctgatacggaccataaaaaccaacaaaacctgcttccagagtgcgatggtgtccttaagggtccccataagtcattgtaaatgtaatctagtgttcccttagtatcctttttgccagtaccgaacttgactctacaagctttaccaagaacacaatactcacaaaaatctaacttctcatacaaccctttttaagtaacatggccaagtctcttgtgccatacttcagttacgtgcttgcttgaaacacacactttcgtgttgttcatcgtgatgccttccataggataaatcccatttgatttcttacatctcatcacccccattgaacatctataaacgttcattactccttccttaatttttaacaatctccaagatacacaatcctataattttgagatgtaaattctttgaactaagatttatttggcatcatatggaatgaacacccagaattcaagatctattcagaatctgaattcttagag

SEQ ID NO: 47067 - DNA, 1795 bp, Cannabis sativa
ctttgaataatttgcttctaattcaaacaatctgacccaactcactatcaattaaaaagcctaaaacatcgttccaacttttcactttctcacttctccggtgtatctttcgtattcatcaccgtcaaaatttccattcaaaagtttcgcgtatcgccgtgaattttggagctcaccaccatcaagggaacttaaccctagtctcgtcagtgaaaggaagacggtccaaggattgaagaaacccctagatgaagctctacaaattcctctgtgctaagctaggttcttcattggggagccacgacagaatttggttcccaagctcacgcgttggaaaaatttcatagatctctatggagaacgtactttgtagagagtgtgagtagattgctaatcgatttggttggtcaaatataggtaagagttccaattacccaactttctttgctgagttataattttaagaaaaatagttgaatcattagtctgattttaggccgttggaattgaaatttagtattttggaaagatacataaaatcatgagtcattgttagttactgattatttaagtcgttgaactaattagtccgtgtagtttaataattgtgtaaatgggtttgtagagccacgaaaagaggatctatgggtgagaatggaaaagataccaagagaatggctattatggagaaatttttacagttaaaaccccccaaattttgagggaagccaggatccatcagatgcagagatgtggcttaagtcaattaaggagaaatttgataccttggatgtgcctccaaattatagaatgcaattcgccatgtttcttttcgaggggaatgctgaggagtggtgggagttgacagaagatgatcatgacgtggggaacatgaaatgggattaatttgagcaattttttcaagagaagtttgttaatgttgatgatcatgtttgtcttgatgagattcttgttccattcaagtgttcaaaggataagaacaaaaatagaaataggaggctacctaggaaaaaccagaggcaactgaaacgttcacaggtttatgaaaactctaatgaggggaagcgataggataacttcgataattcggttcaaaataaaaggttcaaacatgcaaacatcaactacaaaggatccataatagaatttccatggtgtcaaatgtagtagggctcatatgggtgagtgctgggtttatatcattgcttgcttcctgtgcaagtaagaacgacacctagcacggagttgcacacagtacaaacatgaggaaccacaggagaatagcttattcaagggcgaggtgttctcattgattcaaaccgaggctgaagttagctagactgtaataatgtaggtcagatttctattactagaatttcatgttcaattttgattgattctgttgctgcactcttatgaattcctctaggactgttaagagtatggctccaatatagagttatcagatctgtgattgtgccttttattttggttggaacaaacatgttcatcgaaaactaagaaaaaatgatgggaaccactggaaggggtctctccctttgataaactccaacataattattagaattcttcttgctagaccatcaataataacactgttcaaataataaaaaaacaaacatttaggaaaatatttagataagtctaatacgctaaaacaggtactctagaggtgctattgcgggggacacttcatgtttaggaaagctttgactatgacctatgcattagagagaatggcaaagttgttcca

SEQ ID NO: 47068 - DNA, 4156 bp, Cannabis sativa
aaataatttccaacagttttctccccgagatatcttttatttttgttatttctaatgacagaaaatattatcagaagactttttcaagtaactgattggaactccgttgacaatatgtcaacatgggcgttggatctcagttttggccttttgaaggtttcgtttggtccgcaaaaatagttgaatcttaatctttgatgaaaatggagaatatgctcaaaagagttctcagaaaacatccttggaatttgggtaggttgaaaaaatgtcaacctcggcgttgggtcttgattctaacacacaagaagagatgtttcttctctacaagcacttgttttcccatttttgatgaagataaagaagatgcacgagttggatttttgatctagtacttggaagtgacctagattaacaaattgtcaacttgggcgctgggtgcccaggcactgggtgtcccaggtgctgaaaaagaactttctcaaaatctgattctgatgtatctaatatgttcatggtatgtacagttcattttccagtgcaaagtttgacaaattttcactaagacagtcccaaaaactgaaaccctcattgaagatgtcaacctgggcgctgggtgaaaccctaggtgcccatattgacttccagagtgtaggttcatgcaatttcagctctcagggcttggattttgttgctccatgtcatcatgctacagaataatgaaagatagtgagctataaatgtgttatcaaagtccaaacttccattttggagttccagaagttaacctgggtgtagttctagggacccctcccaggtcgactgtatgactcagaactattgcactctaagatattatatttcttatcacgtgtcaaacattgatgtccatgtcaccagggaaagttttcgggtgatcatagtggatctcaagagattacatctccttgtgatagattaaagaagtttaagaaggctctccctcattggtccttatattttttccatgaagtggaatgttgttgtagatcctctataggtgtacacatggcaggtccatcctctactcaggtgccagaggtagtgaaggcctccgcctctcaccctcctatcacaatagatgtagctaaccccacttctaatatcaacctgggagaaatggctcctcaaactccttctggtggtcctttaaagaagtaaaaaaggacaaaggcacctcctggttataagccaggagaaatggctcctcacgcgtctcttaatgatcctcccaaaaataaaaagggaaagccttaacaaatcccctcttccatcctagagaaaacatagtacaagatccaaactttgaagcatgaggaggagtggaagctccccttgagcaagtgaaaatgggctatcgtggtgagacaccactcactacaccattttagattgaacgtaagggtgactggagcgagagagggtcaatgtgtcagtaaactgattgctaaaatatgtgtctagacctaatatgatgtcaaggctggggcagcccttccgctgcacaaatattttcaagatatcacaaattacttcaagctctcacctaccctcattacttctcatggatatttagcattttctaccttatacatcatttatcaccaaatgaaatgggaggggcctaccccttatgaagtccattacttgctcacactacatggtttcccaaagcaaaactactcaaggtattcttacttcaggagctgagatggacgtgatgagaatgagccacacctcactgtgatttttgagcacaccaaggtgagcacctgtcagagatcttacttcttcacgacacccatgcctacaactcattgtgcctttaataaaattggcaaatatgcgagacctgcccctactatagatatgttggagtatgcagaagctctaagggccatgctagctagcaaaggattgatttactcctactatcgtaacagtggaggcctttaagctggtaggattgtaccagattacgatttggatgataacaacatgattgatgagcccaatgttcctgctcagctagctaatgtcaaccatttggctctcattggaatagaagactcatcctcttcgaatagtggtactactgacttacttgttgacctaacttttcctctccccactagaagaaggggtaaggaagttgtagtcaaaattaagattaactcttgggtactatggtgatggatgacaatgactacgaaggtttttttaataacttgttcactttcacctccccatctgcctgtgtcacattattttatttctcttttttttacacatactttgtgacactaaaattattttcactttagtttgtaggaagtcatatgtttcttcatttggtggagtgttacacaacggtggttgatgagaaccagtagccactctcttaggctttgtccccaattctgacttctcaagtcaaggatgaaggtcaaagttcccaaactccaaactaggacaacactccgccttggatgaagaggagacacactccctctatgatgaggccctacaccgcaaaacctacgatattctttgacacacgcattgttcatggtctatcatctattcaccaccgctttgacaagttggttcgtcacaacaccatagaggtggctcgatagatgtgtatgtcttgtggggatgatcttgccggtgaccttcaggatattagtctagtaagttgagcatcaagtgttaagtgattcccataacttccttacttttacatcctttacctgacatcatcttttatttgttttgtgatcctctttcttttagtctgccactcgaattatccgctctcaacaggcctctcaaaccttgaaagaggagctagccaccttcaaggctaatgtggaaaaaactaagttggaaaaagaatatcttaagcaaaaaatcacaacgacaactcaagaattttctacaaagaccactgaggagaaaaaatttgagttcgacgtgcaacattatgagacggaaatcttcaaggttgaaaaggagagatattatctcgaaaaataacttactgactgctaagataagatgaaggaatctataataactaccaatgactttcacactaacatggagaagcttcaagcgtccactaacaaaagagatgaagtatatggtcaagtcttttatgaccaattccacttgctttggaagaagaatccaggtataaagcttgaacacgtacctgaagagtatagagacaaagaagttgccaagttcaaagtgaggcagcttcaggaggcctcacttcctaccaacacgattcccacctcatcattctagggtggacgtttggtggggatttgattagtggtaaaagagatggtggagctagtaccacatcatgctgaagtcactattctcgtggttcaacttgaagatgttgctgatgaggaccggcttggagatactcttccacaagagtcttatcccatgagatatttatgatgagtgcatgtgctctttgctctagttgactactcagttaaatagataattgtaagagtttaatctctaagctctcttgagtaataggttctcagttatttttatttggatttaaactcattgtctagattaagtgcttatcatgtgagtataattaaatccattctttatccattataacttttagtttaagtgttagtgaattttaaaaaattaaaaaactcaccacttttctaaacatcttttcttaatgaaaattgtagcattcaaaatgagtatagttatatctatacccttatgccccctaactaactaaagtttgattattattcttagttacctgttttttgagttttgcaataaaaatacatctattttttaataaataaatatttttattcaaactttaaaaacaacaaaaaaatactaatagtcacaaagaacataattgtttatggaggatatttgagataataataaaataatgaaagtaacaaacatgacttggctaactatcaaactaaaagggatgtttatatattcatgccatgcacatgggacttttgactaagtgttcactattctaggaacgtgccacttgttccccattgaggcaaaaaagcgtgtacactctagacct

SEQ ID NO: 47069 - DNA, 1401 bp, Cannabis sativa
aagtcacattttgggcgttaaacatctccttaatttggttattgttgtttgcaggtattttatgaatatattactaaacaaaagggttttgatgaccattataaacgatcatattttgtattatcgtcgattcttatgacatgcctctgccaccaacaaaaaacatgatggaataggtgtcaattatagatagttgctattgagtaataagcaactgttctacatagtcgctatggaataggtgaccattctaatagtcattaacactatacatgtcaattttaaactgtcacatacaaaaaaaaatctatatagatttcgaataccaccaacaacaactataataataaatcaataatcgcatatccaacaaccaagaataatattgttggaacttattttatggctacttcattcctaaaggaagccacatccttttcagtctcctaagtctcggtaccaaccctgatgcctggcccgatgagcccttgcgctttaatcttgattgccatcttcccgagaatcgatgtgatttgagagagactgatttgcactttatatccttcaccacgggaggagagggtgcattggaggggtgttgggaaacatgacgattatgcttttcgttttcggaagagtgttgcaatgtatacactctctttaaggcgactcctttgtttgctcatgcaaaacttcgtttcaatccttctctttatgagtcattatcattgtaatcagcgagatatatatatatataaatatgtataataaataatgctcctggctcgttggacatatgcatgagtaatactcaaaacttagtatctttgtcaccttattaatttggttttagtagtttgtgtgtgtttttttttaaaagtgtacttgttattcagttatttaaatttttcgtatttgtttaatatgatgtttatgtaatgtattgttaatgtggtgtttcatatcaatgaatgaatatttgcaatggtttgggtaataatttggtagtgtatatggttaaaattatgtacatatatattattattgcgtgtaatttgggtgtttctctataatattattcatattttgaaagtaataactgttatatacttaaatcattcaaactttttaaaaataatatataattaaaattgatttagttcaccacctaaaactatatataatggttaacattaaatatatatattattatgtgtaagaaagtgtatagtttgggtgggtaataatattaccattacgaattgttatttatattggaattttataaattttaatttaataattattataaaatattattaataatcatttaaaaggctttactttgtgatgatgttggtggtgccaatgctcaacttgagtgagtctcttgtattactc

SEQ ID NO: 47070 - DNA, 5008 bp, Cannabis sativa
attataatctactaacttttaacccattttcatcaatgcagagacattaataacgcctttaccgtagggctttaactatgtggttattttttgggatatgtatgacttgcatactttatattcactacatatctgaagtttatccaacgaatcctgattttgctaagtttaatcttgtttccagttccgtaaggttctggtttcaaaggtctaggcatttaggctttcgattaggtgcttagacttggattttctttttaaaaaattgttttgttaattccttggaacatggttccaaaggtatgaaccttgtaattttaacaacttatttttagaaattatttagtaagtgttacttcctggattttaaagcctgagattttctttattttgattaacttgggttaatttgttgtgaagcctgaacttcttttttgaattaacctgagttaattatttgtgaagcttgaaattctttttttgaattagcctaggttaattattcattaaacttgattaactttaaatatagtaaggtagttgcttacttttggctccatgaagctccagtttcaggcgatacttcctacttatatacttattgtaaatttgatttaatgattttagaagagagtggaagaggtataacatatgctatctcccatgtgattaagagtctagattcttggtctcttattacattacttacaaaaattcaaggaactaaaaataaaatgaaaatcccttctttctattaaaattatttctaccctgaggcgtaaatgaaaatcaaacataaaaaataaaaatcaaataaatggataggaaaccaccccctagtttactgatcatatcgacacacatgtggtcagcgttccattctcttgggatttttgatccatccaatctcttgaggcaataagttccaccacctactttgtcttggatatggctcttcctagtttggtcctaggacccccactctttgttcctgagaagctagaaatgccctccttaagactagatcaccaattttaaaccttcaagttttcactttagagttgaaatgtttggcgattttggcttgatatatctagagttggacttgtgacttctctcaaagttctttaattaaatccaaagattcttgaagtaatgcatgacttaagtagggtcctaagtctctctacgatgagaaggtgttttggtctttgctgggattaatgcttcacacccataggccattgaatatggggtatgccttgttgatgttctttgtgtggttttgtatgcccagagaactcgtggaagttcttctcgccaatgtgctttgcatgcttgaagcttcttctttaacatggtttttaagatcttatttacgacttccacttgttcagtttcttatatctggccacaactgaaaaacttttgatgattccatgcttgacacagaaatcagtgaattgatcactatcaaattgttttccattatcacatacaattttatgtggtagtgcataatgacatacaaagtttttgatgacaaagtcaagggccttctttgaggttacagtgttcatatgctcaacttccacccacttagtgaagtaatcaacaacaatgatggtaaacttgactcctccttttcctattggaagtgatcctaccaaattaatttcccaaacaacaaaaggccacaaattcttcaacagggttatctctgtttgtggagctctaggtatcttggaataacgctgacagtgctcgcatttatggacatattccatacaatcctttttcatagttagctaaaagtatcattggtgaaggatctttttggaaaaattaagtttgtatgcatgatctccatagaatccttcatgtatctcatgcatgacgacacttatttctgttccaactatgcaccttagatagggcattgacaaccctctactatataatttttcatccatgagcacatatctttgggcttgatactcaacttttcatgaggctgctctgtaatctggaagtgttacagattcaagatacttttgtattggagccatccaaaaagtggaatgattaatgactattaccctcagtgtttatgtgcttagagcagaaaggtgggcgacagggactaatccatacttttcaatttttgggtctattgccaactttgctagcatgttcgcgaaggcattttgatctctgggaattttcttgatggtagaatgcttaaatgttgcaatatttctatagatttttctacgtaattagccatattctccccttttgtttgatgttctctaaaaatctggttaactacaaactatgaatcactatagaactcaatgttctgggcttcaatttctttagctaactacaggtcatctatcattgccttgtgttcttcttcattgttagagtcttcaaactcaaaacagagtacactctgaagttaataattttatagagaaattagaatgatttggtctcaatagatgctccatctacattatcttctagacactaagctctgggattggttctttatggttgttgtccattctagtgcattcaacaatgaattctgctagatcttggcctttgattgatattctaggttggtaaaggatgtcaaactggcttaactctattgcccattttaagagtcttccaaatgactggattttgcaacacttgatagaggggatggtttgttagtacctcaatggcatgggcttgaaaatatggtcttaacttttgtgatgaaattagtaagcttttcgatcattgggtacctggactcctcgcccatcaatctttcgcttacataagatacaagaagttgtacctttccttcttctcgcaataaactggcagttatggcatgatttgacactgccaggtacaaaaataatggttccccttcgataggtttaaaaaatattggagccttatgttctttaattaggcaatgtgatgtaataaagatggttactttatgaggtaacatatacataatttatattataaaatgaagatgatcccctttattggtataatggttttgtgttaccagatatctgtatactgatgcgtattcatggcagatgcttgtagtgatttggatttcatcttatgaacaatgcgtaatggtttaattctgattgtgtataaatgattatattccaataataaactatatgattattattattacttttcttgttgagttcttgtgactcatgggtgctatgtggtgcagataaggacaaggaaaagttagagttgccatgaggcgactaccttttctaacaatgtacatattgaccgtaccagcctgtgtgccgagttgccaggagttcttttggactggttgcatcttctatatttttgaattgtgttttcaattgttattgtgtataatcttttgagtaaatcttttataacaaggatccacgaaacacctttttactgtcgttataatgtctgttttttttaatattttattttaatcaagttttaatattatcacggtttttaataattaattaatctattagtattaaaaaatcacgcacgtggcgtccctatagattagggcgttacagagcttctcttcagagcaaccatggttttaaaggttctaaagacaagtcaaatatatgcatttgctgcaaaagacaggtcgactcatggtatagtaagtgtttatgttatttgctattgtcttacctgcttagataattatagtgtatgatgggaagaagtagtgtactgattatctatactaagaatatgtgtatggtatacgcatattgatattgatatatgtctgagttttaagtgtttggaagatgtgaattaaatgtgtgacaagttatacaataagggcaatcaaattgcctaattagagagatgtctgggcttggagcaaacgataaggaagagaatcctttattgtcgtaatgctagaaacatgtaaattatgctatgcagaatatgattagacaataagggaaaaatatatctgagatctgaaagaacaacaagctcatcttttgtatattcttgtactactgacacttcctgttgtaccattggatgtggtgaaatatatggagccaacttactagcagatcagggagtgaaaactaaatgaaccaccaattatgggacagaccaaaaatgtgccaaggtgactaggatagcggtcaaggcgagaataagaaatgccgatcttatcctgagtgttcaagttgcgaaaaaggccccatttggggtaatgtatagcaagttctttttttattgtggggtagtagttcatttgaaaagaacttgcccacaattaagaaaggttaatgttaaagcagaaaagtgtacaggtcctgcccaagtactagttatgattcaaggggatttgggtatcggtctttcggctgacttaagttagaattttatgggcaatattatagttactgtttcaattcatatcgatattaaatattgtacacccaatgaggggatatcaaaagatctgaatgggcagtgcatgtatgttatttagtgataactcatctgatagggtagacagattagaaaaatggcaatatgagttaaatttgctgatattcccaagtggaatataggacatgagtagctaatggagatatccttctaattaatttggagaataaaatcttttgattaaaagtgatctagtattagtataagagggacaatttatgagtattgccctaaatcctaggtaaattgaaggcgacgattgtatagtaattttgagattatgtgggcgtgagactacccatgttagcaagaagcatattgttttggtaacccaccataaaggaactccatggcatggttgagtgtagtgtcctgtccttgacctgacctggagtaatttcatttggggagttttcccatgaagcgtgcgagttagaggaaagcacactggaaatgcttggattggtgtcta

SEQ ID NO: 47071 - DNA, 905 bp, Cannabis sativa
ttaatcccccaaagccattatcccagcctttcgagacccccattgcgtctttaagacaaacaatattattattacgtctacgagaggaagcctttgagtgaaagaacttactatttttatctccattttttaaccacagttgcttggacctttgacgccaaaaaatttcacgttggtttagaacctcaaagagctgctgtttaactaccgcatactgctctttcccttcaacatcacgtcttcttttaagaagcttaagttgtctattacactgcttgatacttgaagaaaaattcccagcaaccaactctccccaggcttgcaaatccgatccacaatgttgaattttctgcactagctgatcgccttctgaatggctccaactctgcctaataaccgcctcacagtcttcaaaacgggtccagaaattttcaaaacgaaaagatttaaccccaatagcatgaaacgaatgcataatatccaacaacaaaggattatggtcagatggagacacatccaaattaaagactttagcatcagggtaccgagttaaccaattaaaattgaccattgaacgatctaacttagcttcaatccaagccggagtgtctctgctcttctcccaagtgaaaggatgaccctgtaactcaatatcacacagaccacaatgctgcaccacctcctggaagccctcaattagccatctcgggtaaggattccctcctctcttctcactttgatgcagaatgttattgaagtcacccataatgcaccacgcctcttgatgccgaccatgtaggactcgtaataactcccaggtattctccctaagacgtcggtttggttctccataaaacccagtgaatcgaaacttcctttgtccttcaaaatgaacaaaacaatca

SEQ ID NO: 47072 - DNA, 1834 bp, Cannabis sativa
atccttggccctggtaacatttctcaaaagcagccttgcatcaactattataacatgtatataaatgtgtcagtattagaaacacacagacaaagaggtagagcaaagaacactaagttgattatatctttaatcaaatgagacactcaagaaattagatacgtacatgatgggcaggaacgaatgacagcagcatgcatcacagtcatgccatttcctcctaacacagagcaatcggcaaaagtagtgtccaaaatgatggaagcaatgtcataaaatcgtctctctacggcaagaaacagaggagattcccctgccttgttcaccaaagatgtcaatgttggatcttcttgaatcaaccgcttagcaatctcaaaccgaccattgatcacagcttcatgaagtgctgtgtttcccttcacataattcaccttcctcagcagatatctatagtcactatggccttctgcggcggctaataccttggcatggtttatcaaaaccaccgcgaaactctcatgtcctaatctggcagccatatgtagaggcgcgtcgcctttattgtttggttgaaaggcaagcaaggaatgcgagagtagcaatgtgtttacagatgttgctcgtggattagctgcgcattttatggcaacgtggaagacgttgtttccttggccaaaagttttggcaagaggatccaaatctccgacgtctaatggcgtcaattgtacttctctatcaaatagccaaccaaagtgtaaattatgagtaagaaaagactttagcatgtctactattctggccattattgttagttaacagaccagaatcagaagcaacaatgaacaatttgagttgattgttgtctaaattcaatctcttttagtgtcttaatcatttcatttgtctttctatgtcttgcactcacattttgaattgaactagataaattagaataatatataagaaaaggagccacaacccaataatttattaaagaaagcatatataaccacgtggtcttacttacatgaccattattaatttacagattaatttcaaccagtctaggcctccagcctgatatgtatattagtattttttttttctgaaccagttatgtttattatattattaaaagaaaaaaagaaaaaaaactacatttcacacagctttctcctaaatcaagcactatctaattttttttagtattaaatgtaacaattaattaactaatcttcttttaattatttttttaatttagtctgattttcttttgcacatatcgaggtcgtccaactttgtttatttaactttttcttgaccgaattcatttttcatgaactctttgtcgtgtatattagaatttacagtatgttttcataatacatttttttaatcagaagaaaagaatcttattaattagatttggaagtgttaggtttaatgcatgagttctaatatcaagcaccataccaataactataaatagttaggtgtttttctgttctctaatcttcaaactcatactttaaatttagatttaagtttagagagaaagtgtccaaaatcataataagtgtgtgttgagtgatgtaaagagagtattactcttgaagtgatttttttcaatgtgagacatttctttgtaataatttactatgttgagttgtaattttgagttcattgtactactgactatttctattcagtaagatccatcatgcattcattattgaactaagttttctttatctaatttcaattaagttctagttttaatgttgtgattggttttagttttgtttgtgcattcttaaacattgttactactgta

SEQ ID NO: 47073 - DNA, 1545 bp, Cannabis sativa
tgagctcttaataatcataatattttattcgtctaaatctaaatgataacaaaaaaaggatgtttttcggatgtttcaaaaatgccaatgtatgagtaaccatattagttgacaaatggaatattcacattaagaaaaaaagataagatattaaaaatatctacaattaaaacttgaaaagaaaaaattgcagacaaaggtgctcgcaaagcatttgaaactaacaatgcatctgtctcgaccagagtaattggcaattgtatttgaagtacccaatttaaactgtgaaaaattgtcttgcctccattttatatgatgcaaaattaccaagaattggattggaaagagcaacaataacttggttgtaagagtttgaacaacaactccaactccatttattttcttattcatgtccacagctgcatccacatttaatttaaagaacaccagaggttggtggcttccatgacacctgaacagtagctgagggagagtattggggttttatgcatgccctgaataaaatttattttaatataattttatttactaattaataaaaatatcacgtacaattcattttatattgtttggttcatatgatactttcataattatatgtttaatatataaattttataaaatcttgaacacgtatttactcatgattatgatgttgtctacacagtgaaaaataatcataactatattatttctatgcttcaaactatttagtctcacgatttattagtgcactagatttatactaacgtgataaccaacgatgtggtatgtttacacttagagaagtagaatattttttctagggtattagcaaactaaacttgcattagatggattgactacatcgtagtggactgatattgatagtagaaaaaatatcataaacttactattatatattttctaagtcaacgtcacttagttgatcttagatcgattgatcttattcctgagatagttaagctttagcttaattatactatatggtttctttgacttgtttttaccagtttacctgtagaactagcccatacttacgtcttggatactcggtagtgcaattgagtgggagcgttaatcatatatatagaatctatagcttctataactatttagaagtaaaatgatggtttccatagagtttgactaaacaagataaatgaaagagctcttgtttcagtaattatattagtttaccgaaatatcatttataagaagttaagtgttttaaggataaaatactttaaaaggtaaaataataaatttatccatactcgatgtaatacgtctatagatgatcattgattatttagatcgaaataatgaataattcataacgtatttgtatttggtatataaagtgttctatgtaattaagagtgcaattctgaatctatagtggtttaaggagaaattaataagttaggaaatttaattggtaaacttcagatctactcattaggagtttgatttcataggcccatagtcctcacattttcttagataatactgtcttgtaga

SEQ ID NO: 47074 - DNA, 808 bp, Cannabis sativa
gtttgtgcatttttctcaacaatacatggtcggctgatggggcttgtgtggattaagggactcctatatatatatataaatatatatatagtgcaacaattggtgacccataaactatatagccaatttccattactcaattaaacaagtatgctattatatatataaagcaacactatactcaaccaccaaccaccactactgcagctactaattataattatgcactaatttagtctaaacacacttaattaataacaaccacgccactatataagtatatatatagttatagttttccatcatttttctagcctaacaaattaattgtgatatgactttggctctctatattaattctctattcaaaaacaaactcatcatagatatatatgtaacgttaactaattcatttttatgatcgtgatgattcaattatatttaaatagtagattaacttctttcaaatttctatgttcaaacattatcttcatgacaaacttataaaattacatttgagataccctagcaaacttattcaacaacatgaaaaaacttaaacagtactatttgtaattataataaaatataattttgcaaaataatattgaaaaaattaatatatttcttaatttatccacaactacttccaaatttggtcattacataacatgtgaatatatcttgtacctaattaaacgggtcactcactttttctaagtaatctaaaatttacctagacaaagatagccaacaatagacaataattattcttctcgaacttagcatacaactttcatcatattgt

SEQ ID NO: 47075 - DNA, 590 bp, Cannabis sativa
attaatttaacctattgtattgatatttgctagtggttttgaaacatatatgtctagcaaaagaaattaattataaaggcaaggtttctagaggtctttgttttgatttaatagtatcttaaatacctttaaagatgtgatatgaattgaaaggttagaaaatcggttcctctaaatttcttctatgttatgggtcactttcacactaaatatcacagcaaattataaattgtattaaatgggcttctttttataatcaagttctttgactcagtctaaccactattaacaaattctcatttttatttattaactttttgaaagaataataaattcgagtttatatatggtatagatttatgtacaactattttattgtttatttatttatttcgaataattacttaagttaattagttatttaaaaatatgtttaaataatttaatgaaactgtaaatgagaatcctccaaggctgagaagttcaaccaaccaaaatctgggtagagggcctaaggcagattcaatcctccaaaaaatgtgacccaagactagaaataatcttcaaaatgatttaaattggagggagaa

SEQ ID NO: 47076 - DNA, 1925 bp, Cannabis sativa
  modified_base (71)..(71): a, c, t, g, unknown or other
tttcaaaaacaaattttttaaaaacaaaaattttactttcattttatgattaaaaaattaaaaaacaaaantgttaccaaacggcacctatataattagtaaatatgtaaatagccgatgtgttctttatgaaaataataactaaataattaaagcaatatggacagtgtaaagtaattattagttatcagtactatctatcattataacatattatttctttgaacaagtaaatcttcaaagaaataaataatgattattattattataattataactattgctgaaaaagtatgtaccgtaaatctttaaatgtaaaaataatctgagacatttgagatgttatatataacttataactaattaaacagagctaaaaaataaaataaaaaaaaacctaaaaatatatataaaaaaaaattcagctttttaacaacaataataagaattccaacaaatattcttgaatatgttaatgttaaatttaatgacattcatatattcattagacagctcttttaatattttttttttcttctatattattaattacgatttataatgtatttttattatacatatgtcacaaatgtcaaaataaatagtaccattggcaagaagctcgttgatgaggtcattgtagtatttaacgccaagtggattaacgcctccgctgagtttaccctctgatcataataaaaaaacaatcgatagtgatataatacatttaattcccacatgcaatatatatttaattactatataattagacataaaagtattttttttctgaaaccaagccatagagtaatttagtgataactatagaacaaatctacaaaatatataaaattataaatatgtgagtgtgactatgaaaaatatatgtgcctcttttaaatttgatacaaaaaattcatccgaccattaaatgatcgacttacttggtaatattcttgaccaagagatagagaatctgaaggaatccaagccaactttcttcatcaatttgatgtcttcctgttggattacaaataatttttgagtttcactgtttttgagtaagaaaaaaccactataaaaaattagctatagtaataaatttaccttataacgatgataaaaatctagagctacatctccattgctacgatccaaaattttttctgtcaattcaaaatttggtcattgtttttccgagttaatttacgccaattcgttttgttgttttttcttttaaaaaaaatgatgcatcatctggatttttttttttttttgttttttttaatgttgcttcatttggaattatttttctttttcaaacaatgcttttttttttttttggaaatcttttaaatgatgcttcaataattgggattagcctttcttttttcttttttttttttaaaaaaaatggtatatgcttcatttgagatcggatcaatgaaatgaacatattgtattattattaattaaaataaataaatatcattgactaaatatatcatataccaatacatgatgaactgagagtgatatttatttatgaatttaatatatagctaatacttttagttgcacgactttttgatgcatggtaaagacaatatttttagaaaatacttttggatttagtatgaattttgcattatttattttttgttttctttctaaaattgtgttttaagaattgagaacataaaatcattgttttaaaaactatgtttttatatttttttactaaaacaaaagaacattaatattgcacaccaaccatgagaatagaaaacaagttgtgtagcttttaaaatattaaacgtgtttggttaataatttttaattttttactaaaaagtcttagcacgaacccaatcccaccccgatctcggtacattgaccctacagccaactcggactctaactct

SEQ ID NO: 47077 - DNA, 1604 bp, Cannabis sativa
  modified_base (54)..(65): a, c, t, g, unknown or other
  modified_base (1571)..(1577): a, c, t, g, unknown or other
ttaatcaaaagcaattaactgagtctgctagtagtattatctcaactagtgagnnnnnnnnnnnnctatataaccgagctttcaatatgtagttttagaatttactaagaaaattctctaatgtattaattctgccttgcaccacaatagatttttagaattgagcacactctcaattttatataacgctttatatatgttctacgatatagatacgttatgattattgtaaagaccgaaggtgagaatatggattagtaaaagcaattagcattaattatggatatttttataattatgtacgattttactatgattgtgggtcccattcttagaagtgggcactagagttataacttctcaactccagaaattttattaaactctaagagtattagttaagccaaatattaattatgcaatttttataattttgctcggcgacagaaaatgtgatggatgaccgttaaagtcacatgggtaagtttagaacttattcttagtgaaaaaaacatgtgatatatttagaataccagggttaggcggggttatgatttggaccatttcacccctaggcctattaattgtttaagttctagttaaggggtattttggtaatctgtatgagaggtttaggtggcagcctaattttgggacagctggccattaagtatatctttattttcaatttatgtttagaaattattagatttacattttaagcaaaaagtcaagaaaagctagtttcaactttatgctcttcctttctccttctcgaatccactagggcagcagcaatattggaggattttggtgtgaattgaggattttcagctggaattgattagtgcaattcaaaggtaaaattctagtaccttctcccttaaggtatatttgttttatctttggtttgagcttatgattagtactataactggattactactgtatcgacttcgagattttactggtacatatacacaggtgtaaacagtggtcatccggttgatatttaacagtaatatttaactgacgtgtaaaatttgtagagaaaaataaacataaggaggttttgcaaccataaaaaaaaaaaaagataaggaggttaagtgtataaaaattaaaacataagaatattttaccgcaaattactcttaatattaaatatttattaaatatacataaaaataacttcacaaaataatttaaattaatttttcttaaattgaggactttactaaaaaaaatacatttatattatttaaattaaatgattttttttttttgaaaaaaattatataattgtttattgtcttattttcaatcaaattaaaaagtaccgtaacatcaaattaattatacgtgcaaagcacgtaatttttttttctggtatataaaaggatatgtatatttctgaagaaaaaaaatataataaatttattaacaataatcttctagttaagaaaaaaaaaaacaaaaataatcctctatgcctactctaacaaaacatatatacatttcattttcttttagggctcgtttggaacgctgtattaggtcgtattgtattnnnnnnnattatattgaattgtattttatgcaat

SEQ ID NO: 47078 - DNA, 1642 bp, Cannabis sativa
ttgtatttgtatgcagagattaaggataaacagcttaagaataatgaagatttcatttgggctgttgatgttcctttaactggaaaattcattattgatgttgaatttcttgatttgaagattgcttcaccaactgtaaggattttttttttaattattatttttaatagtacacgtgtcaatcatttagatatagttaggttggtttcactatttttgtgatatggtctctcaacaattgggcctactctacctaatgatgggctcctcctaggcccgaaaaatctactcgagcttttcgggcctagtttactttatatggataggtctaatgttcgagtaagctctaatttagatcatacgataaaatacttaaatttaagttttgattttcatcttagtgtctcattatttgagccaagtttatttcaagctcgagtcgatttaaatttaagcaatattgtcacattatttaggctaaatttacttcatgctcgagttgacctagatcgaaaatgtctcaatgtttgaacctaacaaatacctaattcaagagtaaaaattctttgtgatttagggtggagagccttgctcaatttgggcagatggacaaacacaaaaacaagcaaacacaaccgctcttttctcactcagcaaaatgttaacggaaggtattcacacagacatcgtaatccatgcttccaacggaagcattggagctcaccgcgcagtactggcatcaagatcaccagtttttcgtagcatgttctcgcacgacctcaaagaaaaagaattatccatcataaacatttcggacatgtcaattgaagcatgtcaagcttttctcaactacatttatggtaccatcaaacacgaagagtttctcttccacaggctcgatcttctccaagccgcggacaaatatgacatctcggacctaaaagaggcgtgtcacgatagcctacttgaggatattgacacgaaaaatgttctcgaaaggcttcaaaatgcgtctctttatcaaatgccaaaactcaaggctaattgcatgagataccttgtaaaatttggtaagattttcgatattggtgaagatttcgatgctttcttgatatctgctgatagagagctcatagctgaaatcttccatgaagttcttggtgcttggaaagggttttaattaaaaaggaatgggctttgtgtcttaattgggttttttatttttcattatctaaatttaaagtccataaagatggactcttagaaatattgcttaattagtatatgcaaaatttgttgtcaaaaaaaaaaaaaaaaaaaaagatgattcttttgtgcatatgggatttggaatttttaggtccttgatgatgatgatgattatgtaaatatattatatattgttggtttttaaaggcattgattgattatcttttgtataatatctttgtcacataacttacattcttcaatgaaagagatttggatattatattttatcgtaataattttgatacatttaaattatacatattttattttatattgtatttgtaattaattttgtgatataacataacatatatacttaaacaacttaaacttgtttgagaatattgtttcacatgaattaaataaaaaa

SEQ ID NO: 47079 - DNA, 3690 bp, Cannabis sativa
ctgtattattctgtaataattttaatgtgtttatcagtatattaattaaataatttatcatgctttaacatagtaacttaaaatatataattaatattattttaaaattttaatagcttatttatgataacttaaaaataaacatttttatatattttaataaataaatttgataataaatctatgatattatttcatttatattctttttgagattaaaatatatttacaaaattaaaaaattaaaaataattatatgtgcatgaattatttatctcatagtgctagatgggataactaatttcacataaatgggacaaattgaataatctagtcctccaccatggccaagccaagtacttgattagtgaaattgttcagtataatccaacctaatcttgtgggccaaatcaattttattggattagattaaaatagatttgagtaaattgaattattatattaatattagaaaatatagctcctcttagcgcgattattttaattatttttagtataataatagaaaattaattatttattaatataataaataataactaaaaatattatttaatttatatatgttgacatcgcttttagccaatgacagtaagtcaaattaaagtgactaagaataattaaataacaaaatataaatagtataaagtacaaaaaatactagattttatagatgttaaaccccttatagttggtaatagcctacttctctttaattgtattaatttgtgagaaaatgaacaagaatgacttgatctctctctaaagctctcacaactatctctgagtaatttatttttatatcaagtcttctctctgaatttaatcgccccctaaatagtgaaaatgagtccactatttataagaattaattacatgaaattggtttccctaaatcaataagaaataaaatagaataattacaataaggaaattaagaaatttaggttgtttgcgtttcttctatgaagatacaaattcatcctatgaatttggggattatgtcgtaacttgcaagcttcaagacatataagatatatctctgagattgctaacttgcatcccctggtcgatgcatgcaagacacttgcttgttaaaagttggtcgggtgtaacggtgtatatgcatactctgctcggttgtcactatttctgtatgtgagcttgagaatcaattctttctatacggcttactgagagtagaattgtccgcccaggttatggaatgtactccacgtgtcacttagatggatgccacatcattgtgtagaaatttggataacatttgtccccaagttcgcgtgagatcttcttggttgcatgtggacttactcgaccacgaagttacgcctgtccagttcttgtctctgatccgaagtgacttgattgaatgtctcttcgatgtttgggacatttaatgctatctcaaaagctacatctcaaattacacattgacggttgcacgacaccacacgtgtgacgtctgtgccatttgtaatgagtgctaacattccattttgaggggaaatctaaaaaattaaattttgaattaattaattatccctctaaaatacttataaaatgggttttaagcttcagtgggattcttttagtcatttgatttctcaaaaaaccagagtaaacaatttatttcttcattcttgaatttttaaagaaaagttgttggaatctccatcattaaaaccctcttagcacgttgagaaagcgtcacacaatgggtaagttatcttttctttttatttatgcattttttgttgaatatatgcattgtttttctaaatttcgtgctacaaatttatgtgttcttgaacttgttctcgacttaacatatgctcaggtcatatgactttctaattccatgtcacttttggcttgaaattgtccgaattcaccctttcgtaggttttcaaagaatttttgaatattcttcgtaattttggacttttggatttgggaattccattttggaatgaaattcctcattttttatttgattcggcttggtgggcataatacacatgtttcctcctttctcccgtccaactttcaccatttgtctccctcattttttagatgaaccctaatgagtactggggaggtgatcatcatatcaaccaagatctcattcaactcctttacgagaatcatcctcggctaggtgtgaactcatcttcatctagtgaaagcctttcaaattctagttttgaagattggaaagtcagcagtgatcattcagaatcatcctcggctaggtgcggacttatcttcatctagtaaaagcctttcaaattatagtttcacaaaaaaatttaattttttgaaagaacacaaaaaagtttaattgtaatttaaataagtaaccagataccataaggaggataaccaattaacttatactaatatgaaaaaatcaataaccgggtaccataaggagggtaaccaattaacttaatactgttttccctatattttcttaactctttctaaaattttcatacaaaataacttttttgaataaaaaccatatttttgcaaactcataaaaatgaaaattcacctgactcgtaagatttaagaaaaaagagtagtagattctcaaaaaagaaaaaagaaaaaagagtagtatacataaagatgaagaaaaagtagttaggcgtaggcccattagtttaaaagcccaaagaagaaagagcagcccagcccagcccagcccagcccagctatagcatgaaaggaaaaccaaaccctagctagggttttgtttggtgggatataaaggcgagagactgtctctgccctatatttctttggtccctgcaaggaggaggagaggtttcattcatctgaatcgtaaacaccaatcgtaagtcacctattatcttctgtgttaattgatctctttatggcttctgctctaattttcagagtttcctggataattgctgttcaaatatttccttgtatttataggatttatttcattttcagaagcaaaatcgtattatgttctatgataagctgaaatgaattgataggagctgttagtaatcttagtttgattgattttattgatccaggtaatggctcctaaacagcctaatacggggctttttgtgggtttgaacaaaggtcatattgtgaccaagaaggaattagctccaaggccttctgaccgcaaaggagtaagtttattttgtgttgtttcatagtttgtataatttctggattgttaatgttttgaggcctgtaagcaagaatcttgatttttttttttttcacattttgtatgattctaatgttgtgatgtgaaagagtgtttttttttttgaaatgggttttgtttgttttctggtgtagaaaaccagtaagagggtacattttgtcagaaacttgattagggaagttgctggatttgcaccatatgagaagaggattactgagcttttgaaagttggtaaggacaagcgtgcattgaaagtagcgaagaggaagctcggaacccacaagagggcgaagaagaagcgtgaggagatgtccaatgttctccgcaagatgaggtaatttcgaaagaacttgattattagaataatgctctgagcctgaggttttttttcaagtgtttcttcaattgagttggtttttagcctt

SEQ ID NO: 47080 - DNA, 1416 bp, Cannabis sativa
attaattgattaataaaaagggtatttctcaacttaaggcagctaaaccatttttactgttgttttacttgcatttaattctttaaatataaattttagtagtaaaattttgtaaattactgaactggtaataaagttaaggtgtcatccgattaagtgtcactatagactacttacacatacattcttgtacacatgacacgtttatattgatatacctaatattattattaaaaattcattttgaaattaaataaaattataaaaaaaaataaaaatatttttaaaaaaatattataaattttgaatttttttatttttcaaataataatattatgtgtatcaatataaatgtcacacaaagatgtataaaagtgtacacacaaacaatctacattggtagttaactatagaaaatacataacaccttaaattactaatttgaatttagaaaattaagtgtaagtagaataataattgaaagtatttagctgtaaaaaattcatttaaaatacatttattaataataaaaaatagcgtgatgtcagccaaaaaaaaatgatactaataaaaaaatatgggattattaataataataaataaaaaaaaagtaaacttttaagtggaattaacatgtataaagtactaaaatggtatattaattaactaagttggttttaatacaaacaaaacaataagtttcattaaaatgcacaacaaaaaaattctaaggagcacacttttttagtattgccatgttgccaactttttcatttaagtgagtggattggtctaacttagacacccaaaaagaaaatatgatatttttcagaggtagaagtgggagaggtttatacaattaaattgtgaaaagctcttctcatgtttatgtgtaatcaaatttggaccattagccataatgaagtagagatcatcacatgctcaaactttcttttatagacatggaatttaatttgtagttgatgactcatcactcatcataattgttttctctactctcaaacaaatatattaggattaaagaatttatggttaataataccattatgatcatcccatgatgttattatgtctcaacaaattcatgctcaaatagttaaattaaatacattaataacaaaaattgtaacatttttttctttatacaacatattttcaaccacactaagtacatttttactcatataaaggagatctcttatttgaatctcattcctaatgttaatatatgggtttattcattatttataattttgagtaaacataaaatatgttgtttttcaatcaaggataatataatactaaacaaatatttaaattttttaaacttaactccttatattttgttgtcaaaactctttatcttttatttaaaaaatgggtttatacttgggt

SEQ ID NO: 47081 - DNA, 816 bp, Cannabis sativa
tttgttctaatttctgatttgttaatagtttatagttcattacaaactaaacttgtcattgtgcttctgatgttcacttaacttaacccaaaaaagaacattcaaaggcagcagctcttaatttcacatagtccatatgtgcatcctaaaacataaaactccctaaattaagcagtaaaaaaaaaagaagcacatactgcatacaattcatacatcctgtacttgcataaaaaaaaaaacacaattacaattcaaacactaatttagtagtgttctatatcaaattgttggattggaagaccttgcatttggagcttcttgtgcattatcccttgcctctcttgccaactatttttctttcctcttcctcctctttaaagtttcctcagttgggtttttggaaggtgggcgacctcctttcttcttctccacctaaacatagttgaaaattgtagggaaatcaaggtgttcctttgtacaattatataggcaaacataatttaattaaatcagtaacactcacccatgaaataattttatttgccaaacttatgtaaaataaaaatcaataagtaaaaatgaataacaatatgtaaatcaaataactgtggctgtggggttgaagtctttggtgtgtccagcttctttgcagttggagcaatgcataaccagtccaaatcttctacttttagttgtagttggtggtggtggctcattacctgctctctttctcttctttctaggtctgcccgaaaggttgtgctctccaagaggaaagatcggattaagacatttgttgggccattggtctaggct

SEQ ID NO: 47082 - DNA, 1776 bp, Cannabis sativa
tagtttcgaatcaaaatgtactttaaaatcaatcttagaagtgatagtgatgaaacccctttgtcaacaaaggaaacagtgcaaaattgtaaatagctacacagccataagacgcggtaattttaataaacaaggagtgaaataaaatacctttgatactccgaaaagagcgaaaatgatggccgaacagtttctgaaacataggttgctagaggagaaggaaatggaagatttgagtctaaatcccacactgagggagcagaatcacctcctcttttactctactaagacaaatgaaattcacagatcttttaagtaaacaattaacaatgcgaaaatttcaaatgagatttatcatgacaaagttacatgactttcccaactatctaacaaaggtaaattatgatccaacctgtacacagatgacatgatagtcccataaaacagctccatctgccctgttgctggccttttgaccccataatggaacctaaaaagaaaaagaaaaggaatcaaccagcttaattactactacactgtatctgttcttatcagttaaatatctgatatgtgggccaatggtccacacgatattaaattaattttttaagggtgagagtccaccacattagcttgctaatgggactctcaagcatcgcctatgcgttgcactattgcattggctaggcgcaaccgacttaaaaaaaacaattactacactatatctactcagttctagtcaagtcctgaaataacacaaggaacaatcccaatttcccatccacttaatatgcacaaaaatttacagctagttcatgtttagagagtggaattggattaaaacatataagaataaataagttgatcatttccaataacaaatgaagcaaaaacaagttgagtgagaagttgtgtaattcattggataaaaaaacaaaagtaacccaaattttttcaagagaattaagatttaggtggttgaactaatctttccaatactcactaatttcataacaaaataacatgataagcaaatgtcaggagaaatctaaaacagttgtaattgttcatcacttctatgtgcatttgactacaaataaactcatggataatacttcaatccttaaagcaatgataaaatcaagattcggactcaatctgaaacttgggtaaaaatatgaagaagaaaataagattacttatcaatcaaaaattaaaaatacatgcctgtttcttctcattggagatgaaaacaacaaaaagatcagagccatctgcctctgctatcccatctttactcaatttcttgcaaagcaagtatacattctcctcactacaaacaaaaaatcaaaaaaacataagaaaaaaaacaccaaccatgaattgtaacaataaaacaaatctgatcaaatcaaaccaaatcccatgaatttaattattattattattattattattattatttcccccttgacatatgagagagagtacatcataaatggcataaaggttaatttagagaaatacccattatcagaattcagaaatggcataaaggttgatggaagtatgaattggtatgcataaatgtagagatttacagttaaaaattgaaagatgatgagagagagaattaaaagtaccagtaaaagggtgtgtgttggcactgagaaatgtcgaaagaagcgtttgattccagagttgaagtcgccatcttcttcttcttcttcttcgtcagaaacttgaaaaccaaaaacccatatatgtaaaggcttc

SEQ ID NO: 47083 - DNA, 689 bp, Cannabis sativa
aaaccaacttaaagcatcaaatacgtacaatacaattacaattacagtataaaagatacatcccttccaaaactgataaaaacttggcaagagttaatggactagctcagtctagtatttcaaccaccactgacttaaacagccaaaattcaattaacggtaaaaaacaaaatggcacgtagtcagatcaaggaacattctgttttctcatggttagagaaaattaaggagtgaaccaagtgctgagaagactaaccgtgaacattttcgagtctggatcccaatgagagaagaacttaggtgtagacttgtctatctctgtgctcggaacctgaaatggaaattcactaaaattactctaaagaaaagaaagagctacaaattcttatgatactataaatatataaatatatatatatatatgtatatttaccttgaaagcaatgatctcatatggttcagcggcaaagagaagatactgatatcttttgtcaaattgttggaccctctgtaaccgtgaaaatgcaaaacacaagggaaagttagtttatcaatttttcagataaaagaattccagcttaaattatttaaaaatacagagagatatgtatgtttcacgcagcatactcaaaataaagcacacctgctcataagatgacataaaccggtgccgtggcttagcaaggtct

SEQ ID NO: 47084 - DNA, 1751 bp, Cannabis sativa
  modified_base (275)..(276): a, c, t, g, unknown or other
cccaaagcctgcgaagcttgtgcgatcaattgaacagggaaactcgcaccctataggtcgcatacgttactgcacttattaaaacaaatttaaattgttcttcatttattcttttacgtttattctaatttgatattattattaattgtaaaacggttctataaccggccaattatgtataactaaacggacacttgctttgtatatataggggtgatccaacatgaataaaggggacaaaaatcttttgcaatagtggactaagcagaccgtgnnctgactgaaccactatattcccttgtgctcattgtatttttccatttgtttattatctggccagtctcttttaaatactcgctgttctaagtagagtattcactattttttatcaaataattattatttggttagatattttatgttgtccaaattctcctgacaatatttggctccgtctgtgggaactttatcttatcgattttggaggaaaatcaccatggttgccaaccagacaaatggaaacaacatcacgggatcctttaatacagaaccatgaatgttcctatcccaggagatggaacaaacctaactaatacaatcatcggaggtgtggaatgaaccaacatcaccccctcaacttattccagaaactactggacatgctggaaagacatccacaccggtagctatagtggcccacttcccgccgaccacaccagtagtagtctccgaaggcataatcatgcttactatagcacagtacacaaccatgcaggaacagatgtaggctctgcaggctgaagtcgatggaaaagaacgagtcaagactcgatgtccaccccgggtcccaaacccatgttcaggcaaccctcaagtaaccactatagctagatgttgtactgagcgtcctaacaatacttgtactcgcaaggaacgtgtgattgaacaaggaagtctcaatctgaatcaacctacacgcgactctatgcaaaattgggagcatgttgcccttgatgccagttgtcaaagtgagagaagaaaggaaagaccgcaggatgaagaccctgaatggcacaacccacagagttgggcccaaccgcaaacaaaggtaaatgaagttaattctcattcctcttctactaatagttgctctcctagtatttataccaggtcaggatccatcaaaactcgacggggaggtatgcaccacgtgcatagaggtgatcttcgcgatcatctcaacaagatttttagagtgcaatctcaaacaccaaggaaccgcgatgataatgaagagccccatgatccccgtgtcggcgattaaggcactcaaaatgcaaataatgcgactaatccagtcaacctgccgatcgatacaattgcgaccacaaaagtagtgatccctaccaatatagcagcagtcgtcgctataccaacagtgactcagaccaatcccacactaccaggaggtattgaccaagagaacctcttacgagcattaaggttgatcgagtagtagagaaagcccatttaaaagcttcatgggacatcaccttttacagaagaagtgtgacaggaaaggctcccaaaaggctttagactatctgaatccctcaagtataaaggtactactaacccaatcgattatttagataaatttaatacgaatatggaagtagatcgagtaccataactggaaaaatgtcgaagactcactgtaactttagaggataatgctcatgattagttta

SEQ ID NO: 47085 - DNA, 1368 bp, Cannabis sativa
tgtaatactttttctatttaatagaatcgtcagccctcatgctcattgagctgagttttcattcaattgcattttcttcaaaattaaacttggtatcagagctttctcataacactcttcaatggctactgaaggaactcaaatgtcccaagtcacaccagtaaaatccagttccgaaaactctccaccaagctccagtgctcagccaaacacttcaatggcagcacctctagtgactccctttagtaacacactgagtcaaccattttctttgaaattggatagaaacaactacccactatggaaaacgatggtattcaccatcatcaggggacacagactcaaaggatttctcactggtcagaaaacatgtccacctgaatctcttacagttcctgcaactgatgaagaaggaaatgtaagcacacactctctgcctaatcatgaatatgagtcatgcatcgtacatgaccaactgttgatgggttggctgtacggatcgatgactgaaggcattggatctgaagtcatgggttgcagatctgctgcaacactgtggactgctcttgaagaactgtatggagctcagtctagagccaacatggatgaactacaaactaagcttcagaccactcgcaaaggagacaaatcgatggctgaatatctcagacagaagagaatctgcgctgacactttggccattgttggtgatccttacccagaaaagctattaagaggtaatattctctctggtttggatgctgaatacttgtctatagttgtaccacttgaagctcgtgcagaactgtcttgtcaagagcttcaaagcaccctcctcagctatgacagtcgattggaaaggcttcaatctctgtcaccaaacagcaagttacttaacaatccttctgttgctttggctcaaaaaccctttggtcctgggaacagaggaggatttcaaggaagaggatctggaaactccaacaatggaaacaactcaggtcgaggatacactccccaggggtcatcttcgagaggaggcagtggtcaacgtggcagaggaagaggtggaagaggcaactcaaagccaacttgccaagtatgtggcaagtatggccactcagctgccatatgctgtaatcgttttgatgaaagttacatgggacagcctcctccatctgaattcaattacagtcaggacaaacaaaatccaatgtctgtattggtggccactcctcaaacacttagtgatgacagctggtatgctgacagtggagcaaccaatcacctaactccagactctgacaagctgaaaaacaaagtggagtatggtggtaaggagcaaatgatagttggtgatggtactaaact

SEQ ID NO: 47086 - DNA, 816 bp, Cannabis sativa
gagttgtctcaactgacccataggattcttatcttgcgtcgaatctcttccatgttgacctattaggggtgttattagtgaatgacatggagtcccttccaccgacatatgtggttgagaccctgttcccttatcagtggcttttgtaacaaaagtgtgatgcttgggtttttcctttgagtatgtcactcaacactttttacatcctaaccaccatagtttctagcttttagttcttccagcagaggtcgtttatctcctccgcatagtaacgagttcaaaagctcgagctcaccgagtacacttgcttctcctttctaggtccatgtcttgaactgtcaaaatcttgtggcacagatggtggagggtgccgcactggagatggccttctcagtagttgttatcaagtcatgttatgctggggactcttttttagcattggcttggtggtgttgcaaatgtctacgcatggtgattggttaatactcagggaaagatgtaattatggacttttatttcccacgaacggcgccaaactgttgacagtgagaactcatgaactaaactttagttaaaaagtcaaatgcaaagagttgatgatgaaaaacttacgaaaaattaagaaagcttagtcatcaatggagtaagatactgttgtattgaatattagagctctcttacaaatggttattatccaaccattttacaagtatccaaatgaggcttttacacttgagctctaatggatgtgaaatacaagttatcctaaaagtaggggacaaagttctaatcgtaccatgagggtcagtgtgtcaa

SEQ ID NO: 47087 - DNA, 1800 bp, Cannabis sativa
aagaaagaaagacatgttatcatttttttttactcatgtcccaccaggtgaaaaaacatcaaacaagtaatttacttgctgtaaaatcacatggtcatccccaataaatttggtaattaactactttaacccccacaatgtcatatttgaaactacaataaattaggagtattatttttacgcatcttatagtgaccaacaccatactgatattgaattgcatcaaaatatataagaccttatattaaattgcactaatagcgatatgacaccttaagatactccttaacatttctcaataacttaccattaactaaatcaagaaatttggacaatatctcttacttcgcctctactataggagcatattcaatttttgacatttttttttaataaatcacgcctctttattaatagcaattaactaaaataataacatacaattcaattagagcatcttttttgttggagacaccaccaagattaaaattagataaattaataaaccaaataatcagccatctaattcctaaattatttgccaaaaaaaactaaaatataatcacataaaaaaaattgcaatatcactttcattcaatgctcagaaaatacaatagtaaaaattatattttattttgttttataggatggtgcatccaatatattttttgagaaattctaaataatttatgacataaaatataaagatcaaaataatcaattaattccacaagcataaaataaaaacagtactagtgtaacaaactatatttgaatcatattttctaaaaacatagaaaatacctattataactataatatttataatttctccttataccgaaaataaaaaatattctatagtaaagtcaaaaatgatactcacacctaaaatttgagattatatcaaaaatatgcaaaaacaataacaaaaaattaggaaaataaggttatacaaaattttaaatatttttacaatttttaaaattttatttacacaaaatacgattttttaagataattttatgttgtactcttattattttgttgttaattttttgttatttgtatattattttttaatgttgtttgaatattattttcatgtagttttcttgttatttatgttatttttatgaacacggtaaaaatatataaaaaaaattctttagacgtagtataaaaattttataaaaaataatagttatgtatatttttcctaaacaatttcccattataacatttttttttgggttaaccaacttgttgtatggtgtagtggtaggaattgcctttactatcatccttcctttgcctactttgtcaagggttcaaaacccacaatccctcttgaagagtttaaaaaaaaattggccctttgaaagctagcttagtgtaggtggtgttatctgtatgatgggaactttgaggtgattaccgatggcctaatgagcattgctattagacaccactagtgtccaacaccttttataggtgacaccttacgattggttagtgatattctctaaaagttattttttaggttatatgagacacgctacttgattacatcagtaccaatataacaccaaagaaagtataagacatcaataatattttttagcaattccctgacctaattaagggagacgggaagtataagatttctatagctgacacgtgatctctgagaatgttaaaatgatcaaaaggatagagaaagaatctgaaccacgtcatccttttttattcaaaacaaaaaaaaaaaaaaactttttttttgagttatacacaaaaaaa

SEQ ID NO: 47088 - DNA, 1223 bp, Cannabis sativa
gtatatttttgtactgacaaaaatacattaaaatgcaccattatacttttacgggtacataattgcgccggtaaaaagtgtcaataattattggtcggtaaaagatctttcgccggtgtaactcacatttgtgctggcaaaaatatcttttagcggcgataataagtattgacaaaataaaaattaaaaattaattatatataacaacatacataaaataaaaaagtaattattagagcaacttaaactgtaattttttttttttttaaaaaatatattatataaaataatcctccttaaattaattaggtacaattagacaaacattaattggtatcacattagcatttccactaagtttaaaagtctatttttattttatttattttcgaaccacttaagtttttatagttataaatttgatattaaaaaaaaaaagaagagagaaaagttatacctccttctttagtcacaatttaaaaacacatgagtattttttttttttttttagaaaaagatacttgttattataaattaaacaggaatgtcatttacaataacagagtaaaaaggtagaggtaaatcttctaatcaagagcaagtctcttccacctctaaagcgaacttagctaaactaagcaaccatattagctgagcgtttagtttggacaacattcactgttattgtagtatcttttatttatttaatatttaacttttctttttcccacaaaaacacacgaatatctaaaaacagtaataatatatggtttatgtataaacgtaacattaattataaaactactttctttttcaaaatagataaataaataaaatccaaagacaataataataatcaatatatataaaagaaattaaatacaacatgcttaatatcttattcgaggggggcctaagctgatgtgatagcttcagaaaaaattaataagtttctttttcgtggagtttatttgtttgtttaaaatggattgattgatcttccataaaataaaaaaaaattaaaataaaaagattgattgatcaacaaacaataataaattacaataataaattggtgagcaagtttctattgaaaaatatatattaaaaaataaagagttgttactattttattttcttaaataataaaaatacatcttgtattttttaagatgaacataattagttttgtaataatacttaagttttattttaacaaaaaa

SEQ ID NO: 47089 - DNA, 1644 bp, Cannabis sativa
aaattaaaaatatattatctaattccatattattattaataattttatttattaaaaaataaattcacaattttattaattaatattttgagttatttatcaagaagtttaaaatttatctagtattttaattttttttttaaaaaaattattgttgtaaaaacaataaatagagtggcgtaggaaaaatagtatgttcagcataatgtattattttcatatttcgatcattcaaagccgttattattgtatctcacttgttgtttcattatatctcatcattttttatcaccgcatcttactatttgttatcaccgtaggtcacttgtagtcgatagatagaaagaataatggaaagtattgtgggatggaaggtattttattattttactattaatattatgtattatttttttaaaaaaaataaataagtaataaatatgttagggttgatatattatttttttattagaattagttagagatattgttttttaattagaaagatcttgtttcttattagtaaacaactgcttgtttctcaaataataattaattaaaaaaataagtaatacatatggaaaatttatgaagataatagtaaaatatcaatttgtagatttatattctaataaaatattaaaaatgagagatttaatgagagaaaagaaaaataggtttagagagattttagagtgacacatcaccgcctcatacctctcctttatatatattgattgatgattgattgattgattgatatatattgattgatgattgatgattgataattttttattaattaataattaataatttgaaatagttaaaatagattatggttaagacttatagataattaggttgatatttataaatttttttgttaatttatttgttatgcgtgcatgatttttttattaattaataatcattaatttgattaacttttaaggaaaagatagatagatgtgtttaaagtgttttaagagtgtcatatcactgacttatactttaattttatataaatatatggacttgaaaaaaatattaggaaaaaaaggaaaaattagtgtagagcacgtgttttatgatgttaagttaccgttttcatttttaactttaatctataacttttttatgaccttatttcatgaatcttaagagtcctatcgttaaaaaaaattgattttttctacatcaaataatttatactaataaataattcttgaataattcgaaattatcaatggccatgaagttgtcaatataaaaaaaaagtctatatatctttaaattatcgaaaaatattttgatgagtgagagaaagatttaagatatatatatgtaatagaaaaaataaagtagagagaatattgacaaaattaataatctaccaagaaatatattataaaatataattttgaaaaaaaaataccaacaaaaaattaaagttaatgaataaatcatgaataattcgaagttattgacgatagggaagttttcgatataaaaaaagggaaattatagtaaatgaccccaaatcacaaaactatgttagtttatgtccttatttcaaaaaaatatagcaaatgaccctaaatcataagactatgttagtaaatgtcctcatttcaaaatcat

SEQ ID NO: 47090 - DNA, 2177 bp, Cannabis sativa
gcatagactgtcaaccataaaacgaagaagagttgacacagcagtgatcgaaagaacttgtcttgtctagccttgcttcctctagtctaacacagaacgtcaacatctcccaacattcagcaggggtccccaaagtacatcaaactcagataatttgtaccacaatcttaaagaaaagccacaatgaatgaataaatgtttgccattctcttatcttctctgcagtttttactgctttaagatatttattgatttgtcatgttcattactgttcattgtaagctgtattaaaaaattgtcatttgtactttgcagattcccaccaacaaaaagaacaagaaagagcactatcatgaggacttggaagaacgacttatttcattgattgcatcattatttggtaagcaggcaagcgatatgggctatattatataagtatttacatgcattcattcatgtaacaaggttaagcaggttcatcattgacaagttttggcacctttgattttgctattttataactttttttgccgcaaaatgataacagaacccttattctttattgttcacttacatgtttaagttaaatgaatcttaatttacattgcaaagtcagaaagtttttatgttttggtttatggaatgccattataactttaagcgagactgttatttatatcttaattatttggacctctttcacattgggctacaaaggaataaatgactagtgtttttagtaaaattttgaatggctatatactttacaacatcatggctgcacaagttttatattgtattagagcactcccgacaacttttctactttatccttcaaagtacattcaaaaatttcactttttttttttattgtacctcaaacatttacattacaccaaaatgttttgaaaaatggaatcagattccgaggtgttttcccttagccccgggacgcctacccctcaacagtaagatgaaaaacttaataaaatatcataaaactcatataattcataacaaacaacacataattctataacaaactcatataattcataaaactaaggaatactaacactctgaacatataaagaacacgtatttcctagttccaacactagcttaggagcttccttgagtttgggaaacagtaaaggagatagtgcaagagggagatgaagagtaggagtggctggtgtgagcctgtcacgattttttgacttagaggctaaaggggtgttgtatgcctcgatggttcaaggtttttaggatttcatttatctttcctattctatttattataaatctgttaaaaaaagttcaaacaaaagccaagtcatttaaaagcctaaaaatagctttaaagaaaagcccaggtgagcccacaaaacagccctaacacaaaacaaagcctaaggcttgcatatcatacgcctcacctcattcacattcgcagtgcaaggcatatgcgtcaatggaaataaaaagttaaattatgtttagagtaatgaatagtattttaatagtattttataaagggtaagtacagggtaagtaccatattggattttgtttggattttgtgttttgtaaaagttaccgattggaatctctattttgttaaatgacaattcagactctgtgctttttaaaatggtacaaaatagacacttcactcaattttcatcaatttttttaatataactaacttgaaactagtttctagcacgaacagttgcaaaaaagtaaccagacttgtcataacatctcgaggtcatgttattattaagttttaatttgacagaaattaaactcagggtctattttgtactattttgaaaaacacagggtctgaattgtcattaaacaaaatagagggtctaattggtaatttttgaaaaacacaggtttaaaatagtattttcccttttataaatatagagcatgaattgtaaatttaattttatttcaaaatgaagaagcaatttagacgatctaatacagtgtgtggatctaatatagtgtgtatttacttggtttctttaaaagtttcaagaattctctattatagagtatctattgtgagtgctcatagctgtcatgttattttaaatatatttgagaagcatgaaatacaattgaggcttttaaatgtcctaatccagttatatgagact

SEQ ID NO: 47091 - DNA, 1093 bp, Cannabis sativa
agtgactttggcgctggacgttccgaaaataggtactatcaggtcgagtgaattcagtaatagacgtctgttggtattccagcttcccttctcctttcagggcctatccgaaagagattcttggtcgtgaatatctgaataggatggtcaatttttttttttttggtcaattaaatttgtgccaaagctgaaattaacagattcatgtaatattttgccaactaataattttgtagtatttttaccaaataagattgtagtattccactttgttatatttggataagtttgttggttgtataatattttctttaattatttacaacccataattcctataaaataactaggattattaacaaatgattaataatagttaagaggtatgataaatatcttttgccaatacaacttttttaataatattatttgtccttataaaagacaatttcataacaaaaataatattttgctcaaaaataacaacaatagtatttatcatttttttggggtcaatcttataatattgtaaatgaaaaattatattaatactttgttacaaaatactttttaaaattacaacaaaactttgttgttatttaaaattatcacaaaatgttttgactttttatatataaatatatatatttaaatcattactctcaatatatatatatatatatatatatataaacccattcatcaattcttttttgtccactaacacttaagatcataattgtttattaatgacaatatctaactaatttaacttttttttataaataaaaagggatcactttggtatagattttttccccaccccttcagttattctgacaatctcagagacaatatgttgattatatgggtttcatacctcagtttaccttaattaagttattgtagtcactttaagagtttttatcacataaatgacaccacctccggtaaagatcaaacctttctttaatccctttcaagtagagatggaaattggtcggttaatgtacggggaatgcaatccccgcccccatccccgctacctatttatacccccatccccgctccatccccgtctaataaccaacgg

SEQ ID NO: 47092 - DNA, 2021 bp, Cannabis sativa
tactactactactctagtactctatgtgggacccattccctgccttgcaccacagaacacaacagaaggagaaggagtcacccatgaccactctctctctaatttccagcttttatatttaataataattctctctctctctctctcattgacactctcacctaagcacatcttccttctaccatcattaatgagaagagaaatgttcgtgcttagcatcctcctatgtgttaatattgctattagtccaactaagtatcaagtctcatataatttaatataataatttttaagaagtatcgctagccaatcgcaatacgacatgttgagaaggtactagacaccgctgatgcctaatagcaatgctcttaataagaaatactaaattataccagtgtcgtttagtatcatcctatgtacaggacatgatcggtccaaatattttggaagttttgtgcaaaattttagaattggactcttcaaaaaaaaaaaaaaaaaacgggtacattaatactacaattttattactaactttttttttttttaaggattcattcataaatttttaattattaattttttatttatgtatatataataataaaaaaagaaaaaaatatgtttcctttttttaaaaaaaattaggtcttcaaaaaataaggcattttgaaatggccaaagctgctcaatatttgggccgactgcctatatgtcaatattgttattggtttaactaagtatcgggtctaatatagtttgatataataatttttagggaatattgctagtcaatcacaatacgacatgtctagaaagtactaggtactagtagtgcctaataacaatgctcttcgttaatatattagtcattgttcacctcaccttacccaattattattattattatttaatatttaacattttaaaaaatatatatatccttatgagaacgtcttaaatttatttgattttgataattaatttactatgaaccgcatattaatgtagtgaatggaacatttatgaaaacgttttttggcttttggaattatcaaattgggtggttttacttttcaataaaagtcttcaaacgcttctatgtactgtacatttgacagtcaagtcaactacgagttagcataaccacaattttaaaaataaaatgaattaaaaattaaaccaatcaatattttggtgtgttaattatttaattaatttgtgtaattgttggtaagagaatattaattattaccaaaaaaaaaaaaagtcatggatggttgtggaaagaggtgtttatgagtaagcggaattttagagaaactgtctccaatttgggtaattaattatttaattacaattaaaaaaacgctcatttttttttttttgcagaataacgctctaattatgtatttatttattttttatgacaattttattaaatgtgaattatccattttggccattctattgtgtaataatttttttttttggaatgtcaaaactatttgtgtaattattaccgatgtaagtttatactttatagtacctctgttaaagttgttttgatagactatattcgtgtatcatgtactactacatggaatacctataaattttaatttttttaatactttacaatatcaaaaataatatttaaataattttattaaaggcatgattgtttatacacttcaaatattcataattttttattttttttaatattaatcttaaataactataatatacatataaaattaaaaataacgactaaaatattcttataaatactcaaataaataaaaaaaaaatattctatatactattttttttttttgaatttatagtttagattactttagtgatttctctagtagtttctatggaagttgttatgtggattttagttgcaatgtaaattgctctattagttgctataagtatttctatgtgaattttcgtaacgatgaaaaaaccctaacaaataaactgtctaataaaaattaccgattaaacttttt

SEQ ID NO: 47093 - DNA, 1008 bp, Cannabis sativa
gcaaatgaaatttgtaaaacgaaattaatcatacatatatcaatatatgtattattcaaaattcaaagtaaagatacgtttcaaaataatcataataataatttcaaagtaagaattgtagtgatgtatcaaagtggactgagtgggtttatttgtgtgtggacccagatacgcggaggatcaaagtactgcatgatatactggtaagacaatctaagtagcttgacatatatgataaccgaccaaagtagagctagttgatgaaacacgtgaaagtcaaactctctccatcactttctaatatccatgatgcatcatctttcgtacatggcatatataggagattaattaaattaaatctcatgaatattataataataacaatactaggacagtgtatttcaataaaataagtggtcggaggtgaaccaatacctcaaaagaacccatctagtagttataaattattttcatctttactagcagctagctagctaggtgggtgaaaataaattgtgaaattgtataacacactgtgtaattaagtatcacttatgtaattattttctattttttattttttataaatattgttaccttgtgccttatcgaatcctaaaataatctataactacaataaaaactataaaaattttcgtcctctaaaaattttcgtcctctaataataatttactaaaaagccctcttgattagtatactatatttctctcatcatatataatattgacttctatatgtacattacacaaacattataaacattaacattattataaaaaacatataccctgtaatggtttattagtccaaattaatctttttttaagcaaaaaataaataaaatagctaaaaagtcttagaaagattttattctcaaaaaaataaaagattaagatttttcataccttatagtatggtcactgattctgtacttgaattctctctaaatctaactctaaaaaaaatacaaaaatcattatataatta

SEQ ID NO: 47094 - DNA, 1045 bp, Cannabis sativa
  modified_base (985)..(1020): a, c, t, g, unknown or other
ctattttaataacatttaatttaatacaaaaacttattttataattatgtccattataaatattaactctaaattataattaatcttataatttttaagttttgtattaaaacaataaaatatacttttatataaaaataattatatcttaataaaatttatgtaaagtttataaatttatttatgtaaaattaataattgtatttaaaattgtaataaaagtataaatattatatttactgatgaaaaataattttattatgatatagtattaaagattgtttgttgttattgttgacgcggtttttagtcaactggtctacgaattgtaaaaaataagaggattgcgatgaattaacttgtaaataaaatcgcaataaataaaaaaaaaaagacactagaaatttacagtagttcacttccatgtctcaataattttggtgctacgtctactatgtttttattatttggatttgacacacactagagttatgttctcaacaatgtgtggataatagtaaataaaagatctctaggtaaaatctgcacacaaggctcatggaagacccaacattcataaatttgataaggatgatggttgaaaatagagaatagtctctcttccttagtaaatgtgtcgaagtaatggtgtttgtcaaaggtataacaatgaaagcttggtgtcgtgaagaacacaaagaagaagatgcagaaggaaatactctccaatggtctttaagtctggaagctcttagaacacgaagaatgattttagtccctcaaggatttcgtctctcgcaaggtttttcgtctctttaaccctagcctatcactatctatatatacccgtagggtttattagtgatcccccacatgtcggggtatctcactttcaaatcctgtaagttattctcaataatgaataaaaaaatagaaataaataaagttccatgaaaatgcccatttgtaacaccctaactatctnnnnnnnnnnnnnnnnnnnnnnnnnnnnnnnnnnnnctcgttgctaatcaacgagatttat

SEQ ID NO: 47095 - DNA, 1482 bp, Cannabis sativa
ggccaagggtgcgggtttggcgtccagggttagggtctgggtcgaggtcggggtttaagtctaggtccaagtccaggtctaaggtctagggttcgagcttgggtccaaatctcagtctaggtccggttcagggtcgaggtctgggtccggggtttgagatctaggtcaaggttagggtcagcgtcagggtcaagagttggggtccaggtttgagttcggttcaggttcgggttctaggtctaggcttggatcgagttcgggtgtgtgtttggggtccgggtttgagtggtccgggtttcagtccggggtctagggtccgtggtctggggttcgggttgcatggtcgggtgtaatgtccgggtatgtgagcagaaatataaaatataatatgttagacaaaaaaattagttttaaaaattgaaaactacattttgatgttttttattttctaattttttaaaacctgagttttaaaaaattattttaaaaaaatttggccaaacgacttagtttataaaagcttttttctatttttaaaatctgaaaacagttttttaagttatgattggcaatgttgttcaacccaaggattgacttcctcaaggtcttctaataactctacgtgtaggtcaccagtggaatttggttgctggcatgagtgccagcagctattggtggccatggaagatgagttgaataactagttctgaggcctccacctggcatctgggatgcagcagtcgtcccatcaccagtcttagcaacttgtgtgcccctagtgcgttgaccaattatggtgcttctttcaacacttgttgatcttgttgcaaccatatttaataggatctcaagttatgactctcaatgagagcaccaatattgacgttgaaatttggccaaaactcgttcgctagattggcgagaggaaatataggtttaagtaaataaataaagagacacaagagatttatagtagatcactccctgtgtcacgatgataatggagctacgtttacttcgagtttttattgctcacgagaattacaaaaattgactaaggcaagagctcaaatttcttgagagagaaagtagaaagagatgctctgagcttatggagacttatgaaaatgtgaaaaataaactaatagagctcttcttttatagtgaaagaggtcttattaaaataatacaaaaaatatgaaaaaattagtttgccctaatcttggccactgatcatgatataatagtgaaaattgactactgatgaaaatcgtcaattttagaagcttaaatctcttttgttggatgcttatcaatctgcagaaaaaagttggggacgaagttctaatttgtaatcttcagaattacgatatgggtgtgagacatgacttgaaagagctttaaaacaaaagttgaattgcttctttaggagtttcccagtgctcgttttcatacttctaagaaatttgagattgcgaacga

SEQ ID NO: 47096 - DNA, 695 bp, Cannabis sativa
agatcctggtaaaataacttccaacacttgtatctccaccattgacaaaaataaggtaaatgcctggaagatttctatggaaaggtgtaccgaagtgcccctggttgagatacgtcaacctgggcgcccatagtggcccagaggcctgcattgcgcacccaaggggggataaatctccgaaagttgtctcgttgatgttcaatcttctttttggtaaaaagtgctcactggccagattttagttctatctaactcgcacgagcgttactcggtgaagcaaaaatggtgcccaggttgcaatgtcaacctaggcgcccaagactttggatgtgctccttcgagatgttgttgatgaaaactcatgtcctggcgttgttccttgttggatttgaggaatcatggtctaaataagttcccaaaaacctaaaccatagtcgtcgtgtcgctaaattttactatatgtcaacttgggcgcccattactattctagagagctcgggtgcagtttcttgtagactcgtctccaaagtcttaaacttgaccggggcatgtctctcactactacaaagggcgaaattcgcgacggttccaaaaatgttttttttttgaaccgtcgctaaaaaaattatctgagtgttgaaaactgtcgcctatagtatattataggtgacggttttaaatactcgtataaatta

SEQ ID NO: 47097 - DNA, 2428 bp, Cannabis sativa
  modified_base (1680)..(1681): a, c, t, g, unknown or other
aaaaaaaaaaaaaaaccatttaatggcgattttaactgttagcggttttttcagtttttggttccatcagtttcgattctaatggttttcggtaggtctgtttgaacaatttttttcgattttttgaatttcatgctcaatcttagtttcaacccataatcttatttataaggataagataacctgccactttgccacataataatttaattatagtttacttttcataatttatatcaaaaagaaaaaaaaaacaatagtgaatctttctttacaattagtttagagatttgataaaatttacactcttttgtaaaatgaaattaaaaatatagaattggggtgagagaggctcgaactctcgacctcaggataactcagatagctatgagacctacgcgctagccaactgcgccaccaccccaattttgattatgtttcttaaactttcgtattcttctagaaaagcttttacatatatagttttttctcaaagaaaaaaaggcttttacatgtatatttttcttcttcttaaagttaatttacaatttattaattttacttttaaagaaaccttttttattctacttattttataagagaacaatattgtgtgttaaatgtggacacatgattagaaaaattattagtcttaacatgccaattttgcataatgtttacacaagagacaaatgttgcatattatgcaatgtgtgattagtaaaaactgcattagaaattaatatttaatcaattgtatgatttaattggtagtcaaaagaggtatgccattattgatggttgtttttgttttatcataataatagtagtaaaatatggtataattaatctagagtaaggatctacttttaatattactgataaaggataatgaatttgagttgattgacacataaaaccatatttaataagtaatatctatcttttttttttaattaattataaaaaaaattaacatcaaaagaaaaaaaaagtcaaatgtattaaattcttaattgtaattttactttatgaaaataattaactttctatacatatgttttttgaaatttgtttaatagaccctataaaggattattctagtagattttctatttgtttcgacattcaaattttttttttagtttaattttttttcataattacgtatgctgtagttatttaagattatttgtcaattttttagataattctgaatagtttataatgccgaaaataagttttaaataattacttaccacgcgtataagaaaaaacagtcgcacgtacaataaaatatgtaaatcttatttttagcattgtaaactgcttgaaattttttgaaaatttacaggtaatctcaaataactataacatacgctattatgaaacaaatagactaaaaaaattctcttgagtgctaaaacaaataagggtctatcgaaaagtataaggtaagtctatgtacacttcttaaaaagtatttaaacctcttatttttttcgacattcaagatagttttttagtcatttttttaatgatcatgtaccttggagtaatttagaattatctgtagtttacaatgctaaaaataatgtctaaatattttgttgtacgcacgactgtattttcttatacacatggtaagttaatgtttgaactttattttcggtactgtannctattcaaaaaattttaaaaattttcatgtggtcctaaatagctacaacatacatgattatgaaaaaaaaaattaggttaaaaaacttttttagaagcatgtttaccgaaatttttgaaaaccgattcataaataagttaggcttaaagaagaataaaactaggatttttatgtagttcggcgttaataagccttagtccacaagtcaatattattacacttgaaaaactatagagtattcttacataaaagtgttcttgcctaagtcttagaaccataatctttagccctaaatttgcaaattagccacgaataaattcattagagaagtattcgcctcctctatcacttcttgacatttttattttcacgttgagttgatttttaacctctactttaaaaattttaaaagtactaaatgcctcatcattttgctttaacaaatatacataagtatatctaccataatcatcaataaaagtaataaaatattttttaccacctctatttagaattctatttaactcacataaatcactatgaattaaatctaaaaattttgaatttctaacgatacttggaaaaagtttttaatcatctttgcttttatacaagtttcacatttaccataatttcttatatcacaatcaatcatgccacatttttttaactctttttatagtagaaaaatcaatacgagctaatctaagatgctacaaaaataaagaatcatgctcaatcatataa

SEQ ID NO: 47098 - DNA, 2117 bp, Cannabis sativa
  modified_base (77)..(78): a, c, t, g, unknown or other
tagtataaattaaaacttaagatattgttatataaaaatatgatatataattctattcaatataatacaatacaatnnaatacaatacgacttaatacgacgttccaaaggagacctaacacaagttgtgaataagaattgcccctcctacttaagcccaacccaaagcaaattccaattttttatattattttttcttagatagcagtttttactactcaatttaccagaaaaaaaaaaaaatcccctttaaagtagcaagttgtactaccaaacaccaagttgtattattgttatgaaaaaaaaaaaaataattgctctttaaagatcatgttgaattttagaagcagcagcatgcttatcaactttgtaggattaagaatgaattggaacaagaattgagtggtatcataataataataataatacttataggaccagcttcactatacaacaaagatgagttggacttggacaagttgtctatactttttagacatttttgttctcattaaatactgatgcgactattccatgctcagtgtcaggctactctagttaagttcaacttcactgtttagaagtgtatatacttaaacttaatacgtgtttattatgaatactttgctcacaacaattctaatttattcgtatcttttctaatgatggaggaatccaatgaagaggaagggaagccatttatgttttgtttggttttttgtttcattttcttgttgtacttatggtccccatatggacaccattgaaatgtatgcaaatggctcctttgtcggtttgctagattccagggatgcagagcagtttttgtgttcttgtactgaaaaacaggggttatctgacgaggccctaataaatatattgtctttttttggtaataagaagaaataaaagtaacctagtgttgttcttcctacattttcttactgcttaagtttcctagtactgaaattgttggttggatatgaataataataataatattatacacctagcatatatgtgttatgttatatgacagaaaatacatagaaaatccaacacaggaaaccaaataggaatcgacttaaaatgttaaatttatgaatttatttgtctttttctttgaatacaatgggtgtgacaaaattgatgtctcatgtttagtaataaaatagtaaaaacaagttagaaatgttaattttattcattttttttttgtctttttctttgaatacaattgctgatgctgtgacaaaattaatgcctgaagcttataataaaataacaaaagaaaaatggcaatggaaaaaaatcaaagcatctataaaaaaaaaaataaaagcatcacaaattagttagaaaatatatataactgaaaaattgagggggactacaaccattgccaatacattggttccgtacgtgatcgaaattgatttattgcaagttggattaagtctttcgtaaaatacactaaaaatcttgaccatgacctcatgtgactatacacccacataaaataaacttgtgaattgtgatgataaatatcaaaacttttaataagaccccatctactagctctaaagaattagagaacaattaagtgactcttgaattgaccgagagaacaaaataacttccattaaaaaataaaagctaatttgggagttgaggaaaggggagatgcatatttctgtgccaccactagttacttattcattgtgtttaaccatatattggctactctatgttgtgattagatccaaagttcaatgattaatctgaatctttccattatccaacttcaaaattaaagatttgattacttgcttacaaagtaccagaagtagtaattttttttttcttaatggttaatgttctagtcaagtggttgaagaagtgaaagttatttacttttgaaaaataattcccactactatggagtcaaaacatcaattgagagctaatgatagattttcaaggctgtgatttggccctatagtaatacaagtgacgattttcatgcaatactaattactaacgcaataaagatgcagttattaaaaaaaaagacccaaaaagatgccgtacatttttttcaataataaaaagaaaga

SEQ ID NO: 47099 - DNA, 998 bp, Cannabis sativa
caagacaaaagttttccatcctaacatcaacagcaatggcagtatatgtctcgacattctgaaagagcagtggagcccagctcttaccgtatcaaaagtaagacagtttgtttatcttatcttatcttaggtagtttcgattcaatggtgttaaggcttattaaattgaaaatatgttgggggaattgtgtggcaggtccttctgtcgatatgctcgttgctgacggatccaaacccagatgatcctctggtaccggagattgctcacatgtacaagtcggacagagctaagtatgaatctactgctcgatcgtggactcagaaatatgcaatggggggttgagagagagggtttaattatggtttattctgctaagtggtttatcctagacctgagttggtagaattaatagtagtaaataaatagagaggtttgagtaacttttgtttttggttttgttattatgctttgtgtgtcaacactctcatgagtcttgatacaccatatcaccccccttcttcacattatcattattattattattttgagatgttgataatagtagtattactattaaatctttatcatattccattagtaaactgtttttattatttatttcactggttgaaacaagcatagttttggttattattatatacacattggactttagagggtgtttttggtttggagttttaattttacaacatctgaaataaagcattccaaataaactcacatctcgagccaacgtgggttggatgagattggttggggttgcgtagtagctttgtagcaattccaaccaattccatcgtaccacgtggctctggctcgggatttgtgtgaaataagtaaagtttggttttggtagagaataaggaaattatatagattagatattattattatgggatgtatgaagattttagaataggtaaggtaattgtccttggatggctcaatttagttatgattgaaagaatatgagttt

SEQ ID NO: 47100 - DNA, 2466 bp, Cannabis sativa
gggcataaaacccaacacaatgtacaaaggcgatgcaaatatcatggtgaaatagggcacaccaccaacgagtatgacatctgagggatgaaattgaaggatttgtttggaatggtcatctatcaaattgggtaagaacagaggttatttatcctggacagggggttgcacatggtatgctttttattacttcacatcatggaataattaatcctccttagggagtagtccatccagaaactcttagaattcaatctcccaatgcacaagcccttcaaggggtgaaaactgctcaagcagcaagatctgatgtggcttccagtcctggaaaccagtactctctaggagcagctcaaccagcattagatggtcatgtagcaaccatttttggtggaacacacttgacggaagcacccaaaatgcacaaaaaaggtacttgaatgaattggatcaagacaaaacttgccaacttggtacaatcacctgcccaattgtcctcagatgatgaatttaccaatgactttcacagaagattatgccaaacatgtacattttcctcaaaacaaccctttggtgatagaaactcagattgcaaataaaagagtttatggaatcctcgtagataatggaagctctattaacatcattttcaaagatgcctttaaagcgatcgtccttgtttaagaaaatttgttaccttgtccaattcaactacaagtcttcaatggagacatatggattccaatggggaaaatacaacttccaatgatgatcaattgagaagtctctggaagcaatgcaatatcttctttcaagtacaacacctttgtagatgttgattgcacaaaaaattacaacgtcattctgggacaatcacttttggttaattttggagcagtgacatccatccgctatctatgcctaaacttcccaggtgataccggaagcattggaatgatcagaggcaccaggagactgccaaaagctgttacaatgtttcaaccaagactgttcttatagtctgtgaagtaattattacaaaagctgaaacatcttcccagccagcactggggtggttcacgaaaaggatgaacttgattcaagggtaggcgtggaacaaataaatgatcctattgaagaggtagaataagtatgcattgatgatgaagatcccactagagtcattagtttgggaaacaatctatctccaacagttagagaaaagattgcctccacagtaaaggcaaacaatgatatattggcatggagtcattctgacatgactggaatcagtccccgagtaattttggcatgcactaaacataaatctcaaggcagatccaggtccatagaagcgaagacccctagacccagtgagatcagaagcagtgaaagcggaagtagacaagttgatgaacattgatttccttagggaagctctatatcatatatggctagccaattcggttttggtcctaaagcctaatgggacatggaggattgtatagattttacaaactaaacaaagcttgtcccaaagactgttttctacttctgcaaattgatcagatggtcgacacaacctcgaggtacgaaatcttaagcttcatgcatgaatactctgagtataatcaaatcaaaaagcacatggctgaccaagagcattcaagctttcaagctgagaaaggcatctattgctacgagggcatgccttttgaattgaagaacgccagagatacctatcaaagaatggtttataaaatgttcaaaaatgtactgggaagaacatggaagtttatgtcaatgacatgctggtgaagtagaagacttccatgaaccataatgaatatttagaagaagctttttccattattcaagagtatggaatgaaactaaatcaaaagaaatactctttcaaagtttgctcaagcaaattcttgggtttcatagttagttcttgtgacattgaggcgaacccaaaaaaaaatcaaagctcttctagatatgccttcacccaggaagcataaagatgttcaaaagctgactagaaggattgcaacacttagtaggttcgtttctaaatcaatagataagtgcatacctttcttcaatgtccttcgacgaaacaacaagtttgaatggacaactgagtgcaaaaaggccttccaacaactcaaagaatacctaacaaaggctccaatattgtccaaaacaattgagggagagtgttgttcctgtaccaggtagtgttagatcatactaaaagtgccgccttagtgcaagaagaaggaaaggtacaacttcctctatattacatgagcgaaagattgttgggcgcggagtttagattacccatgattgaaaaagatttccttttgctttctaattgcttcacggaagttaatgttgggttttatgccctaaataaaactctattataatgtaatccattttattcaacatcaa

SEQ ID NO: 47101 - DNA, 2342 bp, Cannabis sativa
gttattttataataatgtatatatgatcacacatttagattataaattataggagaatcactttatataatattttttaaaacctttttttattatttttatggtttggattgctccggtggtttctatatgagttgatatgtaattttgggttgtgatttagattactttgttagttgttatgtgaatttcgataaaaatactaaaaaaaaattattttgaagtgtaaaaataaaataaactcctaaatatataaaaggatttatgtactaaaattgtaccgagcacaaaaaaaagaataaaatgacttttgtctactattaatgattgttcaaattgaatggaaataatctttcaaccaacttggtggcttcttctcaagctcaggtcaggttaggccttgggcataggcggattaggccctcgtctttagtataggcagactaagtctgtacttacgacccacctaacctaggggctcgggcgttcttagttcctttcaagatgtgagagtcatatatgctatatgtttcttaaggctattatatatgtttatgtctataaattatattttaataaagctttcttttatgtataatttaagtgataccttctgatattggttaggtgaaattatttctaatcaagatcaaagtgatttgacgcttacaacatactgagcatagtgagtatttgtcagcataatttttctactttcttctgttaaagcaagaataattttagctatatagatttatagttaaaattaattgtaattgtcatacttaccatttactaaatatatattataaattttattaaataatattgtactaagagactaaatattaaatattgttaggcatatgtcttgtgcttcattttagtttattaatttttatgtagtgatataaatctaatcaatttttattgtaattttgttttttttttcggttataaaatataggtaacgtctacaattcaattatagtcgagtgattatgttatttataaatgagccaaatactttaaaattcttaagtatttgtaatgtgggacaacatactctaatatttttacatgattatttttttgtttttgtttttaacttcctagctaggtgcgtaatcgcaagtttggattctcttggtctcgagaaaagaggagaaaaattgttgctaagataaaaaaaattaggctgaatgaatggagaagaagaaaatttcttgtttgaaacctgtgcaaagtgggcacaacacatgtcggccccattgctctgcaatttcgtgccaattgcatcaaatggcatgacatgttagaacaacatgaccgacttaacacgacatggcagagcaatgaggtcgacttaatttggtcgtgcctaatttttagcccgggaaaattcttgcccaaatctaacagtgcaattttgaaaaattaaaagaaaaaaaatttggtgcctaaaaaggccatgtcgtgctagactcacattttaattttaaaagaaaaaatatttggcacgactttatgtggaatattggtattgggtactagtggtattcaataacttttataagtggtgttccacgattagttagttatattctctaaaagttattttgttaaattatatgaaacacgatacttaattatgctaatagcagtatgacactaaaaatgatactaagtaccaataatacttttcaaaaattttcctgtaagatttttgaccaaattgacctacaccaacaaaacacttaatatcagtatccaaggtcaattttgacttttcctttgtctaattaattttagacaacaaacggcagcgttttaaccctacgacaccaaaacttatgtcgtattaatccctggcttaaagactctctaagaagagtctagaaactctaagactctaacactctcctcacttagtcactcaaaccctaaaaccacgaaaccctagcagagcaagttcttcacaagaacttgctcgatcccagtagaaaccctaggatcctcaccccacacacacagagatttaagtttagtaaatgaaaaacaaaagtaaaggagagaaaacaccagaaaatatttaagagctcacccaaaaattagggctacgtctctgtcaagctcgtctcagagattagcttgatatccactatcaaaaaatgtcgatttacaagttttggagcttcctgtcacataagaacgaccaggtaaacccgattctcttttgtacaattttccgtgtttgtttttcttctgattttgttctcgatctaactctatttcttgttgttgtgcatgtacttccttccctctgtttcctcaccacgaga

SEQ ID NO: 47102 - DNA, 2079 bp, Cannabis sativa
cgctaatactattattagcggcggaattgggctccgattagcggcgggcagtgccggtcctgggcataggcgggctaggcccgcgcctagggcccactcattttaggggcaaaaaaaaaataccatttaaaaatatacatattttttttaaaaaaaattcaaaaataccatgtatctttatagtaagggtcaaaaaatttttttttgcctataacccatttcaactcagggccggtcttggcggcgggaccccgttgctaatgtactctgtcagtttcgaacttcggaactgcaaatatcattttaaaaaaaatatattaataatattatatatacaaataaataattaatgttgttaatgcttttaatcattttaactctagtatatgtgtttgttgttaatgttgtcttagattagctaagttttttaatacaactgaacaatattctgcctcctctccaatcctaaacaatttttttaatcaataagttgttttgtcaaaaaagaaaaaaggagtaatgtctaattaactcgtaacattcggtatcaactaataattcaattttctaaagaataaagaacttgtgttcaatttgataatgtattagatggaaaaataactaaaattaatattatatatttagaatgttcaatttaagtaagcaaagaaaaaaaaaaaagaaagtatattcgataatttacatagccaaaaaggccacaagaaagaaaaaagagatgaatgcaggcagttttcagaaaaagtgaccctatcaataataaccatctacttggattgtcacctccgccgccgccgtcttcaccgcttcctcctccaccttcgtcgattgttccctcgccaggttttgaacaatacaactccgatgacaccaaactcatccactctttcttcctcatcaaataaagaacaaaaataaaaactagtaccgaatcaccaagagaaaataacataggagaccagctgagatagagcaatatatatatatatataaaaagataataatatatatccctaaaatttttaaaatataaaaaaccatctatctgaaattctttaaaaaaagtttacttacatgaaatgggttttggtgcgtggtggtactcggtggtgcgtggtatccttcctggtgcatggtggtactcggtggtggtggtggtggtggagaactcggtagtggtagtggtggtggtgttattcggtggtggtggtggtggagaagggttgagagagagctgaagaaatttaaagagctgagagtaaaagtagggaaaatgggtcggtgggggtatttatagacatattagcgacggggtccgccgctaatgccccgccgctaattagtatttaaaaatgtatgaactgaataggcaggaattttctcgcccacttacccgccgctaatagtattagcggcggacctccgccactaataatttttttaaaaaaaaataaaaattgactattagtggcggaatttagagtccgccgcccatactgccattattagcggcgtgccatctccgctgctaataattccgcgacaaatgaccaaaattgttgtagtgtgttcttccacaaactaatcttacctccatgggttctcactcaattgatgggaatagaggagaagagtggttgggattagccttggggaccaaacccttatgttctttatatagaaaactaattagagccccatttactattgtgtattacacattacctataccaaataagatgtttattaggttgatttaattagatcacttatttagcccaaactagaatattagctcaaataaattatcttaatttataagcccacatattggattattaaagataacccaacaatctctcttgggctacaaattaataccaatgacaacaatttttgataaccttatgtgcgcacaaacttgatagttattctcaaaacattctctgtaaaatgatttggtccatctcctataccaatatgagaccaaatcggctttaattatatttatcgaaactggaaccatcaatgatcaccatattaaatatattcaatggcata

SEQ ID NO: 47103 - DNA, 1303 bp, Cannabis sativa
agaacatgagtattgggggttttattgcccaaatttgggttttgggggttaagtgaaactaaaatgaaaattttgggggttttgccgccatttacccatatggtattatctatttcctatataaaagattctcctcttaaagctttaacagcaacttcagagtcacttttagcgataatgaacaaccaattcttcccataagtaacttctaacactagaagacaagcttgagtttctcctatgagagggtcaacatattggagtttacgagtctctaccccaacaataattccattgtagtttgtagctactatgctagccatcatgcacttgttgcccaccgctacatcacagttaaaagcttgaaccagtctagcagcgggggcaactagcccaaaatagcagcaacaggtgatttaaatagaagggagtgagaaaattccgcataataatggaaaacaaaagtgatataataatgagagttttgagaaaaattgttacatactttttcattttagacttgccaaattgtatccactataatagaggcgagaagaaatacatctacccctacattctaaaggctccaaagaaactaataaaggcatgatatgtgttatcccaatttttgtccgcatgacatggcatgcttatgtggatagaacatgcgccacgtggtagtacagctcatccaaaaggaaggctaagtcagcatttgagccaacgaagaccccgcactcaaacggggatcaagtgatagtctagctcactctcaagagctgcctcggccaagaaacaacaacatggccagctagcctggccagcaaaaggccatggtcagccaaggattgtaatgtaggtcccacaggactctcctacacgtgcacaacaagaatgggctgtgaattaggccccaaaagcccaacaaacatgcttagaagtatctagaaattaagggcatttttgtctaatgtaaatatctagctaactatcctattttcaagggatttaagttgtaaacctagggtttaagactcctatataatggccttaacctctagctaaaaacctaagttgcccaagtctcctctaagctagaaatctcatattctctaggtgttagcctctctttctcttcctcactctctcacaaacccaagcataggttgtacaacactctaagctgtccaacacttcagtttgccaggcattgatccatacattgtaatcctaaaaggaaactatagcagatcctcttgggttttgtgccctaaataaaaccctttacaatctgattagttat

SEQ ID NO: 47104 - DNA, 1662 bp, Cannabis sativa
tatacaacaactctgtatacaaaaaaaacaacaactaacataaatgtgcatccacattaacaaaaatcaaacagaataatacacgaatcagtataaacaaccaagatactaaccttcaatttttttagcaacacaataggggcttcatcacattctgaatcaaaatcatcgtcatctttaacaacactctttaatttcttagagcacctatcgtcaagactcagatacaccactcctcttcgaaatggcaatattcttatttttcttctccttatcagaatcaacaaccttcgcaccagatccacccatttttttcgaaacttcctctattttttccagcttcttcttcgaaccagacacctccggtgatggagacattgaactcctagtacgcaccataaacgggttaaatgcaaaatcctaacaaaggaaatcctaaaactttgctgaaatgagatgaggggaaatgaaaatagaaaggaaaatgagaaatggaagtgattgagtgatagcttgacagagaaaatgagaagtggtatcgtgtttaacactcaaaccactctcaaacagtaaccgtgtacacgtgtcaaaactaattcaaaaaaaagtggttacttttaccaaataaaaatatattcggtatatacagtaataaaaaacaaaaaaggtctcacagcataattttctctaaaaaaatcctatatatattgattattttaaatttacaaaaactagtaaaatgaatgtctacaactacacattttcatataataagtattgagttataatttctataaataccaacaaaaaaaaaaagataacctcacctaaaccatgtaaacgcaaataagtttcataagttttgtcatatttttaatggtttgttttgctgtcctcttttgagaccttctacaaacaaaaatatataaaaatcagtgtaactaaatttacatttaaagacattggtcctattatttttgtacattcatttagtattaattattttgaaatgttttaatctatttcttataatttattattattattaggcatacttatttaggattattattttatttgaaagaataatattttgttatgcaattttttaggccttatttaattttgccagctcattttttggtgtctgtattgtaatttttattccttatgatttaaatgttttatttatggtttttcctttttagttatatattaatttattacagcctttattttaattatatttaggtattaatgtaaatttatttcataatttctttattagcatttattttcttttaagaattaagtagccttaattttttttttctacttattttataccaattttgtttaatttttatgtcttatattaaattttataacttctattttattatatattattaaagacattttttatattttatttagtcttactgtcaaatcttttcttatattttgtttcgctgatagcatcaattttgaatttcacaaagtacatttaatttgtttccctcatatgtaataatgattgttttttaagtatttatgatagtgtttttttattatatgtttaaagtatttgtgagatcacacaggtttttgcactattttttaatagttttgatgccttttacagtttatgtgccttttatg

SEQ ID NO: 47105 - DNA, 1129 bp, Cannabis sativa
ctgcactactaacaaccctttcagttgcaaagaacttgttattctcaatcactcaatgagtcatcgaagaacaaataagaaccaaaaacaaaataaaataaaatcatgtcacacaaacaagattaaaacactcaaaatcatgtcataatcactcaaaattatatcacatagacaatactaatcacaatagcaaaaatcgaatcgcaatagcaaagcacaataccgaccatgttgcacatatgcccggaaaggctgacgggtctggccggagaaaaaagataatttcatatagctataaatttagaaacgagaaactctaatttttcaatttagttgatgttaaataatgttgaacacaatattaatttgtatactggaagagaaaaatgacgtgactcgagcaacactgcatgacctaattaaatttaaatttaaaaattttataaaaataaaaaaatatattatattttcatctaataaaaaaccaaaattaaacacttttaaggttttgtctagatatgtaactactttgtatggtatgagtttcacgcaccaacaaaataaaacaaacatatttttaccaaactgtttgtatcttgtttttcaacactataatttatttaaaattttagaaaaacttataaaatctcaactttaatctacaatctctactattacaccaaaaaaaatacataaaaaaaagtgtactaatagtcctcctcttcttgagtactaccattttttttttcttccaataatagcaaaccatcaacctaaattgttgtcctattatttgttgtaaatttcatgtagatgacaaaattacaaaaatatatatataataataattaagaatattgttattagaaacagtatgctcattatcatttatagataatatttattagtaatattatttaaaaattattttataagactcatatttaagaatatttttaatagaaaacatttatagttgttaaaaataatgcatacatcatcttaaaatattatttttttttctttttcatccacataaatttgacgacttttcaataattacccactataatcccacatatcatcatttaaataattaaattttattaaatactataaaatatttttt

SEQ ID NO: 47106 - DNA, 1306 bp, Cannabis sativa
attggcacgaagcgaggttcatgttggtcacgctccttcacttctttttagcttaaaagtggtcccttcttttcttcttccaaataaagtgtgtggtccttaatactctctctctctctctctctctccttattaattaaaatgagagtggtccctctctttagttagtattggcttttttgtatagtaattaacatatattctatctttctatacctcccaaaggccaagattgttagaccataattaatttctaattaacttacaaaccaaaatacgttaaattggcctttatttttgttgaggaaatgaaagataaagaaaaggccaagttggcctttatttttacttgatgagaagaggtggaatgacgaaagctttaagtggatattaattggaatttgaaagcaacaagctgtgagagaccaaaccagtcaatggtacatgatcaatatgtcttttaacatattcatcccagctataataatgatcataatgaaaatatctcaaacttgattaataatttgtttgctctaacgcaagtagggtggattataattaggtcgacacgagtcaactagactgtacctatggtcaattttgaagacacaaataatataatttgatcacttaatttttatataaatgtaaaatatataatattacccgattaataaccattgcattaatgtattacattataaaatataaaataattttcttttatcaagcatttttaaattattttgttacactcataagagatgtttcatccaatctaatttgtattattttatttatagtgtatatgattcgcactaagtgcaagaactcttgattttatatatttttttggatcgaatcaaatccacacgagagttgaaatccaattaaatctaacttgcaatagtgcgaattgggtcagttattttaaattgtttttttttttaatattaaattatgtagagcatgtatggcaacacttttatttttaaatttttttaatcacaaacatgaaattaaaatttttgtttttaaaaatttatttttgaaaaactaaaatgtattctataactacttttgttttttaattttaaaataaacgaaaaatatttgttttatataaattttattttaatttgtttattttatttaagtcgggtccgagtccgagtcaagatccaggaccggagttccaagtctgggtccagggtttgggcccgaggtcggggctaggtttaggttcgagtccaggtccatgtctgtgacggggtctgggtccagagctagggtttgggtcgagatt

SEQ ID NO: 47107 - DNA, 1240 bp, Cannabis sativa
ttctctcaatcatagatatattatgttatgttttatattttatattttattggcaaaaaaagaacataaaaaaagagtattatgtgaattttaatttttttttttgggcatggagacaataataataaagaacatgatctcttagctttttttttttttcctattccaatataaatgtctaagctagtgcagcctaattagaatatatatttttttgaataattgttgaataaatcctaattagaatattcgagttgccttatgtataatggtatatttaaattatagagtataataataagagagactatagtagtatcagaaaggtgaacaaatattatatatggatatgtgtctcaaataatgaccatgcacgtaaaagatatttcactatatggatatttattattatatataattatatatagatgtcacattaacccatgttatacaatgcacaaccacataattaatgttttatataaatattatacaaattaaattacgtacttataggagtttgtatagtagtattatgacatgaagatgattctatagtagaaagtagaaaccgaaattattatatatatatatatcgaataaattaattatgggatattatatatatatatagtttgtgtagtgttaattaatttcatttgaaataatattcacttagttttgtagctcaattatcaagagatatgattccttaataattattattcttataaatagagatatgctccattatttagttttgatgcacgagatcatgagagagtaatatttatatataataaaaataatatatataatgatatagatcatcatagatggagtgtcatatgtgaaaatgttccttttttttagtaaatgttcaattctatactcaaataattaacatgaccttttatatatacatacctttatgcctcaagtggctaagacactctccaaaacattcacatatgcctttactttttatatctcataatattatgttgcccactatttaaaaaaaattgcaattagtgttgttcatgatattttttttttgttgttgtggtaatagttatcttaacggtttttttttcggtgctaaactgacagaaaaaaatctcaccttagttattctaacggtttccatagttgataatagtcactacaaatttttttacttttagtcacaataaaatttgtgaataaagataaaatagttgtgactaattataaatta

SEQ ID NO: 47108 - DNA, 1234 bp, Cannabis sativa
  modified_base (41)..(52): a, c, t, g, unknown or other
  modified_base (981)..(990): a, c, t, g, unknown or other
ttctgatctatattaataagtaaacctgattatattgaaannnnnnnnnnnnagggcataaaacccaacacacgatttccatagttttgattgaggcctcttcctgatccagggtatcgatttggagcattggttctagatccaggttgagcttttgtttttcctttattttaggtttgtttttagttgtttgataattgatgttatgtctaagttttctaatgaaaaagttaatattttttcgaattataatttagtgttgaattttagttcatcgagttcttgggtttgagaatttttatattttacttttatatgcattgatttctttgcactgattttttttattggaattttttttaagtttcattattatgtttccatattgaattaaaccccataataatgcttaaatgggtctttgattttgttatgagccattgtcacttaatttttctctatttttgaagctatgttagggtacttgagtgtcatgagatagatttagagctagtttggcacagttgtgttgtagcctgtaggaaaagaaagttgtagctgtactgtgagaaaaaacagctgcagaagaactgtggaaaaaagcggagctgagtgtttggtaaattataaattttaaagtattgtgagttgttatgatgtattataatgataatgataatgttataatctagtttattataataaaaaatatataaaaacttattttatataacatttttattttctatatatttttaattttttttaagaatattggcggctaaaccacctgaactataaattttttaacacttaactatgaaaatcgatttttaagggcaaaactacttaaactgccattccgttttgctctgtgcctctccattcaaaaatcacagttaagggccacaatggactatccacgtgtacacacttgtacacgtgtcaaatttttagtggcccacgtaatattaattttannnnnnnnnnataaatatttaaaaaattaaaaatcagaaaaaaaataattttaaaaatattttctttttgagatagtggcggttaaaccacccgaactttaaattttttaacaattaactacaaaaattaatttttttggggcaaaactacctaagctcccattccatttttaacacttttcctttttcttttcttcttcttcttaactgaaaaatcctagcacctagtcgctaccccacgacccaaccttctc

SEQ ID NO: 47109 - DNA, 1586 bp, Cannabis sativa
acttatttaatcacctatttaatgaatgaaggttaaatatttctgtttattgcaatactatgtgggattgtatgagttgttatgatagttaatattagcttttgaagtcttatcttaagagttatatgtttagtatgcagtcaaatatcttttaaacaaaaaagcaaataaataatatatatcataattttagagagggcacaccatcactcctattttcaacaataagtttattgtagttaatttcaaaggacataattctgtgcataaattgggggaaaatttgagttctaagctgatttgaagcttcttgagtgaagaatgtaaatctatcatatcccttctcttgaacactaataatttgttcattcatgccatcagaactaattccttcataaatggctctaacgatttttgggaatagtatttgaagtgataatagattggttagaatagaaatctgttgttggagtgatacaccaaaattggttaatggatcactattttcaatgacatctttttcataaatgagggctctttcaaggatgacaacataaccattgaataggtttatgaatccagaaaagattgaatcttccatttgaagagcaattaaaggtgtaacatcttctgcaattgtctttgaaagaaataaaaaatagaataaattataaattagagtaatttccattaagcattgaaaatttcaagtattattaacacaaaaattatgttactaagttaccaaagtaagtaaagacaaacctgaactagacttaaaaacttccaaccactgttagtaagcaaacaaatttcagcttcttcttccccaacaattgttgaacaacattctccattcataattccccaaacaaaatccctatccaaatcccaacaattcaccgccgtaaagatttcgataactttcccaaaatgttcaaattgcgaaaacagaacatcttccaacgaaggccgaattcgatcaatcaagaacggtagcaacattagtctttgagcatctaacaaagaacaaaacataaccgaaactcgaacagcttcaactattgttgacaattccgaaatggactctataaatccattgaaacaatcaacataaacttttgtctcatcaaatgaccactcaataagctctgttgtataatccatagtttccccatttaacataacaaaacttgttgcacattgtgaaatcaaagaaaacacaacttttgcaagttgtgttatgtaaatttcgttacaaaaatagtttgaacacttcaaagtatggatttttcaatttgttgatgataatatctcaacatcaaatcattagcatgatgattctctcccaatctacatagccttataagtgccttgtggagttccaatacattagctactttcctctcagaaattatagagtcatttctaaaaatttgttgctctaattctaaaattaaaatgtctaatatttctgatatgttatttatatgtgatattaattaacataatctagtaaaggttctattacttctgacactaaagtctttgaacatgttacacctagcagttctttaattaacctt

SEQ ID NO: 47110 - DNA, 1637 bp, Cannabis sativa
ataacaattaccccaaagccttcgtggcttgagagtcatggaagcttgcagccttcatctagatctattatagtacacggggccatgaacgattcgaatcttttaatactccgaagtgggaggttgtggaagctcgtgaccctttcatatttcatgattgaattacacttgtcaaatgctctttggtatgtgtctatcacacagctcgcagaagcgtgtgttactttgggttacggactgacggctggttatttcagtgagctatctgaggcaaatatcatcattaatgtgcatgtccttgattccataaatggaatttaaagaaaacatttgacattcctagactgttggatccaggggatttgtgctttctcagattcaatatgagcccttggatctaaagcacagagattgacactttccttataaatatgaaggaaactgactattttccattttggtcactttgccatttttcttctaatttttcagagagaaaatacccaaaaaaattataaactcctccagtgaaatgttcgatctctgtgtccaacttcatcatcagttcatgatcgtcttctccatctccgatcaaggcttttcctagaagcacccttgttcgctctagtaaaaacaccagtctcattaaattttcaagaaaacgttgatgagttcgtcaaaaggttacacaatttttaggagaaacacctcgtgcgtacttagaatccaccacagtcgacttcaagtgcaatatgtacatgcttgtttccttgactttgatacttcatttcttgggtatttatgctctgggtaatgcatttaatagggaaatgccatgattttggggttttcagaaggttattttctaaagtttgctaagtagctctgtcatgtatagaggttttaggcttttcacttgcctgagatcttaggatattgtaaggtaactttgaacatagagaccttaccttgtttagggaaatgagattcctgctgttgttttttttaactatcaatcccacaaatgctaataatatccctgagggttttattgtgtcccgcttacattgttcgggacccttatggttccggactataatacgcttatattttcttttcttattcatgtgttccaaatctatcatctaggagttatgtttcctgggggagtaactccaggacctggggttataaaaataacagtcataattttatatttatacgatagctattaggcttaggtttagaatttaaaggaatttttttttaaaaaaaaaaaagaagataaaatagctttatttaaaaccctatggtcgaattccttagtaggcctaatgggtttcaatttggccattttattaaaacttatctttcttttctcaaatattattttttaattataactttataaattttaattttatctatttaataattataattaattatcaagtaaaattactgtaaaatcctattctatatggatgccacatatatgattttataaactaatttaatactaatatattaattaattattaaaaattgtgatgataataaaaacttgactaaaataaagcactaaaaacagacaacataatggaagtaaaaaggtgttatgaggatccctgttataa

SEQ ID NO: 47111 - DNA, 1332 bp, Cannabis sativa
  modified_base (28)..(49): a, c, t, g, unknown or other
attgcataaaatacaattcaatataatnnnnnnnnnnnnnnnnnnnnnnggcgttccaaacgagcccatattttttaaaatagtactaaactaatttttttattcaaaataaaatttaataataagtcgatctaaatatattattacaaaattggttacgttaattagttcgttttagaaattatctttaagttgttattaaaaaaaattaactaaaattgagctcatagtgctattaccatttattaaataaaatatatggtttattttattatttaacaaaacaacaaactcaatcaaaattacatagtacaaaatagtcctaatatattttattttttttatccaaatagatttgaaaaattgtagcagctaagaaaaaaactgcttacctcaacctgcctctggatgactgctagatgcaaaatggtgttaccactttcaaccactcttgcattgagaacttctgtgctattattaagactcagtgatagtactgctgattctaccaacaatttcagagcctctaaatggttatgttgaacacaaagatgtagtgctgtttcctcacttggaagcttttgacaaactgattccactccagcactaataaggagtagatgaatcaagtcgacacaaccattcatggcagcatagtggagaggtattctcccatcattgtcttcaaccatgcatacatctttatttgtgtgtaacaaggctcgggctatctccacgtgtccttccgaggcagccaagtgaagaggtgagcgtttgtggtggtctagcttagatgccagttttggtttgtggttaagaagttgtttagtgaaatcaacatggccatgtagtgatgagatgtgtaaaggtgtttcaacaaaacgagtgagtgaaatcttacttagaaggagtttatcttcttcaagcaatgaattcagtgtctctacacatccttttactgcagcctcataaagcttgatcatcatagttgtataatcatcatagtgatctctctgactcccagtttcaatttctgttaatgtcgtcatgatgaaactgttgttgcaataattgagagatctaataggagagagggctcagctgatgaaatagatatttttgttttcctaggggttttcatcttagataagatatatataaacaattcgtggtagtactactagataccattaatagctaagataccattaatagctaatgacagtgttcttttattttgagcgagatagaatggccaaaagtgggtgataaggggagaatagagttctgtcgaagctctatgatgtatatcactttttcataggtaaaagc

SEQ ID NO: 47112 - DNA, 1139 bp, Cannabis sativa
tctgagagtcttcttgactcttcacactaatcatattataaacaatgacagttgagaattatgggttgtatctcaaaattaattagttcaaaattaattagtaataaataaagtaactcatgttcttatatatagttcaataccttattaagatttcaaaagagattttaatatattattcattctacgccacaaaaagtaactagctaatttttttcttcttctttttagatctgcttaatatgttgattataaagaaatccccttgctatcatattctggtgatttgagtgtttttttcatttatttattttgtatatgtataattattgggcatggcgaatacaacagtaccgatcacctttgttcattcaggttaatgaagtcaagaaagactttgaaactagaagtcaacgatgacattctaactaccccagcatttattaaattcaacacattgctttctggttaattttactagaacaatcaccaaaatacaaatgacatatacttgccctcaaatatatacaaattgaaatggtctcacaaatcattttcaataaacaaaaaataactgtttgagataaaagatcaagattggaaactttgcattgtccatttcaaaaacaaaaaagaatgaaagaaactctgcattgcccacacttcttatatcacaattgtaatggagctatgtctactttgagttttatttctcacgaaatggtaattacagaaaaagaccaagtgtttaagctttgatttcaaaagagagatgttttgaccttgtggataattttctaaatgtgaaaaatgagctagaagagctccccttttataagtgaaggaggtccttaaaaataggaaaaaataatttaaaatatgaaaaattctaaattggctaattttgactatagatgatgatctaacagtcaaaattaacttttaacatgatagccaattttctgagcccgagtcacggtggcgaggcctgctccgagtgtgtcagaacttattttcgtaactctcttggatgaaattttaggtcgataacatcagaattacgattgaagtgtgaaatgtgacctaatataacattgaaatagtttcaaaacgcaagttgaatcgcgtcaatcagatca

SEQ ID NO: 47113 - DNA, 4400 bp, Cannabis sativa
tatatatatatacatgtttgttgattttccatggaaacaaactcaccaaatatgggattcccaccggccggttctccggtaaaacgtaacgccacggtactgagagctccgggaccgcggtccccgccggcttttctttatctgttgtttctgctgcaaaactttaacatccgccggcggttggacggcggcacctcctccaccggaatccgcaaaagataagtttaaccactgaggtcgcgaggaagacgacccagaaccggcttcaacgaactgattccctaccttttctccggccaccgggaaaaaagacctggttagaaatcccggcggagagatgttattagtttctttcccggcagtggcaccgttgttacagtccttttctctcttcattatgtcaaagaaaaatgtcgaagatgttgtgttcgtgacattgatggaagagtcttcttctctaaagacgccattagaggtagtaatagttgtagtactactcagagcatcgatttcaacattaacaacggaagagccagaggaaccagaatcttccattatttgggttgttgaacctttttgcagtttatcttccacttccattatcaccaactctgctcctctttccttagtcttcccgtaggttgaatcggcaccgttgttgatattaacattaagatccaacatcatatcaaaatttttctttatctatcttctctctcgatctctatcaaaattttcagatggtgaatttgttttgaagaggttgatatgggaaaaaaaaataaaataaaaaattcccacttcctgaatggattatttttcagaaaaaaagctctagaaaatccaaacccagttcagatcaaaaataagaaacccaagaagggaaaaaaaaaaaaaaaaaaacagaggtttcctgtaaagttgtgtgaaaaaatgaaaagagaaaaacggcagttgggtctgaagaaaaatggatcacagacataaatatggaagagagaaagagaggacagatggaaaattaaattaaaaatttgtagaaataaataaataaagaaagaaagaagaagaaaaaacaaagtgtagctgaagagtaagaaataaaaggcagaagaataatctatctagtttggttatgagagaaagagaagtcttatggctaaaaaagaaagagatgtcgacgtgttagctgtgaagttagccaagtcttactgttataagttacgataattttaaagctaattagtaatttttcttttttaaattttgacatgtattaaattatgtctttgaaattttttggccgttaaaaattctccgaattattgaaattgttagatgtaaggacttttgtttaatttcattcaattttataatttcagtaattatttatatactaaatcatgctcccagactgccccttaaactttgatatgtactaaattattccactgaaattttcatccatgtttaaatttttttagttaaaattagataaaagtcttcaaatttaacaatctcaatagttaagggaaatttttaatagccaaaaaagttcaggtagcataatttagtacatgtcaaagttactaattaacttaattttactactttctcttctctcttattattatcttaaatttacaaaggagtgaaaagaaacaaaagttaaaaaattgtaattaaatttataaagtacttaaattttatggtagagtattactgcgttcagtggtaaagatatctaattttctggttaaaggaaaagttactaagaaactaaagagtaactggttcaggtgattgagaaatagactctaatttatagctggtcacattcaaaaaaactttggacggtcagtcacctttgaactttgtacgcgttttttttataatgtaatgtattgtattcattcaattttcaccaatgtcttacatgaaattagaaaagtgttttaaggaatgaattacatttacttgaatgagttggcaatgtctaatagggcagtaaaggtagagggatatatcacagtttcgatcacatattatggtagacaacgttgaccatactataaatggagtttatttttatcatacaatatggaccacttttctttatttttgcttaattatatgatgtgtaatggtccccctttaccaagtgatcattaaattcaacggttctgcaatgtacgttttcttttacatctaaatttgggtatccttttcactctttctttccacaactagaaagatctatttatatatataaatgtattcatatataattaagtgtacccaaaaagtcacggaatttgttagtttggattttttgcttttcttgttttatttgcagatatattttcaaagtttctccacatgtttatacctatcttagatttttatggctcttattaattttgccattaaacttcgttttatgtttattattattattttgccaaatttggatttatcaaagttgggacttgcgaggaaagactatgctacatgacttcctaaattatttacgccaaataatgtgtgagagcctcatctctaagggttcattattccaccaaggtgtggaattttcacattattctatttttatgatacacaaaattgtataatttggtgtgcaccaaaatccacactataaaattagtgcataatttttttcttttcatcctaactttttatttaaaaaaaaaaatcataattcttttcttaaaatatacatgatgttaacgttaattttgtatcatctaataagcaatagcaacaaacgaaaaaaaataataactaaagagagaatactataatttatagtagttcactctttatatcgcaatgctaatagagttatgtctacttcgagcgtttattatcacaaaagctaattgtcttaaaagagaaatcagaagaaaaaaaattactaagtctagcttcacttcacaattttagagagaaaaagtatgaatagagaaaaattctggctttgtagagagaatggaaagtgtcaatttatagcaaacgaggtcctattaaattacaataaaataatagaaaaatcgcactaaatttgcttggaaatcctgcacgagtacttcacgagttaattttgaggcccgaattaatagaattgtggcaggagtgtgagacatacttagatccgtcttgaaaagagctttcatattcaacttaaattgtgccatttggataaaaaaaaataagagagttatacccattttactgagaggtgtacactgctgaaactgattgcgaggtgaggctaacctttgggcgcccaggttgacataaacatcaaccaaggcacccagaacttggtttctttggctttaggcatatttgagatgcttgaatgatttcatagctatccttagttcattctttgacattggtgaagttctcttggtaattttacttaatatgcacgggtgatgccaggtgaatcactagtgatgactaagtgacacctgggtgatactagtgtacatgggtgtctgtggacttgcgtgtgacacatgtacatgggatattaacttgtagaagcatcgaaatcttatttggggggaaaaataagaccaatgcccaaagtgaaactgccatttaatggacagaacactgagtcccaagccaatgtcaacttgggtgcccaatgtgcttgcgtgctggtgcctggtgatgcctaggggtaaatcaccaatcgaacgatattttctcatgattccaagtctcatatcttgttttgggagcaacacaagaataatgcccaagacaaaatcacaatcaaatcgacggaaccaccaacgtggtggctatgtcaacctaggtccccaatgtcaggggagttgtcaccctgggcgcctaacttttaatttgagctctagttggctttgtttattttttgaaagcacttgaatcttcattgtggacaaaaaataagggaaattctcgtactactaaaaaattgggatttcctgactaattttaacagtcgggtatagtattctcgccagtttctaagaccgacgcctatttgaccattgtaaactaagtagaataggcgttagtgaaaaaacaacaaaaaaaaaatttctcgacaccgaaaaattatcagcaatactaagaagaatggctatcaatttcgcacaacttcctatacttgcaaagccaaatataacatatggaatgttactatggcagctgactgaggtgttcttcgaatcatgaccactggcggctgctcgtcctcctcaaccagactcgaggctttggatctgactcaaaaagccttgtctccggcagtttctaaatagtggccaagcaaagtcgtaaccgcgagcgtttggggttataaaatccaatgaccaccg

SEQ ID NO: 47114 - DNA, 839 bp, Cannabis sativa
aacttaacattagttaagttatgataagaaccaagtactccgagctcaagaaaaccaataaaacagtagccaaactatgggagcccttaggcccctgtgatgcaaagagagaatactcaattcattgcataccctcttaactctcaagactaaccccaatacaatgagtcacacacccttttatttactaaattctaacacacgatactaatcctagggcctaacaaggtagcaactagaaatcatatatgaacaaagttttagtttctttttcagttgacaacatggagaaatctaaagaattagttaacaagaaagaatccttccttggcaaactcgataatcaaacgatataatttcctgttgtatcaacaagactacagcatttagggaccaaaatttatattagatttcataaaaagaaaaaaaaaatgggaaattcttgttttacaaagaaaaaagaaactacgcatgtgaaaggcgagttacaatgaaaataaaaagaactatgaaatacctgggaaagaccagttaaaccatccttaactttgggaatgatcaaaatgtgtgtgggagcctgaggagatatatccctaaaagcaagaacctgtttcaaatacaacagaactagatgattatctgctaaagcatcatcatatcaagtaactgataagttcacttaaacacaagtaatattggggtataatgagtatttagttaggacatatgtgttaaattcaataggaaatatctcaatattatgtgtaccactgaggcactgatccctccaaagccatcagatttccattaaacagatccactcaataattaagagaaat

SEQ ID NO: 47115 - DNA, 2464 bp, Cannabis sativa
  modified_base (2415)..(2426): a, c, t, g, unknown or other
gtaaattaaaatataaaatttgtgacacatatattaatgtcagattaatatatatatatatattatatgtatggtgaataaactacatattatatagtttaatatgttcaaagcagcaaaagaataggagtacaatcaataaccaatttgtaactttttatcacaattttaagtgtgcaattaattaggtgatatattatacaaattaatatgggaatcaaaaggatgttactacactcgtttgagtccatcttccataacctagtaaaacactcatttatgtgttgacatcatccatgtaatgatgtgtgttgaaattaaatttgtagttactaaaacactataaataaacatctatggaattcattttgtacaacttagtttttattaagagagtacttgtagaaatattttatgcttaataaatttagaaaattattcccacttcttttcttctttaagtgtttatgataggggaaaataaataaatttttggacaaagacgtaagaccttgttcaagtttgacaattctcctacttgttacttgtaatttttggtgttgagattactctggtatcttttttatattttgtgcaatttgttttttattatttacttgttgcatattatcttaagttgtgattctttacttcgtccttcatatttttcattttacaaatatgtttgcaatataatttgaacattattaaatcattactatagtttttgatcatagagttgtaatattgttcatatcattatttctattgaagatctataattcccaacaaactcaaaatactatgttgtattatgtattcatttttgctatagatataagtatatacattcttagctttcatgtttgagtcttttttctttttctttttttcaaaaagctttcatatataaatagagtttagaccatcaagtcattacaaaacatttttacttgtattgattgaaaataagtaatattttcatgctttttaaaatatagatcataatatatcatgctaatattttgaaagtgtaggacctttatttttgtatcgtgcttaaattcataccatattttattcaagattaggtgagcatcctacaacttactaagcacctaggcgaactccgcatttcttgggctattttcttatcattatgatttctaggcttggttctcaatgtgaatataattatgtaactaagaaacaaaatttagagtgatgtccttgtaacaagtgcccaagtgaggcctctacaaaaaaaccaacacctaggtgagctcctctcagccaatgggcgcctaggtgaaccatgtctagggtttggtgcttgtacactcaagcaccttcaaatggatgtcaacacaagtatttaagcattaaaaaggatttcaagttatacatggatggggggtgctcaagtggccttatgcttaggtaatgcccaagtgaacacccgagcacaagtgctctctttcttgatggacatgcatttggtgatgagaaacttagttttgactcaagaagaatattgtggctacttgaaattgttagattttatgctctaaataaaacttgttctatgtaatctcatttgttaattgaataaagaaaatgaaaaaatcatttataatgtaatcaattgcttagttcaccctttttgtatgtgattatacgtttaatatttaaattctattaaatctagatcatataactatcacatttatagtgatgtcatcgtagtggattacatttgtcttttctaagacaccatattctataaatgagttattggtgatgtcatttggaatgacaaatgctcccgaagcttttatggatcttatgaacagggtgttcaaggatttcctcgatagctaggttatagtgtttatcgatgacattcttgtatactctcagatagaagtagaacatgagtaacatctttaatggttttacaatgacttaatgatcacaaactgtatgctatatatttaagaagtgtgagtttttgttattgcaagtgcctttcttaggccatattttcggtcaggatatggaatcaagttgatccaggaaaagttgaatcagctaagaacaggttgagaccacaatagttttcaaagttagaagttttcttggattagttgggtattatcgatattttgaggaagggttttccaagatttccatgccattgaaaaaattaaccaagaagaatcaacggttcatgtggtcacacaagtgtgaaacgagttttcaagaacaaaaacaacgactaattttggctccagtgttatattttccatcaaatcaagagaaatttatagtatattgtgatgcatctagagaggatctgaggtgcattctaatgcagactaacaggctcattatttatgttgggttttgtgcccnnnnnnnnnnnnatttcaatataatcagatttactgattaataaagatca

SEQ ID NO: 47116 - DNA, 2667 bp, Cannabis sativa
gagagagagagagagagatagtttattagacacttagagtttgagatcagatttctagcttagaggcaacttaggcaacttaggttttcagtcagacgttaaggcctttataaaggaagccttaaaccctaggtttacgattcaattcccttgaaaattgtatagttagttagatatttacaaaagactaaaatgcccttgattctagatataattcagctattcagttgggcttttggggcctaattcgcagcccattacccctagccacgtgtaggagtgtctagtgaggcctgtagagcaatccttggccgaccatgatggtgtcctgggctggcccacccagggaccagccagctcctgagagtgagctagtttgtcacttgatccccgtttgagtgtcaggatctttgtttgctcaggtgttgacttggccttccttttagtgagttgtaatgccacgtggcgctggttctgtccacataagaatgccacatcacgaggacgaaaattgggataatatttgccccccaagtgcctgtgtagatgtctgtacggatagggactttaccagctatattgatgttgtcgggtctgttgttacctttcctgaataaaaagtgatgcgtttgttgaagcactttgtcttgactgtatgatctctttgcattagagaaataactgctttggttatctttatgataggttggtgaagtaagaaaaaggagggcccacatgtactacataagtgagttttggagagaaaacccttctttcactttcatttttcacttttactttctctcactagaattttgctcttggaaaagctcctccttctctctaggtggccaaacctataggctccaatctccttgggatttttgcgctatttcaacaatccaagcttctcatcttcatcttcatcaaaatcttgttgtgggtaagctttttatttccgctctttcacttaatttgattaatttttccctgaatgcatgaacattatttcttgttttgaacatgctttgattcttacgttagattgtagtccatttggtattttgatcctcatgatagccttaggatagacaataaataatttctagatgaacaagaactgaatctaaccttcattgtgattcttggctctttaagttacgaaaaacatgtttgagttcttgaaacatcacgtattttgatccatggacatgctggccggccaaggaggctttgtttgaagtctagccagccatgggtggctttcattgggtctggccggccatggggactgtgtccctaggctggccggcctttgcctagaactaagattcctggccggccactaggtagggtgtaagggtcttgctgacctttaggacatggaattctggccagccaaagctaaggctctaagtgggcagccagtttttctccctcttttgaccttagctagggtctcttgatggccttggaggcatatacaactgtagccttatgcgtgatttctcttggaaactctgtataaggctagatgataagtccattatggttaattgtgtaacttaggactaccgtatgtcttaatgagtgtgtcttggtataaagaattgttattttatcattattttgtatttgtgattctaactttgagagttataattagaaaattttatattacttattaggagttgcatgtatcaataaagaatggatatgtattgaataaaaataagatattcaatacttttcctttaagaggattcacagaagattcacaaactgtatgacaccattatttttattatgctatttctaataatgatgtttcattttttttatgaattcatagagttagaaatgtcaatgtttagcattattataataatgtacataaattaatacgtccacaccttctattctgtaaaattataactgcaattattttattattttatttttttatctaaatttcaatgttcatatataatttagttcttgtcatttatttttattagtttttagttttttttttcatatattatgtttatttaagtctgttctttttgttgctcaagtcttagtatgtcttttatatgtttttctttacgggtgtgcataaatcgatctaattcaataacaaccgattgatctaattacaatcgaccgccaaacattagatatctaattgtgatcagatctgatcagatgttatttttgaatatccaataggatcggatcagatcggatgttggatggggtgtccaaaaatccaatacatccaatatccaatcgaactaattagtattttcatttagtttgaatgaataattaaattgtattgttatacgtaaaatatgtatgtatgtataaaaaattaatattaaaattttactcttttgttcttagattggctggatccaatccaatccaatacatactagacttaaaatattagatggattcgatccgatccaaaaaatactatgtctaaaatattgaataaactaaaattaaaccaataaatatatataaaatacatccagcatatataatcgatccaatccaatatccaatccaatatccaatggatgttggatcgattggatgactgaaattaattggattagataggattgtaaaatctaacatccaatatataattgg

SEQ ID NO: 47117 - DNA, 1533 bp, Cannabis sativa
  modified_base (28)..(40): a, c, t, g, unknown or other
aaaattagtatacgtgcctcgcacgtannnnnnnnnnnnnatatatatatatatatgtaaacttatgagactttctttttatatatgctaatgtgtcaatttgtttttatacctatttgagtgaatgaagctaaatttagtgttcacttttccagaatctaaaaaaagaacaagcttagcaaaaaaaaaaaaaaaaaagtaattaaataataattcaataaaaaaatctgacaaaaattatgaaaaagaaaaaatctaattaattaaagggtagtttgagtgtgtgttatatatcattatagattcccaaaaagtggtcctcaatatatgcatatggtttagaactataatttttttattataatatatattattaattattacatggattggaaatgaaaataatgattgtactagctagtttcagagcacatatatatacatttataatagtaataataatgtatataataaataaaaaaaaatgccaaagtcagtcaaattatgatcatgagatgtgcccaccttcccattttgctagctgtgacaatttatacaattttgatgcaattttattattattgcaaattaattaattttttgatttatatatataattatatatacaaggtattaaatacatatatatgtatgtgtgtgtaaaagttatgaaatttcaaatattcttgttttgttcattaatgaagaaattaagctccatttatgtactatttatttttaatgcatgataataataataaagattaaattattatttctatggtgatttttgtcctatatctatttttagagaattgtttgatttatatctttttaggtatataatttcaatatataaaagaaattaataatttacatttggtctcaatttgtaaattttaggtaccatttcgtgtataatttgttcatttatatatataaataaataatattaatatatactatgtatgagctatggtaactcttaacaatttggcaaaaaatgatccattttagagaaatcattaaataataaatataaagcactgatttgtccttttcaataagagattgattattagtaaatttaaaagatgagtgttaattacaactttctatattacaattttttagtcaactttcacgtttgaaactacatgttttttttatggtcattttaacaaaatttaacgtgaaaataatcttcatattctcgttttagaagtatgtgggaaaaaatatttcgagataggttctggccatatttcacaaagaagtaccactatcaaaaatgtgaaattttaattgtttcaatcaaaatgattgttagtgcttaaaaactattttttctcttaacgtgtccaatagaaaatttatgcacatcgatcttggctttgtctttttcaaatttaacgattatttgagatgtgtagggtgagattttaagaaattactaacgagtgtaagagtaaataaaaacttattaaaatttaccttgaaaaatagaacgtttttaattttttaattaggggg

SEQ ID NO: 47118 - DNA, 2696 bp, Cannabis sativa
gtcatggacattgtcctgcccttttacatattgctggaagtgtcctcgcgctatgaggccttcaatctcatccttcaactgatggcattcttctgttgtttgccaagtgtccccatggtactcgcatcgtctggttgggtcccttttacgtctcgtgtgtttcatggcctttgatttattgaaaatgaccttctgttcatgcgcgagatagatactctcccatgtttcattaaactcggtctagacagtataaatgggtacgtatttgtcgtgtttcttttatttcttatctttagacgacctcttagagtcatctttcctctttgacccagaagcttctaactcaaattcttccacagaatcgcatcccgattattttcctgactctctaacttgatgcctcctgaacttattttccaactcgtcaattcgcaaatggatcggatccccttgctttgaatcaagtcactggcaaagatcaagttttttttttcttgttcaagcgttctcgtagatccaattggtcaagacggttggcgaacctcgttccactcatagaacgtattctgctatcttgatcattattgcgacgagtattctctcctccttgcgttgatcgactatgtgttattgtgtgtctcgtagtaacactcgcctcttcacgcctcgctctcccctcttgggtatgattcatcacattctccttattgagatttgtgcaagctcctttctcataagtttggaaagaacgttggtgatctcttagtgatgacccatgtaccccacgttgtgtccctagatttcccttatttctacggggaatttctggttccctggttcctggtcgatcacttggcatctcgttttcaaggtattccccaatttctgcaggttgtctttcctcagtgttttggggattcctttaggctacctcctgccccctagttcgcgagtcccgaggtttgccttgcggttctctctctctctaggttaggttaattttgagagatattcccttgtgtcgccctggctgcagctccctcacgctctaattcagcattacactggtttgcctcttccaatcgacgcctgagatggtggttttctaattcaacgattggtatatactttgttggatcataggcgccatcctcatcaactggattgggaagagaccttccattgttcattctaggcccttcaagcatggttccaaaattctgggttttcccggagtttcttggtccgttcaaatgataagtcgaatgatccttgaggactcattggctcttttccaggacgatgactagttttttcataaggattattttcttcattgtcagccataagaggtatattattttttatataagggggattttttttctgagctttttcacgaaggctctcaatgaaagcaccaaaatgttaacgtagattttcgttatccaaatttgtgcctaaatgataaacttgcacagaaaaaacaaaaatattaaaggaaagaaaatgaacacaaaggtttttttacctggttttgcagttaaaattctacataatccacgagtcaatcttattagatttttgattgttttccaggacctttttttgtcctttttttactctaacttgcctctatttataatcacatagtaggtagttaattatagagttgactgtaatctttacaacaattatctcttaaaaacgggggattcgattacatcccacgtaatatgaatgcggttaatatttgagaatcacatagttgtgattagcctacttttactgggtcaaggtaaacgtatatttaatatgctacagatcgtatcatctgggtcgtctcgctaggaacatggcaacaaccaccctgataacaagttgaagcttttcccatgtcttcccgaggttgatataatcctcctcttctaatgtgtagcgagattgatgccttgccttgtacacttgaagttgcatggtttctcgttaatgcacacattaacagtttgtatatttttatctcgcctaagaccatttagtcagccaagttataaatatactctgtcaattttgattttaacgagttattccatttcaaatatgattactattacctgtgttgatccatattctccccagtctaacacgtgtctttctctgatgtgctagccaaatttcaggtataatagcggctttggagactttcaacattattttcgacgatttctttcttcttctttattttttatgtccttaattaattgttatcaattgttcacaatgattatgtgtagctaaacaatttattagggtattgatggatattattgacatcaatttatggtttaatgtgatttaactttctcccaattctttatgtattctatttcatttgtacttatttcttttaattgtctggccatcaattaattatttatgattttgatacgaaatctgataagtgagtgtcaattatgctatagagaaataggaacaaatttcgatataggacgagagtacctatgtggtttggatagcttatagggtttatgtgtttaataccttttgcatgtttaatttatcacgagagtggaaaattttcatgtaattgagatttatatatctgagtagactataattacttgagtaaacatgctattatatagaatttcgtaataggaattgaatcatgttag

SEQ ID NO: 47119 - DNA, 2205 bp, Cannabis sativa
actctgaatctctacatggtatcatattctcttgacttacattgttaatggaattttcttccaccgatccgaccaaagctccgtccactcaagcagttcttctttaggctactgcaacaatgtcgattccattgaactcaacctgaaatctgttccccagctctcttacctctactttaacggtcaagcttgatcgcactaatttcttgtcatagaaatcgcaggtggttcccaccgtaatcagtcatgatcttgatgagatcttgctgatcagaattcctccaccgtccaccttggtcaatggaaaacaccctgcctacaatcaatggaagcgcaaggatcaactcttactatcttggattgcgttcttccatgactgagggtgttctttcctcagttgctagctttcccacctcgcactctatttgacgcgctctcgaacagaggttctccagccagtcaaaggctcaacttcttaaatttaaaggtcatggtgtggtggagaggggacaagtgcaatatgtatatgaacatagacccggacctcccaaatccaactcctaaccctaaccccggctacagacccagaccctgaatctagacccggaccatggaccctgagcctagctcgagcccagaccttagacttagatcatgcatgtcgtagtcacgaacccagaccctggtgctggacctcgacctactttctctaacctcaattcttattccttaaataaaaataaaaaaaaataaaaaaaacaaaagtaggttagagaatacatctttattttttacttttaaattaaaacatgttataaaacacttttttatttttaattttgtaataaaaaaataaaattgttacaacaataacaataataataaatattatacactaataatatctactatcatcttacaaagttttcttgtaagattctgctgttggtacattttaatgatagcatttcttgttatatttatgttatattagtatatataacatggcaccagctttctccacaaattttcaaattcctactgcaatctatacgagaaaactaaccatataatattaaatgatcgagaaaggtacgtgagagagaagaagaggtaagaattctgtttcaaatttaattcaatttgttactatatattggagctgatcagaactggcagtattttcatcagcataagaactggactgaaatttagttgtgaaaataataagtaaaaatctgaaattatgtaacagttaccagctttgtgatggtagaagaaactgtctccttctactcatttattgcacttttggctctattctagcttcttcctttttatcatgaattttgttcagtcttcctattttgaccattcttccatttcttcccacgtgccctagctagcttcttgcttttcttgcttctacagtacttacatataatattatatatacatgtgtataaaggaagggatattatactatatataaatgttcaaagtggtttacttgaggaagcatcttgagctatatataaggcgtctaatgtacttccaaagctttcagatgggaccacactatggctaatgagagcctgcaaagggaaaaaaaaactacagttggatgtggaagcactgtaatgagtttgagttgatcagacttctctggcaaaagggcccttagctggtggaactataatgaagggatgacatgaccagcaggcttgcagtccaagacgatcaaagctaaagaatgaggtaaacgattaactggctagggtataggatatatgtctgtggagctgctaattggttgaattaagaggctgccgagtaagtacttttccatttatttttctatagaggctttaggccgagcatgttttaatcttgtttcatcgtgcaacttaatctgaagatggcttacacttattctcgagctaaatttgccactctaaaagtcataacaaccaacaaggcactgaagtcaacattggaggatgcaaaaaaaaagaggtggaagagaagacttttcagctgggcaaagcaaataacaatatttcctaagagaagctcgttaaggactttaaatttaactcgaaagtacttaccaatagtgtaacgccctaatctataaggacgccatgtgtgtgattttataaactagtttaatactaataaattaattaattattaaaaaccgtg

SEQ ID NO: 47120 - DNA, 1784 bp, Cannabis sativa
ggcatcccccatgataatgccaaatagtcgtaactgagcttcgacaataatcttccatacccgaattatttgactggtaattacttggcaaagtaggacccaagaacatgaactccctagccccattcaaatccttgtacttaaatcgatctaatgattttgtttccaacatctcaccgagttttctcatcgcggtaacgcaacgagcaagatcaatcgggttagagaagtagttgaatcgaacatgtggggtgattttaacatctttggtggaagccaaagtaagtgaaccggttgataaaggtcccacgatttttgcagctatggttgctagactaaattgtggttgagttaatggattggggtaaaagctaaaaggtaatgtagttggagcaaatggtaagctatatgatacagtttctatgaaataatcattagtgattcctactacttgtactgctgaaccttctaatgggaatgggattatgagattaatgttgttacgtggattatcagccatgaattgtccaacatttgattgggaatgaattatgggaatatgttgtgatgagaggtatgattttggaccaattccacttagtagcaaaagttgaggacttccaagtgcacctgcgcttagtattacttctcctttgttacgtattaatgctttgtgtgattttccttttgaatcggtgtagataactccaatagcacttggatctgtttatttaaacatacataatattaatgagcattataaatattatatttataaatattaaatgtggtctataatggtgtactgttaacgatgggaatcttaaagtatatgctcatttaaaatatattatatagaaagataaagtagtagaccaaaaagtctaaattttacttttaaatggaattattatattatttgatggtcaatatatacacaattttgacgtatcgaaattgtttatatcatgttgcgtaaatggatatatagtataataatataatgataatatatgtacatatccattattatatatataaagtaataggctagattaggaattaagaaatcttttcactgattgaaacaaactttttagagtgattaaactaataatacccaattacttcaaaattcaaaacttgataactaaataaaagaaatgaaattggaaaacatacttgatgaggatgatttagtggagaagatgactttgttgacataagcatgaatagcaattttcatgttttgaagatctcccttattaagcaactcaacagctccatgtcttctccccatattatcaaaagtagaaccagattgtttagttccaatcttatgttttgtagtgactccattatcaggaccaacaccagcttccaacaaagcctctttaacagcaaattgccaagttgacatattcgaaaacgacacaatactctctctcacccattcataggccttctcaacctcatcattgtcccatttcactccagacttaaccataaaatcattgtcagcttcggaaaagaaagcggcgtttatcatacttgtccctcccaaaaccctacctcttacgttctccactccctctgaagtgaacctttgcgccggggtatcgccatcatcatccgcttcgatgagattagttagaaaccccgacgcaaccaacgtgttggggtgagctttagggacgtttcctctttcgaggacaagaactgagtacttttctgatagagttgcggccaaaggacatcctgcggtgccacctccaaccacaatg

SEQ ID NO: 47121 - DNA, 2710 bp, Cannabis sativa
ggtcttctaattgagggttacaccttattcaactatgacaaagtagaaccaattcttgctgaagcactaggagttaaagaggcccttagttgaattaaagaaaaatgttagacaagcgatagtgtagaggctgattgtcttacgcagctccattgttatgctttctctatttggctgtattattcaagattgtaaaactttattttgtgatttgtttaatgtcacaattattttcatcaaacaatcaactaataagatgactcatagttttgttaagatctctattatttttcatggttgtcgttttaaattagattctattccaactattacttagtttgataataaaatttaattgttaataaagatgttttttttcattaaaaaatgttcttaaaaataacaatacactattattataccacactccattagagatggtataatgagacaaaaaaaattaactttgacagcatcaacatatcattactcaaatctaaattatgtgttgactttgcggaaaaaaaaatgaattgttctaggctaatttaatgtgtcatcaagcctataatgacgaaaaaggggtgttgaaagctgtaaactagtacttgctattttcttttttttttttttgacgacaagttaatgcctactgattaatttcaacaaataaaactggtttctagcggtaattttgtaaaatgaaactaccgaagtttacttccataccttcgatattataaaacaaaatagcacatgctactgattatgaaagtagttgatgggcaaagtataattaaaaagaaagtaaaagcacattcattgagaatgttctactgtgggaccctattcaagtaagagttaagcatgcagagcagaagttggaacgataggttggatcccaaaaacaaatcctctcaaattacaagtcctgcctaagaaaaagaccatagagtattgaacctcaatcaagctagtctaaggtgaagtagagagattaactagtatcaaccacctttttacaaggaaaagaagaaacacatgtaaatgagacaagaaaccttaaagaagaataaaaagatgtagcttgtcttagagaacatagaagaaaaagacatttagatagaaacggattccacagcaacggaaagacacccaaagatatgtaatcagaaagaatatttgtaacttggaaaatggttttgggaagacgaggcctgtcataatgggttataagcaactgtgtttaaatgggttaacagaacatcaagggaactcgaggtaaccaaatagattaatgaaaaataaggactctactcaaagatttccagtgcaagcacaattaaagggaaaggcttaaaattgaaggagccagacccagtttggtgatgcttctcttcatctctactacattattggacctggaaaccattttaaatttcacaaccgatattgctagttctagctaacatcgattagtttctccagaatactttcatattaacctgctgagggatttgataagtaatttcaaatttcgtcttgtagcctcatcaccagtgaaaccaaggatatcagagcttatactctgcatagatagaattacgaaaaataagtgcaaatatacatcaatatggcagaggcacgtacaaaaattaataatagtgtactaggatcttacctcgatgttcttcaaggtaaaaaccaaagatagtactgatttctgaatcttctctgtattctcaggagtcaaaatggatgactgcacttttctgaacagaacaaaactctaaacagtcagaaaacgctggaataatctaacacaagtacaaattggtgagtattcgtagtaaagaggaaaaaacacaaacaaaatgaaaagacaggaaacagttattatgcttctttcttttgtttcccctagtaacaaaatcttcaacatgattattttcaatgtattttgagcctttgacatcattgcaaatcaaacacagaagacacaaaagaaaaatattaaacggtataactcaaattagccttactgatgatatacagtttggaatatattgcacacaaatcaccttccaaacattacatatgttcagagtaatactaacttaagtcatcgtaattagatttggatgacaacactagatcccaatcaccttatgtatctattaaaacagtatttttatatagtatgatttgaatggccaaattaaatcataacccactgttttaaaaggtagttgacagtccaattgacaaggtcacccccgaacaaagtaaaaccctcgtataatacagttcttaaactaaacatttcaggatataagctagagataagcatttcaggatataaggttcataaattcattatcttagcacgttactagtatagtagaaagctatgtagcagtatctcaagaaagtagattgagctgagtaatgatagtaatcttgaccagataattaagaatacaaaaagtggttgaaactgtgtgtagtggcaaaggaaagctaacagtgatgcgtctttgatttgattccactaaatcaataagtaaagtagctcaggaaaaataaagtagctcggcaatcttgaaataaagttcaaaccaatatatttagttaaatagaaaatgaatccttaagaaagaagatgcataatataaatctttcttataaaaaggagagagagagagagaga

SEQ ID NO: 47122 - DNA, 2117 bp, Cannabis sativa
aagtagctagaaaactgggatttataaatattgttagtgttggtgcggttggtttggctggaggctcttgcttcatgtggaataacaacttaaatttggtaataaactactttgatgaaggtttttttgatgctactgtttgggactttcaaaaccatattcactggaaactctatgcggtttatggaactccttatttgagtgttaaagaagccttttggaagagtatggaagtggaattctccaattgccaatatccgtggatgataattggagacttgaattgtatttatagccaagaggaaaaggtgggaggtcgtagagttaccaatgtggatactaaatggctaaaaagttttatggatactactgggggaatcgatctccaatttataggcaataagtttacttggcagaacaatcagttttcgggtggtcttatcagagagaggcttgatagagctttatgttctccggattggttattggaatatccttctgctggtgtcagaaacttacctattgcaatttcggatcatgctcctattatctttgattctcacttgttcgctgccaagggtttcattccgttccggttctttgaagcttggtcttgggagaggacctgtaaggaggaaattgtcaaagcttggtcttctcgcggggttagtgctactgtgacttttattcagaacattagcaaggccaagaaggctttacaagcctggaaaaagaatcacaaaggaaccattgaaggagatatcaaggcaatggaaagcaggctagaatggatccaaagtcaagctcggccagatgactttagaactgaagaactgagtattcaagagaatctgacagtcgcttggtctaagctggaaagtatgtggagacaaaagtctagggagacttggttggctttgggagatcgaaacaccaagttttttcacgctgcaacggtcatacggaaaagaagaaataatatatgggctttgaaggataaagatggcaaagtgtggaaggacagaagacatattgctgatgtgataaaccagtacttcttggagcttttctcctcttcaaaaccgtgcttagatggggaaattgatgaactctttactaagaagattgatgacagcaccaatgttaatttagctaagattccttcggaaaatgagattaaaggggctgtctttgatcttcatcctcttaaagccccggggccagatgggttttcaggatgctttttcagaaagtattgggatgtagtagggtcggatttggttaacacggtcaaggaatttttcactagtggcatcctaaatctgcaactcaataacacctttatctgtctaattcctaaggtggaatttcccctgactatggatcagtttagaccgataagtctttgtaatttctcatataaggtaattgcaaagatcttatctaatagactgaggcctctcatgaatgagttgatttccccattccaatcggccttcatcccgggaaggtggattggggagtcttctatccttactcaggagataatccacaagattagacataaacaggggattggttggtggtcttatggcggtgaaactggatatgcacaaggcatacgacaaaatggaatggtgtttcttagaaagaattctgggagcatatggctttgacagtaagtgcagacagctcctgatggcatgtgttactagcgtatcttactcagttctcttgaatggatgccctctcaaaaagattactcctcagagaggattgcgccaaggtgatcctatttccccgttcctttttctcctgtgtcaggaagtcctttcaaaactcatccgaagagcagaagctaaaggagtagtccatggtatcaagatcgcactttcggcccccccagtttctcacttaatgtttgctgatgatacaattctcttcacccgagcaaatgagaatgaagcaagggcactccttgattgcttatcaacttacgaaaaatggtcgggacaatcttgcagcaagcctaagtcgagtgttctgttctcaaaaaatttgagcagtagaagaaaagacaggattttggaagagttgaacattgatcaagtgaacgg

SEQ ID NO: 47123 - DNA, 628 bp, Cannabis sativa
taatcatatataatatttcgtagtatctctctcactctaattgattaatttgttatactcacgcagctttttaattatatattatagctattagctagttttggttcacaatgatcttcctcaatattaaattttacatatatgtatccatatatgtaatgccatggttgttgccttgttgggaataattaaatataaaaatatagtacagtagtagattattttgttaagaaggatagaattgtgtttatattatattttatttgaatttgctttgaaaattattatttatatcatatgctataacacaagtcgtaaggaaaatgtttggaaagcgtaaagtaattacgagtatctttcttggaaaagtataacaacaaactaaccattaaagtttgttggtttaggtcaatagttggcagtatctatcatttgaattttgatctcacctatatgcattacaatacattaccaaaattgcagaaaggatgataaggaaattcgcatagtgaagatggctgcacctcaaattggaaatactgaaatcccaccggaagataactacacttggcgaaaatatggccaaaaggagatcatgggctcaaagtatcctaggtacttttttttt

SEQ ID NO: 47124 - DNA, 1939 bp, Cannabis sativa
  modified_base (1336)..(1343): a, c, t, g, unknown or other
aaaatagaaaaggttaatgaaataaaatgtagagtgccacctaacctctctaatgctttcctttatatatagatatagatatagattatatacatacattcatactcaataataaatatggttaagacacctatattataagaattaaaatataaatatactcctatgttaaacaaattaatgtgatatttaatgcgttttggaaagcatgaccaaaggcttatactatctcgataaatactgaaaataaaatttgaactccaaaaactcatgcatattattataatttgaatgtagcgatcgagaagaagaaagctaaattagttgcaaaatattttaatcgcaagaagtacaagagatgcaatttaaaaaaacttacttgcaatgattgtacaaaaatgatccaaacctcgtttaaagcaagctctacaggaagaatgttcaacgagccccctcttcgtgaaaaacattttgaacgaggtacgcgctaacttatatgtgttatttgcgaggagcacaaatattgaacagaaggatggctcggtcaataaccgtccattatgagattaaaagtagcaattactaaatatatcatttaaatttaagttgttatatattcatttaattcccacatgaaaaatgctcatgtttcataagaaaacccgtcatgtagataagattacaaaaagaataattgtcatatcgaaccaccaatttttttatctcttagaaaattttgtccaatcttatatcctgtaaataaaaactcataaaaaaaataataataattcgtgaagtatgtagaattttaactacaaagtgatgttaaagattttttgtttgcatctaatattattaagtttcattcgataccacggtgttaattaattgtcaaaaaattcatttaatgttaacgaatttttgagttaaaaataatattttaattattatatttattttataattttgttatacggtataattttgtaaaatcaatatattttaatattaactattgtagactattatatcatttttttggcaaagtgttgtagaattaacatgattattttgttttttttttatattattctatactaattgtatataaattatttatgatagtcatttgttagcatataatatatatgcccaatagttagtataggttattaacctttcaatgatcattaaattgcaaattatcaaaatgaaaaattcaatcatgacacattataatgctttagtcataataatttagtgataaatacatatattaaaaattagctaaatctaattggagaaatagaaaggtttttattttttattttttatnnnnnnnntttattatttttttttttgtaagaggagaaatgaaatataaaggttagaatatatttttttaaaaaaaacgtttatagattaaaatcaataaaataagagttagacctcgcagttattataaaagatgttgtctggtatagaagtcaattcaaccatgctagtaacagttttggtgaaagctcatttagcgatattatgggccgcaaaattacaaattctgaaactaaacgaaaattaacagcttaacaaaatattagaaagatgttttcattgatgcatatagttaccgataccccaactggaacaggcttccttcagcgtcttgataactgtctcagaatcactctcaataataacaaaagtatgtttcaacgaaacggctatctccacaaccaacagacaggtcggaacttctctaataagagaatcagagaaatagagcatgtttgtagctacccacaaaacagtctctgtgtaatccctagctagagtcactacacacatgaaatcactaacaactttcacatcacagttgattttgatctaatcatacataaaagaaaccagtcaatataatatttattatttagaatac

SEQ ID NO: 47125 - DNA, 1295 bp, Cannabis sativa
gtttgaagttttttaaatacgcgtagtaaattgagatattaggaactttgttttcgatactataaactattcagaattttcaaaaatttatagagatgatattataactttaacaaataccgctagagaaaaaattaaaaagaaatattttgacatataatttcgaacacacaggtcaactttttttttgagagaaaagttcagtgtattaaaagaggtagttgggtatcacaaaaggggatccctccctattaataaagtctttacagtgcccatcaattctagcagtttttgccactacatcagcagcttcattatctacccttttaataaagacaaagctacaagaattaaataacttaaccaacttccaaatttcaaagaaaactgctctggctttccaacaaggaggaaagctttcttcaacaatcgtcttgaccaccaacagtgcatccgaagccactgcaattgattgaatcccagcctccaatgccatctgaagagcccacaaaatcgccatggactccgcttccatcgccgactcagcccgagaccatttcgcagaccaccagctccgactggaagcttgatctaccagaccgaccgccaagcctgtcgacccctgtttccaagacgcatccgtgaagcacacaaatgccgtcgattgagagatcttccaggagaggtaagtctctactctttttgtgtttgtgccaaatactagttgttcttcctgtatagagtagaactcttcaagtctcttagaaatagaaactctcgactgcaatatatcaactctgttactttggaataatactgcgtttctggtcctccaaacctcttcgaacatacaaccaacaaatgtcagaaatcgccacttatcgttccttggtatcccttgcagaaagaaaaggataagttccttcaaatctgagcctgtcgctctcgcattcacaactggaaacatacctgaaaaccaaagagcccttgcaaaaggacaatcccaaaacacatgctttagggactctttgccttcttcacacagaacacagtccttatccttcatgaatgcaagtttctccttaactggaatacatcccgctaatactctccagagcataacagcgactctagggtggattttcgagttccaaatcgctttccacacatcttggtctctgcaatcttgaaattggcaacattcctggtaggctcttttagtcgtgaatattccatcatttgcctttttccaaataacagagtcttcacaatcctgaggtagccttttgatatta

SEQ ID NO: 47126 - DNA, 1217 bp, Cannabis sativa
taaaaatgagaagaaacatattaacatgatcaatttatcataaaatttagtgttttaagatgaaattttatgttttataattaccaatttaattaagagttcagaagatcacgtgttaagataaaataattcattagataaacctcaaaaatgtaaaataatttacttacacataaattcattagaaagtatgtaaaattcaattatttcttctcagcttggacatttgcatttgcctagtccatatataaccaggcgaactaatgggcttcaacattacaagatgagttaacatatatacctaaaattagtaacattaaaagagtaaacctccccatcccgaactcattcatgttttttctctgaagaccagtaattctcagtgtatatatatatacacactacacaacccaagaagaccagtttgattgtcaagatttttatgtaactaccaattaattctttagctaattgattttgcagaggctatttaattaattagcccaaaaatataaaccatctttattcttaatttgttttaaaattaaatagaaaccttgaattaatacatgatcagaaatgagcctcttccattacaaaagtaactcattagtcattattgaacattaataatattgcaatatatcatttatatattaattgataaacacaaaaggggataaggcaattactgtccacacacacattgactatctcccacaacatatatataagaagtcttttaatcagtccttaattagcaatacagactttaactgataaaacaagcttgtaataataatcactttaattatagtgagatctcttaataatatatatatatataaataatactaaattctctcttggagatttggctgcataggctggacacggaaggctaaaggcatatgggcattattgtagtccctcaaattcagcctctgatcatgatgatgatgatgattatgatacccatgatcccctactacttccatcttttggtgctgcatatatatacatacatacacaatccattcattaattacaaaaatgtaagtttaacaagagaaattaactccaactattgcccctgagttggagtggtgtttcttcataaggccaaaaaattgcaatactcaaatactaaaagacaccttaagactttaagcaacacaaaagatgacatactgttacatattttaatttaataaata

SEQ ID NO: 47127 - DNA, 1799 bp, Cannabis sativa
atttggatagatttgtatccaaaagattatttcaatcacgttagctagctatatatatatcatccataaaatctttttctatatatcttgataatgtttattactacagtcaatatttaaagaaaagaagtaaaaaagaaaatgaaaaggagcaatgatcaaaaaggttctggtactggcttgttcaacgagtcatcatcatcagaaatagtagtactccatgataccggaggaaatcgttggctgaggccggtttccaagaagaaagcggtggcagccatcgccccagccgttattctgatagttttcatcttcttctctttctctctcgttataatgttacctgcagggtggatcaatgttgtaagtactcataaatattgtatgtataagtaaattaatgaactaataattaaggaatatttatgtaaacttgttaatctgtattattaatttttgcagtctaataatgaaaatgcaagattaataaaaactactacttgtccaagaaactacacctacagtaccagttggtcatctttaatcaatcctagtgatccggtggtgagtaatactactactactactgtgtcgacgtgtccatcatacttccgttggattcatgaagatctgggccattggaaggagagtggaatcacaaaggagatggtggagagagctcagaggacggcgcattttagactagtgatcgtggaagggaaggcgtacgttaaaaagtataggaagtcgttacagagtagagacatgtttagtatatggggtattttacagcttttgaggttttaccctggtcggttgcctgatttggagctcatgtttgactgtaacgatcgcccggtggttagaatgagggacttccgggcacccaacccccgaccaccgccgcttttccgatactgctctgatcggtggagcatggacattgtgttccctgattggtctttctggggctggtaatatataattctcttatatatatttttgcaatgaattctcttacatatattctaattatttattttccattatatatattaattaactatatataaaagtgcattgcaatgagtgaccatcaccataccatattgtgagttgcatgtaattggcataacataaagtgcacttaattaaagtattattattgaatactactggtattaagtactttttgtatcttattattagttattcatattttaaaaagttatttttttaagttatataagactcatacttaattacatcaataataatataatattgaaaaaaaatactaggcaccaatatcttacaccgcaaatttgattaactttgtgatttgttctagagaaaaagtgctttatttatattgttaatcatatttgaaaaagttatttttttaagttatataggactcatacttaattacatcaataacaatataacactgaaaaaaaatactaggcactaataatatcttacaccgcaaatttgattaactttgtgatttgttctagagaaaaagtgctttatttatattgttaaagtatttgcattgcaccccaaattttaataattatttttttatataaaaattatatatttaacttatactatttttcaaagaaaaattcttcattaaaaaaatatttttttaaaaaatatatattaaataaaaataaaatatattttaaatattaagacaaaaagaaaagaaaaatataaaaaaaaagtgtgaagaaaaaaaaaaaccaattttttcaagtgatatgttgttggcttgagtatttttctaa

SEQ ID NO: 47128 - DNA, 1489 bp, Cannabis sativa
  modified_base (1183)..(1184): a, c, t, g, unknown or other
attggatccaaaatatgaaatccgcacttagtgcgaattggatattgtttgaccaaaaaagtgcggatttggatcggatgaacacccctacataagaggcataccccaactaagttatagacttaagagatgagtttacttgcaatctactataataataagttttactccccaaattataacctatgcatgattgtgcctttgaatttttgagtccattaaaatagttccttaataatttacaatattgtaaagcggtaattctcacaagttttgttacatgtgacacacataatgatgacgtaaatatttatatcattgccacattaacatcacatgtgtaatttaaaattaaaaatatgtatttatcagaaattattaagtaaaaaaatcaattaataatttctttaaaaaataattaaaactaaattagaaaattaaaatatatttttttttcaaattaattacacacgtggtgttgacatattaattgtctaaactgccacatcatcattctgtttaccgcatgtaacaaaacttgacaaaaagaccactttacgtcactatgaatagtttgggggactattcttagttgaaaaactcaagggcccaatcatatatatatgtcatagttcaaagggtaaaaatcttaaatagcaataataataagagtaacttgtggcgtatatcccaaagcttaactcttagttgcagataaatacctaagtttaactccagttgcagataaatatctaagtttaatttttgacgatagtaatacataagttatatttataattaagtgtcaagtcaatggccacgtggcaacccctaattggtcatagtcattcaatttttatttaaaaagtaatttaaatatacaaataagaaaatgacatgtggataatgatttaacacttaacaactatgtacctactgaagttccagaaatttaacttaggtattatttcataatgggaatagtgggagtgcaatggaccattataatgcccataatccaattgacagaagcttgagggattatgtgctacctaccatgataggggtccagtcctgtataagaccacttgccattgacgcaaacaattttgaaatcaagctagctaatcaagagttaaacttaagcatttacgccgtaaattactataataataataataannataataataataattagaatttttgtctcctgaactttgacatgtattaaatcatgctccataaacttttaagggcgtaaaaaatcccccttgagttattgagattgttgaatttaaggatttttgtccaattttagtaagaaacgtttaacatggatgaaaattcagaggtcattatttggtacatgtcaaagtacgagggacatgatatagtagattcaaagtttgaagagcatgatttagtatataaacaattaccaaattaataaaattagacaaaagttcttgaatctaacaatcttaat

SEQ ID NO: 47129 - DNA, 1123 bp, Cannabis sativa
  modified_base (26)..(61): a, c, t, g, unknown or other
  modified_base (1083)..(1086): a, c, t, g, unknown or other
ataaaatgatttctgatctttattannnnnnnnnnnnnnnnnnnnnnnnnnnnnnnnnnnntagggcacaaaacccaacaggattcccctgctccctttctatactaggtagtttgggtcactaactgtttggtttttctttctttatacataaattatatctaagaagatacaacaagaagaggttgaactggaagaagaggtcctggagcaagagaatgctccaaggctgatgttgaatgacaatccttaggaaatggaggaatatgtcaacaaatttaggatttatggcaattttacgaagtacgaaaccttatgagggcttgatagtgttcctggattgaactggaataggctcttcgttcacggagagaagccaagcaagtctgcagatggaggctttgacatctagagctgggcccatgtggagatgggtgcacaccttccgttaatgtagtataaatttaaattgtaatattttttttaaaaaataaaaatttttattatatagtcacgtttaatataagtttaatataagatagatatattttattaaaataataaattattttgtaagtaacgacaattattgtataaaacggcaatggatgtaaaaacgattcaaattacataaacgacatcaaatgtggaaaaggagattgctttgccattctattagtacgacgtcgtagggagggtggtggtggcgttagactactgggcgaacatattacattttcagagagcagagagagagagaaagagaggcaaaggaaagggtttaggaaggaagagagactgtgtgagtgagctgtgaaagacagagagcaaagaaagtaggtaggaaggtacctctaatggcgacaacaacgacgtttcagggttatcctcaacagccacaaccacaacaacaacaacaacaacaacaacaacaacaccaccaccaccatcagcctaccaccgttgaggaggtcagaaccctttggattggggatttacagtattgggtcgacgaaaactaccttaatagctgctttgctcataccggcgaggtttacacatctctttctctctctctctctnnnnatatatatatatatatttgtgcttatatttcttatgt

SEQ ID NO: 47130 - DNA, 2039 bp, Cannabis sativa
  modified_base (1316)..(1321): a, c, t, g, unknown or other
caatctgattggggaggtgaattcagatcattcaccaatcttcttgagcaatgtggcattgttcataggctagcttgtccttatactcataacaaaatagtgtagttgagcgaaagcatcgacatgtagtggaaactggcttgacactacttgctcatgcctctttaccattaactttttgggatgaagcatttcgaacagccacttttctcataaatcgaatgccaactgctgtcattcaaaatatttccccactgcagaaactttttcattcaccacccgattattccctactcaaaacctttggatgtttatgctatccaaatcttaggccatataatagaaacaagttacaatataggtccaacccttgtgtgtttcttggatatagcatgtcacacaaaggttacaaatgcatgtccaaagacaaaagaatttacatctctcgagatgtaattttcaatgaaaatcagtttccctatgctgtgtctcacaaacaaaccattgacaccaactttcaagttaccacctctggtttaccacccttaacctctctcatttccactcctcccacaccacctgatcctccactgtcacctccctgcccatcacatgaatccaacaatgattccccaattttttcatcacttgcttctgtacccgattccaaccaactggttgatatagcagtccattcctctgccactttacctcctctcactaccatctctaatatacctgttgctactaatgtttctaatgcagataataccaggcccacaacttctaccacataaaactcacatcctatgattactcgactaaaagctggtattaggaagcctaaggcacttcttgcctcatgtgaaccaagaaatgtaaaggctgctcttcaaatgcccaaatggaatggtgctatgacacaagaatacagagctctcaccaacaacaatacttggattcttgtaagacttcctcccaacagaaaacctattggatgcaaatgggttctaagagttaagtataacaaagatggttctgttgagagattcaaagcaagattagttgccaaaggatttcatcaacaagctggctttgactttgatgagacattcagtccagttgttaaaccaatcactattcgagtagtcttgactattgctcttacccgaggttggtccattaggcaattggatgtaaacaatgccttcttgaatggtgagttacaagaagaaatttacatgcaacaaccacctggatttataagtgaagagcatccagattatgtgtgcaaactcaacaaggctatctatggnnnnnnacaagctccaagagcttggtttgcaaagctctctacagttctcataacaatgggatttcactcatcacaggccgatccttccctcttcattaaaatcacaaaaacttactgtatctacatactggtttatgtagatgacatattagtcatgggcagcaatgacaaagccatcaacaccaccatcactgatcttaaccaccaatttgctctcaaagatctcgggttggtcgactatttcttaggcattcaagtcacaaaaactgatcaggggcttcatctcacacaaactaaatatcttcaagacttacttacaagggctgacatgcagaatgctaagactcaaaatacacctatgaagagtgggttaaaactatcaaactatggaagtgaaccaatggaagatgtcactctctatagatcaatagttgggggactacaatatgctactataaccatacccgaattggcatactgtgttaacaaggtatgccaattcatgcaaactccaatacaacaacattggatggctgttaaaagaatacttcgatatatagcaggtacactagactatggtctacatctccaaccagctcctgatttttccattgaggctttttgtgatgctgattgggcagccgaccctgacgatcgtcgatctacaaccggatattgcatttacttaggtggaaatctagttgcttggaagtctcaaaagcaa

SEQ ID NO: 47131 - DNA, 1399 bp, Cannabis sativa
ccgaagagttcctatcggtgggacagacagggacggtcaaggactatcgggtccgctgggaagtcttggcatctcgggtcccggacgtgcccgatcatatccttgaaggcagcttcgtgaaaggattgaaggaagagattagggctgcccttcatgtactacagcccaatgggttagcccaaataatggacacagcccaaagaattgaggagggacatcacttgatgaatacgagcccacaccaaaagcccaatacatccagacccaattcaagcccactatcacctacacggtccaattacaattcttttggggtacgattcaatcaatcgccatttcaacatagaccaccaagttcttcgccaggaacgatttcatcttcggcatccttctccaaacccagccatggtcgatcaaacaccaccccttcattcaagaagatatccgaagccgagtaccacgatcgcaggtcacgaggcttgtgtttcagatgtgaaaaaaaatatcaccctggtcatgagtgtgatcagaagctcctccagatagtcctcaccaccgacgatgatgagtccgacacaccagaggagaattcacctccttcccctgattccggcgagacagtgactacagaagagacgcttgcaactctttcattgaactccttaattggaatttcggctgcccatactatgaaacttgctggacacatcggagcgcagcctgttacggttcttatcgacagcggagccactcacaatttcgtttcaatggaggtggtaagggcagtgggcttaccaatcaccgccaccacttgctatggtatcttgttgggcacgggtggaaaagttagaacagagggaatttgtgctcaagtggaattagacttgggagctattcgagtgattactgactttcttcctctcgagctaggaggcgcagatgtaatcttgggcattaagtggctagaaacactcggcaatatgcaagtcaactggaaaacaatggtgatgaagtttgaagcggccgggagttgggtgacactacagggggacccgagtctatgtaaatcgccaatttcgctcaaggctatggtgctggcagtggagaagggggcagaagggtactgggtacaattgaatgctattgaagccgagaaaggggatgtccaaccgcctattccccagcccattaatgaactcttacagcaatatgaagctgtctttgtgatgccaccggggttaccaccggctcgttcacgtgaacatacaattactttgaaaccaggcacggcaccaatctctgtacgaccttatcgatatgcccagatacaaaagagtgagatagaaaaaatggttagagacatgcttcaagttggaatcatacagtcaagtacaagccc

SEQ ID NO: 47132 - DNA, 3020 bp, Cannabis sativa
ttttttttttttttttttatggcaggataaggatatggtgcaaatacttggtgtttatattgtcttttttattccttattatcttcttagtgttttattatttattaaagtctaactttgcgctggtcaacactgtagagtgtgaatttataaaaatactcttataattaaacacatattatttttaatttaagattgaaagtttacatgtataataattattattgaagagtgatttttttgatacacaagtttgtactttatgtttaattagatgcacaagtaaaatacattgatgatgatagttttgaatataataaatttatttttctaagtaatacaaaaatgaaagtgtagtaaaatacttattatataattattttaaaatatgtatatcaaaattttaaatttaatacagatttacgattaaattatcactaaacaatatatcaaaaaaaattaacaccaaacaaaatacaacttcacgcgaagcgtgtttcctaatgatattatattattattcatttatatatattaaatgattaaattttcttattttatcacgattttgtcccgtaatgtacttttacagaatgtattccgtggtacattagatgggtcttaaggtacattagatgggtctcaggatatacgttactattttttaaccctaattaccctagatgtacctcaactctcagatcaaataactcctccagctaacgactgtcgtacatcacaaaatacattctgtaaaagtacatcacgagataaaattgtgtcccaaataaatataatagtaaatgaaagaaagagaggatactaagaatgtcttttttatatgcagacattttttttactcactctaatgataagcatttgttaaaaaataccaaaaatatttacatgtagtattctttaaactattcccatgggagatacttgtatatcaaaggatttaaaacagacccacacctatttttgtaattaaaattgaaaataaatatgcattatagttttagtttgagtcatatatatgccagcagtgttgcataaaaatcattaatatcattttaaatatacaatataaatactccttttggcattaactttgatttttcttttgttgtatgtataataataacaaggcaataatgtgaccaaacgtagttggcattattcacaagtgtggtctatgaatcttcgtagcaagagtaatggaccaccctacctatatatatatattctaaataacaataacaacaatgatatgcatacaaaatatttaacatttactgttcttattagctaatgatgttttttccacttccagattttaaggttctaatatattttgataataatcaaagtgtctctttattaccaatcattaattaatttgatcagacagaaaagcttgtcccagcaactttagttgttttgacattttacaagtacactaactcagaattaaacagaatctcttttgtcaaatttatgaaatacaaaaatcaaagaaaaattacagcataatcaaaaaggggagtcaaaaaaataaaatattaaacccaaaaaaaaaaaaaatctgtactttgatctctctcatcctctggaaagtccttctggtactgtatcatgttcttcacataatccaactttgtcaacattgacagtgtttctagaatgaaactgagattgtttacagtgtgcaatagctccttgaatcgagttctcaatctcagaatgcttaacactcccacatctcttcaactgttttaattcttgattattacaaatgttagaagaagaaaaagaagatgaaccagaggaagaggatgatgtagatgatgctgatgatgaagaagaagaagatgatgaactggacttgtatgttgaatatcttaaaaaagccaaagagaatgatcttctatggcgaccaccaccatctacttgatcagtgttactaatctttgccttcttttctttctcagtttgcccaaatgagacgactgatctcttctctgctatgtctttcgaagctgtggatgattcgttggaacaacctgatttcccaaaccaagatttgaggtaagccttggaagctttaagcttcgacccaagtgaggaggaagaagaagatgatgagttcttgagctttttagctttaccccaagattttttactaccattgttaagaccaccattggtgaagtcactaagctctgtggagtaacacttgttcatcatcatgtactcctcctctgtcgagtcattgatcatgcgaaaagattctgaaggtgagatattgcaggactcgaatggagtacttgttgctgttggtgttggtgctgttgtcattaaaggggtgctgtagaattcatcaccacaaccaaataagctttcttcttgactcatcatatgatcaaatgatgagatgaagttgggtttggagttttgaaggagtagtttttcgaccatttgtaaacgaggtggaagatgaagaggaagaagttttcctttgtaaaaaagttcatctgcaggagatgttgtcatggttgagtaatctctttcttttggtgtggaagacatttggaattcaaactctcttggagaaggtactattgagttacagaagaagttggagtaggaaccaacttccatgtcgatgtagtcatcttctgctgttatggggtcgaaagccattaatggtttttctttgcttttggtgtggtggaagtggaagtttacaagaagtagctgctttgagaggttttgtcggaatgagattgaagacaagtgcaagcttttaaaagaaagaaaaagatgggctagttggcaggcattgatgtaaaagttttatgcaattttattctcatttgtttatgagtttgtgtgtagataatgagataattaaatagaaaagtggtatgatgtgatgattaattccaacttaaaattttacaaaaagttaataatatactagaaaaaatgcatatgtaaaaacactatcaaaataaaaa

SEQ ID NO: 47133 - DNA, 1293 bp, Cannabis sativa
gtccctaacaacttgttttagaggcttgatctgaattacttaaatatgtaaaaggggcatcgtttcaattctgtaattgttttgtgatttctcacttctttagatattttacttgatcttattcaagaactttatctttcagccgatcatgtgatcggaagaaaccccaatttggtttcaggcgatttctgtaaaagagaggcagctaattggaaatgtggcgttggatcttgaagttgttcgggaggattctagtcctgttcggattgtatccccaaccacagaagctacagaagattctgttgcaggtaaagaatctgagaagagttttagtgacaatcaagagctgctgtctggcatagacagtcaagctagtttatctgttgttcaagaaaaggaggatcttgaaggatctctgccaggggttatctcagtcggtgatgaaatttcaagccgcttgaaaggaataacttcttttgggagattcttagagcatctggatgaacagcttaatgaaattgaagaagaaattgccactgttttaaggttctcaaccttagtactagacaataaggagaaaacaaaaaactttaaggtgcaacaagcacaaaaacttcttgagagcatccatgaaatcaggcaaaggtataaacattatatttgaagctgatatagctctggccattgcttcctgttttagttttttgaacatttaaaattgttactttgttgtttggtagctgaaattgtatagttgtcttttatcccattggtgatcttttttattttcagagttgctgatataaggctggctgaggcaaagactaaatgaagctatacttcttcagttttcagtttttctattagtatttgcaagcttgtcaggtgtagaaatggcaattagcatttgcaatgagtggctaaattgggcaaagaaagaaaggtgtgtatttagtatttagtatatacaatgaaagatatcagccatttgctgcttcagttccatgatcttcagaaaagtgtagtgtgttccttttaactttgatgttttttttccttgaaatgaattcatataatcatctgtgcattttgaggaagtttctgtgtttaaatgcagacattaatttgaattcaatacactttcaatactttaaattgttattgctcatgaatgtttttttactcttcattccatctacaatattctttaaagtttacctttggtgtagcaaatatattataggcactaagaggaattgtttgtattgctatttataaacaaaaattgacaat

SEQ ID NO: 47134 - DNA, 777 bp, Cannabis sativa
aaaaaaaaattaattttaagtgtttaaaatgtgtagtttttttaaatgttttaaactttctaaaattattttattttaggcttatgaaaatttattaaaaaaatatattttaattttacatttaaaggtgattatatagtatactataaatagtgatatttgtatatgaacaaaattatgtaactctttattatattttttcctgtaatgactgtatatttaaacatagaaattagtacattattcgtatgtaatgattgtttctgttgtcttgacataaccgataaggaggataatactattattaaaatgttgttcctagtagagatagaaagtcatcacgatacaccttgtcatagtgggaaggtttcaaggaacctaccctgttatgacttggaagacacttgtgataaaaatctgttgttattttaaacgagtaatggatactcagaataaggaactaagaagcaaagcgaaaagaaatatggttaaaaccattcatatgtgttagattaggtgtgactttgtaatatgccacataagcaaccgttttaactaactcaattagttagttaaaaccgttaccctatgtcggtctctattgtacctagagttagctcctataaataccatgtaattgtaatgtaggataaatgtcttttacttgtaattcagatcaaatacatcaataaagtgagacgattattcattcaattctatgttctaaagtatggtttatttggtattaacttctggttttcggttaagtgctttgag

SEQ ID NO: 47135 - DNA, 2699 bp, Cannabis sativa
ttttaacaaccagatgtacggatccattccgattgactccttaccagagaacattttgtgtaatgaccgagaggtctagtatctttttcatatatatatatatatatatctacgcctattttcaaaaaaaaatagttggggtttcttcttcttggttttttaagagcaattctaattataattttttattttaatgtccgaaatcatatgcccgtaatattttttagctaagaaaaaaaagagttatttcaaaaaataaataaataaataaataagcaaaaaaaagtataaattagagaaaaattagtatatggtttaaatatctctttattttagaaaaatttacatcaaatattaactatttttcaaaaactttacaatttatattaggataaatatcattttgtctatattttgcaaaagttaccaatttaatcttctgttatattgaatgacaaaatagactttatattttctaaaattgtataaataggaccctgaactgaatttttgtcaaaatcaaaattaataataatatgatctggagatgttataacaaaattagttatattttcagtacatgttcgtcttaaaaattgtcttaaagttgattatattaaaaaataaaattgttaaaaattaacactacaataattaagagtagtaccagtggagaggtctaccgatactaattagggattccgccagtattgagtattaccggcagaatctgccagtaattatccgccggtaataattagtcgctaatattagtattagcaaccaaaatagatatccgccggtaataatattaatactgacggattaataacggtggggtctgccggtattaatatctgtactttactcgttgacatattaatatcggtggaccacatttagtgatccgccggtattgatatgtttttagataaattttttatttttagtttttaataattatataataaaaataattataattatatatataatgattataatattatatattatatgtaataattattttacaaatatattacaattaaaatttaaatttaaataatcaaacattaatattgattagggtttaagaaatcaaacattaatattaatatccataacaatatacagtattattttaaataaagttataaaattgtcttaaaataaacttctaaacataaaaatttacttaattaaaaaacctaattatcattgttcagatcaataaattctataaaatcatctgcattcgagctaagtcttgaaccgtcgcgattatcacgagattaaggagccagcggggtagggtaataaggttgtccagattgttgcgtatgtcgagtctgcggacgaaccaaagtaggttgttgttgttgctgactctacgcactgaaaatctgaccatacataggctgttgtagagatcttcccatttgaccatacacaggttattgctgcaacaatgacctaaattgatcgtgcacaggttattattgggatgacccaaattgaccatacatagggtattgttgttgggatgagcctccaaaatggccaaccataagttgttgtgtctaagatcctcctggggcatccggaaaaaatataggaggagactgtgagggatgctcgaacatgtaatgtaattgaggtgattatgaggagccagcagacatgttgggagaattttgttgttgttgttgaaagaactaaggcatctgatgcgattgttgatgttgttgttatggttgttgtgacattaacattggacggggatcgaagtggacaaactaccttactgttatgatggtaaaaaaatttcaaaccgtgggtcatgtagagaaggctcactggaggtgccagactgatcaatcttatcacgcatttttaacataaactcagcaaagactcccatatcttccggactaatcgatggagaagggcctttgtgattgagcttgacattgagtacgagaacttgtttctgagctgtctttcaatttataacccactcctctttgatagttcgaccgactcccaagaactttactcatagcttgaaattgcttgtatttgctagaagatatccatcgctggaaccattttctgttcccgtaatgctagcaacctcttcaagcattcactccagatcaaataaaatattagaaacacaataatacattcatgcattctttttgaaaatattataaaacaaaaattttaaacttacatgtagttctctgcatgtctcgctaatccaagtgtcttctgtttcttttttaaggtggccttttttccaagtatgaattgcatagtcttcagtaagcgtgtcgtaataattaaaaccttctgttccagccacaaacactccactattttgtgtgctcctcttctcatctcgtttagtagccataaatcgaacttcattcacaatacaaccttcatagtaagtatttaagtgatcagaccgggatgctaaagctagcaactcttcgacattctctaatgatccaaacttgtgcaagtcatatatctataaaaataaatacctcattagagaatgacaaacatcacttaagataataaacttttattacatccatattcaccttcttgagaaaccacggacgaatttttttttttttttttgtgtgtagaacattataatctccattcgggtatttttgtct

SEQ ID NO: 47136 - DNA, 1397 bp, Cannabis sativa
tggtcacagaatacctaactcacaacttgtatttttaagtttacggtccagctgtaattataatttgtgtcatttttaaggtatcttgcaggtattttgttgacacgagcatcactgatgtagtaagagtgtaacacatgcaaagtgtcttctaaagcttcaatatattcaccaaaaatcattgtatcgactctcattccttgtgtaatgtttattaataagacatgcaataagattttgtatgagataaatattaaatttaaaagtagtacaaggctgtgcaaataatactatggtgtaaaaaattaatttggttacctttggattagttaaaaatagcttttgatatcggactggcgaattcatacttgttcgtggtggaaatttatgttaaactgtcattttgattttccatctaacggtggtgggagtgatttcatcgactgaatggtgtagtgtcgacatctgatatgcacacttataattgatattttgaaaattaaattttttaaaaaaaaaacttgtagtgacaagaaacaagacctcaaataaaatgtaataaaataacaatgcaaaataatattaatatggaagaaatataaacatagatattgaaaatatttagagctgtaccagaaacggttagaattttatgaatgctaattacatagtcacctagcatgtttttcgaagagtttaatttaaacatgataatgataataattccatatacacaatatttttagtagaattcttatcttattgaaaagttgagacaagtcggatcaagactctaactgtcgaagatgtctttgctcttgatattgctacatataactgactgtgtgaaaaaacaggttgcagtaaatagatcccaacgtaatccaatgtttgtccttgtgacttatttatagtcattgcaaaactcaatctgattggaaattgtgttcttttgaaaggaaacccactattttcatcaacatttggcaagaatggtatccttggagtgaacactctttttcaaatatggtgtctcacaacaatttcaacatctatgatatttttgtcaaatgtcctgcatattaaacgggttccattgcacaaaccttcggagggattaatgtttcaaaggagtatgatgggacaattctttttgagttgtaattcatgaggtggaattccattgggagttagggtatttaaaaagtcttccattatcgattactcagtattatctattgtctcatccttgttgtaatagatgtgtacttctcctaggaaccttcctattaacaacgaatttatctcatcgacaaagctgttctttggtgtgaggatagcacggttcatcatggtagacacattatctggatattgttgaatgttgtggaaaacgt

SEQ ID NO: 47137 - DNA, 1071 bp, Cannabis sativa
  modified_base (178)..(181): a, c, t, g, unknown or other
aaaaaaaaaaaaaaacgaaaaacagggtattcacaaactcaaaattgaatcaacattaattaggagcaaccagtatttcacatcctcagttttcttaatatttatatctatacacacatacacattatgaaacacatgaacactgaaagtgagaaacaaaaaaaaaagagagagagannnngagagagagagagatagagaaaggaagtacgtaccctataaaagtagggcatttaagctcaagattctgaaaaaggaaaaactcaaaccatgttaagcatagctatttttgtttagatgaggttgttcagagaaatataaatacagggtgagagaaagagtgagtgagagagtgtgagaagatgaccatttacttgtctttctttttacaaaaacgtaagaaaggtcattacttgtggggtctgctaagaaaaaggaagctactataatgtgtacaaaagcaaagcacacactgtcataatcataaatgcatacataactgtatgggctgtagttgttgatggaaagcacggcaacggcaacggcaacttaaccaaccatcatctctaaacggtgcgttgcatatcaacgaaagagaaaaaaaaaaaaaaaaaagcacaaacaatatcagtgtcgcttgttagagagttcgctagagttctatgttcttaatatgtggaaagataatgagtcaaagttaaaaaaatacttgtgattcgaaaaatagtgaatcaaaaagagccatcaaaaatctaaaaatgttaatctaaaaatattagaatttgggataaggtgaatggagtttcatggagtagctcatttctcttatatattatattatattttcataattagcaatgtggaactctctaataaaaaaaatagagcaaaaaagagccacgtgatcgaagatagtgagccaaaaaaaaaattatttgtgatcgagttgtctaaaacagcacattatttatgtgtaaaaaaattagaacatatataaaatgtagggactatttctcccaatacctaagtgatagggagcattaattgttgtattttagcacaaaataagtg

SEQ ID NO: 47138 - DNA, 1927 bp, Cannabis sativa
tgcattaataaatcatcatcttttattcaaaaaaaaaagtatcatgttgacatttccaaagttgattactccctttcccctagaaataagcaagtaactcaagtatacaaccccataaataatgatgtacacttgggggggaaggagatgagtaggaagtgtatatttctgaataatcaaggattagacacccttgattgacaatgggaaacacgctcctccatgcaaaatactgctaagccaaaagaggtctcgaaagacactcatgacataacgctgaaatgagaggacgcctctcaagagtaagtaaacattttccaatcaagagggtagcgcggtcaagtactataagctccttcccatctgggtaaaaggatgaagaaataataagaggtggagactgctcaaagacccatactccgtcaatgtaaaacccactagccacatcgaggaaagatgcctagccaaagagtgatcgcaagatatgctcaaccagcatcgcaataaaaaaaaaaaaaaacaagtccaaagtagacgattcacttaccaaagtaaggagaaccactcagccaaagagccagagccactcgaccaagtttgattcccaatctcagacatatataaaataacggcagaagttctaaagtcatccaaaaatataaaagaataaaaaataagaaagtccctagagtttccatgaatatggccacaagaagaaaatcctaatggttacaattgctagacggggctacatcacgtcgatggttgcctcggtgtgccacgatcgcatcaccgcactcagccttaaaggattcaaccatttgtgcagcaaaggaaccaagaatgctatagtcgacgtcagggttttgtatctagaccgcgtatagcaagcatttaatcttgtcctctgaatcttccttgttccttgctttaatggagcagaggcagtgttgcagcttgtcaatcctagctcaaaccctctttgttcgaacgtgtgagtgtgacaaatacctctggcaaatggagagggaatcctcaagttgctgggtaaggctggccactgatatttactcattagttattaaagcttgaagacgattcacttcctcttaaagatctttgaatttacggttggactcctctaagttacttagagcttgttggaggcgcaaaaggtctccctcctcaagagattagagctaggagtatattacagatgcctgcaaataaaagtcatagttaagaaaaaaaaacatcagcaagtgatgaaaataaagacaatggtaatatgtgctaacccatatgttgcatttgagagcagtctcttggtgtccctccaccgaggagttgtgcagccaagtctagtcaaaaggggtaaactcacccaagtgccggttatacccactaaagcattggttcatctgggattgtgaccacgacagctcatcagagccatagggcaggtgggaaggacctttaggcgagccaaatgggttctggaaaagctgttgaatattgaaggcatcaaatgatacgttagaggcataatccgagcctcccacattcacctccttctgtacctgactgtggaggccaatgcccgatgaaggaaggtacttgttaggcccctgcatttcaacatcttttaatggatcaacaaaaagagtgggcttcgactttgcaacatctccctccccctcatcatggccccctaaggaggcatgtcgggacatgcgacgagcatattcgttggtaggatatcgaaggagggcatgttcgactaccctaggcaggccatagtctttttacgacgacacatatagctgccaatgatatgcttggtagtcaggccctttttgagcttggaaaggagggatgggctggcttctagagcggggttgtcagaagtgcaggaaggaggtacacc

SEQ ID NO: 47139 - DNA, 1439 bp, Cannabis sativa
agtgtataatatatatgtttggtcagttctcagtttaatcggtcggtttgtcattgacactaaaaccgaccgtgttaagacagttttaaccgaaggtggttttttcaattttttgtttttcggtgttggttttttcggtgttcgaacggtcggtgcactcggtttggtcgatttcttagattttttactcacccctagtttgttgttctacataaagctattaagcaactaaactgatttcacacactacccattgtctgtgaacaaaattagcaacacagagacacaaatctttttggcacataaccaatcaatgatgtgcaacaatatgatgatgacatcatatcacaatcaatcagcacaggcagatgtgcaacatttttgtaacaacccagcaacaaacaaacaaacaacgtactatctgcatcaacaattggatcagttcaagatgatactattttggtcaatactatgacattaacatcagagtcaaccatacaacaactagaaaacaacaacaaaaaactcctgcagaagatgaacattttgatttcaccgactatgcaaaacttgttgctgcagaaatggtacaacaacttgaaaacaaccagaaagaagaaaaagaagtcaataatacagaagtaattatcactgataaacgacacaaaataatagaaaagggacatatttacaaggacaaagatagataagtgttctatgcttataatcaagaaaacattttaatacaaagtagtgaactcttgctctaaacaggaccgtctcaaatattttagaggtcatgttctaattttaaaaagtaggccctaacaaaaaaaaattataatttgtaaataatatttttaaatattttcatactacaaaaatatattttacataattaaacatctaaaaactcaaataactttattaaaattattattatgtttaatacaacttcaaactaatacaattaaaaagcattaaataaggaaaaaaatcatagaaaaacctttttttttttatttggcatgacacattgatggaaggttgggttaaaataattctgaaaaattatattgggccttgtgcattagctctgtttgcacatgttaatggtcggccttggctctaaataatacaatattgtttgtttggactcaaattacaaatagagtttaaaggcttcaaaaaaatagaaatacagaaacattcataataaggagttatcaagaataacacacatgtgcagttccaataagatttagaaatcaacgacaagcaactacaaagttgatagcaaattttgtaaaatcaaaatttttgaacctgaaaataaaatgcagtcctacaaatataaagagagaaataaaaaacaaatatggaacaaagataaattacatgaaggcatgtcgtagtagagaacgagcataaagtcagct

SEQ ID NO: 47140 - DNA, 1897 bp, Cannabis sativa
aacaaacactataaacatgaacccgcttagtttgaagagagactagagttggaagacaatcggtaagagctctccaaagcaaattcttaactttagcaaatatactttttcccgaatataagtttctcatatatttagatctataaatactattgctcatactttagcaaaatatactttttcccgaattctatttttatgtataaaccaattgttgaggagattatttctctcttaactgatgttggtagtggtttttgttgtgtcattccgcgtgttgtgaatggtgtggcccacgcactagcaaagtatgttactagttttatagaggttgatttgtagacagatgcttgttctaaatttattagtggtcctgtaacagctgatttaatttaatgtgatacattccttccttaaaaaaaaaataaaaaataaaatacatataaatgaaggaatgccatcttcataaatgactattgtattataactcttttttaatataataatattttaacttaaaaataaaattagcgggacaattagtaaatagacaattattacataataaaattgaataaaattatatgaaatttcttaaattaataatttcaataattcagtattaaaaacataatttattacatggaacataatttgttgcattttattgaacaatattattctatatagataaaatataaaaatattaaacaatataaaaatattaactattacactcaaaatagaatattcaccttagctattgttatgtattaacgttgtgaaatagttaagagaacaaaagtgaggtggccatttttgattggatacatacgttggcaacaatctcacatgttagctttgtttgtatttgactcctatgttgaaacaaagaacgaggaatcattaatggctatggcgatgatgatgatgatgctatcagtctcaacccccaaactcaatactatctcactcaatttccgacgattaagccccaatcctccaaaattgaagcccttctccgtctccgtcaagaatattgtacacgaattcgatttcgaccccaaaatcaaaatagaagaagctgtaactcctccctcaaattggtacactgacccttctttcttcgcccgtgaactcgatcgcgtcttctacaagggatggcaattcgtaggtaaaactaaataattatgcctttgttttctttgttattatttattaaatataatagtagtaattattttgtttaattctcaggatgtagtgaacagatcaaagatcctaggagctatttcactggcaggtgagatcgatcgattgagttttgttttgtaattgttttggttgggtgaatgagttggttgattgggttatttatgacaacagattagggaatattgaatttgtggtgtgtcgagatgataatggaaaggttcatgcatttcacaacgtttgccgtcatcatgcctcaattcttgcatatggaactggcaaaaagtcttgttttgtttgcccttatcatgtatgtatgtctgtcactataattaatttcaatttaattatgaatttttttctacggtctttttttatttttacactttaaaatagtttttcttttttgcatttttacaaaattctatatagaaacccatattgtaactagcgctgcaacttaaactgcaacaaaaaatcttatagaaacccctattgcaactagagttgcaaccactttaaaaactcaaacggtaaatttgaaataaaagttaaaaaaatataatatattgagtaattttcttttttttttttactatagttttgaaatatttgcactataaaaaactgctacttttagtgacaactttttagttacaacatatttttttttgtgactaaatgt

SEQ ID NO: 47141 - DNA, 2368 bp, Cannabis sativa
ttatgtgattaaaaaattaaaaaataaaaatattaccaaacaatactataatatatgtgtttattactttattttttttgatacaacttaatatattaacttgatgattattatatattatgatgttaaaattttaataagattttttttttgttttattttgtgaaatattttccatttataatatctttttcacgtatgatgatttttttataatattaatttattttataagaaaaaaaataaaactttattagaataattacttttattattaaaaaaattaaataaaaaatatcaaaatttgaaatttgatatagttttatgacttaattattaaatccgtacacgaaacgcggtttgttttctagtatttaataatgatgataatgtaaattgcttaaatcgcaccacggacccctatcatattaatgcaccaaaatattaacaagtttaatatttgtgtaaaatttgttcatcatttggtttgagattgaaagtacttccaaagagattaaggggtgacatcatggctaacaacgaaggaaaaataaaataaattaaaaaaagaataaaaaaattgggttttcaaaggtgggttattctgaagaatctgctcagtgatgtagaaaattttttgtgagagctacggtcatgtttccatgctattaataaatattgcagagtataaagaactccgttgaaaatgggacacaattatttggacatggattattttattaacacattctcatgatgtcattaaaaaagtattgctgcaaactttcttagaagaccaagtgattagaaaaacataagttgactgattgtagctaagcataaaacaaaatgaacacactcttgtatagagagcaaggtctaacaattgattcgttcaacaaaaaaatcaaatgaaagcgtagattatattggaaaaacgatgaaaagaaagcttgtggtgcttctctcttttctggtcattattttcttggttgaagctaagattgttaaagcagagactacgaaaagaagcaaacatttcgtgctagtccatgggtcttgccatggaggttggtcatggtacaaactggtgagccttatcaaatcatcgggccacagagtgacggcgctggacttggccagttcgggagtggatccgttgcgggcaagcgaggtgggatctatgtatgactacttgaggccattgatggatttcatgaaaggtgttggtgggagtagtaaaagagagagcattattatggtgggtcatagcctcggaggactggccatctccaaagctatggaggaattcccgttgatgatcgatgtggctatttttgtcaccgccttgatgcctggtccctctctcaatgtttccactctctaccaccaggtaattctttcttttatggtctatgtttttgtttttttaatgatcatgtatgatgtatgttatgaaaatattctataatatttttaaaaaaatcaaaatataatttaacacttattttgtttttttaatgatcatgtatgtatgttttttttttttttttttttaatataatattctatgtttttttttttttttgatgaataaaggtattgtgaaaataaaaacttatcaaaagtagttaaaaattcttaattgttgtagagcaccccaatattaataaaaaaatgacaacataataacatgcataaactaaaaatattcttataaaatgttttcataaaatttggatggaaaaacaatgttgaattaataatttagtttcgtatcatatactcatactattatttttcaatctaactttttaaactcttacatgtaaaggtagcatatcatgtctttataaaaaaattataaatttgtagaacttctttaatgaatataataattttttttttttgagaaaatttatgagtttcatcactgcttgtattaaaactattttttcttctttttttttttcaccgtgtaaacttacttgtttggccaagtaaattagttactggaatgatggctttctttcttttgtgcaatgaaatttcatatttttctaaaaaataaataaataaaagagttattgttaaattcctttacctttgtgtttttacagtcattgaaaagttcagatgctcaaatggacaatcactacacatacgacaatgggccaaacaaccctccaacaactttcattttcgggaaatcgtttctagcatcaaaagtataccaaagaagcccgtatgaggtaagtcaactttcagattttattcattttctaaaaaaaaatatttacacttcaaaatcttataaagacactttattttattattatttttttttttgagtcaaagtgaaaatttt

SEQ ID NO: 47142 - DNA, 1119 bp, Cannabis sativa
aacttcgggctaataggaaaagaactagacttaggcataccttttgaactacggcccacagaagagttgactcgcttccaagtcttggtcttttgtgctttgataagaggttcaaaagtatgttggaatgcatggctaaaagataactcttgttgagatgagtgatgcaaaattccttttcccttattattttgttgtatccgctccttactggggcccaccttttgaatctcatcaatactttccacaatcaacccagccgaggaagcacccactgcagctgactcacgtggaagcacctccttgactttcaacttctcgggtacaccacttgactcatatcctccacacaccacaggcggcacacactccatcttttctttatcacctcgaccaccttcagaggaatgaacttcatcgttcccacatgatgaccgaacccgtaactccggatcgccaccgcttccatgttcagcaacaacaccattcaactcttcttcatcacgttcccgtctttccaagatagaggttggagccaactgttcctgagtaaggcctgagaaatgtggccgagacctctccaccgcagagatgattttcgaagcttcccccatggtcacgatcggcctgttatttggagattccgcacgcttcttgttgaaccgtagactatctcgaggaggtgatgctagagcacacaatcatgaaccgaacctcccaccatcaaaccgtgggttatctccagcaaaatctctaagaggacagtctaaagccttgtggccaaagatgtcacaatcatagcaaaaatcaggtaagtgttcatattgaaagaggagagaaacctcattaccttgatcatcaatagccaccctcaatccccttttaagaggctcagtaatattcattcttaccctcactttcatggtaccattaacaagcttaatatcttccagcttaccaatccgctcaccccattctctagcaaagagttccgtcatacgagctaatgacacattattgatagagatccaaaaggaagtaaaatcaaaattcatcttagaaacttcacccagacccatcggtttaacaaagcaaatcaattgtttatcaattgtccaa

SEQ ID NO: 47143 - DNA, 2173 bp, Cannabis sativa
  modified_base (497)..(498): a, c, t, g, unknown or other
actacaagtgagatacaatgatgacattaactttaaatgtagtagtgactataagtgagatacatgacagttattttgaagttttatgatgagttttctgtaaatttattgtctttttttttttagttttagatctatattttgtgtgagaatggtttaatttttaatttttcttcactataatatacctttaaagatatttttgtgtgtgttttattttgtatatgagaaattttgtgtaagtatggtttaatttttaattatttttcactatgatacacatttaaagatatttttgtgtgtgttttattttatatatgagaatttgtatactggttttttttaataaaataattctttaaagtttcctatatattttaataaatatatatttttttaatattataaataaacataaatttaaaattatttgatatgattttaattttcaataaatattcatacatatctctcttttatatctattctatataaanngtgcctatataactgaattcttgatttatgagaaattcataggtaactttttttaaaaaaaaaaaattctattaataataataaatttaacggagttaactattcacattaaccattcaaattcaaaaagaaaaaaaaatctacttttaaaaccaaaatattctaaaaataaacaaataaatttataatatatcatctcatatttgccattaacgaaagaagacaagaaaaattcatacgattgaattttttgaaaaacaaaaattctaaactagcttctttttttgcgatcaagaaaaaaaaattcttatgattgatggggttttgatcatgatgacatgacgatgacaggtagccttctcggaccaggcaagttccgacggtactaagtgacggtttaagcctttcgcagatcgcacagaccacatgtagccttctctgcccgtccaactaagcaccaaatcaaaatttcaattcgacaatgaggttcacataaacaatgggagttcatagagccgacagcaacgactaggattgatcagcgttcactggccggagtcgatcgagattttttttgggtttgagttattaatatattagatgtgattttatggttttcaatatcattgatttcttatgatatattttcatttatattatcttaaatttgtgttttctatgttttaagtttagaagatcttcttcaaaatctctgccaacgtagtgaattggtgggtggagtcgtttcagtggccggcattgcggttgtgcaagcaatgaatagtaattagactgatgatccgcatttcatgccattttttcatggttttccattaattttttttttttttattattattacttaatgattttatttgtcaacttttcaccttctctatttcattttataagggctattaggttttctccaaggaaaaaaaaagtcagctatttatttaaaagtttttaactattttaatttttttttgttttaataataatattatttaatttcattttatgtatggaaacaattatatatgtttatttaatctctcgacgttttgtttcatctgtggaattttgggtcattctgaacgattttgtcccaagctatttcatactcctgcccatttgattcagaagccatacgggttgttcttgaaagctaattctaagcgcgcgtctgagaaaataggggcgaagtggcttaggtctggagctgctgggggagtgctcgagaaaggagaaggcagttctgacgttgtgactccggcgatgttcggggctggacagacggagacgatggaggaggcgattgaggggagaggtaatcgtgggctggcagctaagattgggggagtgggagttatggtgcgtgatttgagggaggaaatcgtggagggagattcaaatggtaataaggaggatattcatgtgattaatagcaatgattatattgcctattcggatccaaagagaaaaagggctgatggtaaaggggttcatggagtgagtgggcttgttgggaatatcggcccaagtggtggtgggccaatggtagatgttttgaattatgaagatatggaacaagatgggcttcgggtggagacgggttcaaaaaacgagaagttggcgggttctggtttccagacccgcctttcatcatgatcac

SEQ ID NO: 47144 - DNA, 1119 bp, Cannabis sativa
ctctctctctctccattttctcttcgtaaccttgaatgacgaagaactctgagatcaccgtctgacccccgagactaccacccttctcgacctagacccttcccgacccaaaccccgttcgacccagaccccagttggcataaagcccagttgacccagacacccctgtcctcgacccataccgttgagaccattgaaggacagaatcaaagagacactgaacgccgaagcaccaccagattcccgcaaacttgggatgtcgaccctcaaagattagattttgtagtttttatttttaaaaaattatttggttaaagaatatttttggttgattaagtttgattgattgttgtttgtattataatacactatcttttttggatttgtgtgagagatgatggtagttatggtgttttctgaccaaatgtgattgttgatacgtttttgatactttatcaatagattctcgatggtttctccttttacagttttttttgtcaattttggtagttattgatacattatcaatgatttatcgataggttgttttgtttggtcttaactttcaaaatttgataagtatttgatatttattgataggatatcaatttggaaggaatttcaaacttactaaaaaattcagagagtataatttggtacatcaataaaaatcctaattacccttaatttaattaaattgcttatttatactcataaatttatatttaaactacaatttggttttggcgggaagaagaagaagccaccatgagtgtccccaatgataagtctcccacatcttataaatatgtttctaacatttttaggtgaaagcataaatagagaaaccaatttgaaaaattaataacttaattatctataaaaatttaaaaagattaagttgaaataaacctataaatataacttataattcaatcattcgaaaaccatatattcaaaattataatcctattcaaaacacatctatagatatatctatataaatctcaactcaatattctaacatatttatcgatattgaatttttgagatgtgtttatcaccagactagccctaacgtaaaaagagaaagagtacttctaccatttattcactacc

SEQ ID NO: 47145 - DNA, 2396 bp, Cannabis sativa
tgcaattataatatacactgttatgatattttttggtaaaaataaaaatgtggcttatagtagaaataaaagtgatgttccatcagaattgtacaatatatattcacattggaagttggttataattgggaatcatatatgtaaaatgagctatatatatatgcacaggacagcagccatatatatggtccaagcaggatatgtgggccctcatcactctcactactattccatcgcccttaccagccttgaaaggccaatatcttcttcctctcatacctaaattatactgtgtgttctgaaaatgacattaattatcatgtttcttagaccaatcacaatgatcgagtgtagattagactactaattctttagatttctgttttgattttttgatggaaatataacggtatttcaccagcccaactttgactatttctttcctttttttttctttatataaaaatatttaagggagtttttcattttggttaaaatattttgaaattgatggagacgttgatttatgttattgattttcaaacaaacagaaataactgaaaaacaatttgtaaaatataaattaaacacacaacaactttgttccaactatccaatgtcctacctctagttagattgagaatgagaaccttctactaccaaagagaatcaacacaagttacatgcagggtggcggcatatatatggcaatttgtcattggtaacactcaacttacaagttattttttattttaacaactcagctcatgggcagatccacgaacggaaaacagtccctcacagggatacaaaatgctagagctcctttaattgagtgtttgttatgggagtgttagaattagaataggtgggaatacgagttcttcttccataagtttagtttgagtcccacgaagttttggtggataatataaatttttttgtacactatagttttacattccctcctttcagccacacctactatgtcttgccatttattaattcatgatattatataaaaattatatgggaattaatatttaattgtatcaaaaaaagatgttaaacaccctagtatttttttagcatttatctaaaagaaactctggcccataattttgatgtggaaacagcaaacccgcctcatagaaaactcttccctctcgctctcaaataaagaagactttctcattttcatacataaatctctcattaaagtataactagcaattgactaaccatatatattatagaagatataaacaatacaaaccagtcataatcagttccacattagtctcctcttgttaaactaattttcaattctgttagtctattcttatgtatttaatttacttaattagctagtcttactgctatttcttaggcattagttaacacgagttttactcgtaaggattcttatatttgcccatataaagactgtacatatcaatgagaaaatcgaatcactttttcaaatcttatatacattacattaaattttttaggatttatggaaaaaagaaacatatattatctcaaatccagagcacagcatgcactagaccttgtcacttgtttacaaataactaatggcaaatgctaattagtgattcgatcattttaaattagcgaaacataattagtcaagaatgtaagttttacacagtatatatgatggaattttgagtctttctacaaataacaggtttcttatcaaaatttcttgcaatatggctgtaacttgtactgtgaataactgaattaactgatatacatagtacataaactgaaagcgatcgttcaattgataatcaatttgctgttctggaaccacacatgacaaactgtgtggtttatacaaatgatctttcttctataccgcaaaaacaataaccatatgcaccaggctttcctatttattttgaaggaccgcataatattaatatgaacaaatgtcaaatatctaagaccatcattgcctcaccaacccatgcatactattctgctcatcaaagtcttaagcatccaatgcatgtaaacatattttgactagaccgtttatgttcctcctcactagttagcacctccacaaatctattacagactaacctgaacaaataacagattaaatccagaagctcatattgtcaaaaagccttcatggttcaatatttcatctttcatcaaatgaatatttcagaatcctgcagttgaggaaaagaagggatcggcctgatattttaataagggcagacttatagagcagggtcacttctacaattatatctataattgaaaatgtttaaaccaatgatataagaaaataggaaacttactagggattggacaccggagttaataacggtttgtttaagaagaaagcctcc

SEQ ID NO: 47146 - DNA, 1301 bp, Cannabis sativa
attttagttcagcaaaccttaaattgcggatcaaaaacaatcttcgaaagtttcttatcccattttgagaaaggtgccacgtctcgtaatctcgtttggaatctgctagctaccttacctgattgtggaaaaaacatcaaacaaattagtattgaggcttacgaacaaattttctctacagtgatactataacaaaagtaaacactttacactgttaaaggtttagcaagaagaaaattgtgacaaaccaaccaccatttttctgtaaccaaaatataaagataataaagttgagaatataattatacaactaaagccatgacatgtgaaggaaagatttttcggagattaaataactatataccaagacaacaaataattattcaaactctatagttctacatatataaaaaaaaaaatatattttgacacaaagacaaggttatatagcatattaccttttcaatttaagaaggaacctatttaccctaagtgatcaaatcttaaaaaaaatcgtagcatctaagtggataaaagaaaaacaaaagggacgaggtaaaaacctttgcacttgttttccatgcttctatattttcaggagagagttgatgtatctgatcataagattcagcagcccttttatagtctttaagttcaagataaagtgatgcaatgcagtcttaattgaatgtctttagggtctgctgtaatttctttcgaatgacaataatttgcttgatcaatatctcctctttctctgaaattgataacaaataaaaagtaagttttgttcagataatttgtcaacttataatctttttcatggaataataaatagaaaaaacacattagctagagtgagaaaaaaaaaattacaaaaaaacaatgattctagatcaaaaacttgaatatggagcttaaataattaatttaaacaaatttttaaccccctctgtaagtggacacgtctttccttcctctcatatcaaatgcaacaaggtaaatagtaaatctattctttaatttccttgctagattatctatcaatatattcctatatcctcttttcttccccaaattaatagacacaatatctttcataaatttcttaggatgacactgaagataaatcgattcagtaaaaagtccaactcttcctattcataactatttgaaaatcactatctctctagccataaatcacaaacacaacatatatcactctgttcaagccaactcattgtttagtactctactctgtaaataaaataataaataaactcatgacaggaaagcacaag

SEQ ID NO: 47147 - DNA, 1075 bp, Cannabis sativa
aatttttgaaaataatatacatagacaaaccattttctgatacaaataaagaaaagagaattaagcctatgtaactaataatgtctagttaaattatgaaaggaataccaatggcttacataaaaagtatttgattagtgttttgctaattgagaatctcatttcgtataataaatcatgagcaccatcacaatatgaacaatctttaacattttcatttcaataaaaaagaaagtctcaaaatcgatgattgaaactcaaataacaacttttgaaatttgagaaataataaaaaatgaaaaatacatcttataattttgctatccatgagagtatgtttcattgagttcaaatttttattagaaggagatccaaacattgtgaaacatcgccacccaatgctcctttcaaaatttaaatcaacaaagaaaaaatattgaaacttttgataatttctgaaaaatacaattgcaggcacatgatctcaaataaaaccccaacgaaagaaaaagcatttagaaaaaatacaaacgcacctaaatggaatttgaaagacaaaaagagatactattgggccgatggtatagcggtgcttgcaatgggagtagactgcacaccctgataaccaactaactgatgttaattaaagttagttagtttcagtttgttttttgtcagtttctgttacttttctgttaagttggttttgcctgtaatctctgtatatataaacgattgcttctgtaatacaattgattaagttttctccaaattctttcatgataaacatactctgttttctctccctttttcttctctactttaatttttcatggtatcagagccattgactaacgtcaatggcttcctccggtgaccactcgtcccaagctggagctttcgatcctgtttgtgtgccggctcagtcctcctcgatggcacaaaattggaatcctttctcaaattctctcactgcttctctaactctgaagtttgatcgctcaaactttctttcatggaagtcgtaggtcatacccacggtgatcggtcatgatcttgatgaattgctcttcag

SEQ ID NO: 47148 - DNA, 829 bp, Cannabis sativa
gctaatatgtggaaataaattgtgtgagatataagatgaatgggctactcttcccattgccaattggttttgagatggaaccccattcatcttattccaaactttaacaaattttttatcaaaataaaacttaataataattcgataagaaaatattaggactagactagttatatttcctttttacatatgttcatactaaaaattttctttaagtttgttattatattaaaaaaattgatgaaaattaaggtagtactattttttttttttttggtaaatgagaaaatttattgcccaaaaaacctttacaattaccatttagctgagaatacttaacttctgaaatcgaattctatcctctctttataagttttctctataaaatgagaaaacttttcacaaatatcttttttaattctatttataattatatgaacactatacaatttttgcatctaaaaaaagtattccttacatcccatacattgtatattattttatatatgtcattctataattaatattcaaggtctaagttattatttaataaataaatattctactaagtaactattacaaaatataaggttcaaaatagtttaacctaacttaaaaaaatagtttcttagcatttttttttggagagaaaatcaaattttttcattaattaagaaaatcagacaaagtccattacatgaagatatagcttataaagcaaaatcaacaataataataagcataacaagccgtttacaataaaaatgaagaaaaccctaatatcaacatcctcaacgatagatccgatgcaataagccaccaatgatca

SEQ ID NO: 47149 - DNA, 1720 bp, Cannabis sativa
cagctccaaggacaactcattgtccaacccggacaactgattactcacttcaggaagtgagcggtcaaggtagtactggagcatgtccttgcctttcttggcttcaaagctcagcaccacgacggtagaggaggccttggttggaccagatccatctgagctccccccttcggcactttttgacttggatactttttgggatggagggtccacagcaagcatcacctcctcggagtggttgatcactatttcaatcaggcccttctccttggacgggaccacgtcacctctatatcgtttggtcagggaagtcaggctcgaactgtcaccagtccttttcttcagagcttggagcaccttttgagacatggctgcacataaacaagacaagacatttaaaggaaaatataatgtaaagcatgtattgggacaaataaatataagttaaagtaccttgcatgtgatcaggagcattctcccgaacaagtaaggacaaagtctcatcgtccgaagaatcttcttattcctggtttctcatgatggcctttcctttttcctccactggggcagatagccagacaggtctatcaggttccctaatcctgatagcacactcaattggtgcctggtcacttggaggaacctttttcctctttttgctcaatttttcctgctcggtcacttcgtcttggttaggatttggcttcttccccttcgtcacggcccttggcacaacatctattgggaagagtttgtacttgacaaaattggcctcagtggctaggagagcgatgtttcgagcagcatccagtagttgaagaattctttatgccctcttcctgagccccaatgtgaaggtaggccagcagtacgacggtatctactggaattgagtgtggacagtgtcaattccctagacaaagtactattcatccacaaagttccctatcttactcaccccggagtctacggtgcccgtcaactacttctcctcgatttgagatagtagaaatatcccaacctgctcttcttgggtcttgacttcagatcaaagatccagttggtatcatgcggggatggctcaccccatccttgtgaggcatagaggatgaacatggtggacaagtacttgatgcccttgggagtaaactgcatcgagaagatgtggtagtaattcgcaatcctcctaaagtacagaaccaagggtaacatggaaccttgcttagtgtgagtgcccgacgaagcgcagtaaccctcccttggactggtcgccaattggttaggggagggaaggaagcattcgacatcccctaagtaaccatgcttgagcaaattcttcatcttcgccttgttcaccatggatggaggagaaacccaccgagctcctagtatgacataccttctcagaggaacaacctcggtgtattcctcagtgacatagtcttcaccggcttccaggacctccccggcctcagacacaggtcggccctcttcattaaaacaaccaaagggcaaccttcgagctgcaccttcctcctcagctttaggagtatcaggttagacctcgccctaatcctccacctcttggacttcaacgtccctagcaatgtcttcttcctcaaccgtaggtcgggcctgttctgcacacggcattgtggcgagatggtctatgtgtgggtcctatagtgaagactttcgcacgatttgtttagtttgtgcc

SEQ ID NO: 47150 - DNA, 1530 bp, Cannabis sativa
  modified_base (52)..(64): a, c, t, g, unknown or other
gtttattttcatcgttttagaaattcatattaggatgttaaaaacatacttnnnnnnnnnnnnngatcctgataaaatatattccaacaaaaatagccaatgtttatgagcaatttacgccctatatctttccgtaatgtgctatataaagttatttctaaggtgttagctaatcggttaaaagaagtgtttccccagattatttctcagaaccaatctgctttcatacctggtcgcctaatctcagataatattatgaatgcctttgagttatgcattacctcaaaaggaagcataaagggaaggaagggtatatggcactaaaattagaccttagcaaagcgtatgaccatgtggagtggggctttctccgtgccatgatggggaagatgagattcgatacacgctttgttgaacttattcttgctacagtggactcggttagatacaagattggccatggcagtcatgaattaggcctgattgtacctgagagggggatctgtcaaggagatcctttatctcccaattggtttctaatttttgcagagggattctcctctttgataagaaggtttgaacgtgatggaaggttgagaggttgtaagtttctaatggtgcctcggttatctagcacatgctctttgcagataatagctatgtttattgtcgtgcaaatgagaaaaagacttcaaatatcttacatctcctccaactttttgaggctgcttcaggccaacaagttaatttcagtatgtcctctatcttctttagcactaatactcctactgatgtgcgtcatcagttgtatgctttgttgggaatgggaatggctggtgagtgtagtacttacttaggcctcccatgtactatgggtaggaataaagatgccattttaggtttcttaaaagagaaaatgcataaatgaattcaaaattgggaaggtcgtcttttgtcaaaagttggtcgtgaaatcttgctcaacacggtggctcaagctttgcctagctttgccatgtctatgtttctgctaccgttgaaaacttgctcacatcttgaaagcctaatgtctaaatattggtggggctcctctccaaataaatccaaagtagttagttggtttagttggagacgtctttgtaagcataagaattctagtgggctaggatttcgaagtttgagagattatattttatttttttgtgaaatttaattattttttagtgatattgtagtgtgtatagcttaaaaatttagaaaatatacttagtatattttgaattaaaattttgattgaaaaaagatttataaaattttttatagcattttaattttaatgttaatgtttaatttgttaccagaaaaaataaatgtaatgtagtttaggtaaagaaattttttagtgtaagtttatttatttaggaaaataaagtttagtatactttattataaatttagtgtagtttaggtaatgtttggttttaaattttaattttacaaagtttatttgatatattgaaataattattc

SEQ ID NO: 47151 - DNA, 2307 bp, Cannabis sativa
atatatataatattaaaaggagatgcagatgtgtgaagtgtgtgggacccaatagagatggttccgtgagagggagagcatggggaccacgcactggcacgtgaaccattaactgcacttactgacacgtgtggccacgggagggcactattttttgcagcataacgtacacgtgtcatcctcaatcatttattagcttcccacttaggaacacctctctttctcttctcctatcaaatctcgccacgtgttttatgtttattatcgttaccactttcttgagaatatcgtaaataattaatttttaatgtttgatatataatttaaattgttaaaaaatattattgacgtctaatattttatttattattatattattagtagtataattaagtattaaattttatgtaatttaagaaaataacaaatattattaattaattgtaagatgtaacttataaaaggtgttggacaacccaatagcaaagttcttttttaattgaaactaatatttttattaaataaaatatattcctttaattttaatgttagtttaggtgattttaagattttaattaatttgttttgtaaaatttgaataaataatgtataacatttttagttattttatcacagaaaaataaaataaaacattttaggactattctttactttttaaaaaattagaatagtttataatattaaaaataaaatttaaatattttgtacacgattgcttattttatatgcataataaataattaattgaactttttttatttgatgaaaggggaagaattctcactaaattaaacaactccgaacaacaaaagttaaaacaagctcagacctgaaaatattatcagttgtttacatgtacatcttttgaagatattttcttgctacctaaacaaccaaaacgaactttaatgctctacttaatcaactcacttacatacttaacagtataaaaattatgctaaaaaacacaaaggttttcatttgcacaattaaaactaaacaacaatcaaaacctaatactataagtaacgatcgagtcgagaccgtccacatacacaaaatcaaccaaaatagtaaaacctaactaccgatgaaaatatatactctcaaggtcggctctctgtgattttttttagtcaaaaataaaaattgagacttctgcatataaaagatggagatgttgaaatttgaactcttcgcctccaagttgttaataactaactcttgttttaattatttttttgtcgggggcctaagcggccgcctcgtctcacattaggagtaatggcctgtatataacattcaaattttttaaaaaaattacaaataaatttaattttaaataattacaacatatatatagcaaattatgataaaaaaaataagaaagatcttagatgctaaaataaatagggagttatacagtttttttttttaagaataatagataaaatttatactattaggtcatgatatttaataagtatttatatttatgtatagatacagtctttcttaatttccagctgtgaattatatatatatttaatttataatagtttattttatattgatcttgtatatttatattgtatatacaaaatatatataaattaatattaattaaatgggtatacatcaatcaattacaaaagtaataacattattattattaattgatataaaagtagatttaataacatatagatatatatatttataaattagaaaacaattaatttcgtaattaatgtacgatgcaacatagtacatattatattaattgcatataaaccattatattaataaggtttcatagtttcatcaaaaaaaaaaaaaataaggtttcatagcagaatcattgaagctggttccaaatgcatgatttttgcaatgtttttcctgaaattgttaaaatttgtggaatcatcaaggagacactaagttggataaaaggcaaccgttggcataatgtgtcccttgaaaccgactctttgttggctgttcaaggtataagcagcactacacaaatgccatccacctttgggagggttgcttgggattgtaagaaactcttgtctgagttgggttctatttctttaaagtttgttaagcgtactgctaacgaggctgcgcattttctggcgcgtagtgcctgctattccccaattcgcgtattttctcataataactctcctgaagagttgttaaacacttgtaatggctgattcactttattaataaaatgctatactttcattcaaaaaaaaaacagtaaatttttca

SEQ ID NO: 47152 - DNA, 1231 bp, Cannabis sativa
aattaattaattaattaatcataatccaaattaataatagcatgttaggggcactgcacctggcgcaaccaaagccctgcatgtggcactctctcattttttcttatttaaattattaattactttttattattaaaattattaattaattaattaattcaaattaattttgtgccccttccttctctttaacctaggtgcccccctatcatatattggattaatatttttttttaatatataaaatatttatgtacacatttttagtctcccaagttgatgagtatatatttgaatatttacttaaaatgaggattagagatgaacatgtggaagaacttaatatatgagatcatgtgtatatgtgtatatgcatatatatatatatataaatattattttataattaatatgtagataaatagttttattccttgattattatctaaacaagtgttcctaaataagccacatgaattttaattaattaatatatattgttaaaacccaaataataaggtggtaactaaacactctccacatattttgctacttattattttattatatttataatagaattttgctaactttaattaattaatattgatgcgtatatattatgtatgttctttttgtgtgtgtgaaagagtagttgatataattaatttgtagatttgtaatttgattaatattaatgaagattgtatatatccactatatattccttaatatcaaaattagtatatatatgttaattaaatacgattttgttgttcaaatcaatatttagtccttaatttttcataatgctttaccatgtgcaaaattatactttattttagctatatctagctacttaaattgggttgatattttttagcatataatagattttttagtaagtgtcatcactccataaatttaatttgtatattaatttacactttaattgttatttggattttgggttttaatatggaaaaaaataaattattcctaatagttccatttaaattacaatgaaaactcgagaacattttttattttacaaaaaaaataaccttatatatacgtagtataatttttttaaattacaaaaattatatttaaaaaatattaatgagtaaaagcctcttgttaaatttcaaaaaatacattgttttttatatatgatttttccatcaagccttattttttgaaaaaaaaatacatcatatatcttaaaata

SEQ ID NO: 47153 - DNA, 1485 bp, Cannabis sativa
ctaactacccaacagtgaggactgagaacataacagaaaaaactaactttccaacaaacttggaacttgtcaaaggtcaacttgtttacttgcttggattacaaaaacctacaaattacctatacattgtggatctaaacatctcttctcaaaaatgcataaaatttcttttcatccaaatttcatatattgcccagccaaggtagcatgggattccgcaactttagagatttcaacttagctcttcttggaaagcatggttggaggttcttaactaggcctaattctcttgcttctcgcatctttaaagcaaggtattaccctagaggaagttttttcaatgcggaattgggtaataatccaagctttgtgtggcgtagtgtgtgggaggctcgtgatttagttcgagagggggttagatggtgtgtgggtgatggttcaagtatcaatattctgcatgaaccgtggcttcccgatccttcccgatcctaataacccttatatcattacagaccaccccgctctccaatttgccaaagtgaacaacatcattagtatggatggtcaagattgggatatggatgtgctaaacgatctctttgtggaaagagataaagacctcatactcaaagtgcccattaaagttggtattactagtgatcatctttgctggtccaaggaaggttcgggtgagtactcagtgagcagtgcgtacgaactgttgcaggaaaaaaaagggagaggcgttgagggggctggtacagcgttttggaagcatctctgggcgttaaagataccaccaaaagtcaaaaatttggtgtggagggctggtgttgcttgtctccctactttgactcatctggtggtgaaaagagtggctgtgagtactctttgtcctctctgtaatgaagagccagaaacaatattacactgcttagttacctgcaattttgtgcagcaggtgtgggacagagtgggaatcggtactgtggttgcggctgggagttcatttgtcgactggtgtgctgctgcctttcaaaaccagtcgactgaaaccagaaaattgatagcaacactgtgttgggcgatatggggagcaaggaatgatcgtatatggcagaaaaagatagttggtgcttcgactatagtggcttcagcaaagggttttcttgatcaatggcatattgctcaaaagtctcaaattgagacatcttggtctggtttgcaggctatggatgggacggagcaatgggtcaaacctgaggaaaatagtatcaagataaatgttgatgcggctatctttgaagaacaaaaccatttcggtttgggttgtgtaattcgagatcataatggttttcttttgactgctattacaaaactggttcgtggtgttgttcatccaatggtggctgaagctatgagcttccgataggctcttagttggctcaaaacgcaccaaagacaaagggccatcattgaaaccga

SEQ ID NO: 47154 - DNA, 1991 bp, Cannabis sativa
  modified_base (1019)..(1024): a, c, t, g, unknown or other
tctatggtgagccgaatagaaatcgcagagaacagacttggaatctccttcgtaccatagccgcttcttcatctcttccatggtattggggatatcaacaacattctcagtcaagaagataaagaagggtggacaaccttaccctggatggcttctggaaggctttcaaaaatctctcgccgattgtcatttgtttgatttagacctcacggggtaccctttcacgtgggagaagagcagaggtacaaaactttgggttgaaattcgcctggacagagtaatggtcaccgaagcttggtctctcctttttcaaggtgcaaaactttttaatcttgaaacctctacttctgatcactctcctgtatttcttgagccaatttttgttgaacaaacttcaaagaaccaccgttttcgtttcgaaaatgcttggttgaaagaacccatgtgttttcaaattttggaggattgttggcaacgggttggtgtggggggaattttaaataaattgaatgtgtgtgctgatgcgttatctcaatggggtaaagagataacagggaatttcaaaagaagaataagagagtgtaatgccgaaatgaagcttttgaagaagaaaagagatgacatctttgtggctcggtatagtgaggtccgaaaatagctttttgcaattatcgatcaacgtgagattttttggaagcaacgagccaaacaattctggttgaaggagggcgaccaaaatagcaaatatttccacaaggctgcaagtaataggcgatggagtaaccttatttcgaagcttaaaaatgaccaaggggtgtttgtggattgggagaatgggttagctgatgttgtggtacagtattttatgaccttgttctcagcttctaatattgattatagggaagtaattgactgtattgatcatgttgttcctgagattgctaacttggaatttacaagaccagtttcggaggaggaagtgaagacggcggtgtttcaaatgcatcctgacaagagtnnnnnnccagatggtatgaccccggctttctatcaacgatgctggaatattgtgaaaaagatgttgtggatgttgttcagagattctttgctacgggggcctttgatgaagcttgtagtgatgcaaatgtagtcctcatccccaagaagaagggtccagagacaatgaaagatttgaggcctatagctctttgtaatgttctttacaagattgtcactaaggtaatgaccaaccgtatgaaacctttcatggactctattgttgctgattctcaaagcgcttttatttcgggtcggctcatttctgataacattatggtttcttttgaagtactccactatcttaaacgaaagcgccaagggaagactgggtgtatggctttgaaactggatatgagcaaggcatatgaccgtattgagtggaatttcttagaagcagttcttacgaagttgggttttgtggacacttgggtacaccttatcatgcaatgtgtgtcaacgacaaattacaaggttatccatggttgtcatgagatgggtcctattgctccaactaggggcctccgacaaggggatcttttgtctccttatttgttcattctctgtgcagaaggtctctctactttgttgagaaagtatgaaagacaaggttggatccatgggtgcaaggtggctaatggggcacctcgagtttctcatatgcttttcgcggatgacagctacctgtattgtcaagcatcagaagtcgaagctcatcgggttcgtgaatgttgaccaagtttgaaagagcttcaggacaagaggtgaatttatcaaagtcatccattttcttcagtactaatactactaccacggtcaaaaatgttattagccagagccttcaaatgagtattgcaactgaggatagtttctacttggggcttccaagcaccatgtcccgcaaaaaaattgttgttcttggctacctcaaagat

SEQ ID NO: 47155 - DNA, 1373 bp, Cannabis sativa
agggcataaaacccaacacgtggctcatctccacatgtccacactaaaagcttaggggtaaatgttatctgcatttttcacagtagacacatccagattagcatccaaagccaatcagtaacaagataaagaggccaagcccatttggacagatccttccaagaatgtactccagctgcgcgatcgtagaaccttccgccattgacaactcatgcccaaaaggaagtccagtactgtgaggccggaagggtaagacagcatattcctagaaaactggtccaattttcttttttattcctatggacaaataaaaaaataatagtttgccaaatcttgatagaggattgtatcaagctgaatggggaaatttcttaaaataaatatcaagcaattaatttacagtcaatttcccacaatcatagtacacaccgttgactaaattcaacaaaattcgatctacctagtcagcatatcctctcatttgtgggctagacatcacgaggcaatgcaagtgtgttatcattgtaaactctccaatagagggaaaagaaaaactaaataaaattcttaaactggtataaatacctagtaaatcatatagattaaggattaaattctcttgtaatatttgttgtgacaagcatgaaaagttacattcattgtattttaaaaggcttttgaagctaaagaattacctaataatattgactcgtggactaaggctagttaacgctccgaccacgtaaaaaatattatttgtgtctttcttactttttttcttttaattatttatttcttcagtattgattttttataatcagtttttctaaaaaacttagtaaagatcgatataccaattagtataataatgtcaaacataaacttaagaatatcttttacctgttagtattgcacaattttaattaatatataccaattagcatatataattttaaatatataccatatgtataattttacatgtatgtctaatactgtctatataatttaataaataaaaataatacaaaatagtatctattattttttaatggatgtacaatttctaatgtataccaataagtatgtaaaattacaaatgtatatctaatagtattcattacttgttaatatcaatacaattttaaatatatatcaactaatatataaaatttaaaacttatacttaatagtattgtttattattaattagtattaaactaattaatatatccaattacgaatatatatacactacagcagatttgtatattaccggctgaagcatccgccggtaataaatgcccagaccgccggcaataattaataccggcggaatccgccggtaattattcgccggcattaattggtcg

SEQ ID NO: 47156 - DNA, 1022 bp, Cannabis sativa
  modified_base (37)..(57): a, c, t, g, unknown or other
taatttagtttcagtcacaataaatattgtgactaannnnnnnnnnnnnnnnnnnnnattgtaatttttgtaactaatacatttatctatagaccttttagtcacaacacaataataataatttataattaactataatttttttttatctttaattacagtaatataaatatatttttacatttgaaaagggaagatatattttttttgtttttaaatttttaattttttttaacgtgtataagagattttatttaatattgttttttttttgaaggaattttatttaataatattgttaatttattgtagtttgaaatttattttgccatttttctatatgtttgtgatttgaagaatttgtaagggaagatgaagatttggggtggacacactacaaagaatgccactttagtgccatcaaaagtcagcgacataaaggggtttaaaaaaattccaaagctttcaattaaatatttttaacggcgcactattacactagcaaaaatgacttatatatttgcacaattcgtgaattatgccgacataagtctcgaaataaatcaggcgtatagcgcgaactatttctaatgattcatgacctttgctgatgcaattatgaatcggcaaaatgtgttaaaaaaaaaagggagaatttcgttgcgtgaaaaatttggttggggggaaaactttttttcggtggatatttgaaccgacaaaaagttaccaaaaaatattttaactttttaagcagggaaattacacttttgttggcacacatatgctccagcaaaagttcctaaaaaactgtgattggtgggaaaacttttgccgaagcaaatgtggctggggaaagtgtttcaaaaacacttcgtttcaattaagggtaagttttgagacttttttcggcgcaatgtagacttttactggtagaacgaaatgtcttagtaaaagtcttttaatataacaaggtcgaagcccttcccccttgtcatttccttcttcttcctcctctcttcttc

SEQ ID NO: 47157 - DNA, 1575 bp, Cannabis sativa
ccataaacatgaataatacatgtagacataaatgacttctaatcttctattgataacaaataagattatattgaagtaggttttatttagagcataaaataccaacaaactttcacttgcacaaacataaaactagaagtgcatttcaatcaatgcattgtctttatgtccaaatcaagtgtagcatatctgactatacccaaataataggaacggtaagtgttattcgtaattctgcaagcatgacatgtggatattagttaaaaaagactaaggagtcattaagttgcctaagtgccactattagtgctccgaaaggataaagccactaacctcgtgggaaaggtctccgtgaaagaagtctccctgagggttggccacgtgaaaggtacctgtgactaagtgcctcactccattacggaaaaacgaaaccctgtgctcgcacaaagagtatggatcttctcaagttgtgatgtactagttcgggatacgcctttgatctgtgggagctcagcccacgtgtgttaggctacaaacccaatgaccaggctttttcatctacgatgttagaggttgccttccacgccatgcaaccttgcagagcatgtgtgtccttgtgtactgagccaaacagtccaacagttaggaatgagggaaattcaaataagaatttccctgaggtcacatgcatcttgggaagcacagtacttgagatacatgtctttggccacttgcaaagcacagtactcgagatacatgtcattggccacttggccctgaagtggttgcctcggactctccataagccacttgggaagcacagtactcgagatacatgtctttggcctcgcccaggtaatcaaaatttgcctgagggttagccttccaaaagtcataaaaaatctcgagaccgactgtctctaaggcatgtactttctcttccagcctcatcacctccgatttgtacttcttggcctcagctgtaagcttctcctccttagtctttttctcttcttccagccgacagaagacagtccgaagaactcccctttcctcttgaagactattcacttctactgacaaggtgccgatggtagcttcaagttgaccagaagcctcgaggtctttagtcaactcgactgttttcctctcagcagtaaaagcttcttgttgacttcacccagctccattcggacagctttgagttccaccttggcgtcatcagcatccttcctggccagtccacctctgccctcatggtgttggacatggcagcgttcttggaggcagcagatttagctcgagaataggtgtaagccaacttcagaccaacctacatagagaaaaaacattaaagtctacgccaagtaaagaagaattaaaagaaactgtcaagaaagagtcaccctggtaaactccctcaagactcctcacatcagcagctccaaggaagattcggtgtcagcgccggccagctgatcactcacctcaagaaccaaccggttcatgtagtgagtgagcatctcgttgcctctcttggcctctggatgcactggctgttggaaattattttac

SEQ ID NO: 47158 - DNA, 2033 bp, Cannabis sativa
tatgtttttgacataataataaacctaacaaattaatttcattttatttatataatatgaataatgatttggacagataatttggaatgataaaacttaagtaaaatatctaaattattgcataaattgatcgatgacatatttaattaggtcgagttttaagggcattatgtacttgatgtgctatcaactggacaaattattatccaattccacgtgatcaagccaaacataggattattaatccaattaactagtgccatatagtattaatcatatataattcaatccaaactaattttctaattttgtagaataatataacttcacaagaagaagaaattttccttggtgaaaaaacaaagtataataatcaatcatttatatatattgacttcttcttgactctcacattttggacagcacaatcttctccaattcccaagtcacttcttttttgtttttcttttaacttcttaagttacaagcaaagacactcttacttagtgcgtaggtagttgaccaatgaagtgatcccacaaattgaataatcgcccaccaaaaaatagaaagcacataaacataataaatatgtaattggctttaatatgagcaccaaacgcactcctatcctaaaactagaagtgggagttgatagtggagtgagagagagattccacagaataaaatttatcacagagggcatagccacatatataagtctcttcaaatactcaagtaaccatccccatgtgctttgtgactcatttctttgttctttttcaatcaacatgtcttgtaatctcacaaccacttatatccctaacttttcttcatctttttgctcacttttcttgtttatacccaaaaaaaaaaggtgcactttatatcattttattttcctttgaattttggtgtatgatttttattgagaaaaaaaaaacttgagaatttaacaatgcaccaaaccggaggtcacttttatatatataccaaaaaattatacagtgttataaatttatttatattctttattggcttgccatttatgtcttttaaacaagttgaattggttatgatttaacaagtgacactagaaagtacaaacatcaattttgtcccattagtaataattcagcaatcatgtgaatcactctcttcaaatttaactatattgcactctagctgctatagctagtaaatatatatacagagcaaaaagttcttacttctatagacaagaaaagaaagaaataaagaaatggtgagaggtaagtgttaagaatggtatattttgggaaagaagagataaggtcgagggcaccataggtttttaattgtgttgtacttgtatggagtcatttgcatgcatatgctatgctccaaaatacattaatgtggttttgttggtcattttgtactgcactgtgttataagacaaaacataaatttgacttgtgagttgtgagttgagatgagattggatgggtagctcattcccacatgcttttgcacaacaagacaacttgaacaaattcctttaaaaagctgcaataacgtagatacagctttttatattcatacaaaaaaattataataatgcaatttttttaaaaaaaatcaatcaaaattttcattaataggtaaactaaataataaaaataaagatactttttttaggatttgaattcttgacctctataataagtataagttaagttaactattaaaaaaaacgtgtttttgcatatgctaaaatgttcctttaataacagtaaagaaaaatacgattggaaagatctgcattaacataatggaaatttattacggcagaacacaaatttgcagtaacagaacagaaataacagtacaaaagtaaaaacttgacataagagaattatacgtagtatcagtgttcttatttcaaacactcctaattcacgaggtcacgctcagagaataaaatcaattagtaaagtctcaaacaattataaaatacaattgacttaaataagtttagaccctctctaaaa

SEQ ID NO: 47159 - DNA, 788 bp, Cannabis sativa
ttaagtaaataggtgtgatttctccaaagtgatccaacatgtaatttgtggacaaaatattttgatcttaattaatttattaattaaaatcatacttattatttatataaagtcttctcatctcaaataaataaataaaaaatagtcggtataatattattcttttttgttaaggtaccaattaataataagtaaagtctatatataacacttagattctaacaccaaaatattagagaatagtgtgaataggtacaatttaataaggccattttttttaaaagtaataattacttttcctgatatatattttttgagaggtactaaaaggtgggtggtttcatttatttgtgtgttctatcaaattatgggacataataatacaaactacaattaagaaaaatatttttagtgataattatttagctacaatataatttttttgtgactaaatatgatttttagttacaataaaaaattatttgtaactaaaacatattatttagatacaattgttactaatttaggtttagtcacaataagttttatgactaaaaatacatgaaatcacaataaattgtaatttttgtgactaatacatttagtcacaatgtaaaaataataatttataattagtcactattttttttttacttttaattataaattttgttgtgaataaaaagtaatgacaagtgaatcttaaagaattttgttgagatattttggtatttggatattataatttaattttagtcacaacaaatattatgactaaaaatacatat

SEQ ID NO: 47160 - DNA, 1064 bp, Cannabis sativa
caaactcctttttgtgttttgtttcttataagactttaacaagtttttcgaactctgctttcggtggcccattacaccatcacgaaaaaaaaaaagaaaaattaaaatgttccacagtgaattagggatgatctgtaccacaaaataattaataaatatgtataaataccatagtaacatatgtttctttgttactatgtatagatctcttaaatacattataaaataaatattttaaagaaaaagaagatttaagagatttgttaaatatgtttctttcttctgttttttcaaagatttatacatgctttatattaacataataattatatgtacgtacgtatctcataaatttaactatcaatatcaaatatgtatgtaagtatatatgaatgtatatctcattctatgtagatatatttaggagatttaaggcagatcatatataccaccagcaaaagtgcacctaaaaccagctctctccaccaatatggcactgatagcatcgaaacaagcagggattgagtggatccccggcgagttcaggattcgtcgaagctccttggccggagactcggccacgtagttataatcaccggtgactgatgagttagctgctgctgggacgattaatgggtgatctgagttggagtatgaaatagaagtagttgatttatcaagtgttgaggagcgaaaggtgagatttgatgtggatgagatattggaagctggtgatgttggttttcgaaaatggtttccatggaagcaaacacaaggattctggattttgcttgttatggccagtacttgcatttgcgtatgaagctgaacactcctcattctctaactcaacgatgtaatagagtttcagttttaatcaattgctggattaattaccagtcctatatatatatatatgcagagtcttcatataaatatatattatttgttataaataatgtaatatatagattttatatattgtacaaaattatatgttattttggaaaaataattgtgtaacattttattttaagccgaaatgtgtaacatttgagtgtgat

SEQ ID NO: 47161 - DNA, 1629 bp, Cannabis sativa
cacccgcctcgccccgtttacatccctacaactaggtgataagttgttcacaattgagcctaagatggtaactgaagaaatgaacttcaatggaagaaagagagagatactatgaaaaaatagattaattaattaaccagtcaaaatatattaattagttgatttattaaatcttatttttttttttaaaaaaataatatttaaaaataatttaatacaatccaaatattaattattgttgtacacctatcaatttactatcattagatttattatctatggctataaaattctccttaccatagaaacaaaattaaggtgcttaccatagacatattctataaatatatataaatagtgttaatgaaaaatttgtgtctattgatttctattagcagtattaatattatattatataaaatgataaaatagttaaaaatggaaaaaataagagaaattgagaaaataaaaaaaaaaatataaagaacactcatacaatttggtgtacagtgtcactcacgtgcaagtggagagattggtggactcagacactccaaccttttggtcgaatttggtgttgtacaacaccaattatagcatgatactagatggaagttacgtgcctagccacgtaaatgttagttttatttaagatttagtatttttagttgttttttttttttagatttctgtaactaaagatatgattatataaatgattattttattaaagtaattattatgtcattgtatttggttaggaaaacatagttgtgtatatagaattatgatatgtacattagtattaataataaaaagtacgttaatcgtaatatttacataatcataatgtagttatctttaatgtgaataaataatttatgataagtcattacaatatatgattttaacaattattatttatttttggaaaatttaaaggagcaatgtatgtgttttgtaaaatttaaatttgacattatgtagcgaaaattaaagaaagtagcatcttaaaatagaggaaagaaattattaaataaaatcatattatagaataatatttgagaaattaaatagagtatagtgaaacttcttcctattcttttatcgtcttagctgtttgaatggtaaattgattgtactttggactcattattcgttttggatctacatataactggattttaagatattgatggtattgtttacaagtttatggaaaataaaagcattatcaacagcaaatgctagacgcctgtaattaaccgcagagacggtggaaggtgaagaggtcgagtcagaggtaacggttgaacgctaagtctcaactcttagattctttttaaggcagacagaaatttgcatgttatgcacccaatagtatcaacatgcattaaagtgaaattttttggccgataatttctccttaattttttggacaaacaaccagtgtttctacatataaactgtttctgcatataagtattttaggttagtttgattagtgtttttatttttttgatacttgattgtgtatattaataaaatatacttgttgtttatgataacaacaacaacacatctatctattatactagtatattgttacgtgcgatgcacgtatgctat

SEQ ID NO: 47162 - DNA, 1248 bp, Cannabis sativa
ataaattaaaccataaacatgaataaaacatgtaagcataaatgatttctaatctttttattgttgacaaatcagattagattgtaatgagttttatttagggcataaaatcccaacatatacgccctagtatggtcgtatatcgacattcttcagtaaggtctttgactttggtagccttggccatatgaataaagtcttttagaggttttgcttgtcgctgtttgacttcgacacggtcttctaactgtgatggtacaaatctcgaggacgagaattgtgtgtagaattctcatgagaacttagcctaggagttgaatctttctggggtgagtttaaagtaccactgttgggctgtctttgatagtgtggatgggaatatccgacagcgcacatcactagtgaccttgtggaggtcgagctgcatcttgaagtacttgatgtgagctagtgggtcttctcatccagtatacatcttccatcattttgaactttggtagaggtagggcatttatatatgctgagaacggtgataccctcgaccgatcaagttcgaggtctgaaggcttcgagccagctatgtcctggatcatgtccctgtattggtccaactgtgcttgcacagaaggatatgttgctgtggggacttgattgactggccctccttggggaggctacagatctgagaagataggggctggctggccataccttgggagagtgtatggtgaagatcagtcatgccttatagaccttggccgaccattcccaggtacagaagttggcctaggctagccaggcttgcgcccgattactgtgcttggctgggtagacgtgcattggacagggtctagctacccagtactcctccatggccggccagacctacaaagggcagggcctggccactcgtgatgcttccttggctggccagacctgcattgggcaagatttggctacctattactccttggtaaactagtgtcagttatgtattgattaggggtagatcataccaatagttggagtttggtggatctagatgcctgaagtgatcggtttcacttctcaaatttccattttgggtgtttccacccagttttagtcctcttcggtcgaagattcacctctatgcacctcactcccctaggggaagaggtgttgttccctggccggccaggggtactgctgctgatcgctggccgacaagtggctatatagtaggggttgctattgagccagagatcc

SEQ ID NO: 47163 - DNA, 2827 bp, Cannabis sativa
agaaaagtctaacatagatgaaagttaaggagatataatttggtatatatcaaaatttaaaggggtgatttggtagatatcaaaatttagtacatgagcaattacagaattagtaaaagtgaatgaaactgaaaaaaaaaattcttaaatctaacaatcttaatagttcaatggaatttttaacggttaaaaaaaattcaagaagcataatttggtacttgttaaagttcaatagataaaaatcttaattatttttatctacgggtttggatgaggaatttgagctatagactaaatcgaatattgatatgattaaggtggatattgatagagtgattttcacgtgggaaaggaagctcggtgttgaaatactagctcgagacagtgtgggtcaattggtggaggatgcctcgttgtgtagaccagtcaagtggatccagctttggcgagtacagtgggaatcaaagaagctcttagttagattaagacaaaagggtgggcaagagtgaaagtttaaacagattctttaatagcgattcaagctacttttagttccttgaatatgttttctccttttggttaaatagttcgtgaatgcaaatttttgttagcttctttaccttttatcaatctattatattttattaaacgttctactattaagatcgcttattgtattgttcgtgactcttatttttattcagatcgtaattttattttaaagaaaaaaaatataaaaataaaaataacacatcagcgccacataagcaaaacagtacaaaaattctgaatttgatgacattgtattgattgttgtgagagttatggtaatggggccttgccagtcacgaggaatgtaatgagaaaacatacactatgattatgatttattatgggtaagggtggggttcaccactgcacacttgatcattcttctctttagctataacatatatatttatacagctaaaatattgttgtatatatagacaatatgttgatttgattattttgattaagatatatatacacttaccttactactatattaatgatttttcttttaaaaaataaaatcatcattttattaaaacgattaactcagttactaaacaaggtagcaactcaacaggaacattgtccaagttgaaacgacaatcagggtgggatacagccgctctagcaaaagagtgagcaactatatttactgatcgctttacaaaataaaaaaaaatattacgcaaagcatgaaataaagttttacattcactaatcactttaccaaacatcgaaaccacggacatagagcttcgcatagcttgaacaaccgagagacagtcggtttccaaggtgacattggtccactacgtatataggcaaagtatatataggcaatatgttgtgaaatatacttgtttaaataatagagagaaaaaaaataataaccactacgtattggcatagggaattagggatgactccataattttgtgatagaatagagaaaaaaaaaatcattaaaccaataatttttattagtatatgcatagatagtctttaaaagtggtggtgctatctctcatatattaataatttttattaatatatgcatagttaattacacctcatttgtaatatatacttatatagttaattaaagtgtgtatatatattgaggaaaaaaaatacatatttttaatattatatgtcatagtatttgccttgttaatgtttaattagtacacattttcaaatattttgaattgtcatataaaaaaattatgcttttgaactatttgtttaataatgtaaaattagtaataataatataaactttaaaatgatttaattttttgaaatttatttttttaaagtggaaattttaaggttttgttttctatatatttatcctaaatcttgatagattcatcaccaatagaaaatgtcaacaaacaagttatagagtttatttatttgtttattattattttatgagctagaaaaatgtaagtgtatgtataaatctcaatgaaaatacttaaaaaaataataaaaataaatgcatttctcattgtgtacattgaactaaataggatcatttgaaaatatatatatatatatatttatatattgtgtctaatgaataccaacataatttcaaatgtgttatataggtgactctcctagtatatcgaaatattttttaatattgtttttcaattatcaaaattttaaaactaattattatataaaaatagtattttatttttacataataagtaagtatgaaattaaagagaatagtaatgaaagctatagaggcaagtgggtgagatcttaagaatgggatgaatgaccatgtgaaatgattttataatttaataagtgatgggactacaatatgtgtaaaacaccaaactgtccaaaataaataccaaaaaaaataaaaacttatgtcatatttcttatccatgtatttattgccaattgggaagtaaataagacatgatttttaataaataaaaataaataaatttgcaaccataaatttgtaataaataaaaatgtaatttattacacttagatttaataaaagtgcctttgaaatttcctaattttaagctttgaaaaatgtactagacagatcccaatgccaaattgtgcaagtccaagaactaattagttccactcaatgttttgtttgattaggctcaaaattgtgtaataatagggaaaattatataaattgttatttttagtaaaatttttacatttttatttttaaagtttctttttatatatttttatgatattttataaaattaca

SEQ ID NO: 47164 - DNA, 4214 bp, Cannabis sativa
gaatagggacaaatttaccgttccacccttcaatgtattttatccttaaaacacttagctacctaacatatgatgatttttactatgaagtcaaacactttcttagatgttattgttgccaagggctccgcctctgtccacttcgtgaagtagtccaccgcgactaatgcatattttactctacccttgacattgggcaacttttcgatgagatatgttccccatatggcaaaatgccatggactctgcatctgtattagttcgtcagggggtgcacaggggatatttaaggatctctgagatttatcgcatttctttacataagcctttgaatcctccatcatggttggccagaaatatccttgccttggaatattctttgataaacatggtcctgccgcatgcttaccatagaatcctccatgtacctcgaacaagattcatcaacctcttcttttgtcacacatctaagaaatggcatggagaagcttctcctatacatcacaccttcaactatgatgtaccatgcaacttttctcatcaatttctgagcttcgttcctattgtttggaagtgctccagtgttaagataagcaactatgggtgtcatcccatttggtgttgtatctatcatttcgacttcttccgcgcagttgatgctcgcctcttctaggaattggattaggactaagtttgctttatctatcactgtgctgctcgcaagccgtgacaaggcatcaacagttgtattttcttccccgtgaatctatttgagggtgtaaccttaaaattgtgcgagcatgtcttggatcttacttagataggccatcaactttttctccacgggccatgtactctcctgagacatgctttactactagatgtgaatcgttgtagacttcaatgtattcggtgtgtacctcccgagcaagttttagcccaactatgagtgcttcatactctactttgttgtggaggccttgaacccaaattttattgcttcgtgcaaaggttgccccaggtgtgatgagagcaattcctgcaccaaaaagttggtcagtagttgatctgtccacatgtaatttccaagttggtctatctttgttctttgctggtaaagattcttgtactagctccgagttatcctttgtattgctttcttctttaaagtctgccaaggcctgttctctaacttctgtacatggttggaagattatttcatactgtcccaactctatttcccacttgagtaatcatccgaaggcatcaagcttttgcaacacttggcgtaaaagttgctcgttatatacccaaacaggatgagcttggaaataagaccttaacttccttgtggctaatattaggcagtaagtgagtttttcaattatggggtaccaacattcgacttcaacaagtcatttgttgatataatagactggatgttagacattactttcttctcttatcagcaaactgcttacagcgtattgggtgacatccaaatattttccctattcttctttgtccaagggttttgagagtacatgaggcttagcgagttttgtttttagttcttggaaagcactcttgcatttcttcattcattagaacttcttattacgttagaggatgttgaagaagggaacacatttgtctgttaatttcaaaacaaatctgctgagtgcggctatccgaccatttaatctttgaacttccttcatttttgttggagacttcatattaggaaggttagtattttttctagacttgtttctattcctcgagcatcaacaaaggaagttacccgagatgaccccaagagaacactttaagggactgagtttcatggtgtactttctaagaattttgaagcattcatctagatcctctatatgcccctagccttcctggatttgacgagcatgtcatccacatatacttccatattctgttcgatctggtttttaaacattttttttactagcctttgataggtagctccagctcactttagaccaaacaacgttactttataacagtttagacccatatctgttcggaaacttgtatcttctaggccgggtggatgcattataattttgttataccccgaataggcatccatagagctcgagatttcatgtccagttgttgcatccacgagctgatcaattcttggaagtggaaaatagtcccagggacacgccttgttgaggtaggtaaactcaatacatactcgccaatttttgttcggcttggggacttgtacagggttagccacccaagctgggtagaaaactacaatgattaactagtttatgtgtagtctttctacctcttctttcattgcttgtgccttttctttataaatagtcttctcttctactggacgagacaaaagtctagatcaatgtttatggcatgagacatgacaatggggtaaataccgactatatcctcatgtgacaaggcaaaaacgtcaaggttttctctcaaaatttttattaaaactaactttattttgagcagcaaacctttacttattttgagtttcctggtcaggttacctggatcaatttccacctcttccaattcttctattggcccaacatttgtatttattttcccaagtcagggatccatgtcttcgtccccaccttaggcgacttcctattgagcgatgacttttcccttgtttgaactctagtccgaggtattttccttcttgaccttagttagagcaaggttatagcattcccgtgcaattctttgatttcctttaagacatcccactccacttttagttgggaacttaatgcataggtgaaaaactgatgttacaactcttaactcttatagagtcggtcggcctaacatgaaattgaaagatgatgggacatcaattatgaagaattgtgcctttacagttatgctcattagagcttatccaatagtaagcggtaggcgaatttgttcaaggggtgaaacactctggcagaagaaaccttatacgagctgagtgcaagcgattaagtctttaagttggagtgccatcttctcataagttgttttaagcagaatatttgaggaagctccattatctatcatagttcgtcccaccatcttgttttcaattttcacctctacgactagggggtcgttgtttgggaagatgacatggctggcatctactttagtagatgttattgctggctctcccacacgtggtacaataggtttactttcttccacgaccaacattacttcattttgctcatactgcaaggctcgaacatatttttctctaacatttcctgagtctcttacaagatgtgggcccccaaacattacctatatatgcccgtccattggtggaggcatcaattttttctgattattgtctctctgggtggccctttgatcttgatcagccttgacatacttctgtaagtgtgggttattctttcaaattaaaaactcaatctcccgctttaaattattacattggtttatgtcgtggtcgtagtccaaatgaaagcgacaaaacattgttgtgtctctttagctttatatcatttttcatgggagatggtttcttgtacgtcaccatagactgagtgatcacatggattgtttctatgttgtctattaggactgagaaatcagtgaatttagaggcattttctctggggtgctgggcgacattgtcagtgaatttgtttttcttttcgttaccctacctattgctgctgctagacctcttcccatttgacttgaaactgttggaatattgtggattctggacgaaaacccctcccgttgttgtgtgttgttgatttttcttttgcctgacataatttatgcatcgtactgcttcttcgagctttatgaatccatctactcgatctagaaattcagccattcatcccacagttagtcatttaatgtcttttcacaactctcctagaggctcaatgccccccactattgtagctagtcttccttcttaaatcaaccccttaaccttagtagctttggtcataaatctactaagataggctctgataggtcctcctggcatttgctttacttctaccaggacttccaggtatgagggaagctaccaagaggatgaaaattatgcacagaacttgggtgagaaagcattcaatgagttaaaccttcctggaggtagtttgaagtaccactgctgg

SEQ ID NO: 47165 - DNA, 1194 bp, Cannabis sativa
ctggttgtatgcttcgctggcggccctaagagagagcatgggagagtgcatgagcttccatttagtaatgccgattgagtgtctgtccaaggggtagcaactgacatcaacatatcacctttgttgttgaagagagccataccaaaacctgtcatatttgaatttatgttctgggctgcatctactgacagttttaagttaaaagtgggtggatcttcatgagtagcagcagctgaggaggaaggatggaaccccggtatagccaaatgcgtgttgttttgttgatacagatccaagtaatcagaggttttttgtatcacaagagcagggaccattagtttctggtgatggagatactcattcctgcaatgccaactcttccaaagcaaacaaagaaaaaattggtaatctctatccgtgaatgatgaagcagctacatggagaatttccctgcaagttagttccatatattttaaaatgaaagaggagaattgagttaatttcaataccttctggatagttgaacacctgaaaatagcatgcattagggtctcaatgtggtgatgacaacgacagcaattaggtgaagggatgatctttcttgtgtgcatattgtgactagtgggaaggatgtcatggtaggctctccaaatgaagtgtttaactttaggcggtatggcctgagtccacaactttttccaccaaatttggtgtgccaaggtgtccgaaggggagggatcatccttacacaaagaggcatgggctctatggtaacctgagttgactgagtagtttccatgtgttgtgtaaggccagtaataggtatcggggtactgggaaggcaatagtgggagagtttcaatggcttgactaatatcagtaggaaaaatggctctaatacgattggtatcccattgatgagtaggggttatgagttcagatacatttgaacatccatctgagaggtgtttgaggtaattgactttgttataaccagggatccaagcgtcatggtatattgaagtatttgcaccattgcctattgattttttgagccctgaaactagaagttcttttccccaggagatgttggtccaaacaaatgaaggtcagcggcctttggtagcctctagaaaggtgtttcgcgggaaataacgggcttttagtaaggtggcaacaagagaatagggtgcc

SEQ ID NO: 47166 - DNA, 1970 bp, Cannabis sativa
ttttggacatataattttggaatttggctctgttcaaattagggttagcatttctttgtttcttattgtttagtaaggttgttttaggcttgaattttatggttttggtgcctaattcttgtgttgagcaagtttgagatggtgttttaaatttttgtgattaattgttgttgtttcttgttagaatctactcttggatgttattataggtggtctggtaggttttctgaagtttcggaacgatttgagtgagttatgaatttttggagatttctgttactctaaaaattctggtttaccggtttgggccatttttagagccttatttttggtgtttcctcgatatttagggtattgtcttgttttttattgatatggaaactttggttttgagtttagattctcagattaggtttttgcaagttgtttacccatttacgtgaatgtgacatagggcatccatccatcgcgtgattttctgttcaggtcggccgacacacttgaacttggaacgaggtaagactagcatagaatgtatctatatatgaatatgtgtatgtgtaatagatgcatgctatttgtgattcgtatgctaccaacactagtacaatagtgatactgagtgcattggtatagtgtatgatgttcaatgatacaatacggtattaccaacactagtacggataagtatgtagtgtatgtggtataacacttagtggtactcgaggtaaggtgcaaaccctaccaacacttgtaaagactgcttaattttaatttagaattagtagataattagggcttaattatgaaattagattattaattataatttatgaatatatggagatttatttaaattcagggtgtattatttatgctatatatgaaattttatgtttttcatgttttgtgcccgaaaataatagaacgcgtcgtttggccaatagaatcatattttagtaatttagtaatagcggggaaacctagataggcatattggaaatgtcgggatcagtcgggattttaaaattaaccattttacccctaggccactttactagttaagttatgagaagggcattttttgtcattttgacttgcgtgaggtggctagtttttagtgtggcagctggccattatttgataaaatagtctaattttatctttcatttagtgaaatattaaaaataggaaaaaaattaagaaaaaaccacttctctttctctctcttttttgaaccctcaagggaaaccaacaataattagggatttttcagctgcaatgagtagtttagcaaggtttttgtgattcaactcaaggtaagatgttctagcctctttcttggtgatttcttaagctttaagtttaatttgtgcatgttaattcggagttagggttctgagttgttcactagtgtttatttatgtcttctgaagctacttaaggttaattatgttggtttgagcttggtttgtggactgttgtgatgtttgagcaagctttgagtttaagaactcaagctttgctctttaatggtggattttgattctggttgtgttggttggttttattgcatgaatgatgttcattatggtgtaattaggtactctggaaggtttggttgcatttggattcgaattgaggttgttgtggggttttaggtgtttcctgcactgaactggttgaccagttcagtgggacctgtaggagccagaattctagttggtccccaggaaaccccacagaactggtccttcagttgggaaactgctctgtcggttggtagggggtttttagacatcctgggcgttttccttcggacatgccctgtctgaatgcgcgtgcacacgggtgatcacccgtgtccgcgcgcgcatgtggggtgacaccacctccagatttttttttattttcaaaaattcataactaatcaaataaaatcgaaattgagttctgtaaaaaagtgaatt

SEQ ID NO: 47167 - DNA, 1222 bp, Cannabis sativa
  modified_base (61)..(64): a, c, t, g, unknown or other
ttggtattttgtatttttggtgtaaaaatttcttttgtatatttgtttatttatttatttnnnnttttttttttaaaaaaagaaaaagcatttattagagcaaacttaataataataataagccaatcaatgcaaaataatcagtctttaagcgaattattatttttgtccacgtcagtttaaacactggagggatatattatccgtacccagcgtccatgttttccgcgtgggtccgtacgtcgtagacacaatagtaggtgtaggtgggtgatccacgttacgattgttacgtgtcaaaacgcatgtcgtattgttaaaagaaagttggaaacaaatgtcgtatgcgcatcacatcctatctggcggtgaccgaattttctcaatatattttaataagaattggcccgtgaaggtgtgggctccacttgatgtgacagagcgaacacgacaatcgagatctctctcttttgtgtttcggcagttctaataccaaggtcattttttgatgagttctaggcaggtagtcttgggatctagtgaagaaagtgcctaaatcatctatttctactcttaactattttcgaccaaacccaacaatgctatacccaactatccttcaaaattaacatgatttttagctaaattagtcaaaattggagtgagaatgttataaattttgaagttttatttgaggattttatgatcatgatgggtagagctttttaagttaattttagaattaaaaatatattttatatatactagtaaatacgctagaggcacatactcgtaaaattaaattaattgattaatagttatataactattataaataagaataaaaaataaagaagaagaaaaaaaagtacacaaagagagaaagtaaagacaatattgaaaaatgttactagtttatcatttaattgggatgaactttatttgtacaaaaaaaaagaataaaaaagtaggaattcaaatcaatgtgttctcagaggaaaatagacaacgttagaaattgcgagtatttgagatgaacaagaacactcacttataaaactaagagtattcacttaaagtggcgaatactcaaaataaaataacgaataatagaataaaaatatgtctataaagagagacacaaaattatagtggttcaatcaaagcttggtctgcttagtctatttttgtaagaatgtgattattctcatttcgagttgga

SEQ ID NO: 47168 - DNA, 1864 bp, Cannabis sativa
ctaagacaagtggcctatttctcttttcagaaaaaaaaaaaacgtagaccaaaagcaaagctggagacaatttgcatccaacacgcaccacaaaccaagaaaacaaaaatagataaataaacttttactaataaaatatgaattctttggatttagggtacctaaccaaacatttggttagatccaatattgcattcagaatgaaaatagataagaatttatctttgcagttcttgaaaccgagggtgtgaaaagcataagacaaacctatattaacacaaaacaagtctaaacaggaacaaaaacaagattacacaggcacacaaagaagtatattagcctgaaatgtgccctaacttttcttttttcattttgcattctaaatgttgcctagttttctcttttgcaatgtgtcatactttgctattgtaataaccatttttcaccaaattgagctcttaattttgattctttgttatgtagagtgagagatccaagagacaaaacttgtcatcaatgtgagtggtgcttccatgactttgggagtttactttttattgccttggatttttaacagtgcaagtttaaagctagcatgttaactattgcagattcggaatagaagaaataaattcagatgttgacttcttgaaaggaaattgccttccaagatcagcaaaggtgacctcaatcgagtctgaaactaagagctatagtatgaaagttgcatcagagaaaatctcctcattaaaatggttacactccccaaaaagaggctattgtgaactggagtcaccgaattcattgaaatccaaaacgaaactttcagaggatgaggatagcaacacaagatctatgcccttaaaatctattgatcgagttgtgtcttctgaaaaacatttaagatcttcaaggccagaatcaactactgaaaacaatataagtgaagattttgaaaaagtaatatctgaaatatcaaatgaaagatcttgtaaatattcctcaacattaactacaaaggaatccatcaacctgtgtacctctgataaattgtgtactttgtcagaggattgtatgtctatgagtaatttgacatattctagagaattggaagtaatgtcattagatggggaggcagaatgtgacttcactgattttcctgagccatgtgaaaaacttccaaagaaaattaaaacgtcaaattttgcaaagagcaaaccgaagaaatccaattgttctttctttgttggagatcctattcctgatgatgaagctcgagaacggtggctctggcgttatgaattgaaggtaatggaccaggactaatttttcttttgtctttgctgttaatttttcaattttagttgaagttttcatttaaaaagtggtatgcgtagtcatatacacattttatagctcttttgagatattttagttgcatcttatatggttactaggataatatatttagcttcatttattttaataaaattagcccacttcctgccatttatgttattgacaactacttatctaacatggtattgaatctttctataaaatgatctttcttccttccacatagttttttactttgctgtgctttctcatgaagaggagttgaaattcatacccaaaaagcttctatggaatattcttgaaatgcagtaactttattttgtttgttacatcgttttcatcccatcttgtgtgtttgataatggttatgtcctacttctatatgcaaaaatgtatatatttatatatatacatacttatgtatatttacacagctttcgatcttaattcttgtattttatgatcttgatcttgtaaattaactacagtttcttaacaagttctc

SEQ ID NO: 47169 - DNA, 1112 bp, Cannabis sativa
ttaaatttaataatctcaatagttcgggggaatttttaacggcaaaaaaaattcagggggcacaatttagtacatattaaagttcagggagaaaaattactaattagccatatttttatatttgatctgcgtaagataatgtcatccagtacgttcaactaataatagtatgtatacaaactcctaaatttttcttgatgtttaatagagcattgcatggttattttgaagttaaatgagggttgagacaagaggacttcatgtttccactactatttgtcctagggtagaatatttatctagaatcttgaagaaaataggacagaaaagagactttaaattccatgataaatgcaaggaacttgagttaaatcataagtgtttcgcggataatgtgttcatatttagtcatggtgattttaagtccatataccttacacttcaaggcctgaaatttttttcagagacatcaagattatatcccaataaatcaaaatttgctgtgtatcgctgtggctgtatccaagagtaaaatgccttttagatacttggagtgccgatttgtgcatgtgacatatttgtaaaatttcacatattatttacaaatcggcacccctcaagtaagtaaaagagcaatgaatcaaaataaccaaaatcccaagagtgaaattccaagaaaactaaagacaatctgctgcacttgaacatttttcctaatgacctttgcatggtgtgcggcagggaagtagctagagaaacaatagagaacctcttcttccagtgtccaattagtagaaggtgcgtgccttgaggagctgctgaaatgacttaaatggaagacctcagcctctacaataggtgcggcctaattgaagcggattagaaaaaagtaacatgcctaaatgcagaaaataagtgcttattactgtaattatactgctgcaattatcatatatctatatggaagaagaaaagaatcaagcttattggctccaatgtatacaactcccatctacaatagtcaagactatacaagtggaggctaggaatagaattcaagtaaaaatgccaaaaaaggttagtagtttagatagagagtggatgctaaactt

SEQ ID NO: 47170 - DNA, 1560 bp, Cannabis sativa
tttaacatagtattatataaaaatataacatataatccaattcaatataatacaatacattataatacgacctaatacgacgttccaaacgagtcctataaaatttaattaataataatcatgaattaattaatttaattatatgtatagcattggaagtttgggcataggaggaagtgtagccaatgtacacaatatagatgtacatggtgctcatttctatggcacaaccaatggagttcgtattaaaacataccaggtcactatatatataaatttccaaatctattataccaaatacaaattaatttccattaatgggttttccaacttatattttaaaaaaacaaagttattgtgaatgaatttgagtcaggttggaaaaggaattgttcaacatgctacttttaacaatctaaacttccatgacgtgcaaaatcctatcctaattgaccaacattactgttttgatccacgtggctgcaaagacttggtaataattaataaaatttcactaattgttgtaattttagggagtaaattatgaatagatttgattatgttttttgtgtttggacaggcaactgcagttcatatagacaatgtgaccttttcgaatgcaattgggacatcatcgacagaaatagcaatgaatttgaattgtagcaaatcagtgccttgtactaatattaacttcaaagaaattcgattgacaccatcaaagccattaaaggttatacagtcaagttgcaacaatgctcaaggaactaccacaggagtagtccaacctgcttcttgtcttcatccttgatcaaattcatcactatatatatcttcatttatttgtaattatgtttatgttcaaatgcaataattatttaaagacaaaatattcatttgacatttgtttagtgccaatatgcaattcgtttcattgttttgtgttgaatggtattttattttcgacttttgtattttgccaaatgaaataacttccatgaggcaataaagacttctgtaatcgcattgctgatgtgcctattaaatattatgcatgtttacctattgcttttgggaaattttaagcttaattaaatgtaaaacatgttgttttaatatatcatacaattagtttttatatatatatttttttttcaaaaatacctttacatcttaaaaaaacttttctttctaactctctcactctccgtcgttaaccccgacccagaacccataccatcgaacacatagacccaaaaccccggttgtaaggtctcgcaatcgtcttctctcacgacttctctcattttttgtattttttttcttctggtttaccagttttttgcaatattttgtgatgtttagcgatgtatttacaatgataaaacaaatctgaggttatagagatgaagtttagcaatgatttgcgatatttgacgatattttgcatatttagcgatgtatttgtgatatgagactaaaaaatacacaacacatcgctaatcatcgtgaaaatttgagtatgaattagcgacatttaacgatgtgcttagcgatatt

SEQ ID NO: 47171 - DNA, 1059 bp, Cannabis sativa
  modified_base (1031)..(1034): a, c, t, g, unknown or other
tgtaataacaatattatatatatacgttgttctaccctttaataattaggaatatatatggataattaccttctgcactttatcaaaatccttgtttattgtttttaggaaatgatcagatggattttggagagatggacaaggaaagccactcatagtaaaaaactgtacaatacataatattaaatcaattaattagtacaaatattattattcctttatgtattgtaatttataatttaaatacgtttaaaaaaaacctgaaaatacctcattagctgcactagcaggaccaaaatacacaattttaccagcagaaagaaggcaaagagtattaaaaagctgaaacacttcggaactgggctggtggatggaagccaccacagtcctccggccaccggccccaccacccctccgactctgaatatccaacgacgcaatgctgctcatcacatagtatgaagcagcactgtcgagcccactagtgggctcgtcaaggaaaagaagctttggacgagtgagaatctctatgcagatgctcactctcctcttctgtccgccgcttaggcctttgctcccagttcctaacccactaccaccgatgcgagtgttaacagcgtcagttaaacccatctctcttatagtcatctcagctctttccttcttctccgctgaagacatggagtccggaagttgcaactgtgctgagtagtgtacggcttctcttaccgttaaggtcgttaaaagagtatcctcttgtgttacgtatgcctgttcattaattcttatgaatgttaattataattaaaattagagcattactattgagcactattagttcacattatcttttataggttgcgtttcacgattagttagcgatattaattacattgatagcagtatgacaccgaagaacgtgcatagcttttagcaataattctcaataattattattatggaagaggtttcaatggttacattttttattgtaaccatcatggttacatttttttaagccattggattannnntaaatggttgtgattaatttggaaa

SEQ ID NO: 47172 - DNA, 7410 bp, Cannabis sativa
  modified_base (36)..(43): a, c, t, g, unknown or other
  modified_base (189)..(189): a, c, t, g, unknown or other
aattttaaaaacaaaaaaaaattactttcaatattnnnnnnnnacagtttttttttcttaatcaatactttaaacttcgactagacctgaactcaaatctcctcccacggccctaccgctgaacctagcctctgatccgaacccgatccgacttcagacctaggctcaacttaaataaaatcaaaaaanaaaaataaaaataaaaataaagaacacacttttattttctatttttaaaattgaaacacaaaagtggttgcagaatgtatttttgtttttcaaaaataaaatttttaaaaataaaaattttactttcattttgtgattaagaaattataaaacaaaaatgttaccaaacagcacaagttaatctatcaatgattattagttttttttttctttataacaattaacaataacctcaatatttaataatcagacactgaaacgtacaagcagatccaatgtattaaattttttaatttttcatatacaatgtatatgtagggtactaatttttgtatcattttattttattcatcacaacactttgaatttataagcttacaattatgcaataaaaataaacaatatagtgagaatgaagtttaggtatataccatgagagaattaggcacaagctgaggcatcaaaattaggcaatagaacaaatttaatggacctagaaatgatggagagtggtgagtttacatcaacaagcgttggttctagttttgggatgttaccatctattgtaatccccagtggagtaccattcagatgcattgttttgcttctcagttttccatttgctggtgtcaaaaggtattcttctctgtacaatggctcatctgatgtttctcttccaacccaagaaaccattcgcttgatgccacgggtgaaagaactttgtgtgtgaatggtagtttttggagtaaccaactcactcaaagcattttcaactttcagaatgaattcagtctggttgcttaagttgatcagaagtagagttatcccggcctgtaatgacaccgatgacagttgctggttagttagtcggctagttactcttgtaaaatcagataatgatacgagtaatttgtgaatataccatagaagaattgagccagatggacttctttgtgttgtgatatttgtatgacaaacaaaactattacaaagattaggacttactctttctttggcacaatgggcataaatgcgtagaaatggcgatgcatcagtcttaaccgaaagaacgttctctcccattagttggctccatagaagtgcactttcaaaaccaaaatacaaacaataccagatgctgtctctcagataatagaagcaagtaaaaatgttagaatatcagattatggacagttcacgctcagtctaacctgtagtaatcggggttgggaagaaatgtgtctttgtcaaggagaccatagtttccaccaattagtgattgtctgcaatacactttagtattatacacggctgccattccaagctgatctaagtaccttaagttcacggttgaatgaagaggcgcgaaaaggatcaattacatagaatgaagaaaaagcaacataaaaagaacttccttgtgaaactaaaaaatcaaaggagcaatgagacagccaagattaccaaaaactgtcaatatatgtatcagaaacattacgaccgccactgttataggcccctccagactctccaacccatgcagatgcccaagcaccattctgtttcaagttttggtcaagatcaatgaatgtggttgctgtcttgtttaagtaatggggactcaatattctactaacaagtctgggatcatcacctgacaacaagagttgtgttgtaaatttgcaaaagtagacaaatatggtacatatctaagagtctcattctaagaccaactactgactgtttactcatacctttcttatgttacagggtataaaaagaattgaacactaagataggtaagatgtttcatgccccccaaaaatcccatgctaggacctatactgatatagattatttcacacagatatagatgttctgccttgtcataggtgtggaacgagaagttgataaattaatggtcaggagaatatttcattgggtaaatttgatgcaattcctgtgtcatctcattattacaaattattttgcagttgaggttgatacaaattcagttccatcttacgaaaagggaataataaacaatgaaagtggaagatgaactcgtgaaattagaagcacagaatatgtgaacataacaattatgtctatacatggtaagagattttggaagcaaagtgacctacctgcacccagattgtagaggtgatgagtaatgatattcactacacctgaacctgtgacctgtagaagcttagtgaaccatttctcatcataaaagcctccaggtgcaataagtgcaggttttatctcagaatttaagtataactcattgattatcctcctgagattaatcaagtcttttccatattgttctggagaaactcttgctccaacgccatttccacacagctcattacctacagtggcttaggcatgagagaagaaagggagaaaaaaaagtacaatgaaagacaaaatcaacaagattttggccatatgttctataccaaactcccatgaatctatctggtaaccctttaagacagtatacttcataaaatcataagcattgctagaatcccaatctccaccccaagtactcttgtagataatgtgcctcccatgaagcgcattcaagccaaatgtcacaatggctctgaaaacataagagaaaaggaattcaaaaaaataaacatataaaggggaaaacgaagaacttcagtggaatcatgtccataaatctaaatcttaccccgtcttactaaagaacaggatcagctcatcccacctattcaaatgtaaacatcctcttgaaaatccaaacaatccacctttccttttttgaaatggatggcatggatcttttaaactttctacatcatacaaaactcggtcttgcaaagaacctccaactctaatacgcaaaggcttgaaggctgtcaggcaaccagtttccaattgaatgagaatataataacacaacactgatcctaaaccccttgtcttcaatttgtcaaaaagaacattttagtgattgaaaaaggtgtttgtatattttaaactaacacactcaaacacacacttataaatgtaagtggacaaacctttgattgcctggaaaagtataggatgggataaattctgaaaaaaggaaaggaaaccacaaaagctaacaacatcaaatgcaattcttatcatttgataccatgaaaagattaaaataaggaagaataaaaagaggaagtagatgaaagattgaagagttcttaccaaattgattacggaggcatacccccatggacattggttgtagttacatttatcatgaggccaccaatcaagtgtggcacaaatatagtttttatctacttttgcagcagctctagttccatctactataatattacaatgtgcagtatcttgcacttgggcaaaaatagctgggaaagaaatcagaaagacaactaaggagaggtaaaattccattgattaatctaagacggcaattcgaccaccagctcaactagtttggctgcagcataagaagatataatttagaaaaagtacctcatctactttgccatgtttataaactgaattaagtaatacaactaaaaaaaaaaaaagaaataaacaagtgaataaaaacttttattaagagctaattcaaggtcaccaggagtcacacaaattcaagctagtatgatgtaatgtaagaagtgtcaagagatttgagatcaagtaaaacagaaaatacaaatggctttctttttttgtctttataaagatgaaaaacgtaaatctataaggaaatttgaagttaataaactataagcatagttctgtttgacaaacagatcagtactactctacaaatccactacaggggcctgaagtcagagcaacaccaaaaacactaccattggaatcataaaagaatagcaattaaaaaaagaaagagatgttttcccacactaccatatcagcagcagcaacaaacaaatttaagttctttaatttccaataaaaagaaaaaacaccttaaacaaataataaggaaactaagaattgccgcaaatgagaaagatttgagaactggattatatacatatatagctgaatcctaaagtagctttcttcatagttcatatcaactatcatgaccacataatacatcaaatctacaacaaccacaatagagatggggaaaactaagggtaacccagatgaaaattaacctcaaatacaaaaattccacatcgactttgacactagagattcaaataattgatcagataaattgcataaagggtgattgtacagtacaattctccttctcttcctagtccctaacttgcaatctcagtcaggtaccactgaattgttccttaatacatgacagatactgtatccagtgaacggggtcggtcttagattttctggatccgtctgaaaaatccagctaaacttagctggggatttaatgtttgaacttattgggggcttttacaaatataaatgtctgaaacagttaagtatctttttaaggaaaggttttaaaactaattatatacaaagattttcttatttaaaaatgattatgagagtgacacgtgttaaatgtctatttgctaatacatatatatttatgtttgcatagcttcaaacttaagttatgcctacaccaaatcattccttcccagatcaatgggttttgcattttttgagagatccgagttgctttgtttcaagtctgtgtgtttattttgactctggtttttcaaatagctaacatagtttaatggttaagaatttagatttatgtttaagtataatagggccatgtgttttgacctatattttattattaaaatttgttctgttatagtgaatgtttttatgacaatagttaaactaatagtgggaatttgagattttcttttactattaaaaaaaaagatattttattagtgaaataatcatagcacatataatattatattttgtgtcaataattttctatttttcttacattctcaccactgacttgaatcatactattgttggattaggtgcaactctctcatgtgacaaaataatttgctttgcttatggtatacaactatattctattgcattattatggttagggtccttatggagtttgaattttcaaatcttatgtctcctgttatttttcctttctttctttctttctttttttccttaataatctcctattattaattgttgattggtaagtgaagctttaacttttggggatctagtcattaatgcaaacatattggtcaacaatcaataggtgcttttttttttttttcttttttttttctgaaaggatgaatatgacaataggtacttttaaaagaaaatggctcaacagataattcaatacttattgatttccaattttctttcctttttttttttttttttttttcatatagtgtaggagggtttatataatcctcaattcgcagtttcaaactccaagcaatctaaattaaactatttgagacgggaccaaatagattcggtatgaatgatttaatcaatttatattatttataattttctagtttggtcataattttagaaatctcagtagcagttcaaaccaaaaccaattcatgtaattattttatatatgtacttaatatgtatttttttttggacaaaatgttgatatttaaaaataattttaggtgaatattgatattgactttatattgttatagtaataattttttattgttatttatgcattatagacttgattaaggtaaaaaaataatagataaaaaatgattattgtaaaaaaaaaaaaatagaataaccaaatcaatttatttttgaatggattaatttggtttgatttcatcttttaattggtttagtggttttgaatttttaaaaaaccataatattagtttggtttgaaaattttaaaaatccaaaccaaattaatccctaaacacccctaatctatggttcaactaatctacacaaaaaatcagcttttcacctaaccttgaaaatgaacatattcaaatttatgtggaccttttttaaatattaataaataaaaactcaattattataaaagtttggttaagatatggtgctataattttataagtaaatacattttagactttgtgttttgtaaaagttattaattggatcctttgttttgttaaatgataaaattgaccctatattttctaaaatggtaaaaatagaaccctgagttcaatttttgacaattttatttcttaatataaccaactttaaaataatttttaacacgaacagatatagaaaatataatcagttttgtcataacatttctagatcagattattatttagttttatttcgacaaaaaatcagttcaggatcatgtttgtacaattttataaaatacatggtctattttatcatttaacaaaacagattgcctaatttataatttttacaaaatacaagatctaaaatggtatttatcctaattttattggaaccagttttactatataatattgggaaattttattgggcttgtcgcgatgtacacgcttcatgttttcaatatctaaataattttatttttaatttttttatatgatagtgcatgttgtaattgaattttttttcaaaatttaatgcaccaaaaataaattttaaatagttttttgcatacacgcctctttaatttatatgcatgcgaatagacaatttgttgaatcttgttttttatattgtaaattatttttaattttttataattttataaaatatcttaaataactaccctgccacaccatcatatattaaaaaaaatgagattataaatattctaatataaaaaaaaacatgataaaaattaggggctttttcatttttacacttcaaaatagttttttttttgtatttttacaaaattgtacatagaaatccctattgcaactagcgctgcaatctaaattgcaataaaaaaatcgtatataaactcctattgcaactagcgctacaactactctagaaactcaaaccgtagatttgaaaataaagttaaaaaaacaatatataggataatttccctaaaaattaatcagtgcactttttatggggtgcaccatacacgcaccctataagattaatatttattattataaggacatctcttaaaaaccattacatcatgaataaattataaaattttacttctattca

SEQ ID NO: 47173 - DNA, 1548 bp, Cannabis sativa
  modified_base (126)..(130): a, c, t, g, unknown or other
ctcttttctcttccattatttttttaggaaaactgttctcttattttttttaagggattttttcacaaatacacaaaaataacaaaaatttacaaaaatatggttttacaaaattttaaatatttnnnnnatttttttgattttatttacgaaaaatacgatctttttatgttgtaatcttgttaatttgttgttgattttttattatttacatattatttttatcttacttttatgtagttttcttgttgtttctataaaaaattataaaaatataaaaaaataaataaataaattctataaacttaaaaatgtaatttttttacaaaaaaattgtactttaaataattatccatttttttttgtatatattacttgtatattaattttgtttcttaaaaatcgagtggctacttcaatccgatgtggatcagtaatattattatatcatataatatatttagtataaaagtgtactcccctacgactcattggattttgaccttttgaagaataatcgaattagcatgcaaaatacgcatgggccatgtacataataacatatataatacaatcttgagaaatttgccacccaacatgttattttttaataaaaaattggttcaatttgttaatacttttgtattagattcttcaatcgaattgtaatgtagtaagaaagattagtagatttctattctatatattataatggtgatgttgaactcttggtcctggaggctgaaaatggaattgataaagttgggcggtccaccagctaaaataattgatcttgatgagtcatggccctggccctacttgtgccgccctaatcgccaaaccattattattactacaaattgaaactaatataatataatattttacccaacaaatatcattcagagccaaaaaatttcattggtgccatgtcaaattatctgtcactctgtcattgctcatgtaagcatataataataataatagctacaaaaaaagtataacattacaagagaaaaatccctattaaaccgaccaaaccaaaagtacttgttattcttcaccgcccatatacgttgttgttcatttgaaagctttctacgagtattgtgattaggtaccagtggtggctatcactttcttaacatgtcacgttgcgcttggttaacgatactccctaaaagttattatattaaattatatgggacctgatacttaattagaccaatagcgatattgacacataaaaaagtgctaagcaccactggtgtcctttagtatttctcttcaatatattagtgggtcagagagaatgcttgcatggtgcatcaactattccttattatcactaaattctttattatatcatttttttttttgtggactttaaggttacaattgtatgcctaataaaaattaaaataggattacctgatattattatcctttgaaaataaatcgatcaaggtcatatttgtatgggctgattattgccactttccagagtcttgtagcttattatacatcatggttctttaaagtggtgta

SEQ ID NO: 47174 - DNA, 1153 bp, Cannabis sativa
taaaataaattccaacagagacacgtgtcatctagctaactgccacatcatagtgcaaataataggataatattttccccccaagtctgcgtgggacctccttcgtcacacatggagttcattcggtcaaggatcttctctgggttggtgacatgtgtcttagacagttgaggttgattcgatgtgactttgacttagagtctctttgtggtttgagcattaaatacctcttgaaagttgtacctcaaatcacgctttaagtgttgaatggcactgcacgcgtgatggttgtacttcttgtaatgagtactaatgttcacttttagggggaaacccaaatattgaaattttaaaagatttatcttcctttttggatgcttataataggggattaaagctcttgggaattcttttaatcatttttactctcaaagaatcagtgcaaaaattcctatccaaactttcgtttaaatcttcaaagaacttgctggaaaatccactgacactaacctctgaacatatcaagaaagcctcgaacaatgagtaagttttttatcccttcgcttttacatgattgcaaatggatatatgtattatttctaaattttttgtcatgaactttgtctattcttgaactgttcttgactaattgaagaatagatagttctagggttttaaactttagccaaaatttaactataacgcttaatcctctaactgcgcatcgatctcgacctgaaattattcatttccacacattcatgagatgctaaatattaacaggtaccaactaaagttttgaacttctaggattgagaatgccaactctgagtgaagctccttcttttcattcttcatctagtcttgtcggcatataaaatctatgtttcatctcttccttcgaccaactcttattttattgtcgcccaccttttgtatatgaaccctagtgatttttggggaggcaagcaccacattgactaggacttgatccaacttctatacgaagaccacccttgactccatgcaagatcatcttcatgtagttatgatctctcaaattctagctttgaagactggtaagtgagcagtgagcacacacttttcctagaactcaaggtgcaacattattggtatcctgacaaagtacatg

SEQ ID NO: 47175 - DNA, 2794 bp, Cannabis sativa
aaggtgacctttttgtgtgaagtcaagaattggtctgaaagtgcacttgccgaggccttaaaggttgctgagtcagctatccgagagagaaacgacaccctccatcctctcaaaatagtgtaaagatctaaaaagatgcttgagaaggaagtagagcatttagattacttggtttatgacttagatgaatactttcatggtcaagaggagagcgctcgcacttaggaggctttgaccttcgacaaaaccttataaaatatttgaaagtgctaccccaacctatccttttgctgttgaaagggtgtctaatagatgatccacttgtggccctccatccccttgtgaagttgttcgtgttgttttccatgaggtcgttgggcttgagctatcttttattattctcattgggtgactaaaatatttatttttttagagaaaaagacttctttctttacacattgtcatcctttggggctatctatgttttttcttccttactggccacttgtgctccgaggctgtttgtgtcaactctaaaattgttgtactggactttgctatgtttttttttttatgactcttttcctttacgagggtcatcaatcttgtgcaactctttcgatgagcgagtatgggctcttttagccagatctctctctttgggtttgtcattttttgtcatgaggactatgggctttctggttcttgtctctctcttcttgcttgtttaattatggagtgttagttccatgaatctatctcaaccttttatgtttattgatagttttgtgcctgcttttaagaatttttcgagaagtgtcctcattttatggtactatttttcttgagcgtctttcaacaccctcatatttttaggcgcctcaggcctagttttttatctgcattgggggtaaggaatttcttaaagcatcttttatacttttcgtgactaagggtagctagtccttgtgcgtgcaagattttttttttattcttacctcctctttctcccaaatgtgtagcgctatttattatgatggacacttaagacattcttcaatactatgacaattaagacattcttcaatactatgactgctgatttcgtttgaaatatagaaatgtgaggatgatagtaacgtaggagatgtagatgtaatacatatatactaacataccattgataactactctgagtaactctgtatgcatgggttgaagctcatcgaggataccccttcttgataggtgttactcatttgaatgaaatagaaatttgaaatatttactactagtattggaaattgtcattagtacagtccttgattcacctctttcattggtacttcacctctttcatgtatggagacttgacgacatttaagtaaatggtttcactgccttttctctaagatttttgctaatgggtgcttttttcacattttttgtaggttggtcatgcatcttcattgtcggctttcttcactcattatcatagtcatgtccaccctaagttttatggaaatgttcaaagaagtgttgtagcattctcttgccttttctgctttcccttcatcatggttaatccttcagttgttaggaattccatggctaggtgataagctgaggtcacaacattgaatcgattcagggaaggtatgcccagtatgacattgaaagcaacagagaaatctaccacaattaaaattgccattatggttgttttatgcggtttctctccccttgtgaatgctagtcctatcatgcccaacagaaggatagagtctctcgtgaagccataaatgggggtttttcttgatttcaagtgttgcaggcctagccccatcttctcaagggtctttttatacaataggtcaacagagctgccatagtctatctgtgacagctagtagtctatcttgtattcgagtcttttcatacttaactttccccaggcgatctgggattacacaaattacccacatcccttgaggaaagtcaagtgttatgactatgagactatgtaggtatgggagtacacctgaagagggattaaatggattaattgtactatctatattaccgaggtgcatcttatattctggtagcccatcacgaaataattctgcagttaagcgtgcttaaactagcgtaatttcaagatgggtgacctcatgggaagtttttccaagaagcgtgtgagtgagaaaaaaccacgctagaaatactcgtgttggtttgtagggctagtcatcagtccaggaagcagccagagtggcgtactcgtgtctaagtgccataatctgttgggaaggccaattggaggcttaaagtggggacgttacaaatagtattaaagccttgaccaagccaaattgtcgacaaggatgttagaccctataatggtgttgattgtggctgtcagtagtctcgtaatttgtaagggaagatactaggtaagctgtgtaatcacacatcacctaaggaaggtcaagtgttatgattatgagattgtgtaggcatgggactacacagttacaatggaattaaatggatttatttgtactacctatattaataaggtgcatgttgttttttggtagcccatcatgaaagaactccatagttaagcatgcttgacttgtggtaatttcacgattagtgacctcctaagaagtttttctaagaagcgtgcgagtgaggacaaagtatgcttgaaacacttgtgttggtctatagggctagtaatcagactaggaagcggtcagcaagacatactcgtgtataaaagcca

SEQ ID NO: 47176 - DNA, 876 bp, Cannabis sativa
  modified_base (832)..(851): a, c, t, g, unknown or other
aaaacgaaagtattggaggttttgccgccatttacccaaaatataaaggataaactgtccaaacctaccgatgtacaaccctaaaaaaaactcagtccaatcagttgctttcgattgaaggccaagcgagtcgatgtactgactcagcctagattgcttcattcgagcgagtcacatgatagatgactcgtccatcttttattgaccacctagtcagtcaaaattgcagatcccaccattctcaaactcattcaccaatgtagtggacccttagtgggccatgtgaatgggccacttctcgtttctcatattcttatggccctacatctacgctccagccttctctacgtctcacctatgccagctcatgggttgggccctcctcattggattacataccatgggtccattaaagctaacccaaacccaaaagttttataatttacaacgagtggacatgtcacactgggcctgcgtggctccttacaaaaatacctgtcctttttgttattttacttttttactatcatatttttatttttacatttttagtgtactaaatttttaaagatacggtcttaaagtatcaaaattataaaaatattgtatttcaataagataaaaaataattaaaagacaattatagaatactgaacaacaacatgaaaataattataaaacaacaaaaagacagctacaaaaaaaacaaaaatataacaagacattgacctcattgcaatatgcaaaacaatatcaactcctcaacatgtttttgtattacgaatttctttttttaatttcttaatttagatgccgtttggtaacacttttnnnnnnnnnnnnnnnnnnnncaaaatgaaagtaaaatttttattt

SEQ ID NO: 47177 - DNA, 956 bp, Cannabis sativa
aagatcattttataaacctaataatataaatattgatgaaaatagagagaagaaaaaaaatatatatcttcttgttgttgttgttgataccctgaaatcatagacattgttcaccattttgatagctgtatcattctccagataataaaaataaaaataaaataaaaagagagaaagaaagaaatggatgtgaatgtttaacctcacacttgatattctaaccaaattaaataaaaacccgttactctctgtattgaaaattttcatagcagggctagataagatccaatccaattcaattaaactaaactaaactaatccaattcaatctaatctaattcaattatatatataaaaaaaaaaaattggatatccaattattgaattggatatccaaagttgaatgtctaattggattggatcgttattagatgttaatcttaaaatttaattaaaaatcgatttaatctaattacagttaatatatattaaaaatattatttacatataataaaaatatttaaaaaaataattaattatattttttttaagttttttctttatttactaatatatttgatcaattagtctttctaaaaaataatttaatttcaccttaaactaaaagaatagcatatacgtttggcttactgtattttttccaaacacgtgtacagtcttaaatctctagaaaaatacctaatagtattttcctttttccttaaatcattttcaatatcaattagattttatgtaattttcttcatcttaagtttatataaataatttggtgtgtgtaattggatatctaattataaaatcaatcaaatttaattagtaattggattggattggattttgaagtctaatcagatctgatcggatgatgatttcctaaatcgaattactaattaaattgaatgaaacaacaaaaaaaaatattaaattaaatcaaa

SEQ ID NO: 47178 - DNA, 1233 bp, Cannabis sativa
aacaccctgcttagcatgtggtcccaaccatgcacaaaatcatccctaaggtttttttcctgtagcgcaggactaggaaggaaagccttgagtttcccaagaacaccatccttgtagagatagaccaaccttttgtaagttaggatggatggcggtgaaacccaccaagaacccctcaaacccctattgtttacaggtcaggccttagtgtaatcctcttcaacatagtcctagtaagctaccaagacttcaccatcctcagagataggctctccatccccattgaagctaccaaaaggaagcacctaaacttcttcctcttcttcctttccttctccctcagcaacgagaggggtagcaagaataacctcaccttagtcgtacacctctttgacttaaaagtgcccatcaacaatctttccttccccaatcgtaggtctagcttagtttgcaccaattgtagcaaacaatcaagccaagtgtggattaatctctgaagctctactcattgtcttgtttgtttatgctatcattctatgcttgggtagaggtttaaattcaatagtgtgccttacaacatttatagcaaactcagcaatagtagctcccttagtagacagagttgggcaggcttcttgtagagtgtcagcaaccccaagctggaccttgtacatcaaagaagcaggttaataatgcctccaacctttctttaagtcctagatgaaacgcccatacccttctccacgtatttggttagggtactggtgatgttacacctcaggctcctgagatggtgtgttcacggtactcacttcccaatcttcaaagctagaatttgaaaggttgttactggatgaagatcaatttgcatagaggtgaggatgatctttgtaaaagagtttgagtaagtcctagtcgatatggtgcttgcctccctaaaaaaaactagggttcatctacatatagatgtgagataagaaattgagagttgggtagatggtaggttaagaaacaggttttgtatgccgaccaagcaagattaaagacaaaatgaagggattatattcaaaaatagaatccgcaaatctagaagttcaaaaactcggaatatacgtggaaatccttagaatcccttgaatgggtaaaaattaatgagcagggcctcaatgttttggagagaaagtgagtcgggccttagtgggatgtttggtcaccggtcactggagtagcatc

SEQ ID NO: 47179 - DNA, 1218 bp, Cannabis sativa
aatagctatataaatattactaatgatgcaggatgacaaaaatggaaatcattcctgttcttcagataaaaagagaggttttggagttagatggaaggatatgtcaaaaaatgattttagctcgcaaaaggggcatggttcaaggggaattcctgctcaccatgaacctattcgtaagagcaatcgggttcctaagagacgagccttggatgctagattggatgaggatgatgatgatgaagatgaagaaattcgttaccttgagaagcttagggcctctaaaaactctggtggcaatgaaaatgggaaggattacagaagccaccaagaacacgtggttttgaagcttccaaaaagtcgtttgatggtagatgggttgtataatgatgctgttggagattatgttttgccaaagctgggaagtagaaagaagtcaagaccggagaaagaattcgaggatatagactacatggccgaagaagaagtgatatccgatgaggaacctggatctgctgcgaagaagttaaaaaaggagtctcctagtccttatgtgcaagaatggaaggaatcaatcccaactacacgaactagggccatgcagcaaggccaagagaatttaaatgggttgtcagcgagttctattgacgtttcaaattacttagtttcctccaaatctagaagtaagtgttttcttttcctctttaatgatttttcttgtgtgtgtatagccccctggtacatatgcatgtgtagtatctaattatctctttatcaccctattttttggctgattacaggaaaaaaggataagccctctgaactggaacaacaattaaagaaggctgaggctgcacagaaacgtagaatgcagtcagagaaagcggctcgggaggctgaggtttgcataccatgctgcattattatggttaacatctcttttcatgaggtttcttgtcttatgaaggattttatacttttaggctgaggcaataaaaaagatacttggccaagattctggaagaaggaaaagggaagagaaaatgaagaaacatagagacgagtggttacaggtgattgcaaatataaggaacattcttcttttgtgaaaccttgttatgatacattgttgactatgagtctgtgtctgttgcttcctgcagggaaaagctgccaatgcccttatacttccatcaaatactgttagatgggtcagtaatc

SEQ ID NO: 47180 - DNA, 1069 bp, Cannabis sativa
ctttgatcgtaaaattaatttgtggatcgatctcagtgtgacttattatgctttttttcattttatgtgtcattttgttatgctcaagtcatcaagttatatgctataaattatataacatggactatattttttatttcagaaaataaaataaaaaatctatattttgaaatttaaaatattgtacctataatttgagcatgatcaaatatctcatatatctttgattttctcagaaaaataaataaataaattataataaaattttcgcgacctaactttgtaaaaactgaggtggcatttggttgaaggtaatgaaatggaaaagaaataatttttcatcttattattttgtttggttgtattttaaactattggaatatccttcgaatagaaaaaagatcattctaatgcaagattttaaaaaaattaataattttattctatttttattctaattctcattttcattcctgttctaatattttcattgtttccaatcaacgaatattttcattctttccaatcaacgaccacctaataacagagaattttttatttttatttttttttaatttataacaaagtcatctacaaaatagtcctatatttgaacatgttttttataaaactcaatcagggcagctatttatgggttaagacggtcagacttgtgtatagaatcactcttcaagagtacctaaaaaaataattttctccataaaaatatactaacttttttcagtaatttttagaaataccacacattttctaaggttgtaataatttaattttttctaaggtccaaaaacattttcagccctgaactcaatctcactaaatctggttacggttgagaaaggtcttatcaaataaataagatgttgttttaggagtgtggtgtggctgtgtggcctatggaaaagcttcagaaagtgacacccattaattcttctcttaataaataatttcagactcatcttaaatgactcaccttcttcagcctccacaagctattaaatgacttgtcgagtccttactcatgagtcatgagttttttttttttttt

SEQ ID NO: 47181 - DNA, 1624 bp, Cannabis sativa
tactttaaatttaaatttttttgataaaattttattaatacaatcagacagtctaaaattttatgaattcttaattcaaatttaattatttgattagatataacttaggactatttgattaaatttataaaattatattgattaagttttactttaaggtactaaatatgtacaatttaaaaatatgagatactaattaagtattattaaaaggattatttacactatatactgaaattttcaatttttttattttttgactgtggggtgaaatttttttcaaaaatactgtgtattgcgtactgtgttaagtttttactgttgttctacagtttatttttaattgttccactgttatttttagttgttttgttttgtgttccactgttgttttataaaaacacagtatttttgaaaaaatttccgtgtgatagtatttttataaaaattacttaaattctaatatttttataaattttcctattaaaaataaaaatatctaatgtatttttcataaaaacacaaattacaacgagtgtattacctttaatttattaaagatagtcttgtatagtagacaatcgagagcaaattcaattcaaaattccccacaaagaacagtgcgtcaacaagttcagtggaataaacaattaagagcaactgaaaaatgacaaaaacaaccatttggattggatcaaaacttgaatttgtgtttgattttctcctaccatatattagcatgcatgattctgccagaactacctagcatatgcatgaatttgtccaaaacaatttgtcaattaaaaacaattaatattaattatatcaaatgtagggtttgtattatgataaatataaatcttttattacttttttaatgatttcttctttttattttgtttaaataatgatttggtagttcacatgagagtgtccaaagttcctgtcccctctgtcagacctactataagtagattatacgaatttgcacagtttttgtaaactcttgggccgacaacactcatccatttgtggcccatgtgagtgtattggtttttttttcttttttctttagagtgagtgagtgagtgttctttatttttatagggacacattttgtcccgtgatgtacttttacgaaatgtattctgtgatgtgcgacagtcgttagatgaaggagttatttgatcagagggctggagttgatctaggggtaattagggaaaaaatagtaacatactctgagattcatctaatgtaccctgagacacatataatataccacggaatacattccgtctgttatttttatgagagttccaattccaaggacggcaactactcaaatatttgatgggaaatttgattttctatgcttacatattcttaaaatttttcccctaaactcataatatttgatatttgtgggatatgacacattttataatatcccttaaatacgccccatttacgttaccccctctcttttcttctctccttatttcactacactgtagaccatcgggccccatcaggcccactatcgtgcccaccatcgggcccaccatcgagcccaccatcgggcccactattgggcccgtcgggccatattaaattctatttt

SEQ ID NO: 47182 - DNA, 915 bp, Cannabis sativa
  modified_base (31)..(51): a, c, t, g, unknown or other
  modified_base (514)..(517): a, c, t, g, unknown or other
ttgaaaagatttccgtgtgacaatatttttnnnnnnnnnnnnnnnnnnnnnagtatttttgtaagtttccccaaatatattactaagtgaagttttataaaagattataactaactatgaacctagctagctaatgtcttttcaatatctttatataacctatattgtaaggaattaaatatttcacattttttttatgctttttacacgtttgattgcgttattgcatctttagttgaggctgttattagagttttcttcatttattttgtaaactgtttatttatagcctattattgttgattatcatctttaagcgacttatcattctctgaaagattaattagagtattcatccaatttaatatgcattattttgttcatagtgcatccgatccaaattaagtgtagattttatattttgaatctaaatccaatctgcacagtaactcaaatccaatcttattgctgattagatcgattattttgtattgattactttttaatattaaannnnttaatatttattaaaaaatattttctttcacataactaacaacaaaataaaacaaattattattgttttatatgtctccaacaacaataaaataaaaaacaacaaatttaaaggaagataaaaaatttatgtagaaagaaatatttagttttgtgggaaatacaactattggtgcaaaatcaaatcaactaaactttaaacaatcaaatgattaacaatgacaagattaacataacacaaatagtaatcaaacgaaaaacaaggatgaacagagtatgaacaaccagaaaacaataacacagtaaaaataagaaatcaacaccaagatatatatgttagaaaaattaataataaatccaagatctatttgtatataacatagaacacaataataagat

SEQ ID NO: 47183 - DNA, 1861 bp, Cannabis sativa
cctatactaatgagtgcacaaataaattaaaataaagattatttgcggataagtattataattttttttattttttaattattttgagtaaaaataaaaaattgtaattaattataaatcatcgatcattattaatgtcgtgaataaaaggtttgtagctaaatgtattaatcataaaattacaatttattgtgactaaatgtatttttaatcacaatatacttgttgtgactaaaagtaaattaatgacaacttatatctaaataatatattttaatcacaaataattttttattgtaactaaaagtcatatttaatcacaaaaaaattatgttatgtctaaaaaattacctctaaatatagctattttttgtagtgatcaaccctccaaactttactttttatcacaattaactctcggagttgttctcttaacctcccaaacttcatatctattagcaattttattggggggtttttcataaatgtgggagaataatttaaaatttacttttatataacataaataaataatgcaaaaagatatgtaattaaaaaataattaaaatttaaaatatgagaaaccaaacaaaaaatcataaataattttgatcaaacttctaataacaaatatcttcggagaagatatgaaaagttattattaccaaaaaaaagtcaccaacactgaaaaattcaccaaaaaaatcactgaatttgtctcattattggaaaaattaccgaaattaaatatctcagacatttaaaataaatttagacattatggtaagaaatgcaccgcgccggccatgcgtaagaaatgttccgatccaaatcttaattttagcagttattttttccataattatatcacactcttttttagagatccttttatagcacaaataggaatcccaaagttggtaaaaagtaaggaattgtgagagaaaatctctgcacattgttctatgaaattcacaactgtctccttcattccagaacactaaggcagttttgttgttaattaagttataaataacaaaatttttttttataaaattaaattgttgttaagttataaagaattaaaacgttatagtaaattatttgaaagaaatgaatacactaattaacttatttggctcagtattttaaatatattttaataaaaataaagcaaattaaaacaactacaaaacattattttcattttactctacatcttcctcgagaccaagaaatagcaagagtaataatacaagaaaactacccaatataatgaatatatactcaatcacaacatttatacatatatatacataaagacagaaaaaaaaaaacataagttgaaatggtggtgagctaaaggggccggggagtcctagccataacccgacccccaaattttttaaatttttaaatgttagtgtaaaaaataattaaaaataaaaatattttttttattatttttatgacatatatatattgcccgttgcccctccataattttctcagctggctccgccattcgtggtggcaaagagtaacccggttggtggtggtgatggtgtaattgagccgaaaagtcatgttattaacggtttaattcgaacttaatttttgataccataaattatttaaaatgcatacatatgataatatcattatacaatttataagagccatgaattactacactcacatacatgagatgtaatgcgattttagaatttaaactagctagacatgtgtcctcttatataaattaacaaattaagtcacaatgttcaaataatatttgagctaatgaatttaaattaaatgttacctacgtacgtacaatacatacataaattaacccaaa

SEQ ID NO: 47184 - DNA, 1050 bp, Cannabis sativa
aagatgttgaagcggttagagggatggaagtttaaactcctctcatatgcgggtcgtttaacactgataaaatcagtggcatcctcaatgcctgtgtatagtatgtccacaagtaaggttcccctatcgacatgccgtgagttagatgcgatggtgagaaaattggtggttaggcaatggttcaaaggatagatacatggcttttcgggcttgggatgctatttgccaaccaaaggctcacggaggtttgggaataagaaaattcgaagacatgaaccgagctttgctatcaaaattggcttggtctgtagctcaacaagaggataagccgtgggtcaattgcttattaagcaaatattgtacttcagagagtttttgggaggtgaagccaagaagcaataattctaacttatggaaaaatttattggaagttagaaacattgtcttgaaaggaagtatggcgctggtagctgatgggaagtcaattgatgcttggagacagccttggattccatggctagagtatgaagaattcaaggggttaatggatagcttaaagccgagagggttcaccttcaggtatgtggctgatcttactttagactatcaatggaatagggaagtggtcttacaagtatttggcatggatttgggaaggaaaatactagaaattccaaggattccctcccctcatcaggacaatataatatggaagggtagcaataatggaaaattctcagttaagagtgcatattttgaggatcaaaagcataggtttggagctaagaaggacttgtggaaatggatatggcatccagagattcatccgagagtttctttggtgttatggaaaactattaatgatgcattaccaaccaagggcagacttccttttatccatgacaaagagtgctgcctctgtgacaatggagaggaaacaagtcttcatctctttaaggagtgccacttcgcaaagcttctttggttcatgggggagttttcgattagaagtgattgtattccagcacccacaattgcagaatttgtcga

SEQ ID NO: 47185 - DNA, 1204 bp, Cannabis sativa
tacatgtcttttcatgatttaatatgaacaaattcaccattagaaatttgaaaaacacgaaaatacacgaggataaatattttactatagtattgatattatacttgaattggattgtttgagaattctgatttaactttttgagatatacatttaataaatctgaaaattaaagtcaaaaacattaattttatgcaaattaaactagaattggagttgaattttaatttcatggtagcccaaaaagcatgaattctaagtacaatttgtgtgtaattttttttatttggactatatatttatttatttacccaactagaggtatttttataatattattatgttaaaactgaaaaaaaccctaaataaaaagtacaacgtcattttactttcaatacaataatgtaaagctcattacattacatggatacaacatttgtatattaagtagtgtaacattaattgcaatgaaaagcattacaaaagattcaaagacaacaatggaatgcaacttttgattccactacaaccttcactccctcaaaccaaacatgcactaaagaaaacttgctcacaaaatacgtagatcagcatacaaaaggtgcaaaataccaaatatagtgaaacaacaaactgcaagggtaattttgtgatttgtgaaagagaaaccatcaaaagacttcaaaaaaccatagttgcaaaatgcaaatctaaagtgacaaatatagtgacactgataccagatcgttaagaatttgacaaactatagattaataaacttggaaatcaaactactagaaataccatgtttcaaaagattgattgtctgcaaattcgcactaacaagagtactcaactaactgaggtagcaaacagaatacagtaaaaccatttaaacattttgttccatattgaatacttgagacttaaaaggaagtcaaaatttcgctcaataacattatatcactcatttagctgccaatttttcctttgccttttgaatcttcaaaaccttcttcacaatcttttgctcttccaccaagaaagcacgaatgatcctgcataaaatgaatttcttaagagaacattcaacttggacataacaattgggaggacttccagaacagttacatacctctccctaacagcacttccagaaagaacgccaccataggcacggttcacagtcctacggttcctcgac

SEQ ID NO: 47186 - DNA, 917 bp, Cannabis sativa
agagattaggttacgaagttgtgtttcgaagagttagcagaacgatgtaagaactggcgagaattgcatgaatgaccaagccaatttatataggattttcggagaggacgagcaagttgggccgtggggcccatcagggcccatttagcctatggaaataatatctttctttattattttttttttggagattaaatgtaatttaatttctcgtgttttctcctcaaaaaaaaaaaagaatactggattccgtaataacgttaatcagcgtcgagttgccgcgtggacctgcgttcgatgggccccgagacgataaattgaagtaaatattgagaggtgagggcgcgatatatcgtgagggtaaggaaataactgcgaagtttctctgtactggtttacagccgttgatgtgtattgatttgaatcgacggttgagattgtgacacgtggaagatgaagtttgttgcggtttgcatttttatattatggattctaaatttgtaactatgtcacaggtgtgcggcttaattggcatttttttaatttttctttttccctaaatatcgcaaaggtgattgattgaattaaggtcacgtggtgaacacgtgtttcgtggcctttagtctaggtctagtgagtctcctctaatttaacggaaatgggggaccttttttcatgttaagtgttgtgtgggtggaggactagaaggtaaaattaaaaaaaatatatattattgaaaaattataccatcaatttttaaaaaaatttaccgatacatttttattaattttaatattcgaaattattttttaattaaattttttctgatattcaagtacgttatagttatttaagacatcctgtaaaaattttataaattcgaaaaatagacgatttgaacattattttttatattg

SEQ ID NO: 47187 - DNA, 1652 bp, Cannabis sativa
attatgtaagtatgaagaagcgagtggcatgcttcatggcttacgtgtttcgcgaggagctccgacaatttctcatctattttttgcagatgatagtctagtcctttgtcgagctaatacgagatctgttgaagctattcgatgctctctaaatctttactgtcgtgcatcgggtcaaaaggtgaatgctgataaatcggttctctctttcccttcaaacacttcattgccaatctaaagtaatttgcaacaaatattacaaatggcaattcaacattgtcatgagagatacttgggattgccattttactctggtagggacaaaaaagtattgtttggtgaaattaaggataaattatagaaatttctttcttggcaagaataatgatgttctattggaggcaaagaggtccttctcaaagcagtagcacagtccatcccaacatacgccatgagctactttcgccttttgaaatttctcaataaacaaattgaagttatgatgaataagttttggcggggttctaactccttgaattcgagtatcaattggaagatttggaaagccttatgtcaagccaaagttgaaggtggtatgagattcaaaagttttgtccatttcaaccaagccttactcgctaaacaagcatggaaaatttttcgatccaaactcactgctcagtcgagtccttaagcaaagatatttcaaaaatacatcttttttggatgtgacacaagcatttacccatcattgacttggagaggtatcatttggaaaaaaaaaaattattaaaacaaggcttaagatggaaagttggtaatggagatgatatatcccccaaagaattattactataggtgtctaaagaatagactaacttacaattggaacaatttgcttgcattatttggagtctttggaacgaaagaaacaaggagcgtcatggaacgaagcccaaaacctttaatgtgttgttgtactttgctctcctataccttgaggaattccattcagcccaaaaccaatagctttgggttctactcagtagcaagtaccatccacaaaggttccatcaattctgcaatggttaaacccaccattggggagattgaaattaaataccgatgtggttgttaacacaatgacacaaacttctagttttggtgctatattacgaaattgaaggggcgataccatcgctgcaatgtctaaacttttcctaggttgttttcgaccaaaagtaatggaagcatcagccttaatgtatagtctgcaatggcttaaggatcttcatttactagttcactacatagagtctgattctcttgtggttgttaaaggatcgcagtcatatcaagcctttgtctctgactttcattgtttgttagcaaatatctctcttttagtgtctaatttttttggagtgtaaatttctcatgtttatagatcagcaaatattgttgcccacgtactaactaagtatactctttcggtggatactgattaatgtctattgtcttataattctttgtttgatataatagaattatataatagaattttttttttttttaaaaaaaaaagtatatactattcatattttttttttgaaaaaattgaccctgggtgctactccacttaatctttggca

SEQ ID NO: 47188 - DNA, 2759 bp, Cannabis sativa
ttataatcatatttatcgcttataaaaaatagattcgttgtcgttggctaaaagtgaggttaacaattgctaatggtgattgtgattgcaactactacatttatcctttctcataatttctctttgaagttggataatcacaattttttactttggtgacctgaagtccttattgtcatcataggccatgatctcttcggttacatccctaaagctcgtcctctaccgatgaagtatcttattattgctgatcaaatttctggtatgttgaccttaaaaagtggataaccgacagtggggtcgtatgaatttgatgttttccacttgttacacgattagaattagaaagtaaagaacacacaaaatttttatagaggttttggcctctttgatagcgggtaatgacctactcccctttcagatgtattgatattgagggataatactcttcagataactaaaggtgggatctgatatagctctcttaaggatacaaagtataaatcaaggttgacaaatctcaagtgttgataatgcttgtatgggcgtgtgagagagagagatagcgaggaagacagttatgagacttagagacttaggcttataactttatcacttggaggatagaatgagactttggttttctatattagaagtaaggcccttcatatagtagatcttaaccctaatttataactgaaacccttagaagtttatacattaaattagttaatttcaaaagaccagaatgtccttaaacatagaaattttccagctattttattgggatgttagggcccaatttacagcccaactcacagtccacatgtagaattctacagaaaatccttcccgttcttctcctggctgggcaaacacctacaggaagcaggttggctagccttagtattgggacttaccaattagattggtgtagttagaactgatgtagcctttgttgaatagaagttagtgcatatttaaccatttgaaatactttgccttgggtatctaaaatcgtttgttgtagtaaactaactactttattttcctctttgttgtgtaggtgaggtaagtgaatgaggggtcccccatgtactatataagttcttttgggggcaaaccctatttgctattttatttttcactctctcacaagaaatttacatttaaagaagatccttcttctctctagagggccgaacccacacaagcaccattctcttagaatttttgcattgttttgtcaatctaagcttcccatctttgtcttcaatgatttcttgttgtgggtaagtgttctattcccgctaattcacgtgatttggttgatttttcaatgaatgcatgaacattagttttttgcttcgaatatctcttgattcctacattagattgttgtcctctatgtatttatatctgtatgatagccttaggatatgtgacgtgtgatttctagacaaaaaagatctgaatctaaccttcgttgtgattcttggctctttgagtctcgaagaacacaaataacgtgtttgaaaccttgaaaaaacacatgctaagatcagtaggtctggccaccaaaggaggtcttgtttaagaccttgtcagccaaggatggctagtagggggtcttgtcgtccaaggggtacaccccatcggctggttggcctatgcctggcaaatagagtcctcgcccgccataggatgggtcatggggtcaagccagccaaggccaaggctccaagcatggagctagttttttaccctctattgacctcagctagggtctcgtgatggtctttgaggcatatacaactacagtcttatgcgtggttcaccttggaaagtctatataagaccttgtactgcgtacattgtagtcaattgtataactttggagttaccatatgtctaagtaagtgtccttaagatggtacttggttaataattgaccttgtacattatgatttacctggaaggtacccttgagtattgttgactagaaggtgtttgtagcttcgttaggttgctcacttccccttatctcttctatacaagtggttctaggtgacggataaggcaggtgaaagccacgtaggtcctttggttatcctataatcatggacaaaataaaacagacttgtcatagagcgcctgcatgtgacccctatgtatctagggtggctacagggggttgagtctagattgtagaggaggctacatagcctcatgttaatgttgatgcagatgttgaccaagcagaggtgcgtgaggtcgaccaaggggttgagagccctgatattgtgtttgatcttgatgaggctaccaccagttagaagaaggagatacatgacttgtattattctctccaattccccttttggtcattacgatgctaattgtaatttgctaaataagctgatctgtcttcagtgttaggcttggaccacgtcttgacccactcttctgagcatgagaccttagatgctagattgcagggaaacatgtggatctcacttgtgtctactatctctactgacagtttttataagatactatccaacaggctagtaggtggcctccattgtaggatacatctgtgggataaattagtgcatagaatggccctcaactggacggcgtggttagagtacacatcgagcaacgatctgcgttaccttttcatccatactttcgagacatttttgattacttcgggatgtgtttgacaaaaatcacctcaaaaagtattaagtacc

SEQ ID NO: 47189 - DNA, 1648 bp, Cannabis sativa
caaaaatcactatgatgagtgatagacaaaaaggtttagagaaggctcaagcttctacatttgagggtgcggaggttagattttgtgttcgacatttatattctaatttcaagaaagagttccctggccttttgctaaaacaaaagttgtgggcatgtgcacgagccacaacaccagaggacttcaccaaaaaaatggctgaactggaggaggttaatgagaaagcatatgagtggttgataaaaaaaaaaccaagtgaatggagtaagagtcattttagattctttgttaagtgtgacatgttgctgaacaacttatgtgaaagtttcaactctgcaatattggatgcaagagaaaagcctattgtcactttgttagagaagcttcgtttttggttaatgagcaggagatgtgttaaacgagaaagtgtttcgaaatgggtgaatccagttgaaaagagggtgacgaaaatcatcgagaagaacaagcaagtggccaggcgttgttcttgtactcgagcagattcacacacatttgaagtaagtcggagtggcatagaaaagttctcagtggatttggttgctaagaagtgtacttgtagaggttaccaactcactggaataccttgtgggcatgccttatctgctatttgtagctttggattgagtgagtatgattttgtggatgatgtttacaaaaaagaagcttatatagctcaatacgtcggagtaatttacccaatgccatcacctgataaatggcctaacccaggacaaaatccaatataccctcctactaattctgtcttacctggtagaccaaaaaaggcacaaaatagagatgccgatgaacctcctgccccaaatgcaactaagatgagaagatttggacaggtaaacacttgcggtaactgtggaaaacaaggtcactctcgccgtacttgtaaaatttcaataatagtacaggtacaaaattataatttgaaacctatatagcttgtagtatttctttatagagctctattattttggtttatgttcacaattgacttgtgagttaaaaattttgcagcctactactcaaaagaataaaggaggaagaccacttaagaaaagtccaacagaagaaacagtgaaaagaaaaaagcggagagcaaagcaaaaggcaagagaggcattacaagcttccacatctcagggacaaccaccatctcagcaacaaaattagcctttgttttggctaaaattaatttctttttgatatatagggtagaatcagactttcttttgatatgttgttttgatgtataccattagtacagatgatagttaatgggaactgctactagtggtgttgctgaactcaaaatatccatgatttgaaactttggaatattttgtacttatgctttgattctatgagcaatatgcctactctattttattatagttatgaatttaaaaaagtttactatttattatctaatgtacactcaagctctcctatagcttttaatctgctcctcacattttgttttatcaactcgtctcaattgattttaaaaaacatgtgctatctctcaccttaataaagattacttgttcaataaagatgaaagattctttctttgtttcatcaccttgttaaa

SEQ ID NO: 47190 - DNA, 2793 bp, Cannabis sativa
gagcttcggggcaacttcacaatggggagctctttccaaagcttgagccagatacgccgatttagtcgagaaacaccccttactttctagcgtccaaacccatctatctgtaccaatcctagagggatggccccctttaagaatgtccgagaccgattctcggtcaaagttgtctcgcagcttttgaatatcccactgcccattatttaacagaagttcagccacacagttcaagttgggagaggtaccctcgatttgtttcggatagaagtctttctgatgcgcaatccagggatctccccagatcttagtattctcaccattagcaaccaacttacaagctccttttctcaaaatggaattagccttcacgacacttttccaaaaccaagaatctgaatctttgtacctgcaactaaggaagtctttccctttgaggtatttagcaattagaactctatagcacagagattgacttccattgagaatattccatccccatttagccagaaaggcctgattcatctccttggtttttcggaacccaagaccacccagagattcatggagacaaagtttatcctaagccttaagatgaatcccatgatttcctttctcaaacccccaccaaaaatctctgaccagaccatcaattttgtttaccattcgagtagagagtttcgaagtttgcatcgcatacattggcatagacaagcccactaactttatcagagtagctcgcattgcttttgataaagtttttgccttccatccctgaagctttgccgtgagattgtcaagaataaaattgaaatcagcatctttctgcctagatctaaacaggggcaatcccaaatatttaatgcagccttcaggataatcaattcccaaagcttccttaatttcttctcgcaggctcaagggggtatttttactaaagaaaatagacgttttgagcttattcacctgttgaccagaccacgagcagaaattctctaaacatctccagaagccattcacctcaagtaaattagctcgaccaaccagaattaggtcatccgcaaagaaaatgtgagagagaaccggcccacccctacttagttgaattcccttaatggacccctgatcaagggcatcatgaaataatcttgaaagaactttagctgcccaaatgaaaagataaggggagagggggtcgccttgccgaaggccgcaagaagggttaatcctcccaacctggcctccattgagacaaatgtttagcgttgtagaagagatacactgagaaatccaaagactgaatttttggggaattccatagcaatctaaaacatgatcaataaaacgccagctcaacttatcataagctttgaccaggtcaatttttatagcgaagaagacctccttgcctttcttcctgttgaacaagtgaatgatttcttggactatcacattgttatcatggatgttccgacccggaacaaaagcagcttgagttggacaaatgagagaagggagtaaaggttttatcctgttcgctataatgttagagattactttgtataccacattacacagagagatcggcctaaagtggttggtacaggtagggttttggactttaggtatgagaacaacatttgtggcatttatccctctatgcatgttccctgaaataaaaaaatctgagaccgcatcacaaaagtcagctccaactgactcccaataatgtttatagaaaagaacagacatcccatcaggacccggggccttatggttatgcatggcaaaaagaactcttttgatttcatcggcactggggcaactaacaaggacctccgagtcatcctgagagattttctgtggaaaaagctgagcacaattgtattccacaccattatcagctccgacaaagatacccttaaaaaaatcaataaattctctcccaatagctccccgactggagatccagacattatctttattcaagatactctcaatgacatttcttctacctttaatagcagccgtaaggaagaaaaacttagagaacttatctccgtccttgagccaagacactctggctctatgcttccagtagatcgcttatctttctagcgtttcattcaaagctcgacggatgtcacgttcctggttccagtcccgagacccagccgggaggctctgaagagaattaagcttaagttctagttcttttatgatcacatccaacttaccgaattgggatcggttccaattgaggagggccaccctggtggcaccaaccttcttgaaaatacgagcaggggcccaatcatgatagaccgatttccaagcatgggctactaccagattacttcgaacatcacgggtccaaccttcttcgaatttgaagcatctcttaaatttgggttccaaacctccagagaggaggcacagcggcctatggtccgagttgctagtttgggcagagcagagaatagcccttggaaataaattaatccaagccccatttactaagcctttatccagcgcagatttcacatggtgcctcccagaccgatgattgtcccaagtcaggttgtccccttggatatgcatattgataagacctctactctcaatcagattagaaatgattggaataaaaggatcccgaccagaagagccatcacgctcaaaatcacaaaggacaaaattggtatcacccaaaataagccagggcccaccaaacctatctcctaatttcagaaactcagaccagaactttttctttgcatgcagatagggggg

SEQ ID NO: 47191 - DNA, 1387 bp, Cannabis sativa
atgttcctcacagtatagagtttagagttattatttgtcatactataaatggtggaaaacatgttatgttttgagaagattctgtaggccatactgtcattatgagtgcatttgtacgtgtttttcttcccttctaagatgtcaatgcttgctggaaaactgtagaaaagagagcatgattgttaactggttttgagacgtgaaattcttacttcttaaattaaacagcctcatttttaagcataaaggtttccatcgcaatagtattttaaatgacacggttaccaatttgtgccacttttattttgtctgtgcttctcattcaattcctatacaaattacttttgtttcttttttttcatataatgtgttaattggtatttgtgacaactaaatggcgttttgcagttgaagaggaaagttgatatcgttgattatgaagttgaatctagtgatagagcaggtcctagatttgaagtagttaatagctctctgcagactcctgtatcagtaaaagctggaaaggctactaaaacatcaaggcttacaaagtgcagtaaagctagacctcaaacccctatttcaaatgtcggtaagtttttcttattaactataagttgatacgctctagaaagtatggatttgttggtgcccatataattcgatctatgttccagtacatttagtgggattctttgtgaaaattgacaggttctccttctggccctaatcttaccccagctggtccttgtcgttatgacagctctctaggtaagagaattcttgtttacgctttgattaacttattttcttaaatctacaaaatgtttgtactatatagggaataagtatgagaataccaaaatatcctgtcatttcatttcaggtctcttgactaagaagttcatcaatttaatcaagcatgcggaagatggtatccttgatctgaataaagctgctgatactttagaggtgtagcatctataatattttcccctggtggtctattgtggttggtggttcatcatcttatggtgtagtttttgttaacattcttattcttctttgtttttacaggtccaaaagagacgaatatatgacataacaaatgtccttgaaggaattggtcttatagagaagaagcttaaaaatagaattcagtggaagtatggataataaatgcttcttagattttgtaaagtttgatgccatttcttaaataatgcgaaagtttaaaatgtagatgtagtaaacattatacatgtgaagtactcaaattctaatgacttgaactactgattgtttaggggacttgatatctcaaggcccggggatgctgatgacaattatgctagcttacaggtacagaaattatggaatctgtttt

SEQ ID NO: 47192 - DNA, 960 bp, Cannabis sativa
ttatgccactatttaccctataaataacattacattggcatatcaattgttgatgagaatactttaatttgtgctttgaaaaggtagagaatcatatgattataggtgaatgaattgtcaactatttcttcgttttttttatttggaactccaacctataacggtcacccagttgtttatcatgatttatttatttgacgctgatttcaccgctcttgctctattttgtcggaattaataattattttttaggtgttctcttatcgtcgtgatggttgtgtccgtgggtgtagaagatgggggctatgaatatatttcttcttcgttctctttggctttttttgtagtttttttattttggtaaatacatttaacgagctcactgacaaaagagttttgaggtgtgtagttcttttatatttttttttttataagtggttatgtctacttaattcatttgttttacatttgtttttgtgttgttttagttttgttttagtagtttttttattttgattttttaggaatggtcttacaaatacagttgattttgcttttggtgttaaggttgtgcagaagattgtttgttttcttttgatcatttattcttttattttgtttgatttgttttagtgttgttttacagttgttttgtcatgattatttacctaacgtcgatttcactatttttgctcaatcttattggaattaatagttgttttccggttgttctggtattgttgtggtggttctgtctgtgggtgtggaagatggaggcctcatacttttttttttggtgtttacaatacaaaagaaaaaaaaaagcgagaggacagtataatataatttatatcgtgtggcagtaaaattgaaaagttaaatccaatatttttgtaaaaacctttttttttttgggaaatttgaaaaactatccacaaaaatctctaaaattatttccct

SEQ ID NO: 47193 - DNA, 2017 bp, Cannabis sativa
ttacagtcgttttacatggctgtacccattgagaactaaagatgaagctttggcagctttcactcaatttaaagccattgttgagaatcaatttgatagaaaaatcaaggctcttagaactgactggggtggtgagtttcaagcctttactgacattgttaaggtcaatggaattgacttccaacatccttatcctcacccctcagctcaaaatgggagagctgagaggaaacatagacacatagttgaaatgggcctaaccctccttgcacaagcctcaatgccactcaaattttgggtggatgctttccaaactgctgtccatttgatcaatagacttccaactcccatcctacagatgaaatcaccttttgaaactctgtttcatgaaaacctcgattactctcagttgagaatttttggaacaacttgtttcccctgcattcgcccataccaaacgcataaatttcagtttcattccttaaagtgtgtcaacctaggctttagctaatcacacaaaggctataaatgcctaagttccacaggccgtgtgtacatttcgaggaatgtcacatttaatgaaactgagtttccttttaaacaaggttttctcaacacctatgcaccagaaaaagaagccattgtccacaatccagcctggtctcagttgccttttctgcctttctcacacaacactcccctgcctactggtacagctcttgacccttctgttcaagcatcctctgaagcaacatcttccaacaaccatcatattactgatattgaaaatcagcaggttagtgattacgaacacacaccagctgatactgttcgtgctactgaaccacacactgttgcatcagatcgagctgaaccagtagttacagaccagagacaagcaacacagagtgaacagattcctgtgccttgccatcctatggtgacacgtgccaaggcaggcatttttaaaccgaaaacctatctcagcaaaacaaagtggattcccaaaattgaagaaccaaggagtgttgaagaggctctcaagtctaaggaatggaatgctgcaatgagtacagaaattgttgccttaaagacaaagaaaacatgggtgttggttccttattttgatggtgtaaatctggtgggtaacaaatgggtgttcaaaattaaatacagggctgatggtacagtggagagattgaaagcaagactagttgctaaggagtttcaccaaagaccgggaattgatttcagtgagacctttagtcctgtaatcaaatcatctactgttcgaattattttaacaattactatctcgagaaattgggctattaaacaggttgatatcaacaacaccttcttaaatggctatcttgaaaaagacgtttacatgctccagcctcaaggtttcaaagatcccttgaaaccaaatcacatttgtaagctgaacaggtctctttacggccttaaacaggcccccagggcctggtttgacagacttaaacaaactctgctgctatggagctttgtgaattccaaggctgacacttctttgtttttctacatgacagatcaggttattatacttgttttgatttatgtggacgatataattgtgacaggaaacaacttgcaaaagctgaatgagtctatagcaaagctgaacaagcagttttcgctaaaggatctcggttcacttcattatttccttggaattgaagtgtatcgagatgaatatgggctgtacctcactcaaactaaatatatcacagaactgctggaaagatttgatatgttgaatgtcaagttgtgcccgactcccatgattgcaggaaagcctttgtcgaagaatgatggagatcctctcactagttcgagtgtgtacagaagtgctataggtgctttgctgtacctaagccataccaggccaaacattgcctttgccataaaacaaattgagccaattcctacaaaatccaacaacaactcactcgagtggagttaagcgaatcttgag

SEQ ID NO: 47194 - DNA, 2663 bp, Cannabis sativa
tagaaaagaaaaataaagaagttgctgtataatgtaatgtaaaaatttgagattaaataaaaaaagtaaagttttgatgatatattttaaaggataaaatagaaaagctattctcagtgctcttatcgcaacacaatttactttttacatcaaaataaaaaacacaatctacttttttttttctttttaatttctttactcgcaaaaaataatataataaacagctacgaaaatctaagatagattattcttttaatttgccaatatgagaagaattaaggaaatttaaaaaatactgaaatttaggttaacatttacaaaaatactgtcacacggaaaagttttaaaaaatactatgtttttataaaacactagtagaacacaaaacagaacaactcaaaataacagtagaacaactaaaaaaacaccggtaaaacaccagtgaaaatttaacacagtatactgcagtatgaaacttataagaaaatacagtaaaaaagtaaaaaataccgcgtgacagtatttttgtaaaaaaataacaaaaattagtataccatgtaaatttcccaagaattcatgcgtaagagaaatgttaaggccaactccaataatgacctctaaatacttaaatatgttgagatttggcactaaatacattctaagtaaatttaatcttataaataagtttgtctaatgtagactaaggtagaaaatttcaatgacttttgatatttaaataatgcatatataatttgtatttatatattataatgtgaaataataaatagataatatagtaatgaagaatatattttttagtggaatttttagtggttggaatagaaaaaataattagtgttagaccatctttaatggtaaaacccatatttagtattaaattcacaccaaaaaagtactatttcagtactattttttttttcattccaacaacaatacttaaaggtataattattattattatattattttattaatataataaaaataatttaatgttaaatatttatcaaatctagtaaatattaagatgaattatttaattattaaaaaaattatgtcgtggtctacaatatctattattattagtggaacactgtaaagcctcgtgaaaataggttggctttttgctgtatagttaaagtattttagaggaaaaataacaatatacatatgagtttctgtggttttattggagatggctttataataagtcttttggtataagttcaataccaaatttaaatttcagcatttgagataccttaataagataaatactagtagtggtcctagcaccttcaactaataaaataatcttttaaaaatatcattaactaattaaaataaaccacttataaataatattagtcactactattgtttaaaagatactaatagtatttagtatttttctcaatgtcatgtcgctattaatttaattaaaaatcgagtttaattctacaataaaattttagtaattaaataaatattactttatatttataaaaaaaaattaaaaattaaagttcatgtaacttaactaaataattgtagagaatattattaatgaatgtaagtatcactagtggtgctcaatgcataaagaatttgtttagtatgtcgtattacatcgtattatattatatagtattacattaaattgtattttatacgaaaaattatatataatattaatttttataaacacttaaatatataatattttaatataaattaaaactaaaaataatattatataaaaatatgctatataatctaatttaatataatataatattataaacgaggccaaaaagagtgaaatccaaagaaaaatgataagaagttgattatgtttctgaaaaagctgattggcttgtgagggtgagctggggctggtcaatgggtagggaatagggaatagagggaggaactgagaagagaagaccatcatctcaatgtctaatctctctctccaattccaaagagcctgaaaatcaaaacataaaacgacaaaacgtagttttggaaaaacaattgcacaaatgagattaattaattaatataattgtacttggattgggtcccacaactactttacttgccttataggtgaagcatgtgacaattgcgtgtcctttcctcatttgctatactggattcccttcaacaagtctcactacccacacttcaaactcccttttttttttattcagaatttatttaatcaattattttttaataattatatagtgaaagttttgatagattttttatttattttagcattaaaaaataataatctattttttttataatggtaatattataattatctacgataatgtataattttttaaaatttttttaaataatttataataaaatagtatttaaatatttattacatacataattatttttttttgtacacgtaataaataagtatttaaatttaatttttaacactataaatttttcataattttctaaaaatttaaatcaaataattataacttatgagattgtgaaaaaaaaaatagactaattttttttaatgtcaaaatacataaaaaaaaaaaaaaacctactaaaacattattttaaggaatgtactaaagttcctaaaatttttacacttc

SEQ ID NO: 47195 - DNA, 3259 bp, Cannabis sativa
aagaatttgtttcagatgggagtagcagtagtagtggagagaaatggggtacgcacgtgatgggtcaccctgcagttcccacgtgccacccttccaacaagaaagcagcgttgtggggtggtgcccctactgatgacgaggctcgtcgggttcactacccttatcttcagtacacccccattgaaaaggctcccaatagtactactccgatggactctatgatccatgccttcaattcttggagcaacaaggctgagtctttggccaataacatctggcataaccgtaattaactaactccctctcaatctcaaatctctatatattttgttttttttattattagtatatagattgattgatggggatctttatttttcttttgagttcgagtaaatttgatgtgttattagatatgttattgaatagtgttgttggtatgaagatttgccaaaaatttaagagtgttttgacttagaatgaaaaggaattggaagaaataggtaatagtttgagattctctatttaacaaaatactaaatattagtagtttttttatattattaattaggctaactagaatttttacagtgaactttgatatttattaaattacgtctctgaattttttttagctgttaaaaattcttcttaaattattgagaatgttagatttaaagacaatttcatttaattttattaattctgtgattatctatatacaaaatcatgctatctagattttaatatctaccaaatcatgccctcaagtctcctgaagtagttcaaagagtaaaaatctgaattagcctatttattaaattaaaatataggagattcaatatttaattgaaccaatagtaatgtaaagaggtgttttatcccaaatcctctgaatcacatgtgaggaaaggatggggtttggatttgaaggtgagttggacattatagtatactagagaaaggaatggttctctcactataggaaaaaagagattccattccttcctgtttatcggtgctggacaccttaatgtagatcaacgctatacatccctctccggtggaaacaaccatcgcggttcaaacaattacagtgctccggatcaatccttagcccatggaagtttccaccggaatgaaaagcttttagcatttctcaaatattactatgcatttataatgcatattagacatttgatgaagtaattagtgaataataggatactttcttttatgacagttaaaacggggccgtcaatgtcaggagcagcttgggggaagatgaacttgacagcaaaggcattaacaggaggaggatatgaaagtctttacaagcaaagcttttctacttttcctaatgagaagctaaagaaaacatgggcttgttacctctctacatcaactggtcctgttgctggaactctttacttgtcaaatgttcatgtagctttctgtagtgatcgacctttgtctttcactgctccctctggccaacaaacttggagctattacaaggtattattcattaataataactctcaaacttttcacttatgtacattctcatattgtcatacatattaagatatgttgtgttttattgcataatattttgttcaaatcggatttcgggtattatgtaaaataaatcgtatgaattatcatttaacaaactgattagtaatttgtgaagaacataagatttaaactagtatgtacacaatataattttatgtataaacaaaagtggtaagttttgaaaagattttagagtttattttgtacttggatattatttgataattgttcaacctgaaaagtttagactgaatattatcaatttgctattttgtagaagctacttttacaaaatattatcaaatttgctatgaaaattgacttgaaaaagataagccatattactaaggtgtatacttaatggttttcatgtttgtgttttgattgttgaaaaaaacaggttatggtacctttgggaaacattgggacaatcaatccggttgtgatgagggaaaatccatcagagaagtacatgcaggttgtgacaatcgacggtcatgatttctggtttatgggatttgtaaattatgagaaagcatcaaagcatttgactgaaagtatatccacttttgtggcttctggatatactgttccaccagtcattgctaatcaaaaatagtctttcttactagttactataataatttctattaatttatgagagtgagagcatatattgttttgttttttatcatattcgtcagattgtaatattctttcattttgatgtgaatgatcactttttctttttgcttaaatatgatgtgaatgatcactttttttttgcttaaagatgatgtgaatgatcaaatagcatataacactgatgaccctttattatgtgctgtcaaacaaagtgaactaagccaatttatagaatagttgaagatgtcatcacataatcttttgaggaaaaaaataaccaatttatctaagaatgttgttttcttcaatatttatttgtatgattttgtggattttacgtatggctattaaaagaagattcacattcttaatattatttttcctttttcaataacatgacagagtctcacatgagaattagattagttcatatccaaaataataatccaactgtctgcatcacttggcttttttattattaatttttctttctattggctcaaaaaatcccaaaataaaaactctgatttttgttctatcttcttgaacaagatggtaatggttgtaacaccaagcccacttacaagtccatcaataaaaaaatgaaataaaaacttccttataatatcattagaggcaaaacatataataatgtctctaccaaaattgatagcaagtcaatgattccggatgtctctagcattaacaactattctcaataagtctatatcatcaactaacaaaaggtgtaaattaaaatggcatagaaagccatatcattgcatcaagtgacgcccaattgggaagccattagatttttgtgtttagtaaattaacgcttcttcttgcttccctttccggcacctgatttcgaaggactggccaccaggtagataaacataaccacaattgagatcactgaaattagggatccatacttcatcaacagcctctgcaaaattagacaaagctcggaattagtacattgctttgacccttttgagattatatcttagtgaaatcaccaattgat

SEQ ID NO: 47196 - DNA, 1028 bp, Cannabis sativa
cgcgcagggctggtgcctagcgcgtgctgggcgtgcgggctgggcggcgtggagctccccttggcaaacttttgggacatatcactaatgactctaaatattacattaagtaatctttaggagtcaacaacacttaaagtgttttggatgtaaaagtaaataccaaaaggaaatgtgagtttggactataaaattagtttgtaagttaagtatcacagatcacataattcatgtagtattgtgtcaatgtctctttaaatatgaatatggagattaaaattcgattaagacacaactgtgtaataattgattagtgatttgtttatatatcatcttacataagttttaagttacggtgcatgtggctattgttaataataaaaacaaattaggtagttaaaaagaatgttcaccaaaataataataaaataaaacttcaaaaattaaaataaatatatggaaataaatgtgagaataaacatgttttgaaaatataagatgataaaaaaaatgtgggtggaaattcatggaggtcgtgtcaactaaaggtgaagcaaaaataaataatgtaaaaacatatatataaaaaattaaatagtactaatatatgtttttttaacaaaatataccatctttttatattatatttgaccatatgtatataatttatatgtagtttagtggagattatttaagtagttctaatcattataattttattttatttctaatggcaaattaaattaccacttagtctgttaagcacactgccttgttaaattgttatattgtaatgtattgaataatattgttttagtttggagtctgattgcaactgatttgttgcctaatttggtaataaagatggtgatttaataaagttattattttcattcaaaaaaaaaatattgttttaatttttattctactgtattatataatattattttaatatcatattatatttgatattgacttgttttaataatttgtataaaatttaaaagatattcttataacctgacctt

SEQ ID NO: 47197 - DNA, 807 bp, Cannabis sativa
tagtttagtaatatttgtattgtacttttccatttgattagatgagtatgatatcaaatcaaacataaactatcttctagccatcaagccctaatgggaatcacattcaattgtctttattttttatataaaaagatgtgttctttttcttcttaacccacggccacattggtcggctggtgtcattttcaatctttctttctgtttttttttaatattttatttctatgtatgtatatataattttattaatttctttcccttactaggtaggtactaggtagataatgaaatttgaaactaagaatattttagactaattgtctatttataccgttgtatgtaagatcttgtaggatatgagagtcaaatataattttgattgaaggtcatagtcctggtctaagttaaggttaggagggttttagacatgaatcatggaaacacatttgcatccatagccattgtcactaccttatgaaacaaaagtaactttcacatagttttaatagaacaaatcttttttcttatttactatatttttctaaaaaaaagatagaaatctcatatttgtaaaacaataataagtttcgccaaaaaaattagtgacactgaaaaagtcaccggaaaagttatcgtcgccggaaaagttaccaccgccggaaaaagtcaccgtcgccaaaaaaagttaccaaaaataaatgtcgcagatataaacaaaatagacctagttctattatataatgaataaaaacaaataacctaaaaaaattcaaactagttataattgaaatataactggtactg

SEQ ID NO: 47198 - DNA, 1548 bp, Cannabis sativa
atccacataattattaatatttataacacaaactaatttttttctcatatttttgcgaattcccctacagaatagtattataaatgtgtgaaatcacacattttatgagtactgtgcaaaaatacagttttttttttcaaaaaaaattattttatgagaaaaaaaaaataaaattattctctcatatctcttaacttttttttttaaaaattttcccttaatgtttttttttaaagctatatattgtaaatttttattgtagaaatcataaaaatgaaactaccaataaacaattttttttaaacaaaagaaggaaatttttattccaacaatcactgaacaatatacactgccgagcagcaaccaaacaactcagaatttgtttatcaaatttattacatcaatttctcttttgctaagtctagataaattgacacaatgagatcgagctttgacaatgatcttcacttgatgactaagaataagagttgagccgcaagatgcttcaaatatgcacctgtccttattgcaccacacaaaataaaccactgcagtaaccaaaattgttgagagttcctctaccgaacctttcaaaggcgacaagcatctacctaaccaatcagctaagtgatttggccagtgaaaccaaccaaaccaactcatgatttcttttagcaccttccttgtaaagatacggttgaagaaaagattatcactggattcaacttcaatcacacacatcgagcacaaagaggagctaatagaaataaatctcccaataagatctctaatctgttgattttgtggtactaatcaagtatgcaggggaaaaataatttttgattatcatcataccacatcctcaaaatcaccacgtgtatatatattaaatctgaaataaatagaagaaaaaaaatttacttcttgaagcctatcagggtatccttgtttctttttgtaagttgtatccttggatgatggtaaagaactcatattgtagtcttctgaattttccaccacacacaatgactattgtgggctagtaggatatattgtatatggagttcttagtttatttctcaacacatgcgtaagaactagggctgcgcatgggtcaggtttttgggtttttggatggtcgggttcagatttttggattttgggtgtttaaaatgtgtaaccgaacctaatttttgggtggtcgggtctggcaggtttcgggtcgaatttgtgcgagtatgttgtggtcgggtttaggttttattgggcttagtccaaatgaaacatttttggaccaaatgaaattttgtttttaaaattgccagtagattttaggctatcattattcataaaaatcattatttatatcttgttctctataatattaaaacgtgatggattaatatatatatatatatatcaatgtactgttacactatatattatttgagcaataaataagtgggcaatatttttaggcatatgagagaaaataatgcataataaaggcttaagattcatacaatggaaaaactaaagtggcaacag

SEQ ID NO: 47199 - DNA, 1388 bp, Cannabis sativa
gagaggcatggctgcctgagcaaggagtgtgaggcccatctcaataatatgacgatgctttctctcagctcgtccattttgttccgaagtatgaggacaagagtgatcaaaaatgataccattgtcaagaacaagtgaggaaaaagcttgaaactgtcctccccaatctgttcttagtttctttatttttctttcaaattgtgtttcaaccatgcttttaaaatgagtgaaagcttctaatgcatcagacttatttttgagaggatacaaccaggtataccggctgaaatcatcgagaaaatgaatgtaatatttaaagctagtgtgggaagtgatgggggatggtccccaaagatccatatggatcaagtctaagacatgagaggctctagatgcagagttagtaaatggtaaagcatgagactgccgtattggcatgcatcacaaaatgtcaaattatcattaataggaacggttacatttgtcattttgagaacttgtctaagaacattacttgagggatgtcctagctttctatgccatacatcttttagggaattggagaaaactacagtacttgaagaggaactggtggctactgctgtgaatggtttttgaagtgtcttgtgaggtagattagatgtttggagcatgtaaatgccatctttaagagctccttgcagaaccactctccctactggttgttccttcacaacacaagaatcatggaaaaactcaactgagacattgttatctgaggttagtttagaaatactaatcagatttttcgaaatagaaggaacatgcagaacattatgcagcagtaaaggagtattagattgaaattgaataaaaccagatcccacatgtaggataggtagtttgctaccatctcctattgtgatctgttccttacccccatactcagctttgttttgtatcttttcaggatccgaagtgaggtgattgctggcaccactatcggcataccagctgtcatcattcacggtttcaggagcagcaatgagagctgtgagttgcttgtcttgattgttatcagtattgggttgatttcccatgtaactttcatcatatctgttgtaacagatagcagccgaatgaccatatttcccacatacttggcaagtaggttttgatccttgacctcttcctcctcgacctctgccacccctggagccactgccttgagaaaagcctggtttgtgatgattaccacgattgttgttgtgactgaaattaggccttcgagatgtaccccctggattgtttgagtgagatggcttctgagcaaagttggcagtgggattgttcagaccttttgaagcattcagcctttccaaccttccatcgaagctgagaagcatgtt

SEQ ID NO: 47200 - DNA, 812 bp, Cannabis sativa
caaaaagtgtgtttttccaagactcaaattttttctttgtgttctttgtgattgaaagagtcaagaatcacaacaaagctcaaaatggaatctttttcatgaggaaatcatacagcatgcatcctaaaactatcatgcgaatcaaaatattaaaaagtatacaatctaacgtgagaattaagaatataaaaagcttgtaaaagcttgaattcaacaacggtagattcaaagaaacaattagagaacgggatttgaaagcttacccactagtagaggaagcttatgggaagcttggatcgtaaaaaaaagcaagaatcccgatattctttggacttggacgtgtcaagatccaaggaaaatgaagagcttctcttttttccttttttgaagagagagagagagagagagaataagtggtgatgtgaaaatgtgcttgactaaatgagccttaaataggttctggtgagcccttctcatcaaacatgcaacaagcagttacacagcctacaaaataaccgtgtagaattttatcagttccctattggggaaagtgagtagacaataaacaaaaaatattttataactgaagttgttacataaacttgcccagttaagacttcaacagtcagaactgaatttagaaagttcctatccgtacagacgtccgtacagggacttggggggcaagtgttatcccaattttttcccacgtgacatggcacgtgttaggaatattttaccaggatctagattcactaacaagtatgttgattaacatcctaaatatgacttttctaaaacgatgaaataaa

SEQ ID NO: 47201 - DNA, 1693 bp, Cannabis sativa
tcctttcatccaacacaatccaaggccccccgcacttccaataggagggatatagtgcgatctttcaaacttcaacttgttacaaattcgcgaaaacttggtgcttagtaaccgaacttcagacagaattaccacttcgggattatgttaacggacaagtgctgccaattggcgaactgtcgtggaattcccgagaccacgacagttctaggatagtattttcatggcgactgtggagactttcctgggcaagtctccatagccccaaatcgaaaatcctcctatctgttattttgtttgccttgattagtcgcaatgtctgggatttcagtgatgatacaactcgtactaggtcgtgcattcttctcaattactacaaagtggttatctagattcacagttagatcaaaggaactaccttcccagtggcttaagactgttgatcttcttcccgcccttgccttagagtgttgtcttcctttgaacgattttggcgttgctgcaagcttcacttggttcttcggtggtctgcctcttctctatggggtattggattcctctatgcctgccggagttttttgatccacctttgattgaaggtaatcagtaagtaaccatttttaaagtcttgaaatgaacgaaaatagttgatagacagaacgtgaatttttacttttgagacaaaaatactttgagaaatgtctgtaaaaacatgatgggaaaaatgatatcaaatatgggttctaaaacttaccacttgcataacatcaaatcaaatattgacaaaaaattttatagactctcctattaattattaaaatactaatataaaccataaagttttttaaaattatacccaacatttgttattttttttatataaaattacactaaatataacatttatttaataactaaaattttattattgaattaaagtttaagtataaaaataccaaagtttttattaaagtgcttaaagagtcaacatttattgtggcattggtgctaatttttggcactaatactaaatattttttaaaaaaattaaaaaaattaaatttttatgtacttataatagtgtggaattgtggtggcaacatctaggattatgatgcaaaaaatacataaaaaaaaataaaatgttatattttagaatgatgtgaggataattgacacaagattacatgctattaatctttgagtataataataattctcatttctttttgtatttaccggtgccattttagatattgttcccattataatatctaataattgaccttatgacatgtattgtaatttgtacgtaagatatgatgtattgggtgattttaattttatttttgtgaggaaaatgcaaaggggtcatagaaggatggctccaaatttatatgataaagtcaagttcttatcctgtgaaagccaatgcaatggcattggtcaaaggccatgtaatattaatctttatattaaattagaaagtgatgtatagcgacttaacagtcatgtacattgtacgatctcaaacacaatgtacattgtacttaattcccttaagagcattggaaaatatggttaaaaaaaaaataataataaaaaagagcattgaacaatctctactctataggtgccaaaaatatatacaatcaatttttttttttctagttcgtccagataagacactttt

SEQ ID NO: 47202 - DNA, 1537 bp, Cannabis sativa
  modified_base (786)..(787): a, c, t, g, unknown or other
tataaccccctattgagcatgggatattgaaactactcggatctttaagcttgggcggtagtttctcatcttcttccttgtcaagtattaattcgaaattatttaattgtaacatttgatcaaacagtagtacttattgatcgaatatgctcaaaaataccgatctcaacaatttcagcacaataatattagtgcttaattttcatgatcaaattcagaaaatccaagaatagtgggatgttattatatattaatggtaaaaatagctctgctggagctagcaacgatctggtggaataggtcgaggaaaataaaatgttagaagaagaatagggtgagcaaactgaaaaccacggatggcagtcgaaagagaaggggagttagagcgattgagaaagaaaaaataatttagaaaattagggtttgatgagagagaaaaattaataaaatatggtattttaaattgataagaacaaaaaaaaaaaaaaggcataataaataccatataattataaataaaaaataaccaagcccataaaaagtcgacaaacataaaaccatcatatttttcaatgaaagtttaaaaatattatattttctcttttggaattcaatgaaatttagagaagtaaatatatccaatgggctttggctgagcatggtgttaggtttttttagtattatttctaggataatttttagtgtgtttttaatttagttctactcttatttggagcaattttacgctttttatcttttatttttgtagatttaaaatagaagaannttagaaaatatcaaaggaataagatcgaaaaaatataaaaaaaatatcacaaaaagaagatatataaaatagagaaaatagtgtaagaaaatacagctcaaaacttcaagcctgaattcgactattttctgattagaatttggaaaaagtcaaaacataaaaaattaagattttttgttgtgtgggctaggcatctgttttgggcctacccaatccactgtgtcctaaaaaaatattttccctttcaaaatatacaatgttttagtgactgtattttgcgataaaatcaaaacaaagggatgaacaagaaacggctacgaatcgcaatcaaatgtccttgtcatagtgacatgttgaacacttatatattaatggcaaaaatagctctgttggagctagcaacgatcaagaggactaggtcgaggaaaataaaatgtgagaagaagagggagggtgagtgaactgaaaaccacggctggcagtcaaaagagaagggagttagagccattaagagagaaaaacaatttagaaaattagggtttgatgagagagaaaaattaacaaaatatggtattttaaattaataataatatctggacgcgtacatacctgaagatacattagactccctacagttgatgcatagggaatctttttcatttcctcaatttcaaggctgcttttacggcattgatcactaagactgtatttgtcccctttagcaataggggtatggtctacaatcttgca

SEQ ID NO: 47203 - DNA, 2161 bp, Cannabis sativa
tttttaaataataataaaaatatttttttttagtaactgtaataagtaacaacgtcataatagtgattttttttaagaaacataaatattttttttcaattttaatgtttaataagaaaacaacaataaaaatgtatttttttagatatatgaattgggtaaaaaagataatagaaagatattttttagatatgtgcataggtttaaatttgaattgcaatgttaaaaaaatatattttatgttatatagtcacattcaagataaaacaaaagataatagggattagtgagtttatttaaattgtattgttttaaaaattaaaacaacattagctagatgttaaacttttattaagtgtgattggtcattttcgaagaacccattctaagatcgaactgatgggaagctccaaaatataggtggggtggcctcaaagtaggatctagttgtaacgaagcctccgaaaaaagttgattacactaaaatgtaagtttggaggctccgttacaagatttgactattgggactaaataggtggggtggcttcaaagtaagatctcagagtatttttaatgatgcaccattctaccaaactgctgtgaattttaacatcatttcactctaatgacacactaaattatgcaccaagttggtgtgtacaaataagtgtaatttttttttttggcactctatctcttattttattttattttaaaaattaattttacatcttagtcctcaaagtaaattttagtaataactaatttaaaacactaatatattaaaaaataacaataacaaaaatactaatattaaataaaataaaagcagcataacactaaattatgaaactaaaaagaataacataaataaataaaaataaacattaagtgaaataatagtttaataagcattaagtgtgatttatttaatttttcttttatcaaaaaatgtgtaatatttaattgatttaataaatattttattttactaaattattttaaaattttgtaaattcttactagtagtcgatataattgtatcataaactaactattttgaattataattgtatataatataaattatattttaaaattcttactagtagtcatgatataattctaacaatttaaaaaaaaaaaaaaaaagttatattttacacaagtatttaaaaacctaacaaaaacttccgaagcattttcaaatgatcaacatagacatttacaatgttgattatcaaccaaaataataatgaaatactaatagagtaaattacggtcaaactctctaaaattttactatacttacaactaatctctaaaatcaattttttgacactaaaacctctcaaactcgtattctgttagtaatatagtatttccattaattttttgttattaagtgtcatgttagattgtccatatattaatgtatacatttacatacatatgacaaatttatattgatccaaatcatttaagtatttaaaaattattttaaaaaagttagtttcataaaagaaattaatgaataaataaaagacaaaaattaaaacctaaataaaccctaattttattaaccctaaacctaaatcctcatatctccaacctctcccttccgttgcctccctttgtattttttccaaaagaagaaaccataatctcattgtagatcggttggtgttatacctttgccgaaccctaaggacaaagaatccaagcttaatcggcagtacctaggctcaatcggtggtacctaaggaaaaaaaaggcctcccaagcttgaagttgcgtttctccactcacaaactctcggttaactcggttgagcttcgccggccacaagacggtgcaacaaaggccaccatcgaactcaagacggtcctgaaacccctaaccccgtgttcgctcatcaaagtttgatttttcgtggtttttaagtgatttttaggcgattctccaatctcctaaacatgtatctctcctaacaatctctctctctcttctatctcgttcctctctcttttagtcccggtctcctctctctctcttgctgtcacaattttcccctttctctttggaaaactgatcgaaaggtgtgtttgtgttgggaaaaacatatctgagctgagggtttttttgtgtggggaaacagatg

SEQ ID NO: 47204 - DNA, 860 bp, Cannabis sativa
tttgtttgcaatctttccaatatcgccaaccatagaataattcgatgttcgaggaatattaaaacgctcccaaacatgcccatattagctctttttctcctccttttatacttcataaccaaagctaattatatatttatattatcgtaactcatgacattctgtcatatataactcttcattttgttcttcatattttgcctcatagttgcaccaactatcactttttaagtaacattgttcatccatttaacccataaaatatcttgttttgttactgcagccaaaacatatttacccaaagttgcttggttccgttagagcaattttctaaatcccaaaccatcttctttctttggtctacaaatattaatccaagacacataacccaaacctccatgatcatctactcatttccataaatacgttcaacaaatgtttatcgcatcaaatttttgtttcaataagtatatccaagtaaaatatgaatatgatagtgctctcaaacatcacaatagattaaattaaatttattttctgcaaagttattgttatttggaaaagacaattttctttatttagctataggacagagataacaatattgtgtttgtttatgtaaagaatttacagtgtagcttatcactaagtaagctaaaaacttttgagataagagtcctagtcttgaataacataggtctacaaagattgccaaaacatgagcaggtggtgaaagatttagcatgtacaatccattcttggttctacctctgccaatcaccttctggttgagtttgtatcactctaatggcttaggcatgctaccgcgctatttaaattattgtacaatctttgctaat

SEQ ID NO: 47205 - DNA, 1567 bp, Cannabis sativa
ttttttgttagttgtacatgattttaaatgggaaaacaaaactttttgtagaataaagttttagagcacaaatcaagagaagaggtaaacacctcataactctcgaaaaatgaaaaaaaaaaatagttaaattgtcaaaaaaaaaaatagactctagaaaatgtataattagctataatagctacgctcgtggtctaagaaaaattgtatttacatttacttaagaagagagagagaaagcgagctaaatactatttaatcatttttttatatttatttatttgcttttctctattttttttacttggtgttatggtttttgtattcttgattaccttttatattatttaattaaaaaaatatttaaaaatttattatttaaatgatgtagaagaaatagaaatataaataagttggttgatattgatatatatgatgtaatataaatgtgtgaggtaaaataaataaagtcgtgattggtgatgcattttaaaagatagaatacaacatctgttgcaagtgctcttagatgtcttgttaaaaaaactctctccacactttctagtcataacgttctaaccaataatgtagtcttatcggctaccaattaagagcattatctaataatgataaaatcttaattatacccattagcttagtaacagtcgagttttcttgttacattatttctggtatgagaaagaagttgagagatggagagaacatgagaggagggagagaggccggagaaaataactttatttggcaagaggcattgaaggagagaaagaggaggtgagagatcaacaagtctacttaaatctctagtatgaggtttagacttgatgagaatgagaatgtaaaagttaaattaaaggattaattggggcaaaacccttaatactttcattttgcttgcacttaacccccaaaacttattttttggcggcaaaatccccaaaaccacgattccgttagcaatttacactttccatccaaatttaggtgttaagtgccatgttagattgttcatgtggacacattgtacacgtggcacaattttattggtccacgtaaatatatatttttcaaaaaaataaaaaatcattaaaaaataaaaatatttttttaaataattaatttaaaaaaaattaaaacaaaatcataatttttttctattctttcttttctttttcttttttctttcttttttattttctcgataccttcttcttctctttttctctctctggtatggatgcaggtactaggtgcgacgccattgtcgaggaccaccaagccagcgctgttgctgagtaccaccaacccaggtgcagtcaccgagaaccaccatgtagaactgatcgttctcaaccaccgcgtagaaccaccgaggaccactacgtagaatcgtcgatctgttagccggttagcctcgattctctctcttagccccgatcgatccagccacgatcaatctcctctctctcccaatatcgatcacctttctctctctcccgatctagagttttttagattttttttgcaatctttgttgttgatattt

SEQ ID NO: 47206 - DNA, 2442 bp, Cannabis sativa
ctaatttattcttaaaaattcattttatattgatcatccagaagcttttgatccaaacaaaaaaataagacaattttttacttcaacttttagatataagcaaaagcaaaagttttaccaaacaaggtcatagattcataactcataggaacaaaccattcattgtgagtagagctacactacactacaattaaattcaacggaatgccatattaaatacaagtacctgtatttgttctttgtttccagcagtaatatttgatatagtccagcaagcttcctttttaatgcttttcttatgattatgggtcaacaaactcataaggcacgggagtgcaccactgttgatgataaactggaagcattgaaaacatattagcagaggtgcaaaaagcttctgagacctttatatggatggagtaataggaaactagaaacataagaaaagttaaaacctgagtttgaacatcatctcctgtcacaatatttccaactgtgcgaagtgctggaatgagaactgaaggagatggatgtctgaattgcataagcatttaaaaaaagaaaatcaattttacatttacaaaatatttgactgtgtaacaagaataagaaaataaaatataaaacacttacagaaggagctgcacaagtcgaggacagacaccagcctcaatcacggcttgaattttgtcatttgtaccatctgacaaatatgataatgcccagcaggtatctgtcaagacttcttcatcatttgaatgaactagtcgctccaaagctggaagtgctggtcttacctgccaaacaaattccaaaattacaaaaaaaagaggaacatcctacagaaagaaactatacagtttgaaaacaagacaaaaaaacctgatcaaaaggaggttgtggtttgcctctgcaaaagtttgacagtgtccatgtagcgtttctcaacatggacagctttgcctgctcattcaactgcgccaacaatggaatcagagctccatgtccaagaacaagatcacgacatcttggggagtcaccagcaacatttcccaatgcccatacagcctagagttcgtaatacgttcacatattaaacaattcttaaaaaagtagacttctacttcagactacaaacgcacaagttataacaaacatagacagttctaatttaatacctgctcacgaacatcatcacttggagaaccaagtagcttaacaaaaattggaactgccccatgatcaattaccactttggtgttctctgaagtacccgaagcaatgtttgtgagagcccaagctgcctcaaactacattaataagagaaacaaatctgtaaaataaataaacaatccacaaccaccatggaaatgaaatattggttaaaattcggacctgaagttgtggaaaatcatctctgtcaagaaacttaacaaatactggaacaaccccagattgaattacttcttcaattggagggcttcgttctgcaaatgaaaatttcaattggttttgtttagtgaacaacaaagtccctaaaaattatatcgacaaatcaaatcatgatcattattaatataccaattgaaagcagtttccgaaactgcgtagttgcctcgagctgcaaattggcattatcctctgaccataccccagcaaccatcgatggcagactctccaactacaaataaccccaataccatcaatataaatacatacatataaatatcttatatatagcacccacatcccaaaaccccaactcaattcatctcattccgatctaacagaaccgacaatgtgcttaatcgcacaaagaaagtaaatagtgaaggaaaacaaagaaacaaaaaaatagaatgaacaaagggaatcggcaattgagataacctttttgtcaagattggaagggtgaggcgaaggagggaattgctgggtttgaaggccttcacgacgcttcttttgcaagctctcttcgcgtttactcttacggatctcaaccatgttatcctctctccttctgcgaccttcttcggcatcgacagccactttgtacctgtttcgccggacttccgtcctcgcgttcggcctcagagacatgtttgggtaatcaagctttgttccaacaaaaccctaatatcaaatcacaaacaagtttcgtcagattattctgaatagcgatcgatcgtaaagagagagaatgaaaaatcaaagaaaacagaggaaatcaaattgaagaggcaaacctttttggtttggtttgagagggaaagtggaagaaggaactgtatttgcgatattggacagacacagggtttcgttttttgattttttttttttaagatcattttatatcacttttcattcataaaatataataataataataataataatgattttatattgtgattatttcacaaaaatataaaaattacaaaa

SEQ ID NO: 47207 - DNA, 2850 bp, Cannabis sativa
tggctactaagtttgtgtttgtttgaataaatggatttaattattaaaaaagagccatctaaagtcctctcgcgcccagctccacattttgagttggttaattttgctattaaccatctagtatgaataatactatttcattcatctaatcttctaatagagagagttcaagttacttaaagagatagaatagaactagaatcaccattgttgagttgcttttcggttttagtgttttggagggatgttaatgtgattccctattcttgaagtggtttttctcaaatgagttgaaattgtaattgagttagtctgttaggggtgatcctaaactgtgtattctcatctcttttgtactttgttcatcaataaaattcaactcttttattcattgatttagcatattttattacattattgtttcctgaaatcgttgttatgattgttcttgatgagatttactctgcaacaaatgctatcagagcttgggtagctcaagaagatcaagaactgtgcgaggaaaggtctaaagattaaagaatggcactggccaagtaagaagtggacaaattcaatagggaaaatgacttcgggttcttgtgaatgaagattattaacggaaaaatctagacacagacacctgctcgctagactggtgagaatgtattataagttaaatataaatatgagagacacaacaatttacagtagttcactccgtgtatcgcgacagtaatgcagctatgtctacttcaagttttatttctcacgagatggattacaaaaaaagagctaagtttgggtactctaatttctagagagagaaactagagagaaattctctgacttatggaaacttttctaaacttgaaaaatgagctagtggagctctccttttataagaaaggagttcttattaaaataataatacaaaattctaaaaaatgtggaaaaatacatgtaacttatttttaaccgtagatgatgatctaaagataaaattgactccgaatgttgttcgtgaattttcggagattgagtcgcgtctacggaacccacttcgtgtaacttgtagcttaaattcgtaactccctcgacggtaaaatttgggctcgataacttcagaattcaaattgaaatgtgaaacataacttaatagagcattgaaatagctttaaaaagtaagttgaattgagtgaactagatcaatattgagtgagctataaccgttttactgaaggttattctactcccaatgcccaggttgacatccagcgcccaggttaacattccaggccctaggttgacatgtgatgtcaacctagacgctaggtgaaggaaaaatagtgtctgtgatgtattttatgaagcctaggtgatatgttaaaataacttagtcagtttctatgttttggtgaagttggtcaccaattctcagagatgttgctgtttgcagaaataggagagtcaaaactacccagtttttgagtaagtcactttactggaaaagtgaaaatataaagttgtgaatttgactcttctgacttcatatctctcagttactataaaaatatacgaatggtcgagacggaatcagaattggataagcagaacccaacacacaaggtcatatgttaacctaggcgttgggtgctctttttggagctttcaagatgccattttgatacttccaaggtttttgaaattgagaatgaggtctcgtaccctatttttgaccactttatagagaatgctcggagcagaatttgcatttggcctatcacaaccagcgagccaggtttattgttaactttgagcattgggctcagttataatgcccctatgatttttttttctccttgagcttacttgtatcttcgttattatagatgacgaaaaaaaagtcgagaatacgtttttggaaaaaagattagaaatagcctaggttgaaaatatgtcaacctggccgctgggcctagtgccaggtctcaacctgtgcactaggtctagttttaggcccttagacagttctgtttgctccccaaaaatacttgaatcttaatttttgatgaaaatggagaatatgctcgaagaatttttttgaaaaactcctcagaattggcctaggttgacaaaatatcaaccttggcactgtgccagcaccaggtgtcaacttgtgagctaggccattaccaggtgttagccatggtgatgatcccttgtttttcttccgtattggtatgtttcttccctaaaaatacttgtttccccattttttatgaagatgaagaaaacaccgagatggattttcaatttgatgcttggataatgccaaggttgacaaaggctctaggtgtagttgaccaaagttcatattgaacttcccgtttttcttattgccaaagtttttctattgttcaaccttttaccaccatggtggaaattatttccagcttgaggttggaaagttttcccctttttccagtgttccctcttgtgtaagtcccttcacttttgtagcctcggtcataaatcaactaatctaatgcttcaaatgttctccaagaatttgttttacatcgggcaagttttttaagtgaggtaggagctatcttgaagaagagtgttgacacaaaaatctggacatatatatttggtcacacctgctcactagattggcgagaatgtattatgagttaagaataaataagagagacacaacaatttatagtagtttatttcctgtgttgcgacagtaatggagcaacgcctacttcaagttttatttctcacgagatggattatagaaaaatatctatgtatgggaactctaatttctagagagagaaa

SEQ ID NO: 47208 - DNA, 846 bp, Cannabis sativa
tggtggtggtgggttccatcgcgagtttaaagatgagggagagggagcaaaatctgaatgtttgaacaaaatgataaaattttgggtttattctccacggtttaaaaccgtcgggtattctattagataataatattttttgtagtagtgaataaactagtatatataataattatttatatatatatatacagaataattgaatattttaaatattcatatgtggtgaaaatatatttaagagaaaaaaaaaatattgcatattatttgaattgtttgtcttaattttgacatatggttaggtgactaaaatagaataaaggaatgccgcctggttttatctagaattacccatttatttgagggtaatttacaaaaatattggattttgactcaatttttacaaaaatactgttacacggcaaaagtaactcttatactgccttgggatttttttttcttttatactgtaaacactgaaaataaaaaacaaggtctctatcttctacacccacagacagaaccaccacaacaataccagaacaaccaaaaaataaccattaaatccggtgagatgaagcaaaagtattaaaaccattaatgttggggctgtcatggttttctaatgtttatttttgggttgttccactattgtcttgtatgtttaacaaatgttgattttaaattacacacgttaaatcaaccactaaatatttatttgaggtaaccatagtgaaagaatcatggacacaaatagttttaccttctattaaagtggtgaaatctagaagacaaaaaaaagagaggatgaaagcgtgctgagaaaaaaaacaacataacaaatgc

SEQ ID NO: 47209 - DNA, 3276 bp, Cannabis sativa
gaatcattcagcattgtcaattaaaatatcacttgatacctatcacaaagcttcgaggcatgtacttaacaatgacaaatcagtgatgtccttttctccgaataccatgataacagcctagaattttttttcgctcaaacactacgaattccaataactaatgtcatgagcggtatttgaggttaccctcttactcagggcaagagaaacaggaactgtttagtcatatgaaagaaaaagtttggaaacttctccatgcttagaatgacaaaaaaatttctattggggggaaggaagtgcttttgaaagcagttgtacaatccattaacgacttatgttatgagttgcttcaggcttacaaagaaattttgtaaccaattggagagtatgatagcaaacttttggtggggaagtaattagaatggcacaaaaatacattggaaagataaaaatccttatgcaaatcgaaaattgaaggtggtatggggtttctctcctttgttcacttcaaccaagaacttttgacaaagaaagcatggaggattttgatatgcctgattcattattaagctgtttgctcaaacatcggtatttttcaaacacatcctttttagatgctatcattggccactcaccatctttaacatagcaaagtatttgttacggtagagaattattgattaaagggctgcaatataagattggtaatggtcttcacattgcaagtggttatgatccttggataccgagtcacaatgagtttcaatcttttagtttttcagggtctccatcaatgacggtttcgagtttcattactgaagatcgagtttggaatgtctctatgttgaatatgtatttcaagccaattgatattgaacgaatatcgtcaatttcccttagctactttgttggtccggacaggttaatacggcaccatactacaaccggttcttacactttcaaatcggggtttcacttagcaacttctttagaagaacaacaaaattcctcaacttctgatcaacactgagactggtggaaatacttttggacctgaatttgccacctaagattcgtatctttgcttagaaagtttttcaaaatgtattacccactgctgatgcacttttcaagaaaaatataatagattcaggtgaatgctcactttgttctttgagctgggagtcaattggccatgcgctctttggatgtaaacatgctaaagcaatatggaagcattccaaatttttaattaattttagacaagctcaaagcatgtttaatggtgattatttgcatcatctttcttcaatccataatcaggaagattttgaggtcattacttgcttgttgtgggggatatggactgatagtaacagagcctttcatggtggagtatcacgtcaagctgcctctattgtttaatatgtaacaagttaccatgaataatttttacatgctaaaagaccttgcttaaaggctgttgtagctgataattaggttcatcctttgcccagatcagtctgtatacagcaggaccaaacttggcagccaccacgtattaatggtttcaaattaaacaatgatgcagctaccaatttagaccagaaaaaattaggggttggagcaattattagagatcataatggagtggttgttgctgcttgttcaaaagttgttcaaggaagttttagatctgatgagatggaggcaaaaactcttttcatgctcttaattgggtatcgcagttacaactatctttaacttatatggaaactgatgctttgagagtctccatagctttaaattcttcctctacagacttatcttgttttttgatcttattatgaatgttcgttgtcttttatctttttttcctaaagttatagtttcccatgttaacgatttgctaatcaagcagcgcatgatttagttaaatttactttagggtacgttggatgatgacattagttggataggagaaatttcttatcctattttctcggttattgtaaatgactttaattataataacagtgattttctttaaaaaaaaaataataattagcccatttgtatttatgtgctgctatttttttggcgtctgtacacgtgtttaaaaataaattaaaatgagaaagttctaagattgaaataaaaaaaaaaattgtaatcatgagattaattttaaaatttcctcccaccacgtaaatttctctaaatggtaatataaaaataaaaaattcaaataacaatatttatgtatggtgaaatattaataatttatttttcagtttttactcaaatatcaaacaaattaataagggcatattttcttttccttttcaaacaatgaagagagaaaatatacttcagttctcctatgacctctactctttctttcattacaataatttctatgaaacatagtataaattaatcttccactgatttggaaaaaaaaaggatctatgttagaaagttagattttgatgggagaaaaaaaagtaaagaatatgtcgaaaaaaactttatgttcagtataaaaagaaaaattgtatggaaaaaagtttaatttaataaaatctttcataccacacataaaaaattgattttatttttacatttttctcactttaatttcctacatttttctcaacaaaatttaagagaaagttacaaaaatactgtaaattgaaaaaaaaaaaaagtacaaaaatattgtgatacgaagttttttatatttttactatactaactttacaaaaaaatactgtatttaaagttttaaaattacaaaaagataatatttcagtaaaatataaaacaactaaaaaataataaccctagaacaacttaacaaaaactatgaaaataactataaaacaacaaaagtatacctacaaagcaaccaaaaaaaaacaaaatatttacctaattgtaataagcaatataatatcctcctcaatatgtttttgtattaagaaaattttattacttagttttgagaatttcatttatctttttgtaccattacattattttttttttcatgggatttgttgttgtaactttcttctttcaacttttttttttcttttcctttttaagttagtgatagttaaaaaataactataaactgaaaaataacaaaaaaaaaaaatacacatatatacaacaaaattattgtctaaaataaacttaaaaatatacacgataaaaaatatacataaattaaataacaataaaaaaaataaacacaacataatgataact

SEQ ID NO: 47210 - DNA, 2709 bp, Cannabis sativa
  modified_base (39)..(54): a, c, t, g, unknown or other
tataatggccgatttggctattataagttaatgaagttnnnnnnnnnnnnnnnnaaaaaaaaaaaataattaataattgaggactgataaacagtgtactgagttagttgaaacagttagttgtgccacttgtattagctgtcatctttttctgttatttcttttcttgatcaaagccttgtaactaactctgtaagcatctctctataaatagtaaagctccattcaagacttgctaacttttgcaaagtcttgtgattcaatctctaattgtgtccttgtagatttgcatatataagttctttggttttacatgatatcaggaagcgctttgaccaacgtcgatcatggatcctcgtcaccctgaacatatttctcaaacctctactgctgcaacttcggttgctctgccaattcagcaatggaatccatttcagaattctctgaattcatctcttattattcgattagatcgaaccaactttcttgcatggaaatcgcaagtaattcccactgtcattgggcatggccttgatgacattcttctcactggtgttgtccctgttcgaactccgtcaatggagttgtcaatccagaattcaccacctagcaacgaaaagatcaattcttactgagttgtcttcgatcttcaatgtcagagacgattcttggatctctggctcagtataactcctccttcgacgcttagcataccctgaagcaaaaatttgtcagtcagtccaaggctagattgcatcaaatcaaatctcagatctcaaaaattaggaaaggtaatctttcaatctctgattactgtgacaaagtgaaacttcttgctgattctttgtccacggctggtcatcctcttgataacagtgatctcataatgcacatgctgaacacattgggacctgagtatgatattgtggttgttcatgttacaagtttgtggataatctttcattagaatctataaaatctttattgtaaacccatgtaagcaggcttggaagatattactctattggagactctaattccaacatctcaacaaatcttagtatccacaatacatacaagatccaacataagaaagaaatggctatcgcacatatgcaaatcagggtcgtggctatccttccaacaatcgtgctcagggtcatccctatggtaaaggcaatccatcaattccacgattactctgtcaagtttgtcacaaagatggacacacggatgttgtctgtcattacagattcgacaaagcctttgtcacactcaagattaatgactttaaggtctttcttgcttaaattgatgagcaagatgattaataggtttactctagttcagcattactagagtttgtggaagattatgattggtatgctaacacaggtgcaaccaatcatatagcacagggcatggaacatcttgaatctaaaattccatatttaggttctgatactcttactgttggaaatggcaaagactcgctattagtcatattggtaactattcaatccccttttctaattcatttttacatttaaacaatgtccttaaagttcccactataaccaaaaatcttattagtgtctttaagttaacagcagataataatgttttcttagaatttcactccaaatattagtttgttaaggccaaaatcacagggagagtgctactcaaggagaggcttaaaaatggtctctacatgttgtctcacagttctttcccttctaaggttcagcttgagtgtcatctagtcaccaagcaatcaaactctaagtcaagttgtactgtttcatctgcaaacaatcaagaatttgtacaaccttctatttttagttcatcttaatataataagagtactattaatacagtctcttcctcttgtactggtttaccaattaataaaaataatgtttgtacattgtctattgctcataattctgcattatttcttgctcaaaaatttgatataaatttatggcactcaaaacttggccatcctgctcctgaaatcttagctaagattctagctaccttacatattccgagcaacctaagaaatctaaagttttgtaggcaaaaaaggcaaaagccataaactaccatcttctatctctgagtctagggcctctcaacctttagaattggtccacacagacttgtggggaccatctcatatagctagcatctaaagaaaggcataggtactacattcatttcatagacgatttttgcaaatatacatggatcttttcgttgtctgcaaaatctcaagcctatagaacctttctacagtttaaagttcttgctgaaaaagaatttgatgatctccctattaagcctgttcaatcagattggggaggtgaataaaggtctctaacctcctttctaactcaacatggagtccattttcaacatccttgcccccatgaccatgaacaaaatggtcgagctgaaaggaaacatcgtcatattatagaaactaggcttactttattccaaaatggtcgaccataataggtccactaactttattccaatgaataagtgaacgatatttctttttcctaaaacattttgtacggtgccacatcaacagtactctgataactattattgtatgaaaacttaatcagagggagatgcttatttcaagaaccttcaaatctattatacatactcgttacagactctcag

SEQ ID NO: 47211 - DNA, 1277 bp, Cannabis sativa
atcgacgcgacatgtcgagaaggtactacgcattactggtgcctaatagcaatgctcaatagatatacaacgtcgttttcattctttaatgctgaaatgtattaccttcaatgactggcaaaataatgactcactacatcatcatacatttgtggtctttattctttattatgcattcaaacttttatagggttaatttcaacataactcgttgtgattacccaatcattcaaactagctacataattattgtagtgtgattcattatttcctttcatttttcatatatataaagcaaaaggtaacaacttataagaagtgaaaccaaaataattccaactagatatcatttttatggaagtcagaaataaaatggaactcgttgatcatatatttttatattaagtgagacttcaaaattttgataaaaattaataaaatataaaataatacaaattagattaaagtaatttttatgtaatgacattttaaattttggcccttcctataattgctaaatagtttaaattctaacaataatattttaataaattagaccaataatatgatataacacctcttaaaaattgatcaaaagtgattgttacttctctatacaagagttagtggaagactaactgaaaaaattgacatataaaagaattgctgcttttgctttctaatttagactaatcatttttctttcgttatccaacatggtcaaattgcttgatttaatgaagtgcttcgacattttcaaaaaaaaaataaaaataaattaataaataaattaaatacaataataaagtgatcgtaaaataaatttctttaaataatttggaagatggtctttcaggcatacattattattattattttgaaagaaataaaagttcaatcattatcattattattataagcaagcaagaattttatttcactaacaatcaaccaatacaagtgctatacaatcacaaatcaattgccaactattattattatatttcagaaatgtatgtaacaaaattgtatttttcaattttctactttaaagtattttaacagaatttctcaattgctttattatttttcatcaattttataatattattatatatatttaaaaattaaaattatgtaaatattttaatataaaaaaaactaattttattatatatatttaatcataaaaattacatctacataatcacatgtatacataatatacatatttaaactttaatttgacgacgaaatttttattttaaaaataatta

SEQ ID NO: 47212 - DNA, 1444 bp, Cannabis sativa
taactaatatttttagttatagacattttaatcataatataagaataattatttataattagttaatttttttttatagtgcatttactattttcaactacctaaaggcacatgttttccacattattcaataatcaactaagtaggtaccttattttcctcatttatatatatttttttgcaaaatcattgatgagattattaggtttttgtgtgttagtcactccttaattttctatattaatttattaattagttaataaattaaggaaatgaaacaccattaataccttatacctttacaaaaagaagtcacatcgagccttgaatttattagttgataatattaggtgaaaagctttatatatataactatatatatctatagttggtaaattatatttgataacttcattaatacatgtgcatttttttttctaaaaaaataacaatcacaaattaacatttatttgattggttcaccaatcaccagcaagattttgaagatcggaaacaatattgaaaaaaaaaattatttatatattctataatgtgtgtagattatagtataggaagttgaattgattgtctaaatattttaatcataattaacttatatagaggcagttggttgtctcagtttttagttaagtttgaaaaatttggggtaaaaattttcaaaaagtttattttaatgtaaataactttttaatattaaaatatagcgataacaatttttaaggtgacatttttcgtaattccgttagttttttttttaattgattacttattaaatatgtcatgtatttaaattttagtttaaaacaaattaaaaaaaaaaactaaataaatcattttaaaaactaatatttctttctttttattttttttttctttcctcttcttctttgtgttcttctagttgcccagaaattcataagcttaattagatcgaaaaagaaaacagtggtgactctcctaatttgaaccaaacccctccacttctatttcatttttattatcaacacaaattattattctcacaatccatcttctttttgtttcattcatcaatctcaattcacccgaaaattaagttaccaccataccctttactagtttcctactgccaagcaaaactcatctctcaatttcatctctttatctgaccaaaacccaaaaaacttccataacaagaaattcaaaaaacgaattaagaaaaagaaaaaaaaactcaggaaaccataatcgatgcacctttcttcgatagagaaaaagagatctaattagtggtgtaattaaagtaaatcaaggttgagagtgaaggagaataagaagaacaaagaaaaaacagggagaaattttcaacaaaccataacggaggagaaatcatagaatcgttggcttatatttttttatggcaagacttcgcgtcgtagggggt

SEQ ID NO: 47213 - DNA, 1685 bp, Cannabis sativa
gtttaggtagttttaccaccaaaattttagattaggaggttagttgcaaaaacttgcccactttaggaggttttgccgcaaataaccctaaaaaaaatgattgggtttacattatttgtcatataagagctttttgagtatacactttttatagttcttaagttattgtgactcgatcgatatttaattacaccaatatcgatatgtaccaagaaaagtgttaggcactactagtagtgtcttttaacatttctcttggtataagtgtgtcaaatttatgtgtggacatatcattactctattggaatatatgggcaaatatgataattagaaagaacatgaattgcacaaaaagtaaacttttattctgttccaataatttttcataattaaaaaaaaaaaaacactgctcatactcaagatctcaaatacacaaagtcctttgagattttctttttcttttttcccttcatacatacataattcaattgaagaaaccaaaatgctcaagcaatttttattcaaacaatctaaaagctcaagcgaattcttttccaattcactcaagaaattaaatggaattaagtttgtttcaccctttctcattttgcccatttattttatatctaataactttccctcttatggatatttctctgccattcttcttcttcttcttcttcttcttgtccttgtggtggtggagaatagagatctctcttctttatctttagatctacataatatgtataataaacatttttttgttctcttgtcatcatatttttctttttttgaaaaaaataatatttatgtataataaaattaacactttggaagatcagttggaggtggtaaaagtgattgattaggcccttttccattgtctaccaaaaatgccatcttaagcccccatgttgtatgtacttctaaatggcaatgcatgaaccacactcctgctcaacattgtcacaaattatgtcataataataataataataataacaacattgcatttatatacttacatatataagacaatactataacaagtttttttttgaaaaaagtactataacaagtattaataatcattttttacaagttaatttgtttatattactagctcaaaagcaaaagactcttaattaataagatttttttccaatcaaaatataaaattagttctcatactaaaagaaaatgagtataattaattaatttagtattttcataatttttcttacaaaagtatttctttataaaatacaattttcagtaaataaaagtatactaagtaaaaatgaaaaaaaaaaaattataataaacctaattaaattccttaaaagaataaaaaaaatcaagtaaagctaaaatttattcttcacccaaaagaaataataataataataatcacattatttttttatttttgctacctaaaaaaatttcatattctatttttgtgattttgttacaaataaataaatgtgatgataaataaacttaaattaaaaattaaacgggaattatctcatatttttttttttttaaatttaatgtttgaatttttaagggattgtagcgctagttgcaatagtgttgttatatgaattttttttgttgctatttaagttagctacgtttctttataaaatttagtaaaaatgccaaaaaaaaaaaaa

SEQ ID NO: 47214 - DNA, 635 bp, Cannabis sativa
tggggtctgtgagaagagaaaaggagttcgaaagtttcattcccctgtcaggccctatcccattcctctgttcctttatccccttctgtagttctattcttggtcctgttaatccttcctgaaaaccatcccgtatttcttgttccacttttagccatatcccgtaagctttagccttctcccccataactcttgtgatttctttgtattccacagaacaatctttttgattatgtccgatacgtccgcaccaaaaacacatgaatggcagttcgtcgtatttgaatgcgatccacttctttgatcccccacatggtagtagataccccggacaaactggtttgttgatcgacatccaaatctgaaatctaaagaaaccattagtcaccatttttgatacatcagcattattgatcgaaatgaccgtccctgccatggaagccaatctcaaagtgtttttttcagttaaatagtctattggtacccccagagctctaccccaaataggaaaggctgtaagatcatccttccaagaatcattagtattcaccatcttccccaaaatcaataacccattagataaataccacggcatcttggctagaattcttgactggttttgttcagaggcaaaa

SEQ ID NO: 47215 - DNA, 2026 bp, Cannabis sativa
aatattaataacatactaattgttcacgtttttattaaaaaaaataaattatataatatcttttatgatttatttgaattatttacttttaaaagtaactacgacaattttactgttaaattgtatttgtaggacatgcgtgtttaggttcgatgttatgcttgagagtcttaattagggtaacagaacgtgtgggtttgactaggttcgaagtgtcactactacaatttagccttttagtgacactatttagtgacatgcacaaaaaatgtgtgtcactaaagagttaagagtaatttttagtgacacgcacaattagtctctaaactttgatgttagactcttgtaatgtgggtcactaaaagtaatgagtgtcactaaagagtaaaactaattttttttttaattttaaaaatactcacttatagtgacacgccaaatgtgactaagtaaatatgtcctgacacacctagcacgtcactatatcatagctctaattttttttttatttaaaaaaaaactgctttattaatatatatttaataaataaataaaaaatcaaagtttaatatatacacacatatctaagaggcacctaaatctatttccaaaaaaaaggcgcctaaactttcagaaaaatatacctaaattttcaaaaaataaaaaaataaataaaaaagaggcacatttatgcagctgtaatacatttcatttttgaaaatacagctgtaatatatttattgtacatacaattgtaataaaaaagctaaccctaacttatttctctctccccttaatttcttttcaaagccgttgcacacatccaagagacccatggagggatcgacataggcgagggtgcaggcggtggacgatgcaggcgagggtgctggcggtgacgatgcaggcgagggtgcaggccgttggttcgacggtgcaggccagggctggtcgacgatgcaaacatcggtatggcggagcgatcagcataggtgagggctttttgtcagcgaccaacgacttcaacaaagcatgcatttgtttttgacgacctacaactttaggtactatggtattaatcagattttcttcttcttcttctaattcttttttaattagattttccttttgtcttctcaactctccttaaatttctctgtgtatagatctctgttatatggtattatctctcacactgtcttgttgaatctgggtttgaatattttctctacagatcgatggaaaatctgtatcaatggggctgaaaaatggttgggctcgagttagtcagggacggagatcgaagctagaatccgtgggattcaattattttttttctaactattttatttgattcaaatgttcatacccatgatttcggattttcattgttaaaagatttgtatttttttttaacatttattagttctttttgattcaaatagtcatatgattgaagtttctgtaattttttctgttttgtatttgtgttttttcatttcgtataaaaatatttgttaagtatttggtttccttaatcgctaaacattagatataagtttatagaaattttattagcattaaaatccataaaaatcacttctttaaattttatttttaaaaaacatataaaaaattggtatcattttattttaaatttggtcgatttgcacttttttgtgctaaaattgaattaaaataaaaattaatggcagcaaattaaaaaaagcattaaaaaaacataaaataagatatatttgataaattaaaaatataattaattaataaaattttgaatcaaaataattaaatattatttttttagaaaagtatttaatgtagtggcactttttgtgtgtcactatatctccaaaaatattaatgaaaaagaaaaaaaaagatatagtgacacttcatgtgtgtggttgttcccttttcactcagataaaacctgactctatatgcctatagtgacacgcaaaaaatgaatgcaaaaggtttcagtgacacgcgtgaagtgtcacta

SEQ ID NO: 47216 - DNA, 1269 bp, Cannabis sativa
atgataattataattacacacctaactacttaagaaactagttactagtttaccaatttttaatatgtactcgagactttgaattaaagttaacataagactttctattcgaaaaaaaaaaaaaaaaaagttaacataaggcttaaaatattaaaatctaattttttttttataagtaaagtaaaatctaattaatctcccaaaaaaacacctataaaagaacataaatccttctaaagcacagaaattaattaatagaatggagctactcaatttcacatgcatttggtcaaatatgaacagctgaaacgcggaattgttccacattgatttaattctgacattgtcgcaatggataatgatggttggcaatataaatatatatatatcattgtaagttgaattcaacacatttactaaaaatgccatatttgtggctttaaactagaaaattcatttggcatagaacgactttctgtttctgttcctttttgcaaaaataataataataataagtgaatgacacgtggcttaaacaacagtttcaaaaatgacgtgtggctgccgaaggagtccttggatgatctcctaatttctacaaggtgcagacgatgcctcggctctgttttgactcgatcacagaaattctctatttttattataaactgattaagagtaaatatttttttacattttgagttttgtaaaagttattaattgaattttatattttttaatttaaaatgataaaaataaaactctaaacttaatttttttgataatttttttttaatataagatcattcttaatacgatcaaatacagaatatgtaaataattttgtaataacactattagatcagattattataaaattttattttgataaaaaatcagttcagtgttctatttatactattttagaaaatacatgtaaattttgtcatttaacaaaacagataatccaaattagtaatttttgcaaaacacaaaatccaaaataatatttaactactaatcaaattaaaatgaaaaattaatatactttaaatatcgaatcaagataactaaagacataaataaagcaactagtacaccttaaaaatatccaaaccttcaatacacctaactacttgaattgattttttcgtggtaaatgataattaaacggttaaccattacattttcttacattaatttgtaggtactcatcgttattggttaagtgtagagatggaaatttataccgcggggatgggtaaccgcggg

SEQ ID NO: 47217 - DNA, 571 bp, Cannabis sativa
aaaaagagagtaaaaataaaagaggataatataaaaagggtatagagtgtaatttcctcttagaaatatcgcttaaggtatctacacgtttaacacactttaatacccaatctctcacaactactaaactgatcactttattttgggctaaatttcaaataccaatacactaatatacatatgagtccatattgagaattttaatccaaaaacagacccttaaagcaattgcagttgataaatgttttcatttataataaatgaattgaattattgtgtatataacttatatattatgtgttgataatattaagtaaatattgaaaaattctcaaatttaaaatttttgttaattaaccaaacaaaaatgtgagtatagatattaagaagaatgaattagtaagagaagaacacaatttttacgtggtggggattgtacaatagccacgagtcattgtattaggatgttgtttgtgttaagccttataatgcatgtaaggacattttaattattaaacaaaacgaaaaattaaatgataaataagcaagaactattatgacaacattgaaa

SEQ ID NO: 47218 - DNA, 1471 bp, Cannabis sativa
tgcgttgaggttgatgagtccaggtagagctgagagaattatggaagcaagtatcactatgtgtctataatatagcagctacgtcaaaaattgcagagatatcagaattataatacaaatatttaagagtgaccacctctaaactaccacttgaacaaataattcacaatataatttttatttatatttatcactataaactacattcaacaacaatataaacatcttcaaccaaaaaattatgcacttttattctttaaggataaattatttgtaaaaactaaaaagttgtattcaaatttctttccaacaaaaaagaattgacttcaaaaatgaaaaacactataatagtgattgctctcaacattgaacaacaccaaatacaagtgtttgaaaatagagagaatggacacaaaaaaaaagaggaaatgaatggacactagaccatcaatttataacagtgattgctctcaaaggagatccaaccaaactctcatcaaactatacattccagaaaaggatatgaattcaccaataaagctctaaaggtttctcaactgaagcagtagcttgtagagcatgtacatctctggggagatgctaatgtcccttggatcccctgaattaattattgaaaggaaaaattactaacagtagcacaaatccatgatgaagagacaaaaatactcagtccatacatacccctctaattcttcttagactcttatatatagtatacactattttattcccaatcaataccccttaatacaaaaagtcacacacccttatatttattaatgtctgtcgcacccttctaattctgaggattcctgcatataaaagaggaacaataatcaccaaaacaaaataaaagaggagcctaaatctattgaagaaattagaaagaaggcatttcaacaaacacttataatgcatttcattttcgacatacttttatatataaattttaaaccaactattaaaaaatactaaaaacaattctcacaaacacaatgaatctaaaagagccatcaattacatgagcaactattaaaaaatactaaaaacaatactctcaaacacacacttaaactcatatatatatatatgtacgtagccagttcaaagaataagaaaaaagaatgggagggagaaacctgacgaaagattgaaactaatccaaaaatattgaaagttctcactgttgagattgcaactgttgaggtctagtgttgatggtggtgatggaggagacagaggcggacgaacactagcagtggcggaggaggcggaggcagacgaacgctaacagtggcggaggaggcggaggcggacgaccgctggcagtggcggaggagtcaggaaaacgatggtattggtaaactctcgttgtgggaaacaatggcattggtgaactctcggtgtatgctgaatcacatttgtcgaggtggttgttgaatagctttag

SEQ ID NO: 47219 - DNA, 2077 bp, Cannabis sativa
taaaatatatattttagtaacatatgaataatatttgaaaatattatttacaattgcactttttttactagggcccaactatttaaattagaacagggcctcaaaaataattaagacggccctggttggaccctctgctcctcaaaagaacaaggggaaaggaaaggtggatgaaccctagagaaaaactgctcctaggaacaacgtggacactaccaacctctacggaaaaagaaggccaacgatgccctagggctaggacgcccttctgatccgtgaggcagagttgcgggaaacgataggcctggtgctcaggtgcaaatacctactgttcgaggatgaaaaaatttccctagtaattatgctaactaggataatggagtagaattattttctcctgaagatagttggtccactatagacctccgtaggcgcctagacgccaaacgggaaaatgccaaaggtgaaaaggcaaagcttcaaggaaatgatctctagaaccatatcaaggacatgattcatgggcgtgagcttttggatagtgatactaaatacttggaagagatgatagtttccctaaccaagcttgtgtagaaataaagtgacaccatcttggattcagaagacgaggatccaaaaccttgtgtcaggtagatcatagaggctccgctacctgagaattttaaaatgccccagatggagctatatgagggtaggaagaatcctagaactaatttattcaaatataactgactcatgcaagtggccagagccagtgagatgccaaatccctcttttctcattgacgctaaccaagttagccgaagactagtagaaaaggctcccctggatcgattcatggttggaaggacttatggtctatgctttagaagaagttcatagctaccaaagactacagtatggaggtcaaatccttgaccaatatcaagcaacaagcaagggagagttttaaagcttaaactagtggatgatggaagcacctgctaagacaaagttagtgatgacatgaaacttgtagcccttcaatctggattgattgttggctccttcttgtggagcaaaatgcaacaaaaaagggtggcactattgttagagaagagctcaaagaatcattaatctggaagacgcttacactaaaacattcgaagttgctccaacaccaactccacatgttagcaatcctacttacactttgtaattctcagtttcgattgctccagtggctagaagtcaatttataactcccatagtctatggagccatacaaactggatgcagtgctacacccagacaagtgaagacgaaggttccaaaagcaaatgtaagtcaattgcagaacaagagaagcagaaagagtcagaactagagtgaggccccaaagaaaggaagaaaatagtgtaaataaaagtacactgagtatactagcttgataaatactcgagaaaacgtgtataagggaactatcaatatggtccattacaagaagcctcctaaaaagtaccaaggggagaagaaaaaaagggatcaaagcaagagatgtgagtatcatggagatttcagtcataccaccaacgaatgtgaccatttgaaggatgagataaaaacttttgcccaagcaggacatctagttcagtgggtgtggattccaataatctacccagggcagggaatagctcacggtcagcttgtcattctcagacagtaaggagatgtactccaagaatacgaacttcatctttaccagctccaatgatatatgcactggccattagagccctcagggggtacccaatacacaggctaccatagttgttcttgctcccaaatcagagaatccatacccacccaggttggctccaccacccatggatggctatgtggcgactatctctagaggacaaaacattgtcggaagcacacacaatgcacaaaaaagatacttgaacaagctagatcataagggagaagtgtctgcccctctagcctagcattcgcgaatgatgaatatttctatcaccttcatagaagaagatgtcaggcatgtacacttatgttc

SEQ ID NO: 47220 - DNA, 1217 bp, Cannabis sativa
tcctttactgtcaatcacggctgggaagggaaagaatttgatctgaagatagacctcagcaaccacttcgtcgtcgtggagaaacagagcatccccaggagcaactgcaagattacagagctagaacccacggtgactgaggaattgagagctaatgaggaaaattctaacctggatttttgttttggggctatggaggctggcccagaagagcctccagtggggccatgaagatcctatcttggaactgccgtggtctcgggaataccacgacagttcgacaattggcggctcttgttcgcctccacaatcccgagatggtgttgatttcagaaactcgtttaactgaagaaaaatttgtaagaacttgcttcaaacttaaatttgctaattctcattatgttgcccctgtgggatactcgggtgggtttggaatttgttggttgcagggagttgactgcaccatccgtgattccaataaaaataacatctcctgtgtcatctcctcggaccctcctggaaacccgtggcacttattaggcatgtatggcccccctcatggtactgacaaagaagccttttggtcaaaagtgggagattttgtattaaattgccaggaacccctccttatgattggtgatatgaatggtacgttaaaagactccgaatgtgtcaactatgctaatcaaggtaactcttcccgctacgcttttgattctcgtcgaatggttaatcgggtggggctagtagacttgggattccaaggtccgggctacacatggtctaaaggtagaaatagttcatcccagggagggggtgttaagagggctcgtctggaccgtggactggcttccattgattggcgtatcatgttccctaatgctattgttcatcatttggctgcttcggagtcagatcatcgccccattcttcttgacacctccgggggagtaaatgcaaaaagacggacttttaagtatgagaatatgtgggctcgtgacccccgttgtttttgggttgttaaagaagcttggtcaagacgtctccatgccaatccaatgaccaatttctacagaaaggtaaaaaccacaagtagaagactcaatcagtggaataaaactcaattctgtcacctcaaaaatcaagttcaagaggccactctcaatctgaagttcgctgaatgtcaccaccctgataatgtcaccgagattgaagat

SEQ ID NO: 47221 - DNA, 1068 bp, Cannabis sativa
atggctgaatttaaaagttaaataataaagtatgattttaaatatatatatactttacaatacacatatatatacttagcatatataggattaatatatttttggaagatggaacaaaattttcattggacacttattacgagtgtaataagaatcaaacttatattgaataacgctgaagcaaataaaaactgtgggcactatatattcatttttttcatcttttagcttccctcaatttcgattatgacaagtctttaattataagcatattaataataaaaatatataaccatttaacaagcgaatatatactttgctaaacaaaatacttttaattaataatataattaatgaagctctagctcttcttgatcatggcttcatgggagagtcattttcctaggtcaaaaaattggccactttcccacaaacactttatacatatatgattagagctagcatatccccatacttttattgttttccctttctattgtccattaaaattaaaatgaaaaagtagattaaacagagataattcactagggaccagcaaaacacactacactataagaggaatatatttgtactatagaaattaacaacacataatttttttttttttttgagcatttagggcgaaatccctttatgtattattttttatacacttaacatttttatatttttttttttgttatagcaaaacctttttaagtttatttttctttataaatttgatactttagttaaatattaccattaaatatcaactggatgaccactgtatatacctgtgtatatgtaacaatagaacttcgaagtcgatacaataataattcagtttgtattgaatgataatatctaagtgacaccataaatttataaagaaaaacaaatttaaaaggattttaccaaaaaaataaaataaaaaaaatgaagtgtataaaattaaaatataaaaatttttactgcaaattcctcaaattttttttttttttttatatagtacatattaagattcttatatctttatatattaaaagtgtctatctaacggcattt

SEQ ID NO: 47222 - DNA, 1203 bp, Cannabis sativa
atttgagctacccctcttgggtcactttctgctattgtttactattctaaatgacatctttttggtggtttaaatcagtaagatctgcttagaatgtattttatatttattttaaatggtgattcaaaactaattaattctcaattgttatccttaatgatatgcaaagctttatcacattggtgtattttccacatgaataaagcaagacaagttgttgaaacatgggatagacaatttcactgcgctccacgcgaccaaagattggcttttctgtaccttgcaaatgatattcttcagaacagtagacgcaagggctcagagtttgtcggtgaattttggaaggttcttccagatgctcttcgtgatttaatggataatggagatgaatttggaaggactgcagcacaacgactggtatttttatctatttgtatactaatatcatactttagcagttacatgagttgtatatttcttcattctaatgctgaagtatttcattataaccatggcaccatttattcacttcatctagacctttttttattccgcggataccacatttctctgacttttgggaatcatcttgctgtttaacatgaaaagagaaacaatcacactgttgaatatgatcatgtaaccaacacattacgacctggttacataagggacgtatatttatacagttttacttcatacttggtccttatgttgaacactgctttagtaggcagaaagtcttaacatattgctagggtaggttttcatgaagaaacaaatgccaatcctaatggaaataaattgtggttttgatcacttgatctatcctctgtgtgtgtgtgtgtgttttgcgtgtatattttaaactagtggggaagaaaactatagcaattgttatgtaggtatctgggagggttttgaattgtagactttgtgggagttatttatatgcctcagtatttgagctaaccttcttggacattccttgtgttttgtacatggggcatataattttaacggggtgcctagttaaattgaaaaaaataagttacttatttagttttttcttgtaaacagtaatggtgtatagtttacacatacatggattatatgctaaccgggtcttttgataaacccttctaaatcagatcaattctatttctctactccctttgttagctctaggacccatcatctttt

SEQ ID NO: 47223 - DNA, 596 bp, Cannabis sativa
tatgtaaatatattgtatatacacgtattctgtaagataatgtttcttttatctattttttaatttctaatttttcttttaaatgatatttctttttataatgtgcataattcttaataataatatatatttttaattattataaatattttttttattaaatatattattttatttatgaatataaattaatatttaatagcattttaatttattaaacattataattatacttaaaaaaaaattattcatactagatttagttttatactataccaacacaatatagtacaaaattaatctagctcagtacaatccaattcaatctaattccatatatcaaacgagactagggataggtaaggataccaattttgaaaaaaaaaaaaagtaataaaacaactcagtgtaacttaggctcgaatattattagagagaacctttctcatttataaaaaagggcggaaaatgcgaaagttgtctattacatttacaaagctgatatatatgtgtgtagggcaaaaaggaagaggcccaaagatgaagtgtgctgaaaagtttggccaatttaaactaaatggtaaacctaatactcc

SEQ ID NO: 47224 - DNA, 2061 bp, Cannabis sativa
ggatttcttgacccaaaaagtcttcttcttttttggtcaaaacaatttggtatcgtctgtgggaacttggctcttctttccagtagattttttcgtcaaaaaatttcacttttcttttttagacttccaagaaaatttcttgccttttttctccaaaaattctaaaaaaagacgaatagcaggaaaacgtcataactctataaagaaataattcaagttaggaaaaagagattacctcaaacacccaaaacaaccataatgaaacaacacctcaaaacccaccatggcacgaaatcttggaaagattaaaaaatcgagatgacaaaatagcaactcaaggaatagaaatagcccaacataaggaacatgtcaaaaaactcaaaagaaaaaatagctagatgaaggtagtgcttgaagggtatcaacgcccaccgtaaatggaagaggtaaataactagcaaccagcagattctgcataaaaggagacaaataaaaattttaaccgcaacaaccccatgcatgaagggtttcttagaaacaaaaacaatccagctcaagaaactcatcacccctaggaacaattgaggagaactagggaagtagaggaaattacagaggcggaaacactttgcacaaccccaaagagatgcaccacaacacaagcaactcaagagaactccccaatgcaaaatcaagaatcagagaagctgcaagagatgacgtgaaacaaactactggccttggaagcagaaagccatatgggaataagtagtgagtgggcaaggatggagggatccacccaatccccgttcgaaaatcttatcttatgcgtagaagtgctacatcgatacgctgcaccaaaactaccagagtacgatggaactggagacccattagagtacgtatgccagcttgagcaaaagatggttatggtgtcagcccacttagaagacctagagaccataaaatgcaagacctttacgtaggggctgagaggccccaccttacgatggttccataacctcgcttcaaccacaataaactcgtatcacgatctaattttgagatttaaaatgaactccgtgataagcgtcagatcaacaaaagttaacatagacctgatgttgatccattaaggacctgatgaacctctagaaaagttcataaacaggttctgaagggagtgcgtgagcatcccaaagtgcacaaattcagtagcaaccaaagcactaatgcaagggttggtacatggatcaaagttgaaaagagtgataatagtagaaccgtgactatccttaataattagggctatgacgttggcacaagaatatgtagcactagaagtcaaagaaaaatgatatgcagaggaagtgtcaaaggaaactgcatcataaaagattcttttctctttgaaacaaaggaaagaataccaacagtacactcgtagcgtagaaattaatcctgaaagttcaacaatagaaatgcaaaaggactgattaccaccaacatggcgtaggttaggcgaattgggaatttggaaaatgaagaagaactcccttagatgaccattaccttaatagaattgatgtaacgctagagagggtctcacagttgttgttgcatgtcagccatagtttggatgagttgagctacacgaggatcagtctcctcagggtcttttatctcgacgtgtggctccccaagtaggatctggtctttggtgctagtcccgggagcagttggtggtggccttggaggaagagttgaggagtccgttttgaggtctgctcatggtgcttggggcacataagtagtccccgttctaacttcgtcaactggcgtgcccctaggtgttcggtcaattattagagtctatatgtcaacacttgtagaaaatgttacaaccatcttgattaataaatttcttgagttgtggccctcaataaaagtaccaaaattttgacttagaaatctaaactagacttttaagccacactcgctcgctagaattgcgagaatgaataagtagtttaatatttaagagagagagaaagagagaga

SEQ ID NO: 47225 - DNA, 1361 bp, Cannabis sativa
  modified_base (1295)..(1295): a, c, t, g, unknown or other
attttatttggaaggctaggaataggtgtctttggtaccgttagaaattctctcaatagtataaagaacttgattgtaaataaattgtaaagtctagacattaagtcacaacaagaattagttgagaaaaatttgtgtagttggaagattgtttgtaatagttgatggtaaaagtttgttcaagaacaatatagatgacttatatttaccaaaaaaataaaataaaatattaataataataataaattgtgagactatgcaagttccgatactaatacaaacactcataatttatgcatgtttttgtggttcggtgattattaacgtacatgtaatatatatgtataaatatacatgtatggcaaggcataaagaataatacactacaagcaatttaatcaaactacattgatatctcaatagtaattatgtttcatctactttctccaactttcttattacttctaataattagcttaaccttttgtgttcgctctcaagtagttcctccgccaacgccattgcctgctcagaacgcacctccagttggtggaggtggtggcgggggcggtggtggtggcggaaatagcactgctggagacagcagtggctacggttatggttctggagaagggtatgggagtggcggaggtagtggtggcggcggaggtggtggtgaaagtagtagtaggagtggcggaggtagcagttctggatctggctttgggtttggcggtggctatggaactggcgaaggaagccctggttttggtgcaggtggtggtggaggcggtggaggtagtgttggacgtggaagtagtggctttggatatggagacggttatggtatcggtgaaggtggaagtagtggccgaaaaagtggtggtgtttgggaaaatagaaagagtttgtcagttcatcattaattaataattaagtttatatataatatattatagagagcattaaaatgcaacaatattgattattgtattaatcaataaattatatatattcatgcatgaatgaatatgtatggttctaattaattacgttgtataattgtgttgttctaaaatatgttataattaagcttttaaataaattgtagtgtataatgttgaatatttaattttgtgtggtgaaggtgaggaatcatgtattcataataagtttaataaccttttttctaaaaaatataaatttaaacatggcacaatgttataagtgccaaattgagaaattcgatatataagtacatgttaaaaaacttagtaattaataataataataanaataataataaatatttatttatttataaattaatgtaattgcaaatatttaaatttcaatcatta

SEQ ID NO: 47226 - DNA, 927 bp, Cannabis sativa
tattttttgtagtgttaatatttaagtgttatgatcaactttggtctaaataatttacgatgttaaaagcagagttcaaaatataataattaattgtagaagtttttcagttatatatttataattaactttttattgtttataagaaaagaaaacaacatataatattaaaatggaaaacagtatggaaacaattgttataaaataaaaacagtatgattaatttcatatttcatatgtcttatgatcaggtactatatgttccaaattatttggcaaatcagaggcacaagaggaatcaaaagcattaaaattggtgaaaaggctatggaatcaaactttggagttaaagcattacaattatgctgcaattagtagtctaattagttcatcaaaatttcacttattgatggaagcaaccaaagtaggtaaccatgatttcctggttgtgttaattagtgcctatccagaattgatttgggaaaatgactctgatgaaaagaatatattttactatgccgtgaagtatcgtcaagtggaaatatttaagttaatacatgaggtaggtttatcaaaacaagtggtacaaagttatgaagataaaaaacaaaacaacttgttgcatcttgctgcccgtaaaccaccggagaatatacttcggaggagtatcgtaggatcggcgctacaaatgcgagaagaaatcttgtggtttcaggtaattattactgtcattattattattacgaataattgtggtatataagtatccaaatttataattaatcacttgcctattacaaattcaaatttttaagtatttatgttattaatttttaagaaaattacttaatatattattttttatttttatttttaaatatatgttgctgtagtagtttctccggaaattttaatatatatatatat

SEQ ID NO: 47227 - DNA, 1442 bp, Cannabis sativa
ttatttttaattgtatcactttttaataacgtagaaaaaaactaacataaaatttagtatacgtgtctcgcacgtaattttttgctagtatatatatatatttcactttgaattttttttttttgaaacggattcttgcatttataaacaacgttatacaggattcggcacatcaagtaaaataagcttgatgagcacaaggagatataatccgaatccatatggcactagccttcaattctaatcattaaaattaatcattttcgtacatcggctgttgtctgaaaaaaaaaatatactttgggaaaaatagagatttgttagtaatatattatttgattaggaaaagaaaaataattagggaatgaaaagcccaataaagcccatattcgtttagacagtctgtcttgttggcctcgtggggtggggttgggttccgtggtggtggccatttgtgctctctttcactcatatgaaatttcaccatacacacttcctactactacaccatactacaactgctacttctctccatctctctttctagattgtaccgcattcttttcttttgtttatttttttttttttgtttttctcttcactcgcagatcaacttcttctacccttcaacgctctttcatggcttcgatcatcgaatctgcctggcaggtattattattcccttctcttcttcttatccgttttttctttaatggttttcattatatgctcaaacttccatttcttttttcttctttggtttttgtttctctcatatttatctttcatcgacttgatctgtttattgggcattgtttgattttcaattcgtttctttaggtacctttttctgcatgtttacatcaatgctgacgttatcattttttttttcatgggttgttcttggattttcgatttatatatctgtgaaatggagttttacgtgcttaaatagtatactcatttgataatcgctttcaccatttgttttcttttcttttctttttttttttgctttatattttcttgaagtgattgcgttgactgattgatacatttatttatgagggtagtattaggtattccagtttagagtcggatggaattatgggtattctttcttttttcttgtgtttgcgaattatgtgttgttaaagtcagaagcaagatttgaggtaaagtgtttgtttatttttccaagtcaattagtaattatatcgtttaaagtagtgatatattcatttcgttgattcagaaaaagtcccttaaaggcaattcaaagtattggatagaaaattggaactcgggtgggggatatcatttttttcgtcttcttttccatgtttgttggaggagaacttgaaatgatcactcccatgatcttgagtgccctacactaagcaccacaatgcttccaagtgggaaatttgtgattcattatc

SEQ ID NO: 47228 - DNA, 1393 bp, Cannabis sativa
  modified_base (206)..(216): a, c, t, g, unknown or other
  modified_base (1357)..(1360): a, c, t, g, unknown or other
atatagtcacttaaaaattagaggtactttttattggctatccccgacggtttaaaactgttaggtatactatagtcgactgtttgtcggctatagtatacacgacgattttaaactttcggggatactcaatatcttttttttttgtataaaaatccccaaatcagatctatctaatttttcatttcaaattctctctctctctnnnnnnnnnnntctctctctctctctctcatgcactctctcttgttctccctccgctctttatcgtctgtcacctctgacgaagcacagcagcaaccaccagtcagactaagccaccaccactcgcaccagctggtctatctaggcatcctttccaatcgcaccacctcggtagtcattcttccaattgcaccacctcgacaatcaacacaccaccattcgcaacatgatctcaaaatcgcctccaaccaccaacgcaaccaccgtttgccaatatcattctcaattcatctatcttgcctttcatttatatttatttattgtgttggtctttgatttgagaagtgcattgtaaggacatttggacatcatctatttctccactggtatgatattgtctgctttgggcctaagtcttcaaggatttatttttgagcaccttcccaaaaggcctcattctaatcgagatagtatccatccttatatatcctagatccttctcatttctagccaatgtgggaaagagttacctatcactatgctcattgagttttatagtgtccttcacaagattgctctttcgaattggtgggccaattcacatatatccaccgtcaattataacactgggaatttcttctttcccttggggactggtgcgagtatctatcttccctctctcatatatgattggattgtaaactctgccaaggccaagggtctgaaacacactttaccctatcagagtttgatcaacagggtggtgcaaagggttttcctgcgattcttgatcaagacaagattttgtctgtgccttccattggtaaatctttttctcctacttttggcaagtcgattcctttgtctatcatggatgtttttgctgctgtaggtgccccagccacctagaaagcaccaaagagaacttgtccaaatgtgttctctcaacactaaggagtgcaacacaagtgaaagaaactatttctcaccaaaatacaagcctatccgaacactaccatctttatggcacaaattgtggcagtggtcagccataaggaatggggatgatattttttttccaaaaatacattttcatcaataacatatcaaaaccaagagagaaaagctaccaagtggtgtggaaaccacttgnnnnaccactgccacatttttggtacaagtggtggca

SEQ ID NO: 47229 - DNA, 935 bp, Cannabis sativa
aaaaatgtaaatattttataaaaaatggtgtcttatgtaattattccaaatatatttccctaattaactagtatagtagatataggtatagcgtgttcaaaagtttgtactatagctctatagctagtttcaattatttaatttttctctaaacagaacaaaatgcttcgaattccaagttaattggattgaattactatttctaaagatcgttcttcatttttatttagactagtctagctagattggtaaaatataatagactgcgtactatacacaactatatatatgtaaatggtttcttgtgtttgaaacaatctcattttaaaaataataataatagttttctttcaacaagatatgtatatataaatataatagtactgttattgcagcctaaaattcctaatataatagtcatacttgtctaacctaattttctcagtaaaataaaataaaagagtacttgtcatctcactttagtaaagattggccaactttgaaaaccttacatttcaaatatgaaaattatatataatgtcaaccacaaaaataatgtgatcccacataaaaattcaatacataaaatttaatacaacataatttaagcatataatatatatagttgaatatgttcatatatagtcatttaataagggatttacaaagagagaaggattgtaaaaatatttgtcgttgaattcaattcataaacaattatagttacacatttgtatatagtttgaactttggagtcattaatcatatattttttttgaacaattaattatatttattatttagatagcgtatattatttactatatagtatatcttaggtgtgtataatttactttaaaaattaaaatcttctcattaatcggtcttacaaaaagtatggtaccaaccatttgaaccaaaccaaaactaactgc

SEQ ID NO: 47230 - DNA, 1571 bp, Cannabis sativa
ataataatataattcctcaattatacataattatttagttagggttttgctaatccatttcttaattccgggtattacacgtagaaccaactccaggtatctcctcgcaagatacaggccgaacaggatacctcacatgcatgctcaagacgaggcaatgagcaacccacggagaacgagaaacacttaaggaattcaacttccacatcgtgagtcatcaaagaaatccctataacttggggatctgattacagagatatcgcaagctgtccaaattccacgatcagtgtattgtgtatttactatgcaatctttctgttatattaattgtaacgagaaggaaaatactttctctctaagctcatagccttataaatagtgatgcatattcactaggcaaagagtcgaaaacattttagttgagagattttgtctaagaattcatatttagagacactgttgtaagagctataagaaaaggaacatttctccttgttcttaagtcaatgcaagtaacgaggattaggctattaccgaactgctcgggactaaacctctataaaattcttgtgtctttatattgttttattatattcctttcgttataatcaacctgttgcttacaaaattagactcactgtcgttggctaaaagcgaagtcaacaacatttaagcatattgtttatgaatttcccttttcatatgtgacgtcataaagccctaaattcagaaaggtatttttcatatgaaaaaagttccatttttcgaaagatatcatatttcatctatatcttctaaatatctcataaagaaaatcatagtaatattagtaatatatttcccaaatcccacttggttgatcaaaactcggtttcactcatgcatttcatcaatatatacattatatatcatcttaacttcaaaattcaaataaaaggaaaactgcagatatataagtgttacgtaattgaagagggaaaatataacaaaatagacataattgaaaagagttgttaaaagacatggaaatactgtgaaaaaatcactgaattgattgggactgtatctagggttggatgaggaagacttttgcataaagttttgttaaagattagatagtaaaaaaggagacccgtgagacatgaaatcttggcaaaaaagagattaagtgctttataaataagcatgcagtagttggaatatatagaaaatattgtatatgtacaaacagataaatggtatgagaactgtaaagctataaattattattaattgcagtagttgggaagttctattccacatgaaagaagcttagttatatggagatagccatactccaaaagtcgataggattattaataaaattacttgaatgctatcatataataataagaaggcagaggatattgtgtatataaactatagtgtacaatgcaattattatgatgtatatgtacatcatgtataaataatatttcatataagcagtgtatttaaatatcaccattggatctcaacatattaaggattacgattattagtcaccatatacttatttggacaacatcctt

SEQ ID NO: 47231 - DNA, 1590 bp, Cannabis sativa
tcacttgcattatttattattactttccttctttagttcctattatagctaaactgtgtcgttttagccttaatattaatagagagatgagagggttattcagtgagatagtgggaaagtgggtgtaatattgtaataagttaaaaaaggctgcggtggcataggagtgtaaattaaaaggaaagtacaatttgttttggtaaaattaatgagagaaactataatgatagtatacctttgtagaggatatcaaggatcatgatgataatcaatattggggtctcaaaatctgactcatagctatatatgtataggcctatgtaaatatatagaccacgaaaacacaacaatccatttgcttttcaaattagtttcatcaactcgtgaacaatggacaataataatacgtaaaagaatcaaatttggctttgttaaacagtatttccctttgtctttggtctagctccacagttaattttcatcactacttgtcaggtttttttttttttttttgcaatgtgattatgtgtcacttatttgtttcttttagtatccgtccctgttatataattatatacagcaatacatttcttttttgggctcatacctaaatctcaccaccatcttattgttttaaccaaaataagctcaagggacgagttgtacaactacaaacacatgttactaatattactagctacacataactgcgtgccaacaccaaaaagtaagaagtcttcggcaattattaactttatatgtaactacggctaacttcttaatttgagaaatacttttacctatatgtttatattttttttaataaagcgtttatatattagagggaacaaaacagtcagacctcacgatcattacattctaaatagtagaaacttttaccataccagaaatattattggcaaaagcccatttggtcacattatgggccgcaaaattacaagtttctagaaatataagaaaaattacaactagtgaaaaaaatagagagatgtttacattgtcttgcgtagctctcaagctgccaaaaagattcgacatcctctagattcttgatcaccatcttagaatcactctccaccataacaaaagggtgatgcattgtcaccgctgtctccaaagctaacatacacgtcgccgcttccctgagagtcagagaagtgaagcttgttagtcgccacccacaaaatcgattccgtatgatctctggcaatcgccaccgcacacatggtttccaccccgactctaacatcgcagttgatcttgacccaatcctcaggcgaggggaccaacccagagtaccatcaacctgttgagacttgagcaaactggatccataatctgagtaacaataatatatagagttaatataatgtttcaaactacccatagtgttatgatgagtgaatgtgttacacattaattaagatatatatatatcaaactctattataaaataataaaaatattattacaataatataatcactatatattagggtaaatagcagtataagtactcaaagttttaagtttgtaagcggtataaacccaatatttatttttagcagc

SEQ ID NO: 47232 - DNA, 1861 bp, Cannabis sativa
aaaaaaaagaccactaattttattttattttttatttaaaaggataaaagactactataattgatcgtatgatttattgacactttttcttttatagtaagtatatgatatgataatttaaattttaattgtaaattattattatcatgaatgtgtggtgtcacaaaataataaagaaaagaatttgatttatgttattaactccacctatctcacctacaagtcaacattttcttattttaaaatttgaatttattcactaggtttatctaatccattgaatctaacatctgtttggatgaagaggaggattatgagattgtctttgaaaaagaggaagtgattgaactggaatttgatgatcaatggtgctttgttggtcgcctactttcaagaaaagtcttaaattttcaaatattccaaaatatcataacaaatctttggaaaccggagaaaagaatgtatgtgaaaattctcgaacaaaaaaaaatttgtattttagttttaccgtgaattagatatccaacgagtcgtaacaagtagcccataaacttatgatcgtaagcacctaattattgaatggttaaagacgggcgataatcctaggattatagcacttaagaagcttgatatgtgggttcaagttcataatctacaatcaagttttaagacataacaagtagtttgccgggctggaaattatattggtacttttcttgaatcaaacccgaataatttcatgggtgtttggcgagaatatttacgagtgcgtgttcgtatggctgtcaaagtccctcttaagagaagaatgaagttctggggacatggaggtgatgctttctacaccaatttcaaatatgaaaaagttcatacaatttagtgaatttactttatttgcagtattagaatgattttttggaaagttgtatgataaggctaagttaaaggcacgatttgtgcatagtaattacacaaatattatacatgggatatcaaattctcaaaattgtgaattcaatgagattgatcatagattgaaaaacaacattaatgatcatgttgttgttttgcatgagattgattccactttttcgtttgatgaggtggagcttaaaagaaaacatgtggagaatgactcaactagtgggcttaatgtttcatctcaagtagtgaagtaatggaacccaataattttcttactgaagatgttgttggcttttaaaaaaaaatggaaatataatgggctctgttgtctaggtccatcaatcattatgaatactattagttagaaatttagaattgtttgtctagatccatcaatcattatgaatattattagttagaattgtttgtacttaggaactcacagggctatctaattccttgaagatatttgtgtttagaagaagctcaattttattttttttttgtgagacaatgtgtataaaagatgttgtggactgtattaagggccagtttggcacagttgtactgtgagaaaaaatagttgtagctgtgctatgagaaaaaacagttgtagcaaaactgtagaaaaaaattgagctgggtgtttggtaaattataaatttcaaagtactgtgagtttttaatatctattataattataatgataatgttataatctactttattataatcacaaatatgtaaaaatttattttatacaatattttattttctatatatttttaatttttttgcaaatataaatttacatgcatgtgataaaaatgatttatagtatttttatgttatattttatcaattataaaaaaaaaaaaaaatagaaactcaagtatataagaaaatttttacgttgatgttgtttgttaatattaaa

SEQ ID NO: 47233 - DNA, 1746 bp, Cannabis sativa
aactttgatttgcctcatgttgtagaacgtgccccatcttatccaggtattcttatccaggtattaacacacacatgtgtatttatacatgtgtatttatatatatatatatatatataatgttagcttaatatagtttacaacaaattatacatataaatgccacttggtatttggtttttaataattagactagtttattaactaataatgttgcaggggtcgaaaatgtgggtggagacatgtttgaaagtgttccaagtggggatgccatttttatgaaggtacgtataataataagttaatttgaaagttttccaattaattattatatatatatagcagctacctacctatatagtagtttaactaaaacattaacgtttatgtatgtattttagtgtatacttcatgattggagtgatgaacactgtgtgagaatattgaagaattgttacaaagctataccagagaatggaaaggttatagtgatggatggccttcttccaatggtgcctgaagatagttataatgataagttgatgaccaaatcggatgtgcttatgatgacccaatgccagggaggaaaagagaggagcaaacaagagttccaagccttggcaagtggtgctggattcagtggcatcagacttgaatgttgtgttagcggcttttgggtcatggaatttttcaagtagatatgtagacagtagatccatcactactacttcttccttctttgcaaatcattttaccaataaaaatgagttcatcactcttctcttttaatttcacatgcgctcatatgttccgatgagttttatgttttcttttgtaattttcattcatatatatcaataataaagtggtagaatttattttgtttaatttgatttataattgtttgtttacatgtttattttttttttaaaaaaagcaatgaatatattattaaataatagaataaagttaaacaatctaataaccaataaactatgtatcccaaaaataatatgaaaaattaaaccaataaatatatagataaattctatggtaggaactatggttttgttcttatgtacacatttttttagctattgatttatatgacttttaaaagtcaaaattgtataaaatctataggtttgtaggttattaaaattttattttttttttaaaaaaaaatctcacccccaattaaaaaagtgagaattaaaagtatcattttttaaaaaaattctttgaatcgaagatcattaacgatcgtgagactggaagatcaaggggattcgttactttctctaacgaaaaggtgatgagagatgccatcgagggcatgaacggccaagatcttgatggacgtaatatcaccgttaacgaggccaaatcacgcggaagcggcggcggcggcagcggtggttacaaccagggcggagctatatggtaatttacaggggctttggcccccctcaattctcaaattatatatatatatatatatatatatattttagttcgatgatctaaataatttcatatatatattattaataatataaaatgagctatatgatttgtggtcaaattacacacttactatagtagaaaggggatgtggtggatggggttagcttattcaaaaatcatgtatattaagtcgtattgtattatattatatttagttggattatatattatatttttatataatattatgttaaactttaatttatactaaaatattat

SEQ ID NO: 47234 - DNA, 742 bp, Cannabis sativa
ctccgcttctcctggtgatggatcgtcattacgtcatcccccgatttagaataacgacgatgatgacattacccgtctgtaaaactatatatattttataattaactttagagcttgactttttttcccaaacatcttttaatattttactttattacttttgtttagttcctaactttagaactaaaagatattttaatagtagcttgatccagatactatttaattataattatgaataccacttttcatttaattatgttctttaaaaatataagttattatttaaaattaattataacttgtacccgcgtaacgtaatttggcgagtaagagttttgccggtataacttttaccagcgtaacataatttgcatcggcataaccgttacctgccaaattacattactcgaatacaagttatgtcagcacaaatttgcaaacacctttgcccaccaaataaaaaagcctgccaactttcacatgtgcattatagtgctgacaaaacttttcaataaaaatttagcctacatttaatactaggcgaaggaaagtgtcagtgtaaagttactctgtcgatgcatttaccaattgccctagaaaaaattattttaccgaccacgtaattttagcaggaattgcctcggcacatacactctaattttatcagcgcaaatttatactggaaaaatccttctttattttagtggatgtgaatattatacatctgatacaagtttac

SEQ ID NO: 47235 - DNA, 2526 bp, Cannabis sativa
gatgtttatatatagggatatttgcaagtttggaatgtttcttttctctattatattttgtgaaaagttgttttaaaagcaatattgaaattattctggtgtaaactcgagataatttttagactcggcactataaaattttgagagataaaatataaaaataattacatcaatctagagattgagataataatcttgaaatcactaatattagaaaagaaaaattaattctgctaacctatcaactaaacctaatgtgaaagaattccactagaaaaaatgatttcaaactataatgatcaattgaaattaataaataataatatttattcaaaagcccattgattttccttgcgaatagcttcttcttcttcgggagtgaaatcattcttgatattaaataactttctaatttcttccggagtctttcctttgatcatatcagccacagtttgacatgttaagtcaagtaaattcgcgatattgaggtaattagcagactgaaaaagtaaaataaatttaataagtacttttaaaaaatatataatttcaataaataaatacacaatataatagcataatatacataccaaaataagttcaaaaagtgtggcttggtcaagcttgacaaaattggcatcccaagattggagatcagtggaattggaggaatcggcgtgcttcttacagtattcgatgacaagagtaagaatcttactggtgacgttaggcaaaggaatgccattatcagcacaaccatcttctatcatatgtttgatcgtctgggattgtatggcaattgcctcttctacctcaaacgattcaccatctgagctgatcaagatgattttcttcgattccactaaaacgactgcgcttccttcagtttccattataaacgatgcttattatctaatcaagaatcaaggtttacttttttttttcaaagaagaagaagtgagagagaatgtgagaataagaatatgagaatagttttgtctatttatagaaaattagaaaggagtaatctagtcctagtttcttttggaataagattgtgaagtacgatttttgttggttgaatttaattacttagtatctttttatcttttattttttttatttaaaaaaagaggagaagattcgtatatctttttttgaatttgaataaaaaaaatcaatattaaatgataaaattaggtactagtttttttttggttatacatggtgcctcgaaagagctacttccgtgttttatttatttatttattattattattttaaaataaatgtataaatatctaaatgaagagctactatcgtgtcttattattttttttctttttctttttttaaaaaagcaactatcgttttaacttaaaatgataaaattaaataaaaaactaaaacttaaaattagaattttaaagttctaattaaaattctaattttaaaattctaatttttgtccattctgtttacataatagttttttttttcttaaagtaagaactattttaaaacaaaaataaaataaaaaataaacagtaactaaataaaatatttatattaccccttcgagtaaataattgaatttaacaaaaaataagaactaaatctcttcttcttgaatggttgtagtcatttatttttttttgttggtaacttttttatggagattgttttgagtttaaggtttttatttcaagtctaatattaattattgtttatagatttatatttcaattttaatattgattagtagtgttttactatacataaaaaaaatatttcaatttcttgaaagattagatatgattttttatgttcatattgttttttagtatatttatttaaataaaatatctcaattaattaaaatctaaatgagaatttagtggttataattaattatatttgtacatatatgtttttttttttaaattatattcttattaacaaaaatcacaatttaatacatattaacaaaagaaactatagataattatcaatttaaattaattcacctcttcttctcatcaaagataatgtaaagctggatatgggttgacagatattttgaatcaaaaatttgaaaaatattttttaatcaaaactactacaacaaattttctaagctaccatctttaaaaactaattctttctatatcactttattattcttgtcccttactcttgtcttatccatagattaaattattatccccaaaatctccattaatacacattatacaattaagttatcttcaaatctcatctattaaatatatttaatatattataggaaaggtttttagtacatccctaaaataaatatatatattttttttttgaaaataaaataaatatattttagtatctcttatccaaaagaaaagagaaagatgagattttgtattctaacctttttgttatgataacatacgtaattattaggaattatgattagttaagtttagttagttagttcttatatacagtaaactctgttgtataggaaagtag

SEQ ID NO: 47236 - DNA, 1253 bp, Cannabis sativa
taacataagagtatgtcctatttaatgaccatatggatttagttgaaattatttacattttgctacttgagttttcactattttgtgtgactaatgtatagaaagaagctgctgaaagcgctaaagcaatgttggtggcagccataactgaaaacctagagatcaacaaacataatatttgtcccatctcaaactcatttcggattgctgactttggttgctctactggcccgaacacctttatcgcagttgacactataatcgaagctgtttgtaaaacctaccatgagagtacttttgtgcataaccccgaattccatgtcttttttagcgaccatgtctctaatgacttcaactttcttttcaccaaccttcctaaggatcggagttactttgcggccggtgtgcctggctccttccacaacaaactgtttcctagggcttcattaaacctcgcctactcgtcacatgcattgcagtggttgtcgaagactccagtggaagtcacaaaccctagctcacctgcatttaacaagggcaagattttttatgccaaggctacagagcaagtttgtgaggcctataagcgtcaacatgaagaagacttagcaagtttttttggtgctcgatcggaagagctcgctcctggtgggctagttgcgattctaatgtccggtagagaagatgagagttctccatctcaagtctcgcttggccctctttttgaaccgctcgaatctacccttatagaaatggctaacgaggtatgtatgagttcaagttctttatttattataaaatatgtgagatctgatattaaattattttatattttcaaacaaatttcaatgccatatatatcaacaaaagaaaattatcaaattttgctttcaagctatctctattctctatcaaccttctcatgataatcagttactgatacagtttttttccatattttttaaaaaatattttttaaaaagtcaaattaatgatatatcatgtggaacttgctaacaaaaattatcattattttgtagggaataataagccaagaaaagcttgactcattcaacttgcccatttttagtccatcacctaaggagattaagaaaataatacaaaaaaatggatgttttgaaatattaagattggaagttcaacctcgaacacttcatcctatgatcactttacaacaatgcagagctggatttgagaacattatcaccaaacattttgatgataataataat

SEQ ID NO: 47237 - DNA, 1312 bp, Cannabis sativa
aaggggttgtcagtgggaccgagagtatacatgaggaacatagatttctagatatgtttaggaatttccagggttactgatgcaacgagaaagtgactttagggttgaagtaatgttagggacagagtcagttcctcaaacctataatgagtgctagcagtaagattaaatgtaaggatttagttgtaaatatgtacgatttgtggtataccagaacttgtaattattctcatgtacattagattatttgctaaagggaaaggatgaatcactgagaatagtgttgattaaccaaaatgtgaataagtgctctattagggtaagcatcctttatcaaggatatgtgattagactgatcaactttgggaaagatcattttccttaaagctgatctttgatctaattattatcagtttgggaattaggaagtggacatttctagctctaattttgggtactcggtatgagtattatggtctatatggtatatttggattaattaactctatagcgataagttatggacttgacagattagaaatgttagatttctttggctttaaagattgggtacagattgaagtaatttaaaattgccgtggtatgaaacaactagtgagaacaaaacctcttaaggttagttggatattagggaagaagagtaaaagggttttgtggataaatccttctaaatttgaggtaaagattaattttttgtgcaaattctaagttgtttaaccaattatgagcaatttgtaagttactgtgatattttaaaacaaagttaggctgagttttatagtagtcggaaaagtcattacctatgtgctaaggcaattgaagggataagggttagagcaattcatctgatattggcagagagtatggttagaattgaaaccaagtttagagttgggagaatttgtcaacattactcatgggcaaacttgttggaagaaatgaagatgaaatagtagagagaagattatcgaagaataaagatcgaattcagatacttgagcttactcagtggaataaagagattgaagtgagaaaatacttgacgagtcttatgctacatcatacgtattacatttaagaacaagaacgatatattgtctttcaggtagcccatcatgaccttactctagagttaagtgtacttgacttggagtaatctcagaatggatgacctcctgagaagttttttcggggaacgttgttacgaaaattatgaacaatacgcaagtgcacgtaatcaagtagtaaactcacgcaggtgaggtcgaaccacagggaattgaaatgaata

SEQ ID NO: 47238 - DNA, 1501 bp, Cannabis sativa
ttctaaagtgaagcaaaatgttaaagtttaaattcttaagagtcttaccaatgaaactattaacttgatttagaatatggtttttgaaagcttgtaaggtgatttttgtataatatagagattagggtattgtacctatatgatggtttgttgtaatataatgatatatatgatttttttttaaaaaaaaaaaaaaattgttaaaaaaacatataaaaaagtaaaataaaatttatgtatgtttattatgttagaaaaagggggaaaaattaataagataataaatttcatgctatatgtagattaagttggtaatatttaatcgaattagatttatatttatgggttttttttctcaaaaataaaattaaaaattaaaaattgcttcaactagctaattcatttagaggccatatatatatgttggaagtttgaccatgcatgtgacaatacaccaaaaaatattttttttaaaaaaaggtaaggcgaattatagtaaaattgttttcctaaaaattatatgtaaaatgtgtcattaattttaatttactatatatataccttgtcatttaaatcatgtgacattactacgagtaatgtatttgtgatattcaaaggaattcaaaggttgaatgtggatgaacaataaccatgtagttttggttatttgatatttctttttataattatttattttatattagtttttgagaaaaaccccaaagcccatttttaaagcaatgagcttaaagagaaggtgaaggggaaattgattgtattacttcttctcatataaaatgaggtcatagatacaagaaggataactaggtcaccaaaccttgctaataacttttgacaagacatatttagctaaagtataagcaataatattaaaagttatagaacataaagtaagactagtaaaatgaaagtcaaaataattgtatttaaaatctggagaacataattgtatttaaaaattcaagaaatctagttattaaacttcgaaataacattcaaacaattaaattcaaaatagacattttggagactcgataagtaaaattggttggcaatattttttaaaactaaggcttctgttgtttcaagagagtaagtacccatgataagtcaaacagtagaatatctagtgcagcgtctacattaatcttaaccaaaccttagcaggcagcaccagaagaaccgataaggtcaattaatctttttttttcttttaaatagttacatacaataataatttgtaaaaatagatacaacttattttagaggctgtaaatatggcttggccatgggaactataggtcctaggtggtagttataaattattgagccatttttttttaaagaaaatgtggtattttaaaaaattattaaaaaaatatttgtattttcaaaattaattgtggtgaaagatcattctcgaaacaaaacagtacagtaacagtgttcaagaaatacaatcaaaagtaaaactaatcac

SEQ ID NO: 47239 - DNA, 1644 bp, Cannabis sativa
ttattaatgactacataattacgtatttataaactttctcactgcggcttacaatcactaatggataaattgctaataggcttaaacacaattttcatagtatcagggttgtttttagagtaggacggccgaagccccccagtttagtctctctctctctctctttttaaggaatttttttaacatcagctcataaggtcccaacatttttttttttgccagaaaaataatttaaaagattatttgaatttattttatttttcaaataaaatgtcaatttttaaaattttcccataagtcgtgaaagttagagacaactctgattatagttttgacgacttatatattaaattaaagagtcataatatgtacacttaaaatatataatgtgaaatactatactttgtgtggattttttaggcatattttgagtgagcatgtattgttaattactctaaattaaaatatgtgaaatttaaaatacattataagaatagtgacactacagttctatgtggtgttgcacattattagtgtttaatctattacaatttaataagttagacactaaattgagacaatagatttagatttttgtctcgttataaggattgttattaactattagtggtgtttaatagtattataaggtactatgattattttttttttaatatttattaaattaaaatatgtaagataatattgtatgatgacaccacaattagtattgagtaagaattacctatatatatatccaaatatatttaaggggtaattttgtcatttcacttatgactaaggggaaacacatattgttttcttggctcaaggccttatgttgttaagaacacatgtactatactaggttgttggtgttgttgttgttgttgttttacataagaagactaaaattgaaatgcatatccatgtcaagctcataaaaattatttggaaaaaaatattataataatataaatattcaataccattattactacatcattcatgtgtgtgaagatgtaaagaatatatgtggacatcataaaaagaaaattcacattctctataatatttaaaaatatatatatatatatataatataatatgtattagttgagccacattttggttggttgaagtgaaaaataaaagtgaaaaagtactcaatcttttttgatttagtcaacactaaatgccaaattttacctcattaaaaataaaatatagtagagctataaaagaaaataaatatttaattaaaaagaacattattattctggttaaaaattaatttaattagagaccaatgaaatataggtaatatatagttagttagttagtattactagattatttatcaattaatttaagccgttggatgtaaaataattgtgattatcataatttttgaacaggtgggtcattattaaactatgacaacctcatgcatattatgttgcttatcaattaaaaaaaattacaatttaattattattaatagaaaattaaatgaaaaaaatatggccattaatttcaatatttttcttttctgaaaaaataaacgacttggcattttttctaattttccattttgtctttaaattatgccaattagtgacattttttttttaaaaaaaatga

SEQ ID NO: 47240 - DNA, 2150 bp, Cannabis sativa
  modified_base (1133)..(1133): a, c, t, g, unknown or other
aagtagtattatttcattcatagtaaaggttgattgaaaaatgttaccttctacgttagcatttgttggtactaaaggccacgataaaagagctaaaacagctgtaagtagaaccaagatcgccattttcagagcttggaagaagattaagttgggtttgaaaaagctttcaactttgaggtactcaaagagtcaaagggtcaatgttggtaatgggtatttgagattttagagagagagagtgtgtgtgaacgtgttgaggagagaaaggaatcaaacatttgggagaatttatagagcccataaaagtagaggagtgaggttatttgctcttttttcttggcaaatcgctgtaattaattaccaaaactttttttttttttttgaaagacaaaccaaaattttatttaaataagatcggttctttcttttctaatgatttttattaaatataaaatctttttaacattttatttattcatttaaatatttttctttacataatttcaatacaaatttaattactatattgcttttggggtaaatttgtaccttgtttattgggatacaattataaagtttaaaccaaatataatattaaacaatttttgaattcaatttactataaaatttacaccaaaccaaacaataaaactttaaagtctgaataaagaaaattaagactagaagaacaaagcttctgcttcaaaagctataaaggtatgatcattttatttaattttttttcaccaaaagaatatctacaaattataaaaataaaaataaactagtatcaaatcttttaagaatgatatgaaaatttcacagaagaagcattttttaaatgcttgtaaaaaaaattacagctaaatcctcttaattatcattccacttatatttaaatttttaagctcaaaatttagtggcaaaatcctccaagctactgttagcaaatttaaggttgtatctatttttttacaattaactgctaacatagagtacttatgtgtatactcttttacacgtgacaagtttatattagtacacctaatattattatttaaaaattataaagattatttcaaaatttacaatattttttattttgtaaatattttattttttatttttanaattttatttaattttaaaatgaaatttgaaataataatattaggcgtaccaatataaatgtgtgacgtatacaagagtgtacacataagcagtctatagtgacaattaaccgaagaataccttaaatttgctaatagttcagtagtttgaaacattttacttgtcaaaattaattaagtgcaagtaaaacaatagttagagcactcccaacagttcctctactctatctttaaaatatatcaccaaaattttattttttctattttacaacacacttttacactacatcatacatcaaattctattagatacatcacaagaaccttttttttttttttaattttattatattgtattcattactaatatataatattaatatatacatatattttcatataaaaataattattaaaacctaaaataattaataaaatgtgtttagagtaataaataaaattctacaaatgtagagcatgaatagtaaattttaaagaaactttaatataaagaaggagtttagaacatctgttatagcgtgtttttggtcttagagattttatatatcaatggaagataatcaagatatattacaaatcaattgtaaaataatacaaggactaaaagattgattacatacatgttagaacacgtgcactatgtatatgtgtttatatatatatatatatatatatatatgaaagggaaaagagatgaataaattacactatattatataatatatatataatatgaaaaataaaaagaacactcactcacagccttgattatagaatagtggggatcactatgattggaacaaaatattacacctttgtccaaaatcttatttctcctatctctaaggactaagggaactctcatggaaatagctttgaaaattatcaagctttagcgttttctagcaaagtgttatttcgatagaaaacttctcatctcaatatgagcaccttagaccttattaattatatagtatttaggatatcaccatttga

SEQ ID NO: 47241 - DNA, 1747 bp, Cannabis sativa
ggtcctctgcactaactctggaccaaagtacttccgttctcctgttttgtcccaatgaattggggtgcgacatttcctaccatataacatctcatagggagccattaatggaaaagttgttagtactaaatttacaataaaactaatatatatttttcaagaaaaaattagaataaaaattaattgtttgatagaaaaatacttataaaattcatctatacacaattcacaacaattaatcagtaaaattacattttgtagaaaaactaaattagaaaaagagaaagatattagaacagagcatagagagagaaatattctgttattaatttaaaattgtgtgtaaatacaatagtttacatgcctttatacacatgaggaagaattggacaactaacagctttataactaacttaaccgaatgtgaaactaactataacaactctaagagaccccctcaaggtggagtgtgaacattctttacaaccatcttgaaaatgatgttgttgaactgagaaggatagagtggctttgtcagtatgtcggctcacttattgatggaggagacatggttcattttgagcatactattggtgatcttttctcatactatatgacagtcaatttcgacatgttttatacgctcatggtagacgaggtttttagatatgtgtatggctgtagtattgtcacaaaatagtgttgaaggcatgttgattgtgacgttgaaatttggagaataaaatgtaaccgagttagctcacatgtagtattggccatggctctacactcgactttagcaaaggatatcgatacaatttgctgctttttggacttccaagagattagtgattggccaaggaatatgcaagatcctgttatggatcttctggtgtcaaggcaggcaccccaatttgcatcagcaaaggcttgtaatgtgagtggtttggtgaatgttgtgtggaaaaagagaccttggtcgggtgttccttttaggtattgaagcactcttgtagcagcttgcatgtgaggtttttgaggagcttgcaaatattggctgagcttgttgacaacaaagctaatatatagtctggtgatagtgaggtagattagttttccaatgagactttattgtgtaggattccttaagagttggccattatctttgctgagttttgtgtttagttccataggaatggaaacaggtattatgccaagtgtgccaacatcttgtaatagttgtaagattaatggtctctgagttacagagatgccttttttgcatcgagcaacctcaagacctaagaaaaaatggagaatgcctagatcttttaatttgaattgagcatcaagtgtagcaatgaaactagttagggtagtagtgttattggttgatactatgatgtcatcaacataaattagtagtgcaagaaaggctccagattgatttcttataaacagggagtgttcattttgagattgtgtgaaaccttggttaatgagggtagtgcttagtttagcataccattatcttgaggcatgtttgaggacattgaagctttttttgtaatttgcatactaaatttttaggtatcactcatttgagagtgtaaccttgaggtagtttcatgtaaacatcgtcatgccactactacaatgttagcctttagaggctggtttttcacctctatttataaaaagggaagctaaagggggtgaaaataaccgcttttgtcgaaattgacat

SEQ ID NO: 47242 - DNA, 1788 bp, Cannabis sativa
  modified_base (1715)..(1742): a, c, t, g, unknown or other
acaaggttaatattttgatgatacttttgtgttggttttaatttcattattaaatagcattcaggtgttgatgctaagcttgattcaagttgatattatttgagtagtcttatgtgagaagactggcgaaataccaaaagaatggtttgagttgtgagaaaattagaggcatatagttgcttctttgcaatgttttatctcaccaatgttaaatgtatatacatgtatgatagctaaggagagaggagtcagcttgacattgttattataagtttctcaaatggatgttccaaacatgcatagagaacaattgatttattgttaagctctattgggctaattatcacaatcatttatggtgtcttcatcctaattttctttactgaatttgtttgtacttggtcttcaagtatacataaatatttgtaaaataattattaaatataaatttatgttttatttatatttattatataatttatttattttttttatatattttgtagctaatagataaaaagttatatccaaaagctatgattgacgagatgagggaagtgtgggcgtcagatatgcttccacacttgcagagtcatcacactgcgggtcataattagttaatttttttaaaaaaaaaatattatttatgataaatatttagttaacaatatcagttaaacatatattcttttcctctaatataatatttattaattttgttatgtatatatatctttattaaaatattgtaaactttgtgatatttatgtttaaaatttatattcttttttttatgtttattcttttttatgtgtattaattgagttaagttaattatattgtttgaaaaaaaatatattatataatataaataattattcataatttaatataaaaataaagaaataaaattaattttgcagtatttaatttagaaaaaaaaaataaaaaatctagtttcaagtccaacttagctggactagaaaggggttctcagtgtgggatcgcttttcaagtccaacattgttggactagaaatatttttctagtctaacaattaagttttcattttgtgtgatcgttttttaagtccaataatgttggactagaaatatttttgtagttcaacaatgttggactagaaatgtttttctaatccaacattattagactagaaatgtttttctagtctaacattattggactagaaaaataccccttttgtgtccaacacaaaagggactcgaaaaacttatctagtccaatgttgatggacttaaaaggggttttttctagtagtgaaaatgtctgctcgaccaagtatgtaatctctgtttgattttatccactatgatcccacagtcctcggctttccacttgattaatcaaaaccaaggggctttcatccaaggtagatctatagcccataatgtcatgattcttcaggatcttttgaaaaattacaaaaggaaaaatgtctctcccaggtgcgctatcaaaattgacattagcaaggcctatgatactgtgagttgggaatttatggaagacttacttaatgcttttaacatacctttaaggtttgttaagtggattatgggatgtcttcgagctacatcttattccctggtcatgaatggtagagtgcaaggtggctttaaaggggaaaaagggttgagacagggagacacgatttctgatctttattaataagnnnnnnnnnnnnnnnnnnnnnnnnnnnnatttagggcataaatcccaacagtaacgccttaatctatagggacg

SEQ ID NO: 47243 - DNA, 2154 bp, Cannabis sativa
  modified_base (2101)..(2127): a, c, t, g, unknown or other
acaactgcattaccaacaaaaaaatcctctaatcttcacgaattatccaattttatattacgtatattaattttgtacatcagctagaattaatggatataatgtttctatgatatagataggccaaagtgatactccaaaaactttttatttttaatttgttcatgtcccttagtaattgcttttacttgttgtgccccattgtgccatcaatgaataggcgctgcccttgaacttaattagaccatgaaccttttcaagctgcccatgaactttatcaatgacatttataggatgtgtgttagattttggtgtgaaggatcagatgtactgaagaacaaaatacattggtgtacttgagaccgtctttgcaagcacaaaaatgatggtagaatagactttcgtaatcttcacctttttaaccaagctctattagtcaaacaagcgggacacctttataactttcccaactcacttgcaatcaaaggactttatcatcgtacaaaagactatggagaagttgtttcaccaaaaacaggttcctatgtttggaaaaatattttgtggggtaaaaaactatttgacctttggtttctctcgcgagttggtgatggcaattcaatatcaatttttaaagacaaaatggcttcctttgcctttaggtaccattatgactcctctagacatgattaatgaaaacgccttagttctgctctttgtcattccaatggtggctggaatatttctcgaatacttctcacctgaagaagcaagggcaattctctcaattccttagcaattccgcaatgttcctaataaacttatttggcggtttgagaaacatggtttttactctgttaacagtggttattggcttggaaaccaagacaagaacgaacctcatgcttcattctctaatgctagttccccttggtggcaaacactttggcacttgaatcttcctcccaaggtaaaaaatttacttggagctaactggattcctgctaaggtcattctccacagacatggtcttcttaacgatgatttatgtccaatttgtaactgtgaattgcaaactacttgtcatgcgttgtggggatgtagtaagcttgcctcaactcaaaagttatgtgcttttgaactcgataacccaaatatgattgtaaatgatatctataattttcatctgcatcttctacaacttcctcacatagaaattgaattggttcttgttacttggtggcgtatttggttccatcgtaataaacaagttcatgaaaatttaccattttgcctgaatttattggtccttgggcggttaactttttgagttcttatcatttagaaaccaaaaggaattctaattcccttgatcgtactacaacaagtgatccacctcattagaaatatatgccctccttcaggcacgctcaaggccaacactgacgcagcttttggctctagttcgcacttggtatggtgatcagagaccatgatggcaaggtcactgcttctgtagcgtggaaagctcacggcagtcctcctccagagtgagtcgaagctctcgcaatctgtcattccctctcccagtgcatctcttttggcatcacaatatccagattaaatctgattgtcaaagtctgatccataaactcaacaactctctctttttggactcttttttgtgtttacttcttgatgatattagagatttatgttttaattttactattgtattttttacttattgccctagaactgccaatggagcagcgaatgctcttgctcattatactttccgggctacttctagcactgtttggtagcttgattatcgtttttgtattcaaaatattattttggctgatgtcaatcatcaataaatcttttagtctcggtcccttggagttcttctcattgatgatgtttttctaaggatattctctaaaaaaaaaatatttaaatagataaatttaaatttaaatttatactttctataaatatttataaaaaattaagccaccaaataagggtgcactacaagaaaattagtctttgtcgtcataattttgcaccaatagggctcgtttggaacgccgtnnnnnnnnnnnnnnnnnnnnnnnnnnntatattgaattggattatatatcatat

SEQ ID NO: 47244 - DNA, 3049 bp, Cannabis sativa
  modified_base (2977)..(2978): a, c, t, g, unknown or other
gttgagaaattcgttgccttaaaaatattaattactctctttaatttctagctaatttctatataaatatatgtattataattattattattgttgttgaaggtcattatgttcctcaacttgctgacctcatttataagagaaacaaaggagctggcaaagaaaattccttcataaatctcaaaggtttcatggtaatatgattaattattattatgattaattgtgattatatctgttttttcatgcattaatttgtaggtacatatatagctgttttttcatgcatattattatgtgtaataatatcatgtatgtatatatgtctcacactgtcactatccatatttgatttcacacatatataagattctttttttgcctatctattattaattaatagcataagttattaaacatgcttatatatataaatatatatattatttttggtgtagattgggaatgcagtgataaacgatgaaacagattcgaatgggatatttgactacgcatggagccatgcaatcatatcagaccaactccaccaaagcataatcaaagactgtaataataataataataataagcaagacaaccaaaccgtactcaaatgtgcaacccatgttcgaaactttctacaagcttattctgatatcgatatttatagtatctacacaccaatatgtattaatactaataataatcctccttcttcaagaccaaaactacatgttgctccacgcctcttcacacaacatgtaagtaataagatttaaaagaaattataaattatactaaatagtggtatttttaaagattataaaaaaaaaaggtgtatttttctaaagaaattttgtatatgaattatttttttcaataatatgatgatatttttaggagttatgggatcgtgtaccagcgggatacgatccatgcacggagaattatgcagtgaagtttttcaacagaaaggatgttcagaaggccctacatgccaatgtgactaacctctcatatccttactcctcttgcaggtaatatttattgcctttctttcttttcactttcttattatttaatggccttagggaaagagcgagagacaaagacacagccccaaacacagcatttactcatcactgaaatctaacttatatataatttctggtagagtacctactctttaatgaattgtgggccacaatatggcttcaccattttgttttcttctatatatctcttttgtgttattaattaccattttttgcacttcaattttaatatctatcaaatcatgttttagaaatttttaatattgttaaatatttttctaaactattaaaattgttgaatttaaaattttttgtctaattttaagaaagaaattttaacagaatgaaagtttaaggaatatataagcatgatttggtaaatattagaaagttaaaatttaataaaactaaacaaaaattcttaaatgtaacatttatataattcatagaggatttttaacagttaaaaaaaattcaaaaaacataattcaatacatgttaaagttaaaagaattttttttttaattagtgttattattattaagaattcaagttaatgatgacattgagatagatagagagatatatatgtatatttatataatttgttgttattgttgtgtttttggtgttggatgcatgaataaataaagtggtgttattgggagatggaatgactctccagataccgtaattcccgttattcgaaggcttttaaatgctggcctacgtatatggatctacaggtaatcccatcttttttttctcttttccttaatttcttattttttatttaacaaaggttaacagagctctcagcataaataaaacacaatttaatttaaggctgctttttatagaccatgcataaattaataagtaatttttgagggacgaagatgaattagaattagagatagtgaatgacataaataatgttttggagtttgtttgattatgtagtggtgacactgatgggagggtgccggtgacatcgagtcgatacagcataaaaaagatgggattgaaggtggtggaagagtggagagcatggtttgagaaagaccaagttggaggttgggttgaggtgtatgaaggtgggctaaccctagccactgtcagaggcgcaggccatcaggtccctgttcttgctcctattcagtctctttctctattcactcattttctcaaccacaatcataatactaccttgccaccttctaggttttaattctacttattattaattgtaattccaaaaacattattaaatacatatattattatttcatcatcaataaatgaacttaatttataaatggacattttttattattagttatattaagtgacatttaatttgttagctattattggacatatataatcagtttataatgccaagtatatacacacacgactcacacctcaaaagaaacaaataaacaatttaacaaaaacaaattcaaataatggtttaatatatatacgatcatctgataatgatatataatttacagtccaaataaaagttagtaagtcttttttattttcattttctatatatataaataaaagtgcacgtgcatgttgaaaattattcgaaaagctttattaatcaaaagagaacaatataatcatctaatggtcaatatttaatcaagattagacatactacaaataaacattaattaaaaatttgggtccagagaaagattgaagaagaatacgaagaatccggattgaagaagaatatgaagctcttgattgaggttgaaaaacatcaagagatacacacacataccagaagaattagagagaggaagagagagagaaaataccaaatgaatcggagacattgatatgctagagaagatgaattacttttcactgagaaatgaatctgagagatcgatctgccnnagaacacgaagttgctcttcaccgagaaatcaaggccaaatcggccagagaatcagcgaagatggctgaac

SEQ ID NO: 47245 - DNA, 845 bp, Cannabis sativa
tttttttcattacaaaaggtgatatttatagttgaagcttgctgtgaaatgggtgaaattcgtgcacagactaatggcaaaagtggctccaaaaacttagggtaatgggccacgtatatcgatttaatttcctgaagcattcaaattaatcactgatcggttgttaaacattgagaaagctaaaacgtgggactcttgcaactgatggtggtgcacgtgccttgctttgttggaacatgaacttcaacaagtggatttggcaacattttattgttccgtattatcatgacccacgtctaaactcaatatggactagtgtgattcttcctcttgggcttttaatgaaattaaggcccaactaatgatttaagagatgcttgacctcgagaaaatcatttgggatatgattcttgacaatacatttctgttagaagcatggaaggttggacttgagatttctttagtttggacttatcatcattcttacttctatccactttatgctcctgatttgaaatttaacacaaattagattaaatcacttattttcatattaattaatttttacattcaaactcatgaaaatatatattatttaactctaatttagtactcaaatacacttaaaaatatgcaatttttacacactaatcacaacctccaaccagcttattgctagtttctagcaattcaagcgaaaagaaataatgtcaacataatattcttaggtcaaaaattataaaaattgcacaagtattcaaacaaaatgttagtaacaagccaatacgaactatacaaagttaccttgaataaatctagaattgtgagtgtgtgtgcaccaaact

SEQ ID NO: 47246 - DNA, 1963 bp, Cannabis sativa
  modified_base (558)..(569): a, c, t, g, unknown or other
  modified_base (711)..(711): a, c, t, g, unknown or other
tttttttttttttttttgcatgttcatgtaaattatagttatttaatatattttataaaattttaagaaattcagaaaaatttaatacggtgaaaattacgttcaaacagtgtgttgaacgcgtgactattttattttatacgagtgtaaaatagactgttttaatattattttctgtactgtaaattattctgaatttttcaaaattttgtaagatatcttaaatagttataacgtacatgaatatgaaaaaaatagactaaaaaattgtcaagataccgaaacaagtagagagtgcatcagtacatttcttttaaggaaatgcaatgtagaatcactcaatattatatatctaaatgtaataggatcaaaaaatatcttcaatggagtgtaacaatttaatatatctaataattaatcgaactaattttcatttagtaactaattatattttatgtttttatatttaaaaggtaaatatcattttggatcttatgttttgcaaaaattattaattggatcctctattttgttaaataacaaaatagaccctatatnnnnnnnnnnnntaaaaataggaccctgagctcaattttcaataaaattattttttaatttaaccaactttaagaaaatttcttatacgaatagatacagaaaatgtaaccagttttgtcataacatccttagatcaaattattattaagtttnattttgacaaaaaatcagttcaaagtcttatttgaagtgataacataaattatctggttgagcaaacttggaatgggcatggcatgtttacaatctagttggatgcgtttccacttaagcttttagtttgttaagaaattttcaaaaagtgttttgtagatcttataattaaaaacttaaactacagtcaatatatatgggaactttagaagtccaaaagtaatctttaaaaatcaaatagctatttatttagaatatagaatgtatgagtaaattattaagtttggtcatgttgaatgtacaaaacaataataaaatatctttaggaggagttaattatttatttaaattgtaatgtaacaaaaattagccttaaaagagtatttttatgtatgttaagggttatgcttttgaataccgaaaactcttatattttgtttcattttccaaaacaaaacactctattagtttatgttcgtctattctcattcatgcaacattagtgagttgtattagtcaaatttgcatgtggtgcatttaaacacaattcataaatcttaaactaagtgtaccttcaagcaaaatattttttctaagacttagatttagattgtgttatagttttaaaatgaagacaaatttataaaaagattatgattttcttgacacaattatttttattagatacttgtctgtaggtttatgttttgtaaataatggagggttaatactactttaaactttgtattttgtaaaaattatctattgaatttattattattttttttttttttgacgtagacctatcattttgtattttttgaaatgatcctaataagatcacaagctcaattaaagaaaaatgtttataataataagctgtttttaccgtgtgttgcgtggtgtattagtagatatatttttaccggcattccttcttgcttgggtaaagagtttgaaccccaccacaacacttcttagaagggattaaaggcttgactttttcatggttaaactgctgtaggtagtgtcatttgtgtgatggaaattctttaagtgactactaaattatcaaaataaccaaaagagtaggaaaaaaaatctacaccacgtgatcctcttagtttaaatttcaaaaaataataatttttagggtaaatacaattgtggaccctctgttttacaaaagttaccaattggaccatgtgttttgttaaataacaaaatgaaccatgtattttctaaaatagta

SEQ ID NO: 47247 - DNA, 2498 bp, Cannabis sativa
tcaagaggtttaaatactagtatcactcatttattgggatggagacgtttggcaaaggaatgcctaaggtctctcaatccaacggttactagtgaacacgcctgcacgtaccctaaagggttttggtgacatggcatctcaaaagaataaaataataattacagccatcttatcaaaatcctcgacaagacaaccaagagtcaccatctcgtgacaaccactcgcttgcctctctctctctctcatagtttccctcatgacatggccgtcaatcgcgaaactagaggttgtgttatagtgtgaatttttcacctagaaactcgagatcatactccttatgtaagaatgacatgtggactcacatctcttgaagatttagagctgtcaggaaaggacctctagagagtaaacctcgcctaaactaaactcagcgagatgatgtgaccttgacagattctagtcacattattacacctcgcataacgtaggaccaagaaggaaatgttcaagtctcgcatataccaagatatatgcgaagtctatgaagacttatcctgcgacttagtaaagactatatctttacatagcgagttagtccaaaagacttaatatgctcgatgacccgataaggactcgcacgtcctagatcatcgacattgacatggtatccacatatgcgactcgattagggcgcatatacctaagtacgagacttgttagtctcattttaacaaaaatgcaccctaagcccgcaagcttgtgtgagtagatgaacagacaacttgcagtataaaagtcacatacgttgttgtatttagtaaaacggatataaactgtacttcatttattccatttaaatttttcttaatttaatgctaatattcaatgtaaaacggtttgataatcaattaagttctgtgtaaccaaaggacactagctttgtatataaaggagtgatccaacatgaatgaaaagaggacggaaaatccttgcaacagtgggctaagcagaccgtgatctgactgaactactatatttccttgtgttcgttatttttccatttgtttatgcagcttcatttgaatactcgtcattctaggttgagtattcgctccatttttgttaaataattagaattttattttatttggtgttgtctaaattactccaacaatactatctttatcgaataacaaaaatatcactcatattcaattatatattgatttttataaaactacggttaaaaaaataaaaaaactaataattatatattatatataatttattttttaaaatataaaaagtaattaaaataaacttttattgcagtggttatacttagatatttaagattatttttatagttattattatacttgatatatttttttacaaaacattacggaaaactattatgaatgaatttttttaattgtatgtaaatgtttttttttaaattaattaatcaatcaatatttgtaaacttaattaaaaaaataaaaaatgtaagaattaaagagataattgattgatgtatttaaagtgattttagataaaaactgatcctccatttatgataaatctaaataattaaagaacgacgagatatataaaatattaaaaattgataaatttatataaaaaaaaaaaactcacacaaaattatagaatatctaaactaaaaaatttaaaataattgagcaatataaaagaaaaagagtttccaatgtgggatgtagtaaaaaagaaatgtgatcaatcgttatattaaaaaataataagtattacatgaaaaaagctcaccttttattaaaaatacaatacatatttgtgaaacttatttatttgccaataatgtgtttaaatttgtatcagtatagatattactgttgattgagaaattgttgaaagaagatgcagcatacttttttttttttatggattgtgatgcttttaattagtagtgagtaaatttgactataagctagaaaactgacataagaaaaagactagaagagaaagagaatatatgagttatcaaaacaaaaaataggtttaattagagttattgggattgaaaaatgttccatatatatttgacaaaagaataattgtgaatattgaatatatgagttatcaaaacaaaaatagatagaattgatattttgagtttttatggttttatggattgataattttctttttattattttttaattaattaattaataaataaattttatatatctaataaaaaatttaaaaatgagaaaattaaaaaaaagaataaataaaagtaattgaaaattttttaaagtgacacatctttatactttttcttttacaaaatatcttaaataactataacatataatttactaaaatatatataaaagaaaaaaaaaagataaaaattctcttatgtcaaaatagaaaatgcattaccccaccacctaaattttccaaaaacgtattgctcaaagaaacttcattaa

SEQ ID NO: 47248 - DNA, 2068 bp, Cannabis sativa
tgggtgtaagggcccaatgaaggcttgaagcggggacgttacaatatatgcaagaaccgttggtacttgtcacatcgtttaacaaactcatgtgtgtctttgttgatagttggtcaataataacaataacagattattttcttagctagacaggctttgccaatcggcatgatcgtcacaaaagctttcatgaatctctttgataatttcattggcttctgttggtagtacacaccgcactagaggcatgaaatatcctcttctatataatttttcttcgactattgtatatcaaggaattgagtatatatagaagttttcgtgcttcggttttgtctgtggaaaattctccctctatataaggctcgcatctatcatgtcaatttttttctttctcacatttattatttaattgttcaatattgtaggcttctcttgtctactctttgttcaatattgtaggcttttcttgtaccctttgtaatatttctttaacttttgttaaacgatatattaacagagcggctcattatttagcgagaagcttttattttctatcataattgagtagttactgtccattcttttggctgatttatctagtcaatgaagtttttttttttttttttttaaataacatatgagacaaaataattaattatactaattcatagtactatgataaattatagtacttaataccactagtattctttagcaattattataagagtatacataatttatacacaaacttgataccgcaacctgaaaaaaagcatttatcttcgtttttatgtgagttagtctttggttaaaaaaaatttcaagactaatgactatgaaagcgaaaacataagtgtcaaaatgacttaagacatacggggaacttatatcttctgttattagttatttcataataactaaagacatatgtgtttatttatttatttttttaaaaaatattcattatttttttttttaccaaaactactatttataacactatggttgcgaagctccaaaccccacaaaaccctaaaatcaaaaagattatcttttttaactataaatttacttaatcctacatcttatacaatattaatatcttttaataataaaatccttaaactttttattttcatactaaaatttaatattagaaatgtttacttaatttttcaatcaccaccaccaaatttctgagcatatataattattgatttttcgactaccatcatggatttttcgaccaccatcgtgagtatctaaaccctatatacacattatgaaaaaagaatctaaaacacacaaaaaaaaatgcaaataaactaaaagatacatattaaagtgatttatatttcaatgcaagttcaaagactgaaaaaattgcatcaaaagccaccgtttaagaccgttgttactgagccccaaaactcacaaagccctaaagtagaaatagttatttaccgctaaaacctaaaataaatcattttttataatatatttgtgtttctaggtaagaaatataaaagatttttttaaaaaataatgaagaaaaacggtgttttatagaacatatggtggtttgagtttggtggctattagaatttcaaataagaaagataatgagagaagagacaaaatgaaaaatttaagttttcccaaagatatattatattaaccatattttcacggttatttggtaataatcaaagacatagatctacacacatagacttacgtcttcgtttattaccaaataactgacgacacaattagtctatgcttatttggtaataactgcaaacataggtcttcaatttatttcttgatattttgataattttttttaatataatcaaagatataaagtgcctaactaagtaataaaatatattatttttcacttaaccattaccctaatattaatattatgtttatagataccaaattttattataaatactagatgagacttacgtgtcgagccacgtaaattttagttttatataagttttagtagtttttgtttaaaaattcagtaactaagcaacgacaacaacaa

SEQ ID NO: 47249 - DNA, 3569 bp, Cannabis sativa
gtagcctatactataggccacgatttttaaccgtcgcctatagtattaactataggcgatgattttaacctgtggcctttactatttcctcgactattttcaactatcgccttttctacctagtattcgcgacgctcgtataggcgacggttttatggactgtcgagaattctttacctgacggtgtaaaattgactgcaatttggaatttttaagtagtgtgagttggataattgcaagctctggcaacgtctggctgaggcgaaccaacgaaacactaagttaaagagggaggcatccgcagccagggaaacctcaagaaagcaacacacagaaccaacctgatcctagagtgagaaggccacgaggtagaccttggggctcaagaaccgagagataggagacggctcaggaaaacccccagagcactcaggaggagcaacctgggcaaattggggatgttctagaagatgaacaatcaaataatcagacacctcgtcaagaagtgcctcggagaccccgaggattcacaaccgaagagaatgaaaacaacaatattctagagtcttctcatagaatcaagaatagaagacaacctagaactagggaacataaaatatgttgtgttaatgagagaaatcctgggacccaacctaggacaagtgggttaccaccgagacaccatcagcatccctctcgcactgatagggaagaggcatatacacaccccagtcgggggtgtgtatctaacctttcctaaaggagtagacctgtgtgtgatgaggcaaattcaatctcgggatgtacaagatctcaagatcatgatctatctacgcaaggaggggataggactcaccgcagtaatgatcaagaaagtatgagcaacactaggagccatcaatctgagagttactctggtacaaggtcaacaagcaactttgatcaaagacgggtagatcttcgtgaacaattgaattagaggaagcccgatttacacaaacaactcaattccattcaaaagcaagaggatctgatccaattgcgaataagtgagttagaaaacaaattcaagaaatataaagatgggaaactgcttgattatgacccagatgaggagctcgaacctcttcatccaatcattatgagcgctgaatttccctaatgatttaaaaacccccacgtctccttatacgatgggactatagatccggtcactcacctcaacaatttcaataccattgtgtgagccatcaatgtcacgaataacttacgttgtaatttattccccacctcgctgattggggtaatgagcagttgtttcaataaattcacccatcattcaattacgacttgggaatagctgtctaaggatttcaagaaacaatttcaggtagcaagagacaagcgacctgaagtgtcttcccttactaacatagggcagcaagcgggcgagacatttaaggcctactaagtcattttagtaccactgctgctaaggctagaaacttgaacaacaatatacaacttactactcttcaagcggggattacgactgacctctcaacgactggaggggagctatgggatgacttaaaggatcgcacagtaaaaaatatcagtgagttcaatgaaagagctaaagtgtttgtatcataaacctagtactgtctcaacttgcaccgtctcgacgaaggctgacaatccaggaggctctagcactaagagaaaagatgactaagaaatcaacgaaagataagaaaaaacaaaagaagcacgataagtacgtgccaatttacactatttttaccaagctttttgaaactcgagaaaatattttcctcgcacatgagcagaaggttgcaatttgcaagcctgagcccatgagacatgcgaggcacaaacgggatgaaacaaaactctttagatttcacaaggacatagggcatacaatggatgaaggtcatcaatcgaaagacgagatagagagccttatctcacgtggttactttcaacagtatgtaaagcgacaaggtaatggacaaaaccagccaaatccgcccaataaccccgacaactaaagataacaacctccttcagttgaaggaggacattttagttatcttgggagggccacatctcgctggagaaagtagaaatgcccataagagatatgtcaaggaaatcaagaacgagaggtcagctttcgctccaaaaccatcaaagaaagataaaactgaagaacctccaattgtgtttttggaggaagacacaaaggacatgagatactaacacatcgacccagtcttgattacaatcaagctccccaacaagagaataaaaagggtgttactagataatggatgtttagtgaatatcctttacaaggatacactaaagaagatgggattacaaaatgcgaagttaaaaccttgcctggtaaatttatgtagattcactagtgatagtgtcgctagtcaaggaattattgaactcccattgactcttggcaagccacctatatcaacaatatagatgcaatattttctagtttttgacttgccatcggcctacaacatattattgggttgccttgcactaattggactaggggcagttagttcaattaagcatctgtctttaaagtttcaaacactggcaggagtaggtgtagtgtgagatgaccaattactggctcgggaatgctatcgcatagagctacaaaataaaaaagtcggccatcagttaatggcagttacaactaaggaaggcacaggacgaggatttggattctcgagttcaagatgaaaagaacctgttaaaacaaatttaggacttggagaaagttattttagatctagaaattcccacgaagtatgtatgcattaggaagaatttcgatgaaaaactaaaataacaactaattagttttctaaaggcaaactaggatcagttcgcctggagcaattcagatatgatagggattgaccctaaaattatttgccacctcttaaatatcgactcaaattacccagccaagagacaaaaaagacgactcttggattctaaaatacaaggggcactcaagtaggaagtggataagttgttgactaacgactttatacatgaggtattctatccctcgtggatatctaatcatctccttgtcccaaaaccaaacaaaagtgcgagaactattgacttctcagatttaaataaaacatgtcaataggattggtttccactacaaaggatcgagcagttggtggatgcaactgctggacacgagctaatgacattcatagacgcgtattctggatataaccaaattaaaatgcatgtcgctgatcaagagcatacaaattttgtaaccaacattgagctttattgttataaagtaatgccttttggtttgaagaatgctggggaaacatggggctttattattatggaggtctcaaaacactagttgtctgactaaatacaaaccaggttatatcaagttactggataatgagaccatcctactctttttatactatttcacgtgggttaggattgaattatatgga

SEQ ID NO: 47250 - DNA, 1174 bp, Cannabis sativa
gattcagcagcttcttccatcaaatcctgaaatttgacactgaaatcaacgatttaaaatcagagatatccaaattagatgagaaaaaaatgaagtaagactctaatgatactaacactcttcaaaacctactcaaatctgatgctcgtccattgtacaaacacctcagagagattcagaccgagctcatagtctggttagagaagagcggtccgctgaaggaggaacttcagggacgattctcatcattctgtgaaattcaagaggagataactacgcgctgaaagcaattacaattttttaggaaattaggtttagtatcgttttaattttaatatttttttatttctttttggagttaacgttgatgttaaagtgtatcgttaaatttaacagaataaaaaaagaatattctgttaaaccaagaattgctgttagatagacacttttaatatataaagatatattatatttatagcctatagctatatataccatgaactcgtgccttttttctcatgacaaaaaaataaaataaaaagtatatccattaattttcatgaaagcagaatagctttaattaatatgttaacaatattaactagaaaaaagacaatactttattattattattattattattattattcaagacacagtcaccattagctagagggattctctcttttcaattataatatattttttctatacatgtacctggctaacattcttttcataacctatatgtatacatatttctaaaaatgattggtataatttttttttatttttaatcacaataaaatttataactaaaagtgaaaaaaatacttactaattcttgtaaccaacagtttgtgattaaaagtattagtcacaaaatttataatttattgtgaataaatatatttttagtcatacactacaagaaaaataagcttcaatggggataaatttcatcggtgaagagtgtcttttccgttagtgatgtcaatgggaacatagatcgtcactaaaaaattgttagtgataactcatcgaaagtaattaagtatcaatgacgaatttcaaagtcgtcactgaaaacaaatatcaatgacgacaatattttcattgatcatatataatatgcaattttttttttaaagtcgtcactaattatactatcaat

SEQ ID NO: 47251 - DNA, 1668 bp, Cannabis sativa
aaaaaaaaaaaaaaaacatgttatgccagctgtaatgagctaataagctcattttttataataataaaaaaaatatatgaggattctcaggtaatacattgaaattgattgaataaacggattttctattacatgtaaaaaaaaatacagtaaaacaccaagatttccggttttttccttcattttctcggaagagaatcagacactaaaaccacgaaaagtaaaatacctcagtcaaatcagtaagcaaatccttccaacgagctctaatctctccgatctgcaactcaattaaaattctcaaaataaaaatacaaaaacaaaagcaaaagcgaaatcaaatcaagatcaagatcaagatccaaaaagctaaaacgagaacgcagagatgaagatctgacctctccaagagagaaaaagagagaggaaagagacgtcagagaaattcgagcgaatgttcgaaaccgaaaagcctcaaaaccgccaaaaagcgacacgaattggagaagtaagagagagagaaatgcatgaacgaggcttggcgcagttttattccttctgcggaatccaaataagttattatttttaattttaatttcttacccgttttaatttttttcttcgttttcgttccgagctgtgtagcataatgtacgtttcaaatccggtactaccagtgacacgtggaagacattaaataagaggcaactcaacacatcaaatatcgatttcacatagctataaataagtaacttccgtttgagtgatttgacggcgttaagtagtcgccgttaaagtttaatcccgataaggtcgtgtggcatatggtttttcgcatggacaacgtgtctataataatcatctcccttttctaagtcactccgtagacgttattagtagtagtgactactactattttaatgaacttcccccaactgtcgtatttattaaattattattatgcctaattaatcatttattattattaagcaacactgctttttatatgtccgttaattgaaaatgctactaaatatgtccatttatgttttctctactactactttcactactcccttgccaaccaatgaaaaccttttttttttttatttttttctttgatgggactacagttcagcagtatcaaaattgagaccttagttttagggaaatttcaggggcagatatacaattacagggaccttggaacattttttttttttttttttttgaataaaagcgtactattgataaaaaaaaataattaaatcttgcggtcattaaaatatcgaaataacaccaaatctctggtgagaacacgtccacttagccacgttatgggcaacaaaattataagttctactaatattagaaaaaatataacttgtaaataaaggataataacaaaaagagacgtagttatcaattgcacagtgggactccttcccattaagagcgttgataaccaccctcgagtcactctccacaatgacaaaatcgaatccaatgtccctagcaatagataaagctagacagcaagtcgccgcttctccgcataacgcgttagaaaactccagccgagatgtttgaacccaaatcaccttacctagatggttcctggccacaactacagtacacatactctctaaccctactttaacatcacaa

SEQ ID NO: 47252 - DNA, 1269 bp, Cannabis sativa
  modified_base (912)..(946): a, c, t, g, unknown or other
aaaaaaattaaataaacttaaagaaaattctaggatgaacttgatgtacttctttcgtatttttgacattcaaataattaattataatagactatttgaactctatttactgaaaattattctaaagtttttttttaaaaaaaagtgtgacgtctttaatacctgtaatgaagattgtcttacaaattggcaaaaattatgtttactttaaaaataaaaataaaaattaagattagaactatatagatactaaaaaaaataaaagaaatcgatgaattgttacacttaaccgataaaaataatgttgattgcatgcacctttgcttaattttagtactcgaaatttttattatatgatcatgatgtacgtacgtacctggtagagtatctttttttctttattgtggttgaacaagttacgttgaagtcgcaacaagtctaaaatactcgaaacattatagttgcaacgttgttggattcgtgtttgcatatccttttttattagatcatccaaaatattttcccagttagaatttattattccaatgttaatgttgttcaatgcttgtgaaaatgtagagttcaaatcttccctagcttttgtgtttgtttgatatataaacgatatccttgtgtctgatttccaaagcattggatgaatcgacacatcagctgcagttggcctgcagttgaatgtaataattaaaaaaaataactaaaaatatatcgatgcatcctaaataaataaaaataattcgtagtataaatatttaagtttaatttttagttataaataaatacttgactttaatttttgatagtaataatatatgagttataatactgtaacttttatagatattaagtgttaagtaaattaccacataacaatttctgattggtccaagtcannnnnnnnnnnnnnnnnnnnnnnnnnnnnnnnnnnaatatactaataaaaaaatgacacttgaataataacttaatatctaataatcacgtacttacagagcttcaaaaatataatttaggtattattactgccaaaaattaaacttaagtatttatttataaatgggagttaaactatttatgccgcatattactcttaacaaatccatcccacttcatattaatttaggtaaatatcattttgggtcttgtgttttgtaaaagttatcaattggaccacctgttttgttaaatgacaaaatcgatcgaccctatattttccaaaatagtaaaaagtttaattttcaacaattttat

SEQ ID NO: 47253 - DNA, 1227 bp, Cannabis sativa
aaaaaacaaaacaaaacaattaaaacaatagtaaaataactaaaaaataactgtaaaacaacagtgaaaacttaacacagtatacagtataaaagttacaataaaaagaaatttaccttacaataaaaaagtaaaaaaattaaaaatttcaatatgtgatctaaccctttagaaaaattcaatttcatcaactgatcgatcttatgaagtcttacataaaataatacaacctacaaattttcgtaccaactgaagaaaaagaaaagtatgagcactctacaatcagttaccatttaattatttttattcataacgaaatttggtaaaaacaattagaatgcatacctaataatttattagtaaaaaaatatatgtataatgtatatataatttattgtcataagtgatcttagaatatactgtgatgatttctgtcaacataaattatatatatttagtcataaatatagattaatttttgttaagactaaaataacatttagttacaaaaaaaaaattattttaggaagaaaaaaaaactagaattatgtatattttgtctattcatatacatagcctaagctaagcataaactcttttttatattattattattattattataaataagcatatacattcttaattatacaaatgacgtgaatcaatagcaagtgagcaatatttggaaactgtcttaaaaaggtgaaacataatgcatcatagtcatagatgcatggctaaggaatttattccctttcttttacgttacacttacataaaccaatttgtggctctccatttcaaaagaaaaaagaaaaaaaaaaacttattcctcccttatgacatactgcattatttaatttgtgcaatatttctttaaaataattcaatcttaatttgtattactctagaactacatctttaaatgtcactatcacactcttaaatacggccaattgatctttccacttgtcaaaatattttactttaaaaaaatacttgtcaaaatatttattttattttaatttatataagcaatagattcaaatattgtcttgcactattaatataaatgtaaatatatagtattatagtattatataataactaaatttgtattatgacgtaatttattagcccatataatatttttttcaaaattacgggtgggtttctaaagtgattgcagcgctagttgcaataagggtttctatacgatttttt

SEQ ID NO: 47254 - DNA, 1502 bp, Cannabis sativa
ttccataaatataacttaggtattattaccgttaaaaattaaacttatgtatttattcgtaaccagaagttaaccttaggtatttatatcgcaaattattttaaaaattatacaataattagcattttctctactgaactttttacaatatcaagttgtgcctcttatagtatacgacttgttaataatatctcttgaaatataattttttgcagtaatatggtcctttgagcatattgtatttaattttatcatgacatgagtgatgcgagaaatggtggttaataaacatatgcaaattaaatatcaaaaagactgaatttctataaatgtaaaaaattagggggaaatattaacaagtcgtatattttaagaggcacgcgatctggtagtgtcataaatttaggaggtaaaaatactaattattcttagtcaaactattaataaagtggtaagtcctcgttgaactcaccagtctgaggcgtggttgcccttaaccagataggggtcaaggctttgcctcgatggttcgccaaattttatgaatgagcattactagtgggcaccaacagtgcctagcaccttctagacgtgtctttttgcgattggttaatgatactcctaaaaaataaattattatattaaattatatgggacccaatatttaattgtaccaatagcgatatgacaccgatgagagtattagacatcactaataccttttagcatttctctttaggaatattcgtgacagatccacaacattaagtacttatattttaagttataaaaaatacttattgttatctcaaattttgcacatctgacatggcacctacgcgtggcataattcagccaacctttaacatgacaagagacttctaggcagaagtgtgcatggcagggcccgtatgaggatgatatccatgaactaaagattgacttttatgaagcatccagtcaggctatcaatatatcggccagataaggaaagattgacacacttcatgagtcttcccataaaaaggacaagtttcaagaagggcttggttggattgtcaacacgccaactagggtgaacgatactacgaatgttggacaaagctacagaagccttaatttcttccttaaacaacttccacaaatatctctaactgtatcctataaatgtggatttgactgatctacctgagattgtaggagcttcaacaggtcataattgaatcctataatatatggatatttactttttggttactctttttacgaagctaattgtaacaatctctccctataaatagtgaatgaattcacagaaggaagggacctaaaatcataatctcaattgaagagcactttgctgaattctttgtaaacatcttgagaactgtatctagaattcactctatcttccttagtgatctacacggtattatctcgtaatcaatacaactaaaagggaagtaggtcattacttgtaacgtccccgcttcaagcctcca

SEQ ID NO: 47255 - DNA, 977 bp, Cannabis sativa
  modified_base (739)..(741): a, c, t, g, unknown or other
gtatttacccttttttttaataatttttctctttttttagtataaaagtatatttttgtaattttaaaattttataggcgtatttttataaataaaaatttcaagtggtaaaattatatataaaacataaaaaatagtattttgaaaatttctatttatatttttgatctatttgtatttgtatagtggagattaaatcgattactatttttactattaaaaaatttattaaaatacaaattttttaacatcatcaaaattaaataaatattgaaacaaaatatcttctttattcatttcaaatatacatgcaacaaaataaaaacaagtaacaaaaacaattgtgtttttagtcttctccaacaacacatgaaagtaaacaataagttccaaacccaaatagaaatgttcaataaaccattaaaatttttattatctataatatctatgtaagaaagttttataatagaggcatcacctttttttttttttttttctaatttattaaaacaaatcccacaaactttaaaaaatttcagaataatttataatatcaaaaacaaaattcaaacaataaattgtacaataatttttttaatttatattattaactaatagagaagacacataatataaagaaacgtatcaccttctcttattatttttgttcacatatgcaaaatacaagagtgtagggtatatatatatatatatatatataaagatatatatacttttnnntatatatatatatataaatcataagtattgtgatgtgttctacttgttcgtgtactacaatacaccacatatataaatgttattacatacactcattttatatacataatacatacatatactaacatcattcatattatttattcaaaaaaaaaaaaaaaatcattcatatattatttgaagttataggtccaattgaatgtgaccaaaatatttttgttgagtgtctacataac

SEQ ID NO: 47256 - DNA, 766 bp, Cannabis sativa
agagctaacaacattaacaatctctgagccattgaggactattacgattgagaagcttgctgtactccaatatcaacagcagtagaaagaatactttcttttattacaattaaagctagtattcatgtaacataataggtttaactcattctatatggaacttggaaaggctttttattgatagtgcctaactgatcagttttaattgttcttttacttaatttcacttagttttcaatttttgctcgtgattgtttatgtgtttttttttttaaaacaaaaattgcttcaagtttttatgattgctgtataaaactagcatgagggtagcagatgtgcaatctcgaatgggcgtggaaacacataaaaactcttaaatgaaaatgaaaaagaaatgtaacttcagttccttcgaaaatggtatgcttattcgtacattatttagttttgttaggaattggatgtatgtagatagtataccataagtaacacaagacatgtaacaatgaaagaggttcttgaatttttgagcttccttgacttaataaatgtatttcattccattgttaagtcatgctatctattttgtcacactgactaatttggttcttgttattttacaaaagtttgataacatttgtgaaaactaatgttctgtgaatcaacattccaatggttttattttgcttgtacttgacttccaaatcttaaattttagaggcaaaaccctcaagactcgtattttgttagtaatttaatatttcta

SEQ ID NO: 47257 - DNA, 801 bp, Cannabis sativa
atatagtcatatgcatgctgcctaacttaattcctttctatgtagctttttgtgtgggaagagggggtattattaataattcgtattttagaagaatggcagattcaagatttttactttttgtctcaaagttgtaatgcccttattaataaaggaaagttactctcatctcctttatttcgagtgccctttcttctttagattgttagaggcaattttgggttggcttaattagtagtgacttgtggctgagtgattattaggtgtggccaagccatctcttggataggattcctcagaaatggcaaagaaacttcatctcggatttattgttcgagctgcaggtgtggtctataatatttgccttaatagaaatcattgtatttttgaactgaaatagtatgaaattgtaattggcagttgtactgtttcatttgtaatttgattagttttatttttgataaaatataatatgggctgactgactcgatcggcatgatttaatttttttttttttttctataaaagggtattttattaattaaaacagaacaaatatcatgcaaacttacttacatgttataaataaaattaaatatttatttatcagttttagagatttttctcccgttaataattaataatctcgtttctgcttttagtgctactctaattattaaattactcaccaaaatacgtacttttgtgagtttttaaaatatgggtggcccacccgagagccggccagcattaatcatgaagcctaatcatgacatataacaactcttaagatcgatacaa

SEQ ID NO: 47258 - DNA, 863 bp, Cannabis sativa
tatagaatagatatatataaaaacttacattgataattttgccattttcaaggtgaattatggacctgagatctctatcaatggtggaagctgcgacagtaaatgtccagggtgcggtgtggctaactgtggaaggagtagggccggcattaccggctgcaagaactggcaagatagaattttggtcagcatgaatagcaccgatggaaagtggatcttccaagaagctgttggaggagggtgttgagtatccgagtgacatagagattatgtcaaccccatcattaattgcatcatcaatggcttttaatattcctgctgatgaacaaccaccactataacacactttatagctggcaatccttgctgatggtgcaccacctctcgctgtcccactgcctaaacccatgtctgaagctccgggaactactgcacctgctgcagtggaggccacgtgtgttccatgcccagttgaatcccttggtgtcagttctttactcgccgcttgtttaggatcaggaacgtagaatcttgcgcctatcagcttcctatatatataatcaaattatgtctacaaaaatatcaaatttatatataaagtatgttagaatatatacgtgtatataatttaaataaattaaaggttgctttatttaaatataattttattatatgacacacctattacagttggaggaggcattgaagtctgatgccctctcacaagctcccttccattttgaaggtattggccctattcctttgtcgttaaaactttcagcctccggccagatccctaatcatatatcattatttttcgcaattattattactgtcatttacgtacatacaaatatatatat

SEQ ID NO: 47259 - DNA, 667 bp, Cannabis sativa
agtggccttaacaaagatgaagaccctcttgattcaacaggaacttgaaatgagaggaaaatctccgacaagaagtttgaagaaaagggtgataaggtttatagtgtcattatcatgagttttggtgacaaagtgttgagacaagtctccaaatagaatttagctgtgggtatggaaagatatcaaaggttgtatatgaccaaatcctaggtaaattatttatacctacaacaagctttatattcttctaagatgcaagaatgtaaacatgttgaatattagttagatatttttaataaactaattctttacttagaaaatatagatgttattatatatattaaagatctgaccttgcttttactatgctctttgccaagaatttatgctcattttaagtaaacattggtggatgaattaaatgttgaggtggagtctaatgataaacctttggatgatcaagctgataatgagctaaaaaaaattgaggaatgttgatgacagttatctactagctatagataaaataaaaagggcaaacaaaagcttcatattggtatgacaatattgatttaaggatgcacttaacattaaggaaaataataaattgctaaagtttgtggagaaagagaggatagaagtcattgcatggttgataaccatacat

SEQ ID NO: 47260 - DNA, 1315 bp, Cannabis sativa
aatctaacaatctcaatagttcgggagaaattttgaacgacttgaaaagtttagagagcatgatttgataaatgtcaaagttcaggagtaaaaattcaaattagcttttattgtattgtcaatgaatgtagtactaaaaccattttaaatatccatttttcagatctcgaacctcctcgtccgaggccaaagacttctgcaagaactgcgcagaggctgattgcgcagggtatgggattaaaattaccttcagcttcatttggttcaagagaattgagaaaacaggaaggtgataggaggaaccgcattgtgaccaggcaaagactaaaagatgatgcttggggagatgatgattgacctttttaataatggccatgtcttaatctttactaattaaaatttctattgtaaatcattcctttcacaattgcagatttgtggtgcacaatcatttttatttgttgtctattatttattttgtggtgaggttttgaattattattggggttttttttttgggagggggaaccgcttaaagatgtgttgatgagacttttatctatctttgctatttataattgacatgaaaatttatattaatctcttgacatatcatagtccaaaatttgtttaaaaggttaaacacttgttggtaccagttaatggttagcctttatttgtgagattttgatatttaatttcaatgatgacaataatatgacactttgtagtttgtaaaagtagaggcaacttttgtgtatttttatttaggccaattatgtgtaaaaccatggttttaagaaaaaccacttacaatcaaatataatctacaatcataaataattaaattaagcataaaaacacatttcatgacaaaaaaaaaataataataaataaataaaacaattactcatagggaagacaaatttggtttaatcttccatttatttcaatttggtttcagaaacaatacatgaatacatgattcctctcaatctcaaaatataaatcatgagattcaaatattattccaaaactctatttgctttatgaaaatatctaaataaatttgagttactttcgtaattaagtaagcttaattgagcctaagtgcttaacaatatcgaaaaaaagattgacaaaatttatgtgtattaaaatatttatttatactattatcaaaattatataatttttatatatatatatagttacacatagatctcttaattgaaatgctcatattatttaattttgggaaaaaaacaggaatattctaaaaagggaaaaatattacaacaatactgtgggccgg

SEQ ID NO: 47261 - DNA, 872 bp, Cannabis sativa
atctctttgatcaattgcaaggctcggcaaggctcgggtattcattggatgaattgggatcgtatgtgtgcttctaaggatcaaggaggtatggggtttcgtcatttgcacgagtttaataacactcttcttagaaaacaagcttggagactacacacttgaactgattctctggttagcaagtttttcaaggctcgttattatcctcgtgggtcattcattactgcggaatcgggcaacaatccaagctttatctggagaagcatacttgaagaaaaatacctgattactaaaggaggctagttgcttattggtttaggtgagagtgtttctattttgaatgatccttggcttcctgatgaggaaaacccttatctttcctcttctcatcctagtttgtttggtcaaaaagtgagctgcttattggaagtgaatgacaaaagatgggatgtggaagtcatctgtgatttgttcaatattagagacaaggagttgatttatagaatacctatatctaccactaatgtgacggataagtggtattggagcaaggaggttttggggacctattctgtcaagtcggttttggggacctgtggatcacttgttcaaaggcatgttcgaatctcttcttcttgtcccagacgtaatagaggtgttgaaacggttacccattgtctggtttcttgttcgtttgctgcggcttgttggcgttcagctggtttatatggaggcaatccaggggacatatcatttggagaatggctgcaagactgatttaacaattgggaattgagggagagacagatgggggcaatggtttgctgggctatttggcaagatagaaacaacaaggtgtggaatgggaaaac

SEQ ID NO: 47262 - DNA, 1717 bp, Cannabis sativa
tgcaagctacttgaaaatataatacatgtatactaaacatgtgatctaaatagttttattacctcaattcttgattcaagtgtgtcggtcaacctgagtggaaatttgctcgacaatcaaaggccctaagtcacattaatggcaaactattaagtgtctcgctaaaatactttctaggactaatatttataatatgaagtttctctatcgataagtaaggtttcaataccctaagtaacctaaaaaatatataaaaattgaggtaccccaagtatctccaaccgggaaatcaaatttgcaaccgagtgcccaaaattctaggcactggaatcaggcacccgattttgcccaatttttgcaactaattttttttttcgagttttattcttccatacttgtccaaaccacactaaaacttccaaaagagtctatttttgtattccaaaaacatttataaactcaatacacaaaataatctaataaattaaaaataattattgataagtaaagctttaagctttaaacttatataagcttctacgcataaacttctctactctaaaaactcccagctcaattagttactcaaaaccatgaagagtttatctactaactcatcaattagcagaaaacaaatatctcaaaattctcataaaaacctaatttaatacacatcaaaacaaaaagaaagagaactatagaatgatacattgaacttccctacaagtccttcacttactaatcttccaattacagattgttttccttgaagaaatgaagaagaaaaagatggaatttcttggtgtttctttgttctatggggttcggccaaggagaagagcaaagacagaaactattcctaaaatgcccttactaatgtaattcacatacttaaactctaagagcaaaaggttcatttctttaataatccacataatcacatagttttgagctattcataaaatttattggtacctctaaaatattaaattataccattgtgatatttttttcagttttcactgttatcgatcataagcataataagtacatatgacacacaatattctataaaatctttataattgagtaataatatcatatttatttattttctaataatagacctatattttttaaatgcacgtattaatccataatttactgtaatattaattaaatgttaattttctatgtctaattatacagtcattataatttcttattattattagaccattttcaatgaaaaatgtaaaaattatagtatttgacacaaaaaataaatttgtattataagctcgttatttataattatatttcgatgcataagatataaaataagtaaaaaataatttattatgttaatgattatttaatattttattgaaaatatataaaaagtttatatatattttattgtttaaataataataatgttgtgaataaagaagatacattcttttaaaagttaattgattataataattagtgacattatagtaaataaaaaaataatctttattgtggatcaaatttgacacaatgttattttattctactaaatttggcacatgctcaaattttaacacaacttgtagcatgtgtcaaatttagcccactttttagcattccattaaagatgattttagagcactcacaacaacttcttttaaagttgtttatttgggtcgggctttttgatacgacatggaat

SEQ ID NO: 47263 - DNA, 801 bp, Cannabis sativa
tagatatatacacatatacacaataactttgatgagaagagtgtacatatatatgcatgtatgcttttttcttcttaatcatatattttcacattatatattaagttaattattagttaaaggagaatcaggagaggtaaagaataatatgagacattatataaaaaaatcaaattaattagacaaactattaacaagatattaatctagcacgtagtggtgtttggtggattgatttggttcataattttttttttcaagctaaaccagtaatactggttttttaaaactcaaaaaccaaatattttcaaaaaaaaaaaaaatcaaaaccaaactaaatcaattaagtgttcaaatcaatccacttgaaacacattggtttggttcaaatccatagtttgtaattagtaaatgtcctaatttttttattaaattcgtttattttaaaaatatgtaaatgataataaaactatatattcttaaaaataatataaaattaactatcaatatttatgcctaagattgttcctaaatattaacatttaataacaaaaataaaaatattctattttttttaaaacaataaaaatattctattaaatatatatataaagaaaattaagtggtttggtttagtttgaaggtagataaaaatttaaataccatgaccaaaacatcatagacggtttagattaatcaaattattaacactagatttatttagttcagtctcaaataatttgatccaaattaattaaaattttgaacttttggaactaaaattacaaattatatgaacaa

SEQ ID NO: 47264 - DNA, 925 bp, Cannabis sativa
ttggtatagccctatacaaaccagtcttcaggtttagggcagaaaccacctcaaaatttctcaacttagcccctaaactagctccaattttacccaaatgctaccaaactttcaagaatatcaatatacaacataataaatatattccacaactcaaacaaaacaattacactaacaattaaagtttaccattgttaagctaagtgttctaaaacttaaactcacttaaaacttgctacaactgctactacttttaaaaacaaaccacaacaaacttaattcaagcttaaaaatagtttctaactcatatagaaaagaatttcccaaagtcatataaaatactatgtttttcagcaaattcaaagtggaagaaagaattagagctttaccttgaattgagttccaaatcctctaattctctagctgaattcttgctaataaagtcttgaaaattgcttaggttactttgggttctagctaggtccgagaaagagagagagagagagttgttgtattttttttttttatttattaattctaatttttgtttgtaaaactaatattcaacattataactcttaattacaaaaaaaaaaaaaatccactaagaataattactaaaataagcttaagtggtaaattacaaaaatgccctcacttagcttctaagttatcttcaaatctaggggtaaaatagtcataaccaaataccctgcataactctaatattctaactattcataaatccttctcgctaattcaataatactaaaccatatcagactgacactattggtcttgatcgtcgaattttcactattaccgagtataagacatgaaaatatcaaatttcatatataacatgtatgtcacaccaagaattcaataaaatctccataattcactaatgcctatttctgacaat

SEQ ID NO: 47265 - DNA, 1318 bp, Cannabis sativa
atatatatattttataggctcaaataatgaggatacatatataattaatattctaatattcaagcatagttcttgaaaatggggcaccccaacatgctcatgtctatatatgcacattatttttatttgcaaaacaaatcttttgggttgttttttcttagatcacacattgcttatacaaagttattttgcaatcaatttctcaatcacatatattcaacaacattcatttaatgtagcagagaagtttgtttcggtatatatatatatacattgtttctaaagtagggtctaccatgtttctaaaaaagattaattattaagctaagtaacaaaccaagttcagataagttggtggggtaatatgtgtgtgtttaatttattaaatattgacttttcttttattgagttgagttttaagacagccccatgtgattgtaatccaataacctctttcaactataaaatcatcttatagtgttagctctaccaacaagccaattagctagtactcatctcaatagcaaagaaacccttttctttccaaaagtcctataattttttcttattcataaattatacaccatgggttttcatttgccaggagtagtaccaactaagaaatttcttctacgatctctatccaactctaaagcatcatcgagcgcagtaaatgtcccgaaaggccatttggcggtttatgttggagagagcgaaaagaagcggtttgtcattccagtatcatttataagccactctttgtttcaagaattgcttgttcaagctgaaaatgaatatggatatgatcatccaatgggaggccttacaattccatgcagagaagatatgtttgttgatctcatatcaaatctcaatgcttctaattaaggttcacttataaaagtaaaagtggcacattctttcttcaatatcacaacattttgtaaagcaagaaatattgaaattattcttttgttcttatatcattctctttactttgtggagttgtaaaatagctcccagaatgagaaatgtgtaataccaattaatacaattgcaattaatatacaaaatttcatgttaatttccacatatatcttaaagtttcctttagctttgctgactttttataacatattagcttggtaaaaatttttatttttagtcacaacaaaacttgtcactaaaagtaaaaaattatgactaattataaataataattgctgtgttgtgtctaaaaagtccgtggctaaatgtattagtcacaaaaatcataatttgttgtgactaaatgtgtttttagtcacaatacttattg

SEQ ID NO: 47266 - DNA, 1305 bp, Cannabis sativa
tttttttttaataatataagttatacacacaactatatatattttatataataattattcaagtacaactctattaattaatacaaattaaaaaatcttatttgttttttatatctaaatttttttaaaaagacatataaagtttttattcatataataatagattatatgtaataatttatacacacagacatgacacacaaatgattttttttttttcataacactaaaattagaagttcacattgatttctattcaccatttcttcttcaaaaaaatttgtacttaagagtttcatattgtattaaatttattctccatttcatcaaaaagaaaaaattgtacacttaaaaattttacattatatgaaatttattaaatacaaaataaatatatatataaatattttgactctacaatttgaaacgtggttactaaagaatgaataacatataagactagaattatagagtgtttggtctttgttaatacatgtaatatacatgctattaatattaaactacttaatattagttggttattcagttattctgttaaggcatattgttagagtttagttattttgggttgtaattgtgaacctttttattcatttaatacaatttacaacaacagagtcttttgctctgcttctttctctttgggttcttgttttctcacatggtatcagacgtaaccttgccattctccatggctagaccttcaacaagatctcagaatggtattccaccacctactacagatcaccctccatcggaaaatcccgatgttacttctgcccctgcaactgatcccgttgctgactctcgtcggatcaattcaagatccagatctcacaacaccaccgacaataacgttgatgaccctgatcatcaatctccaagaaatgaagcgataccagtctccaattgcaggtctcatgatcgcaacaccaacgacgacgtctcaagccccttcttcctcagctccagttatcaccctggactggtcctcgtgtccaccgttctcactggaatcaactaccaatcctgaaagcgtggcatcacaatagctcttgctgcgaagaacaaaattgccttcgttgatggctcaattccacgacctgaatctggtaactctcttctcccatcttggttgcgttgtaacaatatggtgatgtcctggttggtcaattatgtttcacctgaaatagctcaaagtattatgtactttgatcaagccactgatatgtggcaagacctagctgaaaggttcaataagggcagtggaccccatattttcca

SEQ ID NO: 47267 - DNA, 1135 bp, Cannabis sativa
ggtttcttaaatgtccttgcgtgtatgaacttataaatgcaaacttgaacagagtgatgaatacaacaaactcaaaaatttacaaaagttgcagactaaagaatgagaggcctttatttatagatgagagattacaagaatacaagtgtaaagaaaaggttaattgaaaacagttaactgttacaacaactaacaaagattaacagttggtgagtgtattatcccctacaagtaaaagggtgtgttacacagagttggattttaaatagttgaattgatatttggacaagacctttgtctatcgtaggcttcatctagagttatggccagtaccagcaggttgcttgttgtgtagtaagttggatacctgaggtatggcaaacgagtaaggttgagcaaataaataaaaattatcttagaatttcatgaaaacttgagtaaatactataaatatcacacatacacaagtacgtctatggcacagatgtataaaccacaccccaaaatgaccatctcacgacattcaatcttctacacctgtatgatgatgagtgatactaccaaatactcaaattaaaataaaataaagagtaagttgctcaaacaaaatgtggacatacaagaacgtacctttatatattttgactgaccaatcactaatttccaatatactaactatttctaaagctcctcttttttcgattcacaattccttagtgaagatcagggattgcatgtgtatcaggctctagtcccttagaaaacatctcattaatgagtgtaacagccccatcaacatcacccctataggccactgcatcaggctctaatccactttcaatcatttcccggaacagaacagcagcgtcctgaaatttccctattttgctatagccatcaatcaaaacagtatacagaattacatccgaccttatttccatttcctgcatttcactcaaaacaattgaagtacccactggttcactcattttccctggctttctgagaagagccaattgatcttctatgcgcttttaaaaggccatcagcagaactgtgtaagtgatgagatcaggttcaagtcctttccttttcatatcatggtagagagtaaaggcctcttgcaaacagttca

SEQ ID NO: 47268 - DNA, 645 bp, Cannabis sativa
atttgtgtttgaactcctctgctttaatttgccatttgtcttaattgtattgattagtgatctaaaactgcaattcatatttgaattattgcttgacttgtttaggactcctgtcacatgtcatttataaaactagtcggttctagcttgtcttaaaaaaagggtcccaggctttggtttagccgaaatatctcatttctcttgttgtttagcttgctttgatgatccctttcgcttctaaaagcacagttttatctcgttaatatggtaaaactttgtttgcatggtcctaataaaacaccaaatgtcaaatgcccttttgagaaaatttgactatgatcgttttgactatctacatttgcaataaatacgcattttaatatatagtttgtgtagagaaaaatattagaagcgtgataaaacggcatctgtggatttgagtcattttcatacacttgagctgttactttctctggttgtaagtaaagaaatggctattattgcttaattaattgcttatgatacaaataaattgataaaggttgacctatgctttgttgcttgtttgttcaattagcttcatattaatgtcggacttgagttaggattcgtttgaagcataagctaaacaataagtttccttag

SEQ ID NO: 47269 - DNA, 3791 bp, Cannabis sativa
atatatatatatacttatgtattgtgtataaacaaattaaagagaggtgttttcttttcttttcaaagaataattagaaaattattaagttttaattttaatccgagttatcacaaaaaaaatgccatttaaatatttatttgctgttaaatgaagtaggaaatattattgaacaaaataattagtaaaaaatattaggaaagcctattttctaatagcatatataatggagagagagagagagagagggggcttaatgatgatgtctcttgctttttggattattaaattaaaaaataggcatggggattaattaaagttgtaatggaagataataaagaggtggaattgtttaaaggccaaatcttggacacaactaaaagtgaatatcctccacaatacaatcacatccacagcctcataaatcaaaaggaacaaagaaaataaagagttaaagtgagagtttaaggttgaaagcaagtaggtttatataactaactatacatgcctttaatatcaagttttacttatgtattgggttttgtttttttttggacaaagtggaactcttgcagttccttgcgaacctcatggcatgatctgcacacatctttggctatatttataagtttgtatatctaatctaaccattactcttgatcattttcacagttttaataaagaatgtttaaaggaataatcatgagtattgttgtgtattcgaatgttcgatataattttatatattactgtggttaaggttgtggtcgtcaataaggtagtgactggtgagagaaagtgtgaggcacaagcatgaagactgatctgatctccaaaagcagttgttttggagttgtggacaaaattcaatattatcaagttggaaggttatgggtttgaatccaaaatttttaaactattaagctattaattaattgtaaaatactattaaattacaccaaaaaaagttggaaggtcacttccagaatcaaaacaaatattggacatagatttataaagtgttaactattaagctttagggaaatatcccatatattattttattttttttttcaaatttactgtttgggttgctctggtggtttttaagtgagttactttatgaattttagttgcgatttaagttgcaccattagttgttatgtgagtttctatttagatttctgtaaaaataaaaaataaatgttatgaagtgtaaaataaaaaaaaaaaatctttaaagtgttaatttttaattcattaatatcaaataataattattttttattggttaattaagatttttgttctctgaactttgacatgtataaaatcatgtcctaaactattgagattgttagatttaaagacttttgtccaattttagtaaggaaagtctaacatggatgaaagttcaggaagcatgatttagtagatatcaaaatctggggagcataatttagtatataaacaatcactaaattagtgaaattgaatgtaattaaattaaagttcttaaatccaacaattttaataattcaggaaaaaaaattaatagctaaaaaattcaaaaatataatttaatacatatcaaaatttaaagggaaaaaatattaactaatttttttattattacaaaaaaagaaaaaacttatatatatatatatttaatttaaaattaaattatggtaaccagttataattcttatattgccacatcattaatcttttccagtaaccaccaatgaatattatcagttgaaaagtcttttacatatatcataatttttttttttacgattgtaacctaaagataagactgataagttcaagttacaatacttaagtttggatgaatatccttccaaactacttccttatctagccctaaaacttcctttgccattttatgggcatgaatattacaatctcttggaagaaaatttacagaaacattagggaaataagacaaggaattttttatatcttcaatgacgtcagcaagagcagagagttccttcttcgggctattaactttgctggccagctgcttaaaatttgtataaatgctagcaagtggaattctaatgttgcagcaccagattagggccaatcttagagccataacctctgccataataggcgtagtgtgagctggtataggcactgaaaaaccagttattacattttcattccagtccttaatcactactccaagcccaatcttactgtttcttatgttaatgcaacatctgtgcacaattggtaagatccttcaatagcttgatttcgttttgccatgtcatgcgagtggcaatttgatgcaaaatcaattctcttggactgggagcttttgtacttcaacaagtaactgctggtccaatgcactaattcctctgcatccatatgaatattcttgaaaagctttttatttctacattcccaaatagtccacaaagtacacaagaggagagaaaaatcatcattatttaaggtagtaaatccaaacaaaataaattctctaacatctttatttctatgtataagaaaaaagtgatttaaaggagaaagtttccaaacctgtctcgccctggaacaatctagtagtggatgagttacaatttctaaaggacaactacaagaagagcaagaaggagaagaaactttttttttttgtataaagattggaagcagtaggaaacatgtgataaaaagttctccaaccaaagttttgaatttttagagggatacataaattccaaaaaaaatttcaccagccattataaaatctagtgttcgatgatgaaggaggcagagaagcagtgttaacaagatggtatgcagatttgacagtgagaagaccagaaggatctcctttccaaataaggcagtcagttttattttgccccctataggaacctggagaatattatcaactgtatcatcatcaaaataattagaaagtcgatgcatgttccagtgaccattaggactgatgaaaaaattaactttatcagaaggaggaaattgattatctttgtatctaagaaatctgagatttggaacccaagaatcctcaagaataccgatggatgttccatcaccaactttccaaataagcccttccttaaggagatccctaccccaaagcaaactagtccaagaaaaagaggggaaatggcctttgctggcatccaaaaaggaagaatatttaaggtatctaactttgagaacacgagtagcaagagagtcaagtgtggtgaaaactctccaagcttacttggccagcaaagcttgattgtggtgaatcaaagaacgaaagccaacccctcaaagaatttagagttgcaaaggaaggaccaagctttccaatgaggtttagagtttttcccaagaaaaccccaccagaattgggccatgagcttctcaattttctgacagatagaggcaggaattttgtaacaggacataacataagagggaatagcctgaatgatagctttcaaaagaacttctttacccgctttagagaaaagtttattattccaaacattgaggtgagaactgacacgatcaaagataaaattaaaactaaccttattagatctaccaaagcgttgaggcaccccaaggtacttacacataaagggtttattggctagacctaggttattgtaaaaaataatctaaaacatgagaaggggtgttaggagaaaaaaggatggaagatttaccaaaattgacctgctggccagtggcttgattataaagctgaagagatgccttaagag

SEQ ID NO: 47270 - DNA, 865 bp, Cannabis sativa
tggagaacaaaataatttatgtatcaaaaataatattcaaacagtttgtttgcatttgtgcacccacttttgggatcacaccttgaaattaggttaaaaattatattctgttaaaaaaatttagaaaatttaatgtttttttttaggtagtttactttaatgatttataattgtattttaataaatttttctagtaacatttttaaaattattttggactaatataatgttgacatgttatttactattaattgatagtaaagagggagaaaattccaacgaatttctaagagtatgaagttttgtcactaaaatattttacatatgaagttaattagtattacaaaataaactatttaagtatagtttcgccaccaccattccataaaaatacacaaattaagattttgataattagataaaagttataggagcattctataatgtaccctcttaaaagtggtggattgatgcattcttatttatttcggtattcaagaaaatatttagtccaatttgtttacatagtccaatacgttgtagttatttaaaacatcttgcaaaattttgagaaatttaaaaaaaaaaattaacatattgaaaacatatttcaaacaatctgttgtacgcgtgactgttttattttataggtatgcatatgaaatagaatttttgaacactgttttttaatgttataaattattttaaatttctcaaaattttagaatgtacgtcttaaataactgtaatgtgcacgaatataaaaaaatatagactaatttttttttgaatgtcaaaactgataggaagtacattggttcaccaccttaaataggtacagtatacatgactatgaaacaaaatt

SEQ ID NO: 47271 - DNA, 4166 bp, Cannabis sativa
cttccctcactgggatgcgccagtggagggtcctcccttggaggcaagggctgagtgttcagatctaccgagatgtttgtgttactctggccagttgtagtggccagattcaagctaccagccgagatggaaggattgaccacatctgcagtgttcatgggaattccagtcgtggctggaacatggacattaggatttgcaatcaaaggatcttgaagaagactcgatgatgcagatggtgcaaccggggttctcctcatcttaaacattgcatttgatcaaatatgatactaacttgctctcaatgaaagcaccaaactattgacctcagatttgaccaaccaacaatgaagttgtattagtactgacgcttgtcacgcgttacacaataagaactataaagtggaataaaaaaaggattttatagaggttcgaaccccttaattatcgggtaatgacctactccccttttagttgtattgataccgagaaagcaaaaatcaagataacaattctcatattctttgcttccttctataggacaatcacacaatccactcgtgcaaaacaaactagttcccgacattgataaaactttatctccccaaaggggtatacccagtggtttgcctcccactatggaaaacacatcaaccgccattcatgatgaagcaccagccacacctagagacattcctactagttcacctattttgtcaaaaataggtagaattttatctaaacccaaacacttctctaattatgtttgcaatactactactgcttcttccactactcaccctattcatcaatatttatctcgtgataggttaaaaaagtactttcatgcagcgatccttgctacccatttggtcattgaaccatctagctacaaaatgccagccaaagaccccatttgacagaaagctatggatactgaaattgatgctctagaagccaatgacaccttgatcgttttcactcttcctgacaaacatcacactattggctgtaagtgggtgtacgaaatcaaatacaatgccaatggcattattaaatgattctaagcacaattggttgtcaaaggctgcaatcaaaaataaggtattgattactttcaaagctttgctcctgttgcaaagttgaatactttaaaattactgcttgcatttaaagccattaacaattggtccttgtacaaccttgagattaattacgcatttcttcataaatatttaaatgaaactatctatatgacacttcccaaagggtataaacctaagagaaagattcctccaaatgttgtatgcaaatgaaccaaaagtctatatggcttgaaacaagcttctaaagaataattcacaaactcagcaactactttttattctctagttttaatctatcactttcaaatcacactttgttcattaaaaactataaaggtattttccttgcacttttaatttatgttgatgacattgtggttacttccaacaatgatgatgttgttacttcttttaaatagcaactcaattcagtgtttcaacttaaggaccttaatcctttatgctttttcttaggtttggagaattgtcttcctcaactagaattttggtatcccaacgaccattcaccttataagttttgattgaaacaggttacttatgagcttacatatcttctacaccatggaacctaacattctttcatccgatgttggggaaccattggaaaatccgaaagcttattggtaaattgatttacttaacttttacatgccttgagatttccttcgctgtaataagttaagtcggtttttatctaatcctagagttcctcatcttactatcgctcatattacaatatcttaaaggcacttctggccaaagattattctttcattcagcatcttccactaacttatgtgcatatgctgaaactaacatgtccaatgcagactttcatcttaaaaatttcaaaagccaatttggcttcatgtagtgacataacaaggtttgtttctggctactgtgtcttccttggtaaatcattaatctcttggaaatccaaaaaggtaatccacaatctcttgttcatcggcggaagcagaatattgggtcatggctaatgccacttgtgaaattacctagttgcaagcactactttgggatttcagcatcaaccatcaaactcctgccatcctatattgtgataacacggttgccattcatatctccaagaacccagtattctacgaacaaacaaagcacattgacatagattgtcatgtcgtccaagaaaagatccaagagggaaaattgaaactcatccatgttacaaccaaaataatatagctgatatatttacaaagtctttagttttctagttacttccacactcttgtatccaagatgaacatgaaaaacttatatatttcatcttgagaaggggtattaggtttgataatttcttcttattttaggcttctctcttacctttagcacatgtattttgggcccagtatataagggacctctctttagttgtaacatacacctttcgacattccgttcttttcaaagatttgagaaagagttttctctctattagctattgaatggaagatttaagaaaccatttaagtcaaatttagatggccaacctcatgaaacatcttaatggaaagggataactttcttgcgtgtcaacgataacaatatgtccatgttaagggtaaagttgggatgaatcaaaacttaccttgtaataaggtgaaatatgaacgaacttcaactagatgatcatgtgcaaaacaaaattgtcttattagagcaatagctaaagcaactcgtgaatgaaaagaaaattctccaaactacatgtcaaatgaggaaccataaccacactcgacaacacaaatttgaaatatatatgtatatataccaatgctggtatacaaaacatatccacctaaaaacaaagactattcctaaatgacacaaattgacgataagaaaacaaatcaagattactacttaaagcatataatactagctccattttaaagatattttaatcgatatacaatttatacaaatctcatggtgaagatgatctaaacaaaacatatccacttaaaaataaagattattcccaaataggatagacacaaactaacgataagaaaacaaatcaaaattactatttaaagcatataaaagtaggtctcttttgaagatattttaatcgatctacaatgctctaaatcatattactggcattattgaaaagtgaattgaacataaaaaaaaatcttacaaaaatagcaaatatcatgatacttgaaaaacaaggaaacaattgaggtattcatctaatctaatatacactattttgcttataatattttgaccaagcaccaagtgcttattttatagtttggatttaattcaatcaatcttcaataatgctaaaaataacacataatcgtataaatatatatatatatatatatatataaatatcactgatttttaaaagaaaagcatcaaaagaaactacaatccaagtaaataagcttaaaagaaaggaaatttttttagaaatatactatattaggaaatttttacaaaaataacgttaaatatatatcaaacacataatgatgtgacacgtcatcatcttcttctcacttcaaaactaaatcaactgctaatcctaaaaagcaagaatcaaagcgtgtgattcacaatctacaactaacatataattcctcaattttcattttaaagctcattcgaaacaaaaaaaaaaaaaacctagaaaattctccgacagtcgcaaatctccatcgccaaaaaatgcagaaaacgccattatcgataacctccattgatgagatattctaagcttaaaccttcagtcaattagcaaccattggttcattacctcaaccagaacataatcaaacaacaaaaaaaaacatcatacagctatttgcgctttagtaaacaactacacaaagtttcaatcataaagaataaaaaaaacaaaaacatactgaaaagttgcattctacacattctacccagttacaccaatctgaaaaccatttcagagtaacaaaaaaaaaaaacataacgaataaacaaaaaaaaaaacaacaa

SEQ ID NO: 47272 - DNA, 1901 bp, Cannabis sativa
  modified_base (28)..(55): a, c, t, g, unknown or other
atatgatatataatccaattcaatatannnnnnnnnnnnnnnnnnnnnnnnnnnncggcgttccaaacgagccctttatcaatctctctcttttcaactcaaatctacccactcatactgagctccatgaagctaaacccaagtcgcttgtgttttctcctagctagccgtgagcctaggttggaagctcacgaagtcgacttggatcatctagagaaggtcagatctaccttatgctccatctacatgagctgaaccagaacccgaaaaagcacaggtgcagtttcgattttaagggggttgggagagaagagatagccagagtgaatattgaattaaaaaatttataaaagaaaatcataaattagttttaaaaatgaaagacgatagtgagttcctaaacgcttcttcgcgtctccatggtttcaggcgagcttgggcatttgaggctttcactttattaaatctggtttgtgattttttttttttttggattttatttttgttttgcattttattggtgttgatttagattttgaaaatgtaatgatggtgttggtggtggggaaacaaatatgaggtttgctttgaatttttttttccgacttggatatgaaaagtagagtgcaatggtggttgttgtagtggttgtaggtagtgatggtttcaacggtggtggtggtaatggatggtggtggcagtagatgttggtgtggtgatagtatgaagaatgtattagaatatttctaattatgaaataaaataaagaattgattttgtgataaatgaatattttatattcattgaatttggacaaaatcaattacgtaatattctatatatagttagatttcgatatttattacccgaattgatttcctgaattaattgtcaaaatattatgacaattaatgtggcacagatattgatggagtatctcacctataaatgtagggatctcagtccccgagcatttcactcattctgtgcaaacagcaaaattccatttaaagagagttgagagagtgaggaagtctgaattcccataccgaagctatcgcagggattgaagctcaaacatcaatagctagaggtatttcgatcctttcattgcatatacaatttcgatatatatacagtttattccgcattacatatctttatatatgttttattgttaatattatataataaatctaacaaaatgaagaatgaagaggagaaataaaaactaagaaaaaaaaaaaggtgaaagaaacttatctataacaaagaaagaaaaaagaagaaaagaggaaaaaataaggaattttatttacaccccaaaaaatttataagtgtaccctattttaataatttttattttacataaaataaatatctataataatgttaggttttctttccttccaactcatattcttaaaagatatacatatcaaacaaaaataaattatattttaaatattttaacaaaaaaattaaaataaaaaattacatgaaatattgttatcccaaaatttgcacatctaacgtggcaccaacacgtgatataatccaactagctaattaacatgacaaggatcttctgggcagaagtgtgcctgacatgtcccatatggagttaacatccataagctgcaaatgttccataaagcatcagtcaggccatcaacatgttgaccagagaaaatgagagtaacacctttgtaagggaagttctacaagtaatcccacaagaaagataagtctcgaagaaggtcttcttgggtgaccaacatgccggccagaaacaacattgccaggtgtaccggacaaagctacacgagccttgatttcttctttaacaggcttcccaaaatatctcaaactgaatgctacaaattcgaatccaataaatc

SEQ ID NO: 47273 - DNA, 1251 bp, Cannabis sativa
taagatattaaaaatgtagtacaaattaacaatctattgtatgcatgttttattcagaaataaaactaaaagaatggtgttatgatagatagatagataccccatgaaagagcggcggttagattttttgtgcttcttttcggggagttcactgattcgctgcatcgttattctagagccaccatgtgaattcctccttggtggagctgcactagtactactctctgattttcttcttgacagaccttgttgatcatgatgatctgctttctcctcatttttactaataatacctactcctcctcctgattttcttctgaaggggcggctcatcgattcgctcagtgctcgcggcctcttcactgcttgtactagctcgtttactgagctgtttgccatatctttctgacgagctacattcatcaaaatagtaagtactatgcttattacttaattccctcaactacgaacacttttacttactactataatactattcctctatttcagttttagtcatgataatattagtaatttagtgctttaaatttattactgtttttagaaatgagctagccacattttttagtggggcaatttttatttttatgtttttttttgataaaagagtattagtgaaaaatataaaaaaaaattagtgataaaataaatttttttgaaaataagataaaaaaaaaatatagagaaataagtaaaattatgtagaataaatataaaattatgtgggataatatgaaaaatattaaatttatatgtaaggatataaatgaaaaagtataaattttatttaaaaataaaatattctaaaatttatgtataaaagttcaatttatagaaaattgagaggtgggcatgcaaatgattccacaagtcgtgtcacctcatgatattagagtggtgtctagtactatttagagataaaaatttattttataaaaattatatgcaatttgatacttaatttcattaagaacaatattacacttatttaattactgtctcaacatattttattccttattccttaaagcttaaataatttataaatgagtctttggccactaagtgacaatgatcattttagttaatttatttaagtgatttgagaaataataataataatttaccatcgtaacgaatcagagattctggtaatccatttggacgaacagttttctctttggacccttctgtatgcttactcacttcgacttgcatcctgcccaatca

SEQ ID NO: 47274 - DNA, 2285 bp, Cannabis sativa
ttggtacatgtcaaagttcggaaaaaaaaattcctaattagcccaaataaaaataatagtaataaaacaaataaaacaaataaaagtctgtaaaaaaaaagttaaaattttcatattgtaaaaagtaatttataaaaagaaaaatcacaatctgaaaagtaaccaattaaataaaattcactaatcttaaatacaatcaaataataaattacaataccattaataatagggtttttttttaatattatacctaaagttgattttatttacaaaagtacctttaagaaaattatttgcacaaataccgttgtgccacataagtatacataccaaaattcaaaacaattaccgaaatgaaaaaaattggaaaaatctcgtttttagaaatttttgctttttgggaattttaaaaaaagtaaccatttagttgcttttgatgtgaataagatatcaattggttacttttctattaaaaaatttatttcagaattttacaaatatatataaataatcaaataaccaatttattatgtgagaaacatacatttttttgtctccgaaaaatgacgactaatattaaaagaaactttcttgtttcttttttatatttttaggctatattatgttattttattgtttaaaatactattcaatttattgacaaattattttataaacctattaaaactaatactattattttgccaaataattatcggtatgattgaaaaagaatttaaaaattataaataagaaagacataatatagatagtaaaaataataaaatattaaaactaatgctaccattttctcaaataataataataataaaacatattaaaaataacaacatcaaccgttattaaaagaatggaaagagaaagcaacttatatatgaaaaagttaatattaaaagcttaatgagagttgtgtacgtgtttaagtaaaattaattactggtgtggtcaaaaaaatttttaagttataaaaaagagaatgaatagagaggaaaatgcaataataaaataatgagaaaaaatttaaatagacaaacaactctgacgcaaaagttaaaaataaaaagtctgataccacctaaataagtaaataagtgtttttattcatgtcaaaaaaaaaaaaaaataagtgcttttatctccctcttaagccatctccaatgctaaaatttaaatttggtgttgattattatttcaacactattttttttttcaattccaaccataacactaaaaatatattctttattattaaattattttatcaatataataagaatattttaatacatatatttatttattttattcttaaaattattatttaattcttaaaaattaaaaattaaaaaaaaaaaagaagaagctttgtcatggtctgcagtgcccaccattaatagtgggacactgtagatccccatgaaaataagttgaaaaatagagttgggttggagtgaaaagtggagaaaattacactatatataacattatagtgttgggttggagatacccttagtatacgtttataaagtaatacaagtatataacggtattttaaacaattaaataggtagcaatatttatgtgaatattttgatgttcacgtgttcctacgtaattttcttttaataataattaagacaatttgactcctaaaaaaagtaaaaaaagagcaattactatagagaactttctgtaatgtaaataaaagaaaaaaaatatttaattaaaataataaagatcataaataatataaattatatttaaaattcaaaacaaaaaagccaccaatcaagtaattacataaattgtaattaaagataaaaaaaaaattaatgaccaaaaaacaattcactaaccttaaatacaataaataataaaataataaaccattaataataatgaagaccaaacgacccctaaaaaaaagtaaaagagagtaactaaaaaaaaaacttactgtaatgtaaataaaagaaaaggaaaaagtaaataattaaaataataaacatcataaataatacaaattatcttaaaaaaaaagtaatttgcggtataaatacttaagtttagctctcgattgcaaataaatacccaagttcaatttttggcggcaataatacctaagttatacttctaaaactctgtaagtacatgtttgttaaatattaagtaaaacactacgtggcaatccctgattggtccaagtcatgaatttttaatttttttttttttaaaaaaaattatgtgtaccaataagaaaatga

SEQ ID NO: 47275 - DNA, 1583 bp, Cannabis sativa
gcctgagtttcctcattattttattttcataagattatgtcttcacatatcatccaaatagaattaatactcaattggcaagatatttaatgagagagagacttttcatatttattttgtggaaaattataatagcctatttgcaatttcattagcactatatataaacattttatataataataatttatgtattttgagaaacaacacctaaatatattataacttatatcatcatcaaccaactaggccatacaaaaaactaatattacatcataagataaacattaaaagttatatcctaaagaataatttttgttaatgtgtggatcacttggatttttggcataaaaaaatgcgaaaactaccatatttaagagaaatcaatggaagccactcttaaggttgcttataatttctacatccacgtcataaaaaatgtaagcattgttggcttgtcaagacccactcctaattttttcaataaaaactgatgatctttgcaagcactcaatacatgaatgaccaaaataatagattgagatctaaaattagttgacatatggcatgggatacataatatatttttttttaggaaaaagtctcaattaccaaataccaaaagcaataagtactctaaaaaagtggaagcgagaattcattcaaggatagcatcagctatcaaaaaatcatttatacaactaggattacttgaccaccaaatcatactactactagcagataaagcaagttttggtcaaagaatgagcaaccacattacaagacctataacaatagataaaactaacaactttgaacctattacaaaaactaacaatttcatctaagataagacccaaggaagtaataatagcacattactttgaatgtttagaacgacactcaaacaatctgattctagaacaatgttgtcatacccaaatgaaagacactagataaacacattgcaaatagtcaacgctactgccacttctggttcaaattacaaacttccaatctctaactcgtcgaagctcgaacaactccccattcatttcggataaccatgcccaggccactacattttccaatcgaatcaatggttgcatctatgttaactttgagaaatcctgaagggggaggtctccatttctcagtcgccggaattgggtgaggcctcaccaacagttgagaagagggagcagccactgtatccattgacacccgcttcttgttttggaagctcctaatgtaatcatgatcccaattaaccactaagcttggcaatagctccaagctgttgtggacttttttgttacgcttgtaccaaaatctctaaaaaattaccatcaccaactcaatcttttccattgggaggggatcaataaatctatacataaaatttagaaaaatcctcacaatgaacaagaggatcccacaaagtaaactcatagatttttctacaagacatcaaagcgaacatccccaaagcgcatgatgagtagtttcttcgttcatctcacatataggacactagccatcagataaaagttcgtggcgagccaaattaattttagtaggaa

SEQ ID NO: 47276 - DNA, 1389 bp, Cannabis sativa
tctagctttcaatatctagctaattgggattcaagttcctggaattgatcctacaaagataaatggctcttcaccctcaggctaaaaagtcaccatttttctcttgtaatcaatattggccgcatacttagacaaaaaatccactctgagaatgatatcaaagttcgctatgactagctcaacatgatcagcacttaacttatcaaccactctaaatgacatagacttaatccaccttttggagataactaattcttcgctaggaaatacggttccaaatcctaactcataactatcataaggcctacctagtttatcaattactctagcatcaacataggaatttgttggtccagagtcaaataatacataataaaaagatttgttaacaagaagttgacctatcacacctgactagctagccttaccgacgaactgagtgatggcaaacacccaagttgtagcgggtttgcctctttctttggttcttttttattcaattggggatagcccttttaaaattccccatgagaccatattgaatgcatgctctattgttacactctcccatatgatatttcttacaacaaggacactccgaaaaagtgtaacgaccttcagggccaccctcacgaccaccttgaccttaattcccttgaaacttcttgctctgacttgaaccacctgatgtcaatgaagctttccttttctggtcatacaatgaatcaccaccacccctactaaaattggaagtaggagcaatgaccccactgacattttgagtccattggggctcttgaatgaactctacaacaccctaggctcgaagatccttttctaccatctgagcctaggtagtagtatcgccagtagtgatcattagattattcttaatatgggcattaagtcacaccaagtaattttattttttactgatatcagtgggtacaatacccaaggccagtctagcgagcttatcgaacttggttttatacttagttactgacaatgattcctcctgatctgtgagttgagcttgtctctgatgatgattgtacatatcttgacgatcttcagagaacaacttggcgattttaataccaaattataacggcctactagtttaagcatatcactgtgttttcttaattactgtgctaacctttactaatcaaaaggtttactacaaaatcgtgtttaacaaaaacttttataataaacataaactttactaattatgcaaatacataaagtttataaactccgggatccaaaatctatttttcaaacatttacaaaatacaacataacaaaaataatgctcaacgactaacaaaactgacccaaagatctgaaactctaggtctaatcatctagatatgtacaatc

SEQ ID NO: 47277 - DNA, 1393 bp, Cannabis sativa
gactcattgcggttggagttcggtggtcgaaggtctcgggctcgggctgtcgttgattctatttccaggtggaagctcggatatggggttaatggcgaggctgcttcatggcatgggaatcgggctagaaattccgcgagatgaaaaaaatggctggttcagtagtgactcggtggctgagtcgattcggcgagtcatggtggatgaggaaggagaggcaatcagagttaagtcaggtcatgagatgagggcgatatttggcaatgtggaagtgcagaataagtactcaaacgagttcgttgagttccttgtaaggtatagcactgagtcaaccaggtgactctaagctgggatctactgagtagtctgagttacttaaactagcatagcatgcatggttgttaattattgttaaaataagttgtgggatttcgttccgcaaagtcgcaaacaacatgatttctagtaatgtataatcgtatttcaccatattattaaagttagggatatgccatgtcccgagacatactagtcaatcaatagaatattcaaagagactatgcaccttgacttaatgttaatgaaaacttaagttgcctgcttcttatttactatacgtaattatgctcaattttttaaaaaataatttatcaattaatatagataaaaaaaaatgtgaaaaaataaggtaatttgaagtcattatttatttattaattaattaatataaaaaggtgttagaatattatatagacaaataactgaataaatttattaaatatgaataaaagtattgtgttaatataagagtattgtgttatcattaacacctgaatcagtcaaaattagagatatgaattgaaacatattgattggaatgttcactatttcttcttctagtctcttcactaaagttgcaactagaaatgaagttttatattcaatttagttgttacagtttttaaattttgcagtataaataatcttcactcaataacttcttaaacttataaactaaattttttcttattgtggcatacattagatttttatgtatgataaatagtgtacacactgagtatttaataattgataaattgataaaaaaaaaaagagtaataaagagaaaatatgaataaaaataaaaattatcttctcatcaataaaaatcatattgagacttatgagttctccattattctttgtattgagagagtcctacattctacaaattaactctaatttttatatttcaagtatgagaaaagaagaaagaactaaaattaaaaaacgtaagaagagagaactaaaattaaaaaagatgagagaactaaaattaaaaaaaaaaaataatagtagtaaagttatgaaattaagagaaataatttaagat

SEQ ID NO: 47278 - DNA, 1452 bp, Cannabis sativa
tctttaatataatcatattctaatagttgccgaaaatctcggtcaacaaatactaaatgatttttcttgattactttattttatacagtatttttcttaaggttttaaaaatttagacaatattttctcatttttttaaaaacggttcgcaatgctttttagtgtaataacatttaaaaatcaaacacctaatttattttttttttctttttaaggataatagtattaattataagtaaggacagaacaagagaaaagtagattaatacttaactaataattaaattattaaggaaggaaggaaggaagaaagaagattaatttgactatttgagggaaaacaaaacaactatggtgtggtacattataattaataatattattgttggaattgattaagttgcacctgagtagtagagtttttcccaaaatttattatttgtgttatatgataaattagagtcaatcattaaaaagttttttttccttcaatttttactataattcaaactttcaccgaaatggaaaatacatttagtttatttttttaagaaaatcatagtattctctatcggaattcaaaatagcttatggaaacatataaattttttattaaggtaattggcgaccaaaactcttttatgttttagtttttatacacatagctctttgttattttattttttttttgtagcaaccctctcttaatttcatttttacttaccaatttgaagaaccggttaaattcgatatttaaatgttaattggaattgtcactgtgtacacatgtatacacgtggcgctaaaatctaaaagttaatgaaaacatatttcgcatacaaaagtgtcctcactggaaatccaactaacttttaatggtgaaattttaacaggcgtcttaaatttgaaactagcagtaaaattaaaggagtattgtcacaaaaataaataaattaaaaggttaagtaaataacacgtaaaacataaaaagacttttgacgtcgacaattacttttttttattattattatgcttttgaaaatacatattagaacaaaaatttgtatttaattgggtactattgagataatttttttataaaaaaataagatagagaatttgttcaattttatctatcaaactatgtaactttatttgtttacttagaatgtgtttaaaaatttagttcaaaaccatagtaaatttaaataagttatagcaaaaataattattaataattttgaggatacaaattataaatatataataaaattatcaacaaattttattatacatggttgcttatgggtttattatatattattgtatatataattttatatttgtcacacttattattggttagatgaatagtgtctaaaaaaattaacttaagcttataaaatatcgaaaaataaagtacttgcttagttagagagagagagagagaga

SEQ ID NO: 47279 - DNA, 1200 bp, Cannabis sativa
aagtgcaataaggagagtggtaaaatattaatacttttacattctaaactaaaatacaaattctaatttcgtttcaatatttgattattgcctggattgaatatttatatataaaattttaaaagtaaaaggagtcaacatcaaaggtgtcgtggtgtagttggttatcacgtcagtctaacacactgaaggtctccggttcgaacccgggcgacgccattttagtcttttaaatctttctttcttttcattcaattttaagaccattgcttttcctctgtactcacatgttctattatatatacataaaattgtaagttatataattacatactatttcttatttataattatcaaggtttatatttttttttatatgtttatatgtttgtttttttcaaaaaaaaaaaaatacttgtaataatttaagcattttagctgctaacatttctgttatattatgactatataccttccattaatgttattatgttaccatttccttgctcgaatggctaaagtattgctctgctccaatatattagtcttttttgttaatgtggttgagcaactcagcaactctagtcgactaagcatttttacaattatcattactaattttaaaggaaaaaaacaaaaggcataaaagtgggttggtgacctagtagatgacttcatatttatatcaaaaagtacttcatatctatctaatgatgaaaaattgaatatttagtctataaatgggtctgaattctgatcaatcaaatattttgcacttatcttcaggctgaatttagtgaaccccatattagatttaattatatcattcccactatagaatattttgcaaacaaataagaaaatatgttaaagctaatgacctgagaaagtggaacatattattaattagagtcactactataagtagacctagttttcgactacattcatgttttgatgatgagacaactaaacaaacagatcaaatctatatacatactaatcttcaatgatagttgtttctctttaaatatgagaaattagattggtctgaaatttaaatgaaaaatttagatatgttgtgcaaaattctggtttttttactcatgtacaactaaacatttaaatatattttattaattaataatctttttgtaaaatcttatcaaaatttataaactaagaattatagagatttct

SEQ ID NO: 47280 - DNA, 859 bp, Cannabis sativa
aaaaaaaaaaagtatagacagcaaaacatgccctagaagaaccctctaaccccatgtgagttttccattaattcggtgagtccaagcaataataggagagcttgagaggggaaatagagtaaaaaaaaataagagtgagtgagtgagttgagtaataaccatggcgggagcctggtcaggaatggcgggaccggctttgaggagcttggagccagcgtcgaccacgacagcctccatgagtgttgaggagcgaaaccctaaggtaggaggtactcacttgagctctgaaaatggatttaattaagcagaagtaacagaatcattcttcattaaagatcattctccctcctgctcagctctatttgaaaactgaatggcgcaccttagctttctcttccaccaccaatgagggctttgatactggttgggctcagtggcctgcgttgcaaaatgtggtaattttgtaaactataaacaaatgatattattcatttattctccttttattttacctttcaaaatgggaaatttgtcatgcttaaaattgatttaccttaattttcaaaaaaaaaaaattgatttacctattaaaaatatgctaccctattttgtatcatgcaaaatatatttggactatttttttcatccaactttacccttaaacaaataaaacaccaaatatctcatctctctctctctctctctctctctaggaaagtcacaccacacacactcacactctaccagctggacttcccatcgccagagctactgttgttcggctgccttatattacggaaccttgaaaccaaagtttttagaaagaaattccttcaaaaaataatgggtatgttatttc

SEQ ID NO: 47281 - DNA, 1702 bp, Cannabis sativa
ccaatttcatttcaatttgttctcggttagctcctttctcactgataattctcatctcatgcaatttaattctaacaattgtattattcaggaactttctcagacctcgaagattgggatagctaataaacatggcaatctctattacattcagcaagaaatcagcaataatcccagctgcagtgctgcaacttctaccaaacagaggcaccataatcactggcattctcgtctaggccacccctctgtcatcatcaccaacaaaatcaataaactgttacattgtaacaatgatttgtctcatccttctcattgtaaaatttgtcattttgcaaaacaaaagaagctaccatttaattctaataccagctttgctaatgatacttttgatcttatacacatggatatttggggcccctatccccttgaatcaatagaaggatatcgatattttctaactattgttgatgatcattctcgctatacttggatatatctccttaaatcaaaagctgatgctatactacacattcaaaatttttttacttatgtcactgtccattacaataaatcaattaaatctgtaaggactgataatgctaaggaactcaccttaacatccttttacaatagtaaaggagttttacacaatacctcttgtgtcaatagacctcaacaaaatgcaattgttgagagaaaacgccagcacattcttaatgttgctcgtgctcttacatttcaatccaatgttccactcatctattggagctatatcgttcgaactgccatatatttgctcaatcgaacaccatccatcttacttaaagacaaaacttcatatgaaattttaaataaaaaaattccatcatatgatcacttaagaaactatggatgtttagcttatgcatccccccatcataccagccataaactctctccccgagctaaagcttgtattctacttggatatccacctcacatgaaagcatacactcttctagatatccaaacaaatcatatattcaactcaagggatgtcattttttatgaggatatatttccactcatcacagaccacccaaatcctcacattgaatctttttttcctcttccaatttcatctgaaaattcgaatgatactccaccaaatccctcttcaccttccccaattctctccccacaaaacctcccagataccatcaataatcccactactactccccacatcactaaatctgggagaaatatcaccaaacccctttacctacaagattatctctgcaacaaagttgcagcctctacaaattatcccattgccaatttcatttcctatcatcgattttccaatgctttccaaacagccatactagctgctcaagctctgtccgagcctaaatcatacaaagaagcatccaaatatgctgcttggcttaaagcaatggatcatgaaaccgatgctctagaaagaaaccatacttggattgtcacatccttaccctctgaccaacacgtcattggaaacaaatgggtgtatcgaataaaatacaacccagatggctcggttaacagattaaaagcacgccttgtagccaaaggctacacacaaaaaccaggtatcgatttctttgatacctatgctcccgtagcaaaatttaacacattaaaactccttttctcccttgctgccattcataactggcac

SEQ ID NO: 47282 - DNA, 1012 bp, Cannabis sativa
cttgagtgttgttgctcttcatcagtgtgtcatatgaaatatgcgcaacattttctatagaagcagttgggttttctgtgtcgtcattgaataaaaattcttcatcttccatagcaaatggtggagcaagaatgaacttgatgtttaagttaatggtaaggaaacgagcattatgtggttcttgttctatttgatttggttcaaaatgatatggttttatacgataataggcatcaccagttacttgtggagaattcataattaatcacacttgtaaaaatgattaattttgaaaagaaaaagtagtgagatttgggtgatgaattagtaaaaaagaacaattttagctttaaaagtttcaaaattagggtatgcaactagcttatgaacttacaaaactcacgaggtatttatatagagatatatataaacttaaaatgaaattaatgatttcagatattacaattttgtataatttaaatttaaattggtttaattatgtacactcaattaggattaggattaggaatttaggattcggtccttatgttatagtagaattaaaatatctttcgtacgtgtatatttctgttttacaaaaaattattttacatatatagccaaataaattcaaacttttatcagcctataaaatagatatttgttgatttatgtatttttccgtagcattaaaactaaaacctaatattgcataaaaaaaaactaaaacctcattttaatcgtttccaaaattttttaacatttaaataaaagatatataataggaaaaattaaatttttaattcataatctggtgacggttgactctatttcaccaaataattgtgagtgatcttagctactatacaagaaaggaagaacactattgttacccaaatctctataacacaaactgtaaattgacacaatctttcataatcatcaaagaggaatagcctcgccataatttggggaaaacttcgaaactctacaattgtgtgctaatttctgt

SEQ ID NO: 47283 - DNA, 1982 bp, Cannabis sativa
ttttctttttctttctttttttttgttcatttttcatacaatttcaatttgtcatttttattttcttaccttgtgatatgtatatttagttgcaacattattatgtaaatggtttgatattgatcttaattaacttggtaattaattccatgtaatgtcaattgagtttggttgggaataactagtatatatattaatatatctctcatatatttttctttgattaatcgttcgatttttatttttgtttttatttttccaattttgagatgcaaaattaaagccatggaataaagtcaaatcactctaaagaagattttatatgtaaacataagtaataagattataaattgaccatatatagtcaaatagtatatatagaggtaattattgtagatgacactagtgtagttcactcttttctaaatacaaaataattatgttaaaaggtataatatattggatgttatatattttaatataataaataatataaaaaatattattttagtgttggatactctaaaataccaaataaataatggtcttataattatgtggagtgacatatggggcacaaaacgtgcacaaaattagatgcttgttattgtcctttcccataatttagtttttgacgtggtcacacacacacaatcacacataaatgttatacattttggacggttgtgatttgtgtagccctaaatcaacatctgactttgacccaccacatcagttaaaagtcatgttaactctctctatctatctttctctatctaaaaatgtggagtgagtgagtgagtgagtgtgatcaaattcaaaagaggcatatataatatagtaggataggttggtgtagcaaacccatgtgaaaacaggccacataatgacccttttgctatcctatcacatcatatatttatctttactctattctatatataacttgagatttttaaccaaagaagaagatctcttaattaagaaaatgggtccctaattacaaaaatatatgtgggtccagatctttttgatgtttacaaacctaaaattagtcttatataatagaagaacaaaattctcctcaaattaagttgaaagtaactgaattaagatgtgtcattatgacacttaattatcatcaattattattaattaatcccaaaaaaaaaagaaagcttttaactttgaatgggcaaattctgtagaaaattaaatgatgatcagttaggttgtccttttattttaagttacactgccttattctttaaccatattatattaaaaataattgtggctaaaaaaccaattgatttcgcctctcaattaaggaacacctttttcctattggaataaaattatatttatttatttattatacaattaataaaaagaagatacattttagatttggagctatcatgttgctgagattaggtggaaaataatattataaaatttaaataaagtatgacttagtcttcctctttccttcattaccaataataaaatttcatatatattttgtcgtcttctgaattttaatattgtatttattcttctttaatttgtttgatatagctaagctagctaggtatattatttgtccgtttcaatcaaccaaatgaaaatatttaaaacagtagagagataatcaacatcagccttcacccacatggacattattatagaatataattaattaattaattaattaattagacatatatatacttgtgttgtaagaaacaaaatattaattacctaatttaactcgatcttacattgttattaaatagtaaatgctcatattgactaataatagtgtagtaacgatcgagtttccacaatatcacttttgtaataataataataataatctttgtctattttcatactattaaaaatgagtgagatattatctaatttttacacccgaattaggttaaatgtatcatgtgcgtcaacctaagtttgaaaca

SEQ ID NO: 47284 - DNA, 2505 bp, Cannabis sativa
tatactctactcttagtaaaaaaaaattaccttgacctcaaaaatagtttgaccaaacacgaagaggataaatatagatgagatatgcatgctataaaatctaattatttagtaatagagaggtggtgagtgcgcacaggcatatgtacatatgtgtatataaatattatatatatagatagaatatgatatatataccttacggaccagagagacattgaaggcaggaagagccttcttgcaactactgattcctgccatttgaagtttacaaattattataatatatctccttcaagatatgtcacctatatatatacgctaccagctagtgtttgttggtcacataataaagaaggaagaaagaatgaaaagttgtggtacatctcattattaattgtttaataatggctataacgatatgttttgaaagtataatgcgtataacaatgattttctgttgttggaagtagtaataccctataaggctcattattaaagttgtaataagacagatttgtttttggagtatattatggctactaccccattggtttagcgtctcttaatttgtatttaaaatagatatatgaaaggtcaatggtgatcccttgttagttagtagtggtaccaccacaactatatatatacgtgtggtcactggttagtgacacattgtattcagtcggtatcgtattggctgcttttctatatcaactctactactacttcatacgtatattgtaattattatatgatgagaaatgtaaatttttccatatattagatccaaagtaaattcttacaattatatgtaagtgtaaaataaaatatcatcatttgatttttaatatcaggtcatgtagtcaaattaacaacagtaagtgtgattattgattttagaatacaaattggttagcgattcgaccattgaataggaccaaatggtcatataattagttaaacttggcataaaatacaaaatattgacactaaaaactgaccaacactattttgctagattagcgaaaaaagtaataagtgaaagatagtaaataagagataccaaaatttataataatttactccccatgtcgcaatggtaactgatcctcaccttgcccagctatttgcagcagccggggtggagcaagccaagcctctaaatgaggatgaagttgttgtaagaaggggacattgaagtccaaaaaattgaggaccagggcgaggtctgctgccttgtcagtccatttgaggtcaagggagagaaagaagaagaagaggaggaggttcaagaatttccttttggtggctataatgaggtcggagagcctatttgtgaggagggagatgtcttggtggcaccaagattacatcgaggaggaatacacagaagctctgcctttaaacaatcgagcttcgaggggtgcctagtgggtctcaccactatctgtgctaactttcaagagattgactaatctctatgaagaaggtcttcttgggaaggtggaggcattccttcctagtcccaaatagctaacaataaatcccagaggcaaatttcgtgcatggttagggccacatgccaaacatgttgcaatgctggctttgcatccctatttgaaagaaatagccaactactatcacatatgtccgacctagctcaagggcataaagtaccttgccgcactgtttgtgctatatgctacccaaagatggggttagccatctgcccacgataacaactaatattttgacctgaagtcaacctaaacaaaatagatttgggtacttctacttttcccaaaatcaatgtaaatggctgaccgacaccacaaacacggatgtgtcaaagatttgcaggtttgtagaagacatcggtactaaccacatctcttctagcatattccatattattacaatcctcctttcactctgggtcttagatcaagagcctaaaaaatactccaacttctagagtcggctcggaatatttcacactcgaccattgagggtaatttcattaagtatgggctctacccatccgatgaagttcaggagcctgagcaagtgactgaggaggttataactgagtaagaggctccaaagaagaagagaaagaaggcctcctagagtgataaagtaacgattgagtggcccataaggattagggatgacatcgaggaggttgctcgtccttctgtccaggtggtaggaaagggaaatgtcatggtggtggaggaagaagaggaggactcttctgatgaggataccccttcattacttgtttgagaaagtgctcttgtcgacgtacaaggtagtttatcattctattttaaccttatttgtccttgtttgattatgtttttaacaagtattcattcttttaaatgcaatcaacaccgagaggagtttggctgttgactccacggatgttcctgatattgctcttgaagttagtccttcgacccacaagaatgcaaagtccaaggcctccactacctc

SEQ ID NO: 47285 - DNA, 953 bp, Cannabis sativa
acagaacagttaacttttgctctttttttttcttttcttcttgttttctctatttctttttttttttttttttgtgcaatacactttccttgttgtacacagattattgtactctaatttagattgagatatacggtgctcaatatctaaagatacaagatgttagggagcgttgaattgaacgcccttatcattatcattatcaattctgaagaagaaagatacaaaagtaaaactggccaaacccagaagaaaacgatgaaattgataagagggtccaataccagccactgtcttgccactcaaaaccatgaacctaagaagttactgtactattcgaataaagacagatctgcttccttcaaatcgggacacgtgcctcatctcatgaatcacacagttcaggttaatgcaactaaatggggcttcaacttaaatagggctacctcattattaaaaaaataaataaaaaaacttatagggctacccatggtatttgggcatctttctcctaaaccggtggattttgctaatctccataacaaagagaagagtttttcaaaaaaggtacttattagtgtaatattaactcacattttagtaaagtaactctgttagtttaaagattcttttgtgtcagtaaagaaacataagtggataatgtgaccaaataccaacatctgtaaaattaaattaccatgagacccttcataaaacttcacatctcacatgcaaaggtcagggacatttagggaacgaaacctgaacactccaacagtaaaccgaccatatcacctgctttgatgaaaacaggtacctatagaccttagaattaaaagaaaaaccatcaactcctaagtcctaccccccaccaactatttctcactcaaaaatgcttataaatatttgtccaaatctcacaacttcaattcattcaaagcttaacaaaccaa

SEQ ID NO: 47286 - DNA, 1367 bp, Cannabis sativa
aattttagtaaaaaaattctaatatagatgaaagtttaggggacatgatttagtacatatcaaaattcgagaggtatgatttaatagatatcaaagtttgggagcataatttaatacataaacaatcaatatgaaacagtaaaattaaattaaattagataaaaattcttaaatctaacaattttaatagtttggccaaaaaaaatttaaaaattatcggacaaaaaagttactaagtagccttactttttttactcatgttatttttttttcccttttgcgacgtttgttctggtatccgtgattggagaaagaaatttgaaattacgaaaatagccttgcaaatttcaattttcaaattctcattgttttgtttggcactttatggatgtgtgtccatatgtggcaaatgttggaaatgctttgctagtttcgaagaggcaaaagcaataaagtgggctggttttgcgagagtctgttttcagtcagctttcaaaaggttcagctgcccaatcttgttctaacacgattgttttgttgattccaggagaatcaagggcaatcttggaatttaacacttaatagaaaataccaatcaactattcttttcttggctttccatcactattaaataaaatatttaaggatgagtagtgagtagtgttacctgttttagaaaaaactaatgattattagcacttgttagattgcatagtacattaaactactgaataattatcacatatataacaattggtctagttaggtccaatacttgtgacaaaaatctcatgccaaaagttgaagcaaaaaaaaaaaaaaaatctcatgccaaaaacaaaagtatataacacagtcagattcttctatctaccagtcaataaatggattaaacaaatctatgtataaataaataataaagtgaagtgagaacacaataatttaagaagtggcctatacaaatatgccgtggaaataccgatgattacgccatatgcttaaaaaattaactttgcatataatatttaaggtgttaggtattttattatttttgtaggtagagagaagccattgttagatatcatgcatctaaattgaattttatatatgtaattaaatgcttaaatagagtattcttaattttaattttgttttgaaaaaattactttatatctcaattaaactttggattagagtcataataaatcatccatagctatcttacacttaaactttagatgagtttcaaatgtgccattaaaaaatgataattacactacatactgaaatttttaatttttttacttttatactgtagggtagaatttttttttcttctaaaatactgtgttttttttttaaaaaaa

SEQ ID NO: 47287 - DNA, 1831 bp, Cannabis sativa
aatgaccataaggtttaattttattaatctaacaaacgttataatttttttaaaaaaaaaaacaaaaaaaaccatgtatattattatataattaaaactatccaaatggtaaaaaaaatgcataatacatcttatgtccttcaattttttccaataagtattagaaacatattttatttttcacgtaagtatccggttatagctagagaagaagaagaaaaatatttgtactttcttatttctaatggcattcttggtgaccaattgccacgcgcttctgccacattcaaggattattgtattatcttaagtatatactataattatgcatataacatgctccgtgtaaaagtaattattctttatttaatttttgttttaaagtgtatttatgttagacccattggaggacatggaagaataattgaagcaagatctttattattttttatttggttaataatacatcaagcatgttgagagttggattccattcataaaatgcttacatctaaaactagctatgacataaagagatcatagtgatattattaaagtgcatccataataaaattatattgcatcttttctcctattttatcaacattagtaacaagcaataacatgacaatatgatataaaatatatacaaatataatatgtatggatatcctttgattggagttgtactcttgaaagaaaaatacttctcataagaaacttttactaagctaacattatacaaaaaatacttcataataaaatattggttaaaattaggtagtagtagacatattttgcacttttttaaatttgataaataatttctactaataatttaaagtacaaaataaatcaataatatccatatattatacaatgataaaaaaagtacaaccaaaattttgttgagcatctatctactggagttattttgtttctcactttctcgagataaaaaagctaggggctctcacaataattcacaaatcctagtcgtttaaggttagttttttttttccctcccatcggctagggatggctttgccatcgctacctcttgtgggcttttggcaccttttttccgagagagaataggcgtctaatctatgttgacccttgtagttgtgtctctaattttttctgtctgtttatacaaaagttaataaaaaaaattagccatatgaaaaccacgacttatattaattatgaagaggtgtacattgattagtttagtcggattgcaatatatttttaccaatttaatataaatattaaatcgtaaatatttaattacaatttgtctaattaaaaaaaaattaactcgcccaataattttgttggtttaattggataatcccataatctttattatttctttattattattattattagtggtaatattattattagtagtagtagtattactgttgttgttagttttttatgtttaaataattatagatttgatcaaataaatggatatataattatatatatatctcaagattaaaagtgttatatataatctaaattaaatgttcaaaacttaaatataagatgaacataaattgaataaatattaaaatattaaataatatttttttaaaaatagaaaaaatatatatatacatatatatatctattctatctataatgtgcttatataatcgaattcttggtttataaaaaattaatgggtgactttttttttttaatataattagttagttaaacctaaatagcccactaggtgtaaagtgactgggttctaattaatccaaagtgttgcaattaataataaatttgtttatattgtttatttttt

SEQ ID NO: 47288 - DNA, 1160 bp, Cannabis sativa
aagggataaaaataaattcaaaggggaaagaattcaatctgaaattgataacatttttgctggcccctttatttctccctctgatgttcaaaaagcaaacacacttcaacattctcttgataatctcttgcttaaagaagaagtttttttttttggaaacaatggtccaagactaattggcttaaagcgggtgataaaaatacaaaatatttccatagccgggcttctactagaaaacacaataacttcatcaagtcccttactttaaacgacaattccagtgtctccaggcttcaggatattaccaactcttttgttcatttttactctaatcttttcacttcccaaggtacggattatgattccatagccctgatcctgtagaggattaacaaaaccatcacccctgatcaacatgctttcctggacagtcaatttgatcttgctgaagtcaaaagggctctcttccagcttgttggggacaaagctcctagacctgatggtttgaattatagtttctatcagaaacattgggataccattggcattgatctctgtaatgctgcctttcatgttctcaacaccaatgctgacattgctcctgttaatgagacgatccttgtccttattcccaaggtcaataatgcttaccgtatcaaggatttccgggctatcagtctttgctccactatttataaggtcgtgtttaaggctattgctaaccatctcaaatctatcctccctgatcttataacgcataatcaaggtgcttcccttagcgatcatattatttttaataacattattatcgctaatgaagtcatccatgctatcactaatcgtaaaactgagaaagtgggctgggctgctcttaaacttgatatggaaaaggcttttgagaaagtggaatgggatttcatctgccacgtccttcatcatttcggctttccttcccatctcatttcgctcactcttcagtgtctttcttcagtttcttttcgtctccgtatcaataatagtctatctccccaaattttcccttcttgtggaattagacagggtgaccctctctccccgtgtctttttcttctggttgttgaaggcctttctaggatcattaattaaaagacttcttccaaccttttgttgggttttatgcc

SEQ ID NO: 47289 - DNA, 2589 bp, Cannabis sativa
cactactaccactccctttgtctcatttcatcaccttagcttccttcccaatcaaaattctagataacccaataaataaacaaaagaaatctctcacaaactatgccatcaaggcactcatattctctaccaccataccagttcagcaaaacaaatcttatataatttacccaaaagttttcttatctctctacttcatttacatctacacctttctagagatcatgctagccacggtggcggctttgatccgagccgccctcggggtggagctggagcctcattttgaagagccgtacctttccacatcgctacaagacttctgggggaggagatggaatctcatggccagtgacagcctacgttccacggtgtacattccagttcggaccatgatgagccgttggatcgggaggaagtgggccccagtccccgcggtgatcccgacttttatggtgtctgggatcatacacgagtttattttctaccatttgggaagatcaaagcctacgtgggaagtgacgttgttttttgttgtgcatggaatctgtttggctgctgagattgccgttaagaaggccgttaacaggaagtggcagctgcctccgttggtgtcgggttccatggcgctggcgtttgtcatgactactgtcttgtggctcttcatgccggatcttatgagattagaagtcgatgtaaggtcccatagagagataataaagtttcttgaatcaatcaaaattaagtactgctaagatttagtgtgtatattatttgttaaattaaaatattagggactggatcgatattaaataggatcaataacagtgtatcatgcattgtgcttgacagcgacttagcatttctgatcaaaattaaggattcctctataaagaactatataatctttaagtgttgagagaaaaaaatgttataattatatgcatgtacgtatgatatgtattttaatttaagaatcattaatcgtttgttcttccaagatgcatattataagtacttattctcatttaaaatatttaaattattttttatttaaatgttgagatttatatgtattatatgtagttaaaaatatagaagagatgtacgtacatgcatatataacaaataaaaaggctaatgtatatattttttaaaaaataatataaaatgtagaaagtagaattactacattcttggaatttaattgacctactccaactaaaaacataacattaatgtctccagtcaagttaatgtctaaactaagtcaaccttggcttcgatgtcccatttaaaacaaagcaataaaaacaaaaaacttgacctttcctagttttctttcctttgctgattaaactagtcgttttattagaatttgaaataagatgtattaccgtttattagaatttcatctcaaaattaattggggtaatgagaagagtagtccattctcttatatataaccgtttattttcacacattagtaatgtgagattaactctaatagattttaatcaaaatatcactgttttgttgtgtaaatgttttagagtgtgtatcaattgattcaatctaattataactaactatagaacattaagtatatttatttatttatttattaatttaaatacattaactaacttaagtattattaccgccaaaaattaatcaattgtgaaacataaaacttgaagaacttccatggatagctatgggatcactatatatgctcaaaattaaatagtcaacaaccccaaacagcaagcaatctttgaacacgttgaaaagtaatgaggaattttagaacatgtactataaaatatgttattgggtactagtgatcatgcctaacacttgttattagatgtgtctcttgtaattgattagcgatactttttaaaaattattatattaaattatataagacttgatacttaattcaatcaataataatttaatactgaggaaaatactaaataaacatcacttttcattcaatcaatagtagcataacactataacactgaggaaaatattaactaggcatcattattactttttaatatttctttgtatgataaatgattatacctacctgcctgttctaatatttaattccatctgtatatggatggcatttgccattgaaatatcaaggtcggagtatcacatatatttttttttcattaaataccattttagatttgttttatatgcaaaagatatatttcagcattgccacaagtcattttacatgtattataacgaatactaacttgatgcggtgcattataagcagttaaaaatttcttatattaattgttaaatgtgtgggacttgatatttatcatattagtttgattctttaacttataaaataaaagtattgttatttgacattttaatgtataacaccaccaatataataaatcacttaaaaaaatacaatattttattcaaactctcttctacattatttgactattattatattattatttagtatgtattaaatgattaattttgtttttcttttttcacaaaacaataataaatataagaaaagaagatagccaattagat

SEQ ID NO: 47290 - DNA, 2050 bp, Cannabis sativa
ctgatactagcctccacgctctaatcctatttctgataactctcttctccactctctctcaaacgcccatacaagcactctcatcacttaagattttccaatcttgattcctactttgtatctataagggtgctatatcagatcccgcctatagtgatctgaatatattaaccctcagtattaatacaactaaagggagagtaggtcattacccgctattaaagggggacaaacctctataaaaaatctatgtgttccttacttttacattctatttgtgtaacatgtgggaagcattagatccatacgaccccgttgtcagttgatcacgatttgaggttaatagtttggtgctttcattgagagtgtggatatcgtatctgatcaaatgtcatggttaacacgagaagaacccaaatcgcaccatctgcatcttcgagtctccctcaagacacacagactgtagatctgaatgctcatgttccagtcacaactagagtcccaatgaacattgcagatgtggtaaatcctattaccacaacacgcaccacaagcgtggccactacagttggccaaactgatacgagcatcccggtggatccaaatagcaggcccttgcctccaagggaagacccaccattggtacctcccattgaaggaaggactcatgggaaatagcccacagaaacaacaaatggatctcgtctctagtattacgctagagagacaggaccaggggttagagtttgccattgacgagccccgcgtggacttaagagaagatctctagttagccagactcagagaagctgcaaggccatgttggcctaactgaaggaccacgtgctgctaatttcaatgtatttacacagtagagatgcaaattcttaagatggatggatgactaggagtacatcctttgatcttaccgagacaaattggattgtcggaatagagaaaccaatgatttgataaggggattcaaccaaagaaccgatggaagcggtcaggatctcattagagatccacttcaaggaagactcattgatagatcagggagggtctatcgacatgctgaccaacctagtttctcaggaactaggatagatcttcccttgccagagggaggacaaacctttcctcaaagttctaacggcgagaatagccagatctcggcaaccagcgacttggaggtcaaccagggatctctggctcaacaataccccccattatttagaccatggctggctagccactagcaggagcacccttggatgaccaaagaatagcactccctccttttggggaccgaggcaccccgaggttaatcttcaactgataacgaccgagaacaggtggaaacacccaaaatggttattcgagaagtgaaattgatcacttcaaagacctaaatccaccaaactccagcaactggtgtgatctaccccctgtcaagacacatccaacattagtcagcagaggagtcgtgggtggcaagaccctaccctttgcaggtctggccggccatggaagaattgcgtgtagccagacctttccatttgtaggtctgtccggtcatggaggagtcacgggcggccacaccttgccctttgcaggtttggccagccatgaaggagtaatggatagttagaccttgcctaatgtaggtctagctggcgaaggacaacatctaagtgtaggcatggctagccaaatccaagacccgtacatgagaatggttggctagggtttgcagttcaacacaggtctggctgaccttcaccatacactctcttagagaatggccagccattccatatcacaataaaatttgcaaccccaccaacgagggctagtcagtcaagtcccatgacaacaacggatccttctatggaagcacagtttgaccaacttagggacataattcaaggcattgctagtccgaagccttaagatcttgaattaaattaatcaaggggattaccattctcggctacataaatcccttgcccttgcccaaattcaagatgtcagtatggaagatgtatac

SEQ ID NO: 47291 - DNA, 3260 bp, Cannabis sativa
atcttaccataaaaaggaaaaattattttgtcacctaacttgccaaaaaaagactttacaactttgacaatttcgaagaccacgtattatttgatctaacctttcagcagattatcaagtatatatgtatctcgaatgttcttatcccattaaaaattatagcgctacatcaagttagcctccaaaaaaatcaaaaataatctctccaaaaaaaaggggtaaaattttcagtaccactacactacactacacaacaaaatatgattattgatggtactaattaacttagcactgtaattttggaaatagaaaatagaatcaattaggaccacccgatcgataacaaacaaacaaaatacacgtgacatgttttctcgtacattcttgttctcttatcaacaacatcctcatcacttatatcaatcacatatatgtatatacatcaatcatttttctaaaccattacatatcaatcacgttttttaaagagttggattaattcttatatagttagttcctatcatcaccttaattgtattaattaatcaattttataagtagtactatttagtatttaatatagagtctaattaaaaaataattctacatgggctaattttgtattagttaagggactatttcaaaaaaacacaaaaataacaaaaaaaaaattacaaaaatataattgtataaaattttaaatatttttacaattttatttaaatacactttattgattatcacagtacatatacctagatttacctattgaaattaaaagcatgcataaacctcaaatgtctttatgcagtttaaggtcttagcagaaaacaaattagagaggaagaccaaaaatcttaaactgattggggaggagaatttcaagctttctctgactttgtcaaatagtgtggaataggtattttaatcatccttgatccccatacatctgctcaaaatagcatattagaaagaaattataagcacatatttatgatgggattgactattagtattgggttgatgcttttcaaacctcaatgtatctcataaatcgtctccctacttcagtgcttaatgatgagacagtacaatttttatttttatttttagtcacaataaaattggtgactaaaagtaaaaaagttatgactaattataaatcagcattcctatgttatgactaaaaagtctatggctaaaagtaagtcacaaaaatcacaatttgttatgactaaatgtgtttttagtcacaatacttattataaatgaaattaaattagcgacaacttgtatctaaatgctatgttgtagtcacaagtaacattttgttgtgactaaaagtcacatttagtccaaaacaaattatgttgtgattaaaagattgtcactaaaggtagttgcatgagacaccatgtgaggttctgtacttaaaatcaacagattactctttccttaaaacatttcatacaacatgctatccctgtctaagaccttaccgaagtcacaagtttcaattccaattaactaaatgtgaatctagggtataatgagtctcataaaggatacaaatgcttaagttttactggtaggttatacatctcaagagatgtagtttttaaacactcatcaaagtaaaaaaaaaatgttcatgtcacagctcgcacttcctggtttactctacctactgtccaaaattagtctagcactaactcacaaactgaaccatctgtcatgaatacactagttgatacaagcattcctgaaacttcctatgcaacacaaccagaaaagtctcatgaatcctctcaacatagccatgttgattttataggtcatttttttgttgacctcaatcttgacactgccaatggtgtagatttgagatgtactaattctttagacaactcaaatgtcactcaaatagatactatttaggaaactataagtaaccaaggcctattcatctcatggtaataagagccaagtcaggaatctttaaaccaaaagtataacttagtaagacaaaatagaaagagagcataatagaacctaacttagtcattgaagctttgaagcatgcaagatggagaagtgcaatgtctgatgaaaacacattcttgataaaaaaaaaacttggaatttggttccaccttcaccttcaccttcaccttcaccttcaccttcaaggaaaagtactacaatgctgatagcacatttcaaaggttcaaagctcggttggttgctaaagggttccatcagagacccaaaatggattttggtgagacttttagctctataattagagctttaacaattagaattgttttgacaattgttgtaactaaagggtggaaagtaagataactcgacataaacaatgtcttcttcaatggaaagcttaaaaaagatgtgtacatgacacaacatcaaggctttgaagacccaagaaaacctgaatatgtgtgtaagctgcaaaaatatctttatgacttgaagcaggctcctaggccgacctagtttgatagcctgaaacaaactcttgtgcagtgggattttcaacactcacaggtagatacctctttcttcattctcaaaacatcttaattaattattatggtgctcatctatgtagatgacaactctgttgaactttaaaagtttattataagaataaataaagccttctatcttaaaaaccttggccacctaaattacgtcttgggcataaagatttactgagacactactggcatgtatcttcctcaaggtaagcacattgcaaaattatttgggggaagccactgcccttaaaccatgtctaactcctatggctggggaagccactgtcctaatttaatagagaagtccttgaaaaccaatcatattacaagagcttaattagagcactccaatatcatgttcacactagacctaacataacatttgttgtgaacaatttaagtcaattcctcatgtgtccaacaatagttcatctcaatgctactaaatgaattctcaagtaccgcaaaggaacacaatgccgatgtgtttaatgatagcggttgtcgatgtgtttgcttctttcatgaaagactggattctttgctagtgcaattgctgatttgctatcaacacgaatctcagttggctcttcttgtgacacgttcaaatccttcagcaactttcttagccaaatagcatgacaaacacatgaagttgcatcaacgtattctgcttcacaagtcgatagcgtaacg

SEQ ID NO: 47292 - DNA, 3077 bp, Cannabis sativa
  modified_base (46)..(67): a, c, t, g, unknown or other
aacattaaatgttatttctgacctatattaataagtaaatctgatnnnnnnnnnnnnnnnnnnnnnnagggcataaaacccaacacccttttcgttggatgctctgtcgatgtagaccttccaggtaggcagttccaggattggatcttttggaagattatttaggctagaacactctactatgaaatcagaaagggcttaccttcaatagatacccacggctagtactggatatcaaattagctaagttccgttacacattttagcaacctatcggaggactctagcttgtgaaacacctagcagaggggatgattcattagtacctttatgccatgtgcttggaagtacggtctcagctttagagacacagtcaataagaaaattgtcaacttctcgatcattggatatctacattctggacctagcaatcttttgcttacgtaatagaccgggaactggacctctttctacctcttggacaagggcagcactaatagcatgattagacactaccaagtacgattacaaatcttctacttccatgggcttagaaaaaatgggagcttgagtcaaatgctccttcaattcttgaaagctacttcgcactcttcagtctattcaaaattcttgtgcctcgcaacacaatgaagaacggtatacacttatccgtagactttgaaatgaacatactaagtgtggtaattcgaccaataacactttagacatccttgtgtttcttgtgagaaggcatgtcaatgaaggctttgattttttttgggtttgccttaattccgtaagagctgataatgaaccttaggaacttcccagaggaaaatccaaaggtacacttcttgggatttgtcttcatcccgtacttcttgattactacaaaagcttcctcaaaatcttgaccatgcccttcagaagtcttagacttaatcaacatgtcatctacatacacctccatgtttctccctagctagtttttgaacattcggttgaccatcgatttcaatgtggcttcggcattcttaagcctaaatggcatcaccttgtagcaataaacgcctttgtcagtttggaagctagtgtgttcctcatccgcggcgtgcattttaatttgatgttacccgcagtaggcatccatgaagttgatcaacttgtacctagatgtggcatataccatctgatctatctacaggagtagaaaacaatctttagggcaggccttatttaggttagtagagaatgcacattcttcacgtgccattgagtttcagaatcaaaacaaggttcacgagccataccagatataacgcttctcgaaggaaatcgttagccataacttatctacttccaccttcaggcttccatccttactagatctaaaggtcttctcttatggcggtggcgtcgcgtcttctcaaatactcaaagcatggtagatggtacaataccttaaggtttaataaccggattagaaatcctaactagattaattatgtattaatgaaaaattatattattatataatttaatatgtgaaactattctggtttattgcattttaagacctcgttggtgtgttaggggcatttttgtaattttgacctgagaacggtcaaattgtaattttatgacataccctgcttatggactatattattatataatatatttattctgtctatctgtaggtgtttactgacaagtcagcacagtatagtcacaactgtgtatttttgaccgaaccgagtttgagacccaaatacatttttgaggtttatttatggcatttatatgataaatgagaaaatttgaattattgtgatatctgagtgtgaatgaaatgactacattaccctttttatatgtttgtgacattatttatgccttaggggcaatttggtcatttgaccacattatgcattttcaacaaaaggaaaaattagatttttgtaaaaatttgaaaatcaaattcaaggttttgaaccccatggccgactcactctttctctctatttgattggtatttttcaaactcaaattgtggaaaggagctaggatactggtgtgatttatgtgtttctcttgcttgaagcttaaggaatttgtggattaccggcgcttgctccgaaacaccgaagatttgaaatcacgacatacttggattaccaggtaagatggtaagctagcacgtagagttaagcacaatggcgctcatgtatgttattatacgtatattatgtgagaaacttgtattagggttattgacctaaaataagcggttatgtggtctagggttatgaccttggcatttaagtgattttgaatgctatattatactgtatatgctgagataaagaattatgcgcgtaaggcataattaggttagactcgataattagaactgagataaaccgtactaaggccttattgtaattagacgtgtgagcgtagcacgtaagtctatgtcaaatagatgatagatgcagtggcataaattattatgtgatttttgatcttattgcatattattatttatactgtcttgctgggcttggctcacatgtgctctactgtgtaggaacgtgtaaatttgttatcgattagccatgagtttgagggttagtagtgtattgtacatgttcgggcgatactagaccacaagggttgggtctaccagaagaaatattttgtattccagcttttgccacttagatcagcgtgtagagacaacttgtaatattttgcaaaagtttttacaggatcccaaaacaattgtaatcttttggaatgtttgtaaagttaaataattacaagttatgtttttactttataatcgatttaaagtttaaatttctactcttatttctagtaatctcgaattagcgtgattagcttatctttagtcactgtttgtggcgttcctattgttagagcgttataatttggtatcagagcgccaaggttttcaaacttcctatagatcggctgaatatgtacaatcatcgtcagagacaagctagactcgtggtgtgttaagtattgagagtaaatgcttaattgctttt

SEQ ID NO: 47293 - DNA, 2014 bp, Cannabis sativa
cctcaaagagaaagaaagagatattaacgggtatctggcgaaggagaaaatcttttggaaacaacgtagcagagcaatatggttggcccatggagatagaaacactaaatacttccaccaaaaagcatcctcgaggcgaaaaaagaatagaatccgagggatatttgataaaaatctgaagtggaaaagcacaaaggaagggatagagatgaccatatgtgaccactttcaagagcttttttcagccaaggactatgagggagatatgattgcctatctccaatgatttgtaccccttaaagttagtagaaatcaaaatgatttcctactttctaaatttacaaagtcggatatacaaggtgctttgtcccaaattaatgccatgaaggctcctggcattgacagaatgcctagacttttttatgaaaaccattgggaagtggtggggaaggatatcactaggttgtgtctgaatgttcttaataatcacatcgactgcaggtatatcaacaaaacacttctctgcctaatattgaaagtaaagagcccaaaacaagttgctgattttcgaccaataagcctttgcaatgtcagctataagataattgtgaagtgccttgccaaccgaataaaggacagtctaaaagaagtcatatctgaaaaccaaagcgcatttatccggggtcgtctaattcaggataatgctatcttggattttgaaagtcttcactgcatgaaaaaaggtagatttgggaatggaaaaaagatggctctcaaactggatatgttaaaagcgtatgatagaatgggttggcggttcattgaagcaatgatgatttgtttggggtatgaccaacaatgggtgaacaaagttatgaattgcatcacttcggtttccttctcagtcctcattaatggtgcagtatgtggccaaattcagcctaactgtgggattcgtcaaggagaccctctctcgccttacttgttccttctttgtttggaaggcctttcttgccttatccaagaagcagagagggctgataggattcacgagctcaagtttggaaaagagggtatcaaattatcccatctcttcttcaaagatgacaatttcatatttctagatgcaacgccttcggagggcataaatttgaaagctatcttagatgagtattccatgctcttgggtcagaaaattaacttcactaagtcagaattatgtgttggcagcaagattaaaaaggaaaatggcgagcatcttgcggctgagattggagtcaaactagtggaatgccacacaaagtacttggggatgccagcttcaattggaaaaagaaaaaaggaagtatttgaggacattcgttctaagattagagccaaactgcaaggatggaaagccagtctattctctcaagcgggaagggaaatacttctcaaagcaataatccaagcaatccctacttatatcatgagctgcttccgtcttcctaaggaattaataaaggatattcacgcaatgatggccaggttttggtggggctcctcggactcaaaacacaaaatccattgggggaaatggcacaaattatgcaagcctaaggagaaaggaggcatgggattcaaaaacttggaaaaatttaaccaatccttattggcgaaacaaggttggaaaattttacataatcctcattctatgttggctcgggtgttaaaggcttgctacttcaccaactctagctttttggaggctaaaataggaggatttggatcatttgtttggagaagcatattatggggtaggaaaatcatagaaaaaggaataagatggagggttctttcaggaaaagacattcgtataaatgaagacaaatggcttccccgtcctttaacttttacattgcgtactccggcaaaggtacctaaaggaaccacggtggatacactaaaggaggtgaatggagattggaatcaggatctaattaaagagtgtttccaccatgatgatattcctatt

SEQ ID NO: 47294 - DNA, 874 bp, Cannabis sativa
tctaaagagtgatccacgtgtcgtccaaatgaacaccatgtcaccttgtgcgaatttcaggataacacaatatatatttaaaaataattagaaaatagatttaattgtttttttaactatataaataaataattaaaatatacaaaattatagtaaggatgtaattggtattttctatatatgtgcttgagtgcttatatattcacgctttcgtgtcgtgcccatggttatattttttttgtgtcatatgctagtcataagcccgtatcttttcgttttgtgctcgtgcttatgcctctcgagttcgtatcagtttgtgcacaactaaaaagtccaacccgaatatacaactctaatcatatgcataaagaatcaatacaaaatagtctacatacaatttcgtaatcctattttatttttgtaagtagacttgtatagtaataaagtatgttatagattttatacaaactaaaaaaacgaaaggttatattgaaagttcatagtacaccctcttgaagggatgtggcatgtagaaaattttttcacttaatttttcttttcatgattgcgtacgttgtagctatctagaaccatttgtaaatttttttaaaaaaatctaaatagttcccaatgttgaaattaatgttcaaatagttctttagtcgcgcatgcaacaaaatatttaaaatttattatcaggatcgtaaattattcaaatttttttaaaaatttacaagttttcttaaataactataatgtccacgatcatataaaaaattagaataaaaaactctcatgaatgttgaaatagagaggacgtttatcgaaacacccttttaaggagtatactataaacttaccctatactattttt

SEQ ID NO: 47295 - DNA, 1135 bp, Cannabis sativa
aaaaaaaataggtaggaaaagtataaatataaaaattctcttgtcaaagtataaatataaactttaaagaaagttagtatatagtgtaaatatccattctttctacccctatgcaggggtctagttcatcatgatcccgggccaccccttgtgctagccaagcgggtgcctcaggaattggctcttcaatatcttctttgaccttaaaaacttatctagtcgggacattgtagcacttttgcgcgctttttttatcacccttcactatcccaatattttcgctatcacagggaaactttatgcacaggtgcctaatggaagttattactccgaattccactatgacaggacgtcccaaaatggcattgtaggtagttggacaatccaccacgacaaatgtacagtatttgaaagcaataaaagtattgtttccggctatacccctgtaaaacgtgtctaagacttggatcttccccatgggaagtatggagtcttcattaaagccttggagttggatcgaacagggtgctagtttagcttcagttaatccgatggcttgaaatgcggccttaaacaagatatcgaccaaaattccattgatactcttttattggcgacttgggccttaatcaccaatgggtcgttgtgggaaaagtgaaacgtgttttgcatcttcttccatgaaagtgattggaaaaatcaggattcacgacatttgggttggtgcttgcactagtgcacacattttcccttcctattaaagctcattgaggtatcctttctgagtgtttcttatacttctagcgatatgcgggtctctggatattacggtaacatgaccatctaccggcagtggggcagcccccaacaggtaaggatttcttggtgcaagagcatggacatttgcgggtgcttggatgtttgggaacccctaaggagcctagattcctagagcttgttggtaaaccgttccttgaggagaatttatagctccatgatatttgggaatgaccgattgtccttgagccagcgttggtcccgagtagatgattagaatcctcaagctaacagttggtcgcctttaactgttcccactccagaatgtgtgggaaattttaaggataagtgctttatc

SEQ ID NO: 47296 - DNA, 1326 bp, Cannabis sativa
ttaattccaaccatttaatagtgatctaatgcttaaaaataaatgtaataaccatgatagttacatatttgatgtaactattaaaatctcctccataattttatttattttatacttttttttgacgcgatgaacagaatcacacgtgatgaacaatgcagcaaaccacaatcggtggtggaattttctcgaaccaagatgatagctcatcatttaaccaaaggacatatttattttatacttttaataattaaaatatatattgatttgttattttagtgttagtaattagttcatagataatagccctaaatataatatcaaatttttaataaagaaattttagtaattttactttagtattatgtttcttatgaattttgattgagtttagtatttaaatttgtagtattgagatttgtttttttttttttttggataaggtcatagagattttaattcattgagtaatactaaattggtaactatattgacatattgatgcagattgcataaatgatttataaacacaccattatactttagctagacgatatgtaagtgtttgttgttatatactaaataaatgttgacttagtcatataaattatatatttatatatatcatttataaataagtatcaagtggtaccataaaatgtataggtatatacattatatatatgtattatttacttgtttaataatgttgatcaatgatcagaattatattatgatggatcaattagtttactaacctaaaaaatttgtatggcttggatcgataatcattatctatgattaattttttttataactagctatttggataaatagtttactaactaaattgaaattagactataaaaaatttacatgtatatttgtgtttatatgattttatatataatctaaaatctaattattataatttatatttgaattgtagatatataaaaaatattattcaatagttctaaatttatcacattaaattgaaccagaggttgatagaagttcaaagagacattgtaattcaataaatatggcaaatcttccaactgatcctagattacgagctccgatttctaattataatcccaatattcaggatgaaattcgaagacattatttacaacaagggccttgtcaaccaagaagtcacaattttcctcttactttctttggaaaacaaaagcgttggtattgcatggttcgatcaatttcctacttggctagaatatagcatcagtaaaaattttgcgttttgtctatattgctatatttttaaaccagacactagaaaacaaggtggcggtcaaacat

SEQ ID NO: 47297 - DNA, 1651 bp, Cannabis sativa
ttaactctccaaaatctcacccacccctgcactatcgccctcctctctcgccatcttccttcctattttgatctctctttcttctcgtccatcaatctccacccaccacctccagtcgttgtccctctcatctccatctcatacatcggaccaccaccacctcccatccgtctccctctctcttcgagctcggtataaatacatttatttatttttatattttttatttattatatattatatatttattttgttattgcataaatttaatataatttaaagttagttgttattgtaataaaaatcattagttgttttattttaatttatgtaaaattataaaactaatgcaggaaaaaaaatgggaaaaaatacaattttttttctttttttttttacatttccaaaagtgtcgcatatagtatagggcacgatttaaaactattgcctataccttgttataggcaacgattttaaccgtcaggaagtctacattagcgacggtttttaactgtcgcctattttgcccattttgcgacggtcatataagtgacggttgtagaaaccgacgaaaatactttaaacaactgtttaaaaacgttggaaaaaactatttttgtagtagtgttggttgggttgacgttgatttacagtgttcttacagttgattcttcacaaaagaaccgcaaactacaagtctttgttcattagtctaataatagttggttaattttttttaacaatacctaaacacatagttgctagtacgttgtttacgcattgtcaaataattttcttactaaacatcttataatgaaaaaattagggatcaaaattggcagtgcatgactcatatataggaaactctattgcaataagtttgtttataataacaagagaaggttattcattgttttcaagttatataacagttaccttgcaatatgtattatataaaatatcggttatattatcaatgccattctgcattttacttttttttatagatttctaataattggctatccataatcaaaattttaaaattcaaaatacaaaaccaatttcatttctaatacatttcaacgaataatttgatcatgaagataatttggtcagtaagcattttggtgaacactacaattatatgctaaagcaaaacaataagaatctaaaaatacaaaattgtaataacggtttttagatattgttgttgtaatataattgccataaagtttacttttttttttatttattttttttttttttatggatgatcaaacaattgatataccaataactatacattgatctagctacataatttttcagaattttaatacgtatttcatataaaaaattcaatacatggatcatttattggccgttctaatatagtaagtttgtttatatgttggttgagttgacgttgacttaccatgtttttacgattgattcttaacttgaaactaaaaatcatagtcaatcagttcaataatagtattctacgttttgttagcaatatctgattgcatgcttcgtaaagtgattgccaatacgttatttacggttgttgaatatttaaatttattattgtaagtttgtttataaattatttttggttgagttaacataaatttacaatttaatc

SEQ ID NO: 47298 - DNA, 2002 bp, Cannabis sativa
tgctcattaggggcgggtccccacggggtctatcctcatggaaaaaatgtacctccctagttatatgaatggttaatcatttaaatatgatttatatatatatatttctcttattttaatgttgtttttgttttgatatcttaaaatagaataaataaattaataaaaaaaattaaaaaattgagagaatttaaaataaaataaaaaaattagaataatgagagaattaaggagagaacaaataatactaattggagagattttaaagtgttatgtcactacttcatatttcccatttatatatacataaatagagatatataaatataggggcagctgttgtcacgcatgcacgttttgcgtgactagtgtcgcacagatttatagtcattaaattgagtctcacttttaatctaaggactgatattaggcaccccatatattacttttttataatatttaatttagtaaacaaaggggtatttgacttaggaattagaaatgcaactggttacaaattttcgatttccacatccatttagtaaagtgaaggttctctcattgtctaagatcaaactcactttcagctcaaaaaaactcacttccagctccaaaaaaaaaaaaaaaaaatcagctcaagagatctcaaacttcagttctctttcattatttgaagatcatctttttatttttatcttcgtgttcttatagtttcttcttcataagatcacaaattggttttcttttctatgcatgttgattgtctgtgacttttggacctaagcacaccggcggttctcttaggatttttttatttccttttttgttacaaatgggtgtctgaacttgttcctggtttttgattttagggttctaaacctccttttaagaaataaggtacatttccaattgatctttgttttctctatgtactttgcactatgttggatttagttttttttttcttctgggtcttgtgaaaaccatcaactaatattgaaagtttgttgaaatgaagaccaagattgaaaaatccttttaagttttttaagttttagaacttgtgtaaaaaccttgatatctttcttagtggtggtcaataacaagacatttgtttggcttggacaaaataaaatggctttggttctttatgctattctttaatttactttaaaattataaatattgcattttattgctttgacattcttttttttttgaaaggaaattcaaattttattttatctttcaaattttgcaaccaaagtaggaagcagatcagttggaacatttttcatactgaagttagaatcaggatataacatagatgctctagcaaactcatgaacgactacattagcttgtcgtttcacaaaacaaaacgtgacatttctttcttgagcaagcgaggtcttacatccatgaataatctctcaaaataaagattctgtacgaactgcacttctcaaggcttgcacaaccaacaaacaatcggtttctattataactgagttccacggctgtgttttggtccaacttaaggcctcacaaaagcttatacccctgcaattagagggtgaattgagcctaggaatagctttgtaatacctgctagtaagaagctattatggtctcgagctacacaagccacaccaaaacgtattgctttgacattctaagtggatgttgttgaataaattccacttataaccagtcgggtacacttacaaatatcaacataagcaacatacaaacagaaacaagcaaatagagagaagagaagaatggttataccctagcctcgagctcccaaatccaagatccagagagaactggtccagatctgagagtaaaactctcgtggtgaggtttttgagcaaggagaagtacatgcacaagaaaaaaaacacaaagttagattcaaattacaaagaaaagaaagagagagagtaacaaacttgtaaaagtaccaaaatcgagtcttacctgatcgattttgtga

SEQ ID NO: 47299 - DNA, 2516 bp, Cannabis sativa
gtattaaataatacaacttacaattgcattgaaatttttgatcgtaataattaataaaatacattgctttatccagacatagtgtaatacaatatgacccttatacgacctaccaaaagagtcctaaaatgtttaacaaaaaaaggaaacaaactaaaaataattattataatttgtggaggagtaattaaattttagaatccaaccatgtataattataataagatttattaatatattaattctaagatagttagatttcaatcttaactatttttccaaaatatattttttgttcactttaaatttataacttctaagtattaaatgtaaaacaatataatgtaaatacagatgatcaaagaatattatttctcagacaattaaaaccaagcttttaatttttaactataaaaaatacatgatatttaagatgaaagacattaattaaagaagggaaaatcatttatagagaatcaatgcaaaaataaatacttaaaataaaaataccaatttcatcatctaatttaattgtaagagaacaactgtaagcgtgtcagactttttctctcgtttttttcgtctctttttcctcatggaatcctaactacctaagcttctatttttatggtggtaaaaagacgaatgtacaaataaacttatgacaaattgcataggataaatttgcaattaaaaataatttaatttggagtgaacacatgactttctcaaaatggcatttttggtgagtcagtaccacgtgttaaatgttgatgggggctagtggtgtgtcatgggacatatggcgcaagctgaaaagggaagagagagtggtttcttcaaccttggaccacacgaagcaaaaagctctaatcgcgccccaggagagtgatctacgcacaaggccaaagaggggttgtgtagcacatatgctcgtgggagacaaggcagtagataactgctaggcatagtacccccaagtgagttacgaagtttggacatctccaacttcctggtcacttatctaaaacatatagcttgtggcctttaaaaaataaaaatatatgatgtgaaattaaatgtaagttgcttctattctaattttattatacatgcaggttgtacataatgaagttaattacatcaatattcacacaaagcttaaggcattatattaaggtttggtcacctctacctattggtagtaccgacgtaagtgttctgcattccaagcatgagggacccttgaaccatccattctcttagttgaaatgttctctagcccactttctcaatattttttaggggccttccaaattcgggccaagtacccccactctcagttcttgcaaagtttggaatactctccttaagatgagatctctaacctcaaatgtttgactttttactttatagttgaagtgttgatcaatcttaccttgatacttcttgaagcaaggaatgattttgggaaggatcataggtatctcattggtgagaggggattgtggcctctacagggattactacttcacacccgtaagccattgcgtatggtgtgtgtcctgttgaagttcattctgtggttcaataggcccaaaggactcgtggaagttcctctggccaatgagctttacaagattggagctttatcttcaacatggttttcaagatcttgttaacggcctccacctgcccattggcctgtggtcgggctacaactgaaaagcttttcacgattccatgttgggcacagaagttagtgaagtgcttgtagttgaaatgtttctcattatcagacacgatcttatatggaagccctttcaacatacgatattcttaatggcaaagtccaaagcttttttagaagtgacagtgttcattggttcagcctcgacccacttggtaaaataatcaactgcaactattacgtatttaacttctcccttacccgtggggaaggatcctactaggtctatcccccaaactggaaaaggctatggactgctcatgactgtgatctcggtgggaggcgcacgcagaaccttggcgtatctgtggcattgctcatttcctgacatattcgatgcattctttcttcattgtgtgccaaaagtacccttgacgaaggatcttcttagaaagacttggtcaagaagtatggtctccacaaaagccaccatggatttcctgaattataacatcgatttctattctggcaatacaccttaagtatggcattggcagtcctcagtgatataacttcccatccatgattatgtagcatggagcctgatactaaaccttcctagaagtggccttgtccgcaagaagctctcccaaactcaaaaagttgtaaatgggcgccatccaggagtgagagttttcagctatggaaattacaccacagacatcaatgcttggtttttccaaatggcaaatcgagaccaccccgtgcttaatgatctcaagatctgttgctagtttggccaacatgtccatgtacgaattttgtt

SEQ ID NO: 47300 - DNA, 1607 bp, Cannabis sativa
taaattttgaagtcaaatttaattatttgattacatataataaattttactttagggtactaaatacgtataatttaaaaatataaagtatcaactaagtattattcaaaagcactcagtaccaaatatatttttttataaaaacacaatgtatatttcctataaataaatgttaactaaattaattaaatatggacaaaaaaaaaagtatatatggacaacgatcaacataagaagtttttagaagctaattacttatgttcaacataactaaatcatgatcatcattaatctcctactcgaatccatctaaaccattgttttctatatatagagtttcaaagttcaaaccctttcacgtaacgattaatttcatgtgagataaatggccacatatattttcatccagaatgttccacatgccactagacctaataactcccactagtgtaataaaaggctggagccatctatggccttaaacttaccactggttaatttaggagccacgtctctccaaaaaccacatgaaatgtgacccatcaactccggagaaatcttagcacagacgtggaaccaaaatatccatcactttctttctactctttctctatataaaccctccaaaccctcaataacttagtacatctcaaaatcacaaagagaaacaataagctattcctacgtctttgatctacatcaacaattcgttctacattattatacatcaacactagctatttgctgttagtttttgctgtaaattatcttttgttctctaaaccacgagtaaattaaaaatggccggatcagccaccatgcagtcagtcgtagctagctcattcacatatgcagctgccaaaaatagaatgctcggcagccattttcgtccaagtactactgtagatttgtctagaactttgtacaggaataatactcatttgaccatgagagttgtcagatgcatggccgaggtacgtatacgtatatataagtcgatacacataaatttttccacatatatataaaaatgccttaacatgtttggttttcttattatatttcaggatggtgaaaaggagccgctgacgcctattacagagtcaacagcaccacaaccaaagccagtgacgccttctcctcctccaaagcctaaggtagcttagtattcaattaagcaacatacatcagtgtgtgtgtgtgtgtgtgttttgtaacttttattttaatggggtgttttttcatttggttgggaacaggtgagcacgagtttctcagacgtgttggcattcagtggtccagcaccagaaaggatcaatggtagattagcaatggttgggttcatggctgccatggcagtggagctatcgaagggtcaagatgtattttctcagataagcaacggtggagtgtcgtggttcgtaggaactagcatagtgctcacattggcttcactagttccactgtttaaaggagtcagcgtggagtccaagtccagtgggcttatgacctctaacgctgaactttggaacggcaggttcgccatgttgggcttgattgccctcgctttcaccgaatatgtcaagggcgggacccttatctaagcg

SEQ ID NO: 47301 - DNA, 1958 bp, Cannabis sativa
tgtgtgtgttacatcaaaagaaaaagaaatttgtatgttatattttattccatattagagtaatttataaaatttatattataaataagaattatgttttatttggtataactttatcaatatatatttataaaataaaatttaaaaaaattacagctaaacaagtaaatttaaaatgtaaatttattaaatgagcatccttattgctattagagatcaataatccataatattatttaacaatatttcttaaaatttattatcaatgagaatagttaaaaaaatatcaatatatatattttctcaattcaaaaattagaagtacacaattaaattgaaaaggaattttgaaaaaccttgggtcccttctctcgtatacgccttccttgggtcgatctgaggacgaagacgatggtgttcatcacaaccaaccggaagtcacggtggaaaatcctctggtatgaatgtatttgatttgatattgataatttgtacgtaattctccaaacattctttatatagattctatatataataacatgtaaagttgtaatgtaggtaatgtgtttgtaaaaatgctccaaagaagagaagaaaaagttaaagggaaaaagaagaaaaacaacagaggtaacattgatcaatgttctgaacttctattcttacaatatttatgtatatataatcagtagttcctttgttcttaccatcttttatagtaaagctgaggcttcgaaggccaaatagagactgggatttcttcccctttgatcaaatacttcatacaatctttcgaatgaacttagaaaggtatttatttgtagacatctgtatatatgtagctcttgttatctttattttatatagaatatatatgcacatgtaaattgatagaattttgctttgtaattgtatgcaatgtgttgagatatgttgatcgaaagatactcaatgaactccttttgattggaattcaaccaaggaagaactacttttcatgttccaaagaatgtcaaaggtgcatccaatacaactgcctacaaaaatttcgatcaagtgaagtgtctgtgctcatcaagaagaagaagaaggtttctactttgtaagagcttatccattttcctagagcatttgttatttttactttaaaaaatctctatattataaaaaaatttctatgtaattttatttactaatatcttcttaatatattagtaatatatttttggtgaagtggacaacaaataatatattttaaattttatcttattactcgtaatcagaaaaatcttctaatatatttttattacgttttaaattttttaaataaaagatttatatataaacctaatcctaatatatttattcaaatgtcctggtacgtttcctatttaagttaggagagtgttttcattatatatagactgtgttgtttaaaaaaatgaaaataagagtgttgtagatacaaacttggttttggggaaaaaaaagtgtgaatttgtagaaaatgattaagaagaagagtggaagagaaaaagaagaaaagagtttattaaaaaggatacaaagatggggatggatgaggggtaggttgttgggagttggaactcatggttctgttttcgaagcgattatccatggcaaaactgattctagaccactacaattcaaagattacccttcacttttggtcgtaaaatctgctaattctgattcctattacggcgagctcataatagaaaaggaagagtttgtttatacgtctctggggtccaatcctcacatcatcaagttctatggccacgattataccttttccaaagatcatgatggtggaaattatggcagagttagatataacttattttttgagaacgccttaggtggatcactgagtgatttcatcaagagaacaagaggttggttgcgtgagtctcaagcaagagcacatactcgct

SEQ ID NO: 47302 - DNA, 951 bp, Cannabis sativa
atattattttgtttagataattagaaaagataatcagaatgtattaatttgacaaaatcattaaaacatgtaattatttattgttaatagacttttaaaatgtatatttatcttttttattttttattaataaaattaaaataaaataagttaggaaaaagaaatgtattttctttgaaagtaggggagaatattttcctttattttctccttaatttatgtgggcccactacttttttcttttctaaaatttagtaaataattatataggaatcaatatcatacattatttctcatcccctttaagtaaagatagccttagtattatataaatatgtattaaataataattaaaatgataaatagcaatacaagtacttaaatttttgagtttgagtttgtaagtgatataaatcttataatttttcttaactccacaaatatttaatatttgtacaaactgtaatttttgtcctatttcattagtacaaacttcattaatgtttaaaataaggcacatatatataaagcccaaattttaaattattaaatctagaatgaaacatatttaatggaactagacaaattgtacaacttaatcatcttgtatgtgttctcaaacttgattggaaaacttataaatctgaaacttatgtggcatttgattggaatgagaattgtggggtttatagccttgtgcaggttctgttattactggtttttttacagtttgttataactgttatttttcagttatgttagttaagtctgttgtactcttgtctttcccagcctatgtatataaaggctttagttttgtatttctgttttcaagagagcagtaagacagagagagaaattggtgagctgagagtactttgtaaagggcatgagatattgatcttatgactctcgagtgatgacttgagtgggagcaagactccattgtgt

SEQ ID NO: 47303 - DNA, 3000 bp, Cannabis sativa
gttttctgtttttagttttctgatacatgtgattatcatcaatgaatcttaggaccagaaaaaaaaaaatacatatttttctctaatatgtttcctcaaaaaaataaataaaaagatataaaaagatataggtgaaattattataaattattattttattattaaaaaaaataaaaataaaaaatacatatacctacaccaataaaaacaagttgtttgttctatatgtatgtcattatgtctgtaaaataatataatattttattttaaatttatttatataattatacatatataaattttattttatttttacattagaaaatttatcgctccgtcttcaatgggatatgaaagttaaaattcttaatgagaatgagaacgagagaatactattaattttctgtctcgtgtgcattccaaaatacagccaaatacatttctattaatctataacctcaaaccaactacaaattcagtatactatagtaataatcatattaatataactaatattatatgattaaataataataatgcatacattaattactcatttgcaaacatttcatatacatatttattccattagttgtattatacaaattgatcaataatatataaaatatagtatatagggccaacaaattgttgctttattaattaagtttggccattattaaaaaaaaatcattattttacaagacattgacaaataatgatatagatataggattaaccctataatatacatatatatagctagggcttatgctcatatatcaaatcctaaaaactttttctaatataggttatataggtttacataattaccataataatttggaagatgatttttattttatgtatttattatatatatatatattaattgtgaaagttccaaatcaattttcattattatatatgatgatgataataattgacaaagatatgccgcaatttactataagagaaatatataattggtcaaaagctatttagggttttatatgaagtgatgaagaaatacatatatatacacactaaagttgcttttgatggaaacctttttatgattttatttattgatctttaattatttcaatgaccaaagtattcatcattttttttttctctttttaatttgattccccccacataaaaaggtttttcttttaatattatttcaagaaagaaaaaaagacctttttttaagaaaaaagtgcaaaaataataaaataaattaactaatttatttattacattatttatatttatatattcaatataatcaagcaagcaccaattgggggttggaatattttatatatctttttatgtgttatttctttaagaatgacataattaattacgtacataaagtattatatatatacttttatttttcaaaaaacaaaagagagagtaatgaaaatcaaaaggcactttttttagtaggccattaaaaaaaaaaaataagatgaagaagcactgactgtgtttcaactttttttttgaaaaataaattaattcaaaaaaagaaaattaaaaggaaaaacttttagtttttttttttttaattattatgggcaataaactttgtaaaagagtaggtatgtaaatcatcattaattaaacaagttattttacattatatatcctattatttaaatatttaacccttttagaaagttattaattaattaaagttacaactttaccccaatcagaaaacaaataatagtgtttattggcatataattttagggtataatactattgattttggcatctatttttctttgatttcatgattaatttaatttaatgagtggtaaataaatgaagttgtaattataattatttcatctcttatttcacttataataataataatcaattgctcaatttaaatcacaattatttaagaacatcataattttttttaattagcatataatttggagattttattttattttataaattataggactttaattcaaggataataatgatatagaattaatgagaagtggaataattaatatataaagttgaaaaacattcttaaaatgtgttttagattccaaaccaaattatcatggtagtgttatatcagaatatttttagtgtaattatgattgtatttttaataacaaattaaatagtgtagggatatacatgtcattttattatggtattaatagaagaattaatggacttgagaggagacaaaatatgcaaataacaataaataaaaatacacaacaaaaaagagtggagtctttattattattattttccaaaaccctagaaaaaattatgtcaccaaatctaaaaaacaatttttttttcttagagaatgtgaaaaaagttttgtagaaaaacaagtacgtgcatggtgaaacgtaattttttttacataatatacttgttttgggtaaaaattaaattaaataattgagccatgaatttaaaaataaaaaaaaatgaagtaaataataaataataatagtcaaacgaggatagaaattgaaagtgggacccactcccactcccataaaagaaaagaacgcatgcataggtagacacgtgtactgtgaaagcaatgagtgattgtgggcccaactatgggctctactctgtcatctctttctctgcctcttaatgggctatggcccatgtgtcatgtgtgcatgtgcatgttcttctcacaccttatcatcattcatcacacatacaaaaacaatacataacacacattatttgattattttctacaaattatttgttagtattttcttaacactcgtctctttcattttattttatttttgcaaaatttagaacgttgaaaaaaagtgacattaataattttaattttgttaaccgtagccaattttttgttatgcctaaattttaagctaatttttcaagtattataagatcggagagacgatgaaatttagggatgcacatttatatctaaaactc

SEQ ID NO: 47304 - DNA, 569 bp, Cannabis sativa
atcttattcctcccaactaaagctaacctacaggttgaatatccatattaataatgcccacgtttgaatatgaaggaaatcctgaaagtatagtcctagttacaaacaatacattcccataaagttattaggttcatccgtattattaaaactaaacaaaataaaatctacaaacaaactaacaaaaatacacacaaaataaataaaaaataaaactaaacataacaatccaaaaatcttgcatggaccctgatttttttttcctttggcttcttggatgaacaaaatttctgaattcgccacaacctgcattgatccaccaatgaatacttaacaccacatcacctagccgatcccaagccaaaggctttgcattaatttttctttaaatcatcatatggtcattatcattattttgttagttaataaaaaagaaaagtaaatataaaatcagttcagttcataggttagttcatgacactagaagtgtaagatggaccactatagtcagggtaagttctgggcataggcggattagatttgcgcttagggtccacttattttagaga

SEQ ID NO: 47305 - DNA, 4734 bp, Cannabis sativa
attggaatgtgagaggattaaataagaaggagaagaaaattgagttgtaagagaaatataaggagaataaagttggttttggtgccctctttgaaaccaaagtttttatgggaaagtatatagtttgattacgaataattttcctaactagaacttttattcaagtcctattacttcatttagaataatgttgatatggattgacaaatttctcaaggtgaaggtttcgttggaggataggcagtttgtccattgcaacagcaaaatggctggttataacggaaatttttacctaactgctgtttatggtagcaacaatttgaatgagaggaaagatctttggagcaagcttgctggatttggtcccttgaataagttgtggatcatccttggtgatttcaatgtgatgattgattataatgatagatgtggtggaaggcaagttaaagtgacagaaattgaagatgctcaaaattggcttgttttgggccaaattgatgagttttgctgtacgggatctcagtttacttggactaacaaacatgagaacgggatcagaatctactctaaacttgatagagtttttattaacaatagttggttagatgagttccctaatactgaggctagttttagatgggggactttttttatcattgttatcgcctcaaacatgttaaggttgagaatttgggtattagaccttttaaatttagtaatcattggatgttcatgaatgattatgaagatgtggttctaaacttctggaagggagctagagtttgtgatttgaagagtattgccaagatgcttttcagagtcaaacatgttttgaaaaaacattttgtctctaaaaaaatggatattaagagccattacaaggaggctaaagactcttttactagagcccatggaaaaccttaccagcaatcctatttgtattgattatattttagtcgagaagagattacatcttgacttccttgctgctcaaaaacagtatgccagctatcttcatcagaattcaaaaatttcttggttgtgttttggggatgagaataccagctacttccatggcatcatgaagaaatggaaaatagagaattggattctatcctactatattgatggcactattattgaagattatcccaacgtagtggagcactttcttctttatttttgcaactttatggggaaaaagagctctgctattaggaagattgagttagattgtttggaatacggtagcaaacttagtcaggagcaataacttcatttaaccagccctttcaagaaggaatatgtaaagaaagctatgtctgacattcacacttctaagagcccgggtccaaatgggtgtggggctagtttttttaaaggtctctaggatgatattggccaggatacttatcaagcagtgctggggttcttttaacaggggttatgcctaatgagattaatgaaacaataattcatgacaaccaaggagcttaatctactgaaagaaacaaacaaagcataaaacgcagcaaaacataggaaactaatacgaatcctcatggtcatcctctcggaacctgatggcttccttggcaaggaaatgagcgcttgtgttgagttggcgctgtaagtactgaaaggaaacaccagggaaatcggagaaggagtgcctgatctgagcaacaaggcttgaaagagctgaattatcctgccaatttccgttaacctttgaaactaaatttagacaatccgtgaagatgaaactcggcttcagctaggaagaaagacaccaagagatgccatggagcagagcttgggcttctacaaagatgggggaggaggctcctggcttcaggtttttttcagaagcaataatgcgatgagggccaaccttgaaaatgcaaccaagtcctgtaatacagtggtcatgatctaatgtggcatcaacatacaaggccggggtgtcctcctagatgatttcgacattagcaggacaagatgagagatgatgctgattagaggctgagtgagaaatgtcttgagaatgtagttgttgagcctcccgataatcctgcaaatagttaagaacaaacttttgcacattgttaggttcagaggaatttctaaataaaattgaattcctggtattccatatatgccagattatgctaacaaaaagaggaagctcttctttgaaaattaactacagagcctgaagataatagtctttaatatcatagcttcggtgatcattttggaaatttttaaattttgagtgcttcaatgtgtggcgagctctggtacaatcaataagagaatgagaaacaaattcaatgttattaccacaaaattgacaagaaggttgaggaagaactttcttgtgaaacagatttaaagcacacggcaaaatatgattgaaagctttccacgagaagtgtttgatttttggagggattggaagggtccagagagatttccaccatttttcaaaaggatttggattggaagaagaaagggagtgtatattggcagtagcagaagctagatggtaagcggaattaactgtaaggatgctagagtgatgaaagccccaaatgagggtatcagcaggggtatagtgaagggggatttggagaatcttatccaccttatatacagggaggtaatgttttaatcgagaaacattccaagtgttatcagaatttataaaaaaagaaacaaaaaaaagagaggggtcgatgggatgaagaatgataggataggagatgccaagtatccaatttgggacagataattaaagggatgctattgccagtacctatcatccagacaagaccacgcttgaggagttggcggccccagaggaggctttttcaagtaaaagaagaattgtaaccatttggagcaagaagaaaatccgagtttttaaaatagcgggctttcagaatggaatgcaagagagagtctggattagaccaaagacttgcttaaagggtgtaatagaaagaacacttctgctatatgtattatgaaggttgacataagcaaggcttatgatactgttgattggacttttgttgcagatttgttaaaggggctttgctttcctaccaaattcattacttggattctaagttgccttcatggtgcctcctatacccttttgatgaatggtcagtttcaaggctcgtttaaaggtgaaaaaggtcttcgccaaggggacctaatgtcccccctcctctttgtgttcatcatggaatatttgactagatttttgatccaaaaaatcgaggtgaagagcttcggatttcatccactttgtaagtctcttaagcttgtgaacctttcttttgcggattacttaatcattttctacaagggtaatgaaaattatgttaggcttattcatgagggttttaaaacctttaatgaatgtacatgattgatggctaataaaaccaaatccttagtttatttcaatggagttagtgctaattgcaaaaatagcatctcgaacatgttgctaatggaagagtgtggctttcctctgaatttcttgggggtccaactcagacctacaaaatggtgtgcctctaattgtggtatcattcttgacaaagtctaaaagaatcttaacaactgggccggaaggaacttgtcttttgcaggtagagcacaaatttttcactcggtgctttcaggtttaagaaactattggatgagcttattcattctccaccaaaagattactgcaaccattgatacatgctataggaattttctttggggaacaaatggtcatcggagcaaagttcatctctcgtccttggaaaaagtgtgtcttcctaaaaagtttagcggtataggctttcgtgagggaaggaaatggaatattactttgatggctaaatacatttgggccctattgagcaagcaagaaaacttgtgggtttgatggatccatgccatttacttaaagaatcaagatttctggttcgttactttcaaacatgatgggagttggtgcttcaagaaacttttgaggcttagagatattgtggacaagcaattagatgctgaagctagattaaaaggtaaattcaaaactaaaatattttatatttcctttattcaagtttataaggtgaattatgcagataatgtgtggcataagattgccattctgaagcatagattcattgcttggcaagcaatcaactcttgataaaagaccatcttagtagaatcctcccaattacgatagatgtttgtttgatttgttaagatgctagagagacagaacaccactttttttgtggacagtactttcacaaagcaggttatggttgagatcactagatgggctggtaatgttgattggcctgaggacataagtggatggtgctcaaatcctcacaaagggttgcaatataaaattatgaactcgattataaatactattgtctattttgattggatgaatagaaatggttgtgtcttcaatcatgtttgtaaagctcatgctatcgttagtttggaaattgaaaaggttgtcaagtatagaatcatgggcattcgctaaagttgtaaaaatagttttgatcattatcttattaatgtaattagtgaatggtagctggtgtggggtggggctactgctgcaacagcgtgttgttactaattgtagcagtgttatttttgtaactctgtgtttgttttgaataaaaagta

SEQ ID NO: 47306 - DNA, 2202 bp, Cannabis sativa
ttaaccccagactcagacttaaatgggaactagccgctattaattattattagtggcaaatgcttaatctactgctaataatagttaatagcggcgagatattagcgataggatctcgccacaattttttggttattagtggcgggccccttccacagctaataatgttgaatgctgtagtaagacccgaacccgaacctcaaactccaaactttgactccaaccttagaccctgaacccagaccctgaaccaagatccagcccctagaccctgaccccggatcccaaacaccttgggatctgtgtttgagtttgactcatggtttgtgctcaaggctggagatggaatccaggtcaaggttgagtagagtttatgataaaaataatataatttaacaccttattaatacaagtcactaccaaatatataatattatattaaaataatactaatataatacaatacaatctaacataatattatacaaatataatacaatactatacaaccaagcccaaataatcaaattaatacacccaaaacacaaatttcatccaactcaatctaacataatatacatacatacatacatattctataaataaatatagagaggtgacattttttttttgaatagaaatgtaatttcactcaaatcattcaaaagtacatcacataataaactactcagaatcgtagaatatgaataggtacaacgaacatttaaccatgaaactttagccaatagtgagcaatatgattagcagatcgtttgacaaaaataaaaaagacattattcaaactagaaagaatatgtctgcactctgaatctgaaatgcaaaatccaaaaacagaagtcatatctaacaaacttcaaatagcttggatcgtgaccaaactgttcgactccaccaccatatcatgacgccctgtttcattcaaccaactcaatacttctgtaaccccaatagcttgcaagaacattatttattgattttttcagaaaacaaactattaaatatttaagccaaagaaaatataatttaaagagaaataaccaaagaagacacccagagttttttacgtggttggggcgttaacgagcattagtctacgagtcaatattattaaatgtttagctagaaaagtttaagggattacaattagtatgggcactctattcttcgcctaaaaaaataagccaagaatttcgaaccatttacatgaaagattcaatgagtatttatagtgcataaatgtcatactagttacccttttcccggtaatagagactagagactttacatataatacattgactttgagcagtgaagcccagcccatgaggtaccttgtgtatgctgatgtggatgtcacatcatgatgctagttgtcaaaactgtgtttatcttcgtgggtaattagtgacacattaattacttgatttctaattgcattatatctttatttagtgagatatgatttacatccgagattataggaacgtaattcccaattttgtacaatctggtaataaatgggaaactatattaggcctccggagacatgttagtgacctcttccagatacacagagatagtctttctaaatgctgaataggcttgacggaacctcgcatgggctagttgtattgatgttcccccaatgcagaatggatcctgggcttgacccagtttacgttatttgggtccactgatgggccttaagcttctatttagaatccacgtgtcccttactgaaaatatatatggataacaaacaagatcaaccacccccattcggcttattgtccgagccacaataatctgaccagaagatcagttttgtgccacccaaccatacccatacttattttgattgctaaagatagttgcatcaacattgattttgatcgcattaccattcggtacaatccagtgctcgtgtccttcgctgtctttaaaagaaaaaaaatgaaggaaaccaaaaattttatcttgaccacaactccattgatcaaaactacccttaaccattgaaaccaccactttaacagtcttattcttaccattctacagattttcattgcgcacagaccactaacaactttatgtttcatcacagaatcccaacactaaacgctgaaatctatcgtgaagccacctcttgaaagagtgtcagcaatctctattaccgaaata

SEQ ID NO: 47307 - DNA, 502 bp, Cannabis sativa
tagttaatctttattactttatctattatgattaaggtgtatgagatcatgtgtatacaataaaagtggatgagggagcagttcgaaagggaataaattgatagtaacctccataaaagatttttaaaaattgaaaaaaaataataaagagtctaccataccatatgtagcttagtgaagtagtagttgtttagttttgttccttttcggatgaaagacggccaaaaaacgcgtttgcaatattgccatagttcatgtttccgatattacctttgcttgctttgaccatgtctttttttttttctaagacggctattttctatatcttcttcttcttcttctttttccctaaaaaattaattcaaattaaaagtaataataatatatagcttctcttcatcgtttttttaattaaaaatattaaataaataaatatatataaattttttttggtatacgtcgtcgacacaaatggaacatgggcgtcaatgacaacaacgta

SEQ ID NO: 47308 - DNA, 1564 bp, Cannabis sativa
  modified_base (1537)..(1538): a, c, t, g, unknown or other
catggcaaaagcctttgatagggtcgaatggggtttccttcaaaaagtcatggaaagatttcacttccccagtcgcttcatcaagcttataatggcatgtatctccacagttactttctctttttccatcaaccagcagattttaggttcagtgaagcctactcggggtatccgtcaaggggatccactctccccctacctctttcttctttgttcggagggactgtctactcttatctcacaaaatactttgacttcccgttctcgtaatcaaggacttgggctcaaaattgctcgtacggctccaatcatttctcatcttttctttgctgatgacagcctccttttcagtacagcatcccctttggctgctgcaactataaaagcagtattacatgactacagccttgcttctggccaaatggtcaattttcacaaatcctccctctatttttcacccaacacaaccgaggacattcagcatcaaatcactacccttctcggtattcctattcgcgactcgatcgagaaatatctggggcttccccaaacttttgggagaacaaagaaagaggccttcaactacctcactgatcgagtctggtcgcacttgaataggtggaatgcgcaacacttctcaaagggaggaaaagaagtccttttaaaatcagtggttcaggcgatcccttcttatgccatggcttgcttcaaactacccttttccttcctctcaaaaatcgaatctatgatggcttccttctggtggggaggaaccgaacatagtcgaaaaattcattggaaaaaatggtccgctcttagcctatcaaaatttcatggaggactgggatttcgctcaatgaaggctttcaaccaagccatgttggccaaacaagcttggcgcttacttcaggcacctacttcccttgtggcaaccattctcaaagcccgctattttccccacaccactttccttgaggctaataaaggccgcaggccttctcttgtctggatcagtatcacttggggtaaagagcttcttaagatgggaatcaggaaatcaataggagatggtactacgacatctatctttcatgacgcctggatcccaggtcatggtaagattaattatcttactcatttgtcgagggggataccaaaagtctctgatcttattatctcttctcaccaatggaatacctcttgcattcataccatctttccccctgatattagtcaagcaatccaatccatcccgctcattcccatcccttcccccgacacttattattggccattcacatcccatggtagttatacagtcaactcgggctatcacctagcacatagcgtaaatcataaccatgagccctcaccctctagtaccctaaacactcaaacctggtggaaaaatttgtggtcacaaccgattccctcaaaaaaccaaacatttcatttagagagcatattatgatatcctacctactggctccaacttgcataaaaggaagatcctatctatgttgggttttatgccctnnataaaactctttacaatctgattagt

SEQ ID NO: 47309 - DNA, 2973 bp, Cannabis sativa
aattatataataatataatttcacaataatactcatttaactagttagggttttgcttatccatttccttaatcttagggcattacaggtacgctactcatatgggataccagaagtatcactgttttagacttcttggtaggagattcttctatctcagtctttgttaaagcagatgggaaaaacccttggtgatttttagggttttatggcccatcttcatacaagttaaggtccgccttttgggatgaattggcaggtttaagtacaatatgtggagattcatggtgcttaggaggagatttcaacgtagttaggagggtccaagagaaattgaatagtaaatcaaacacaaagagcatgaagatatttgatgagttgatctgagaacttaagttaattgatcccccgttgaataatggaagattcacacagtcaaacttcagatcaaagcctatttgtagtagatgggatagattccttttcaccaatgcatggaacaatgcacttctttatgtcagacaagagatgttggtaagattgtcacggatcatagtccagtagtgattgaatccaactgcccaaaatggggtacgagtcctttttgttttgataacatatagctggaagacaatcttttctccaagaattttgacccgcggttgaaaaatgcggcagttttgagttggccaagtaccaaaattatgagtaaattgaagatagtaaaggagaacataagagcatggagcaaagcaatttttggaagcaatcatgtgctgaagattgtaatggaaagaagacagggtgaacttgatagattggagaaaacaaacttgtgaaatccaatcctagcaaaggagagaagaaacacgaagaaataatggtagagattagcttttgaagaagaaagaagtgtgtggttaaaggctaaatgcaagtggcctgaggaaggcgatgcaaactctagatactttcataatttgttgaatgcaagaaaagccaaaaatacaatttcaagaatcgaaagagaaaatggccagattattgaaactgaggaagacatagtccaagagatagtgcatttttttgctagcctgtatacttcataaagaagaattggtacaaacattgagggaattgaatggcaagcgattttagagttctcgtcaagtcacttggagagaccttttgaagaagaagaaattcacaatgccgtttttagttgtgaaggaaataaagcccctggtaccgattgtttcagtttggtcgtgtttcattcacaagtagcacaagtagcatcaatgagatctttatctgtctaattctaaaaaagctcaacagttgaaggatcagagattacagactgatcagtcttattaccagcgtatataagattattgcaaaggtcctagctaacatacttagaggagttctatgggagaccatacaagaaaatcaatcaacctttgatgaaggaagccaaattttggattcagtgttgattgcaaatgaaacaatagaagattactgaagtagaggcaaatgtggcttagtctttaaaatcgattttgagaaagcctacgatcgagttgagtggagctttttagacttagttatgcgcaagatagcttttggagagatttggaggaaatggattcgaggatgcatctcctcaacatcttttacgattctcattaatggaaaactaaggggaaagtttcaaggttcccgaggacttggacaaggagaccaactctctcctttcctgtttactatagtcaccaatgttctaggtagaatggtagacatggcagtgaactcaggcaagtacttcaggtttttttttgacaaagagacggttcaagtcagtcacttgcagttcgccaattatacaatttttttttctgaatgatgagcactctctaaaaaagttggtgagtttagtggaggctttttatgccatgtgttgtctcaaagttaattggcataaaaaccagctgctgggattatgtatgaacaatgaagcattgtcaaaatgtgcttcattagttggctgggaagtgggcagtttgtcaatgacataccttgctatgcctctagggggatcaccaaggaagtggagatttcgagaaccactttcggagaggtgtgcgaaaaggttggatgggttgaaatgctcatttttctctaaagcaggaagactgactcttattcactcagttttatcatcactccccacttattacttatccattttcaaagccccaaaagaagttacaaaagctttggaaaaattgatgagagagtttttttaggaaggtggggacttggggatgggaatcacctggtttcttgggaggaggtttgccggtcccgggaagagggtggtttgggtattgggggttttgagctgagaaataaaggaaggctaatgaaatggttgtggagatttccattagaagaaagctcattgtggcacaaagtgatagtaagtaggtatgggaaatcgaacaatttttgagactcaaaggtgggtgctcgtatgtcttcaaaagggacgtggaaagatattttagatctttatggtgattatttagagctagtacatttcaaggtggggaagggagatcgtattcaattttgggaacatctctgaagagtgtaacaccctaactattttaggtatattaatgtaatttttaacatacggtgcagctcgttgctaaccaacgaggttatcgaaaattgtgattatttaaaactttacttatttaattaaaaacataaagtaacatacatataaaattcttggatcccgtttacaaaaacatttacaaaagtttgactatgcatatataatagtttgtcacctaatgactaacaggcataataaacatgtatgttaaacatgtaaatacatatgcataatattacactaatcttaccttgtttccgaattcaggtgtgtcggtc

SEQ ID NO: 47310 - DNA, 2358 bp, Cannabis sativa
taaccctctacagttccacgctacacctctcatggctcctgtggaggagataagacattctcctccacaggggtttgagagtgaacagaagagctagagtcagattcttcaatcacaaacgaaccaataagcgggttcttcacaatgctgttagagcgagacaaggaatccgaaaaaactttagaaggttcttcaaaagcaatcttggatgttctgtcttgatcctgatcctttgtgtcccaagggaagtttcggataacactcgggtgtctccgaataatcatatgaggtctggaacataaagaagcagaaggatccaagagttttcttttcttgaacaaatccatcctcccaaattgctttagatctttcaaaaaaatttcttgggctctaaaaatattagataaggccttctcatcttgagatggataatgggcttccttctcaccatgaacaagtgaaagcgggcccttctcaccacaagcaacaaccggccccacacccaatttgccacattcacttaaactcccacaagccattgggaccaaacagaccgaccctataattaaagcatgaccaacagcagtctgcttctcttgactcgcacacacgtgtccactcacaaagaaagataaaatagttggcccaagtgaagcttcccaaattacatgaaaattgatttctctagaattttgaaggtcatgcaaagtagtctcttgggccttaaaaaaattactaaaataattataagagaggaccctctttccatcaagttggaaattaaattcatggcccacagccgagttgttaaaagcaactctcccttggccctccctattgctcaacccactagtccccaggcccaaaacagcctttgacccagaagtcaacacacctgggcccacctctctaacacacaacccttttccaaaccacacctcctcataaccaattagaaacaagtctaaacttggcaaatgatcagaagccttttcaaaccacacagcttgctctccaacaccaatacccaaactagaaacccataaggacatcacaggcacggggagagatttattggggacccaaatagcctggctagcttttcgtttcactgaccgaggccctgcagtgacccgattgaaccgtttcgagcacagcgccttggaaaccgaacgcagatctgcctgagaacccgcttgagaaaccgcaccagcctccgtcatgactggagaagacggtcgatgaacaacctcctgagcagtagccaccgtcgatccaagggaggaggaagatgacaattgattaatcatgttgtaaatctgattaggatgttgatgatgatggccttgaatctgatgatggtgttgttgttggaatattagtggtgtttcgtcagaagtactattacttgtttggttgttgatgttgttgtcgttccctttaatgctggaagccatgaaagaggttcccaaaagctttgctgcctctgcagcttggtctactaaaaatttctcttctttaaaactattattaccagctcttgaaaaccccattaatatctccaaaccgccttttgactttagtctatatataaatatatatatatttttaatatatatatacttatcttcttcttcctcttctttcaagatgatcatatttctttcaagatgatcatatttcagctccatgatcatcctcatctcacttaccttggtttggttagctcccagaacgaaccacctcgcttctgttgattcccacctcaccaaatctcatcctctctctctctctctccactaacacttttttttggttcactacattaagcacattaaaattacatataaaacaatgttcgttaaagtaaatgagtttatatatggtgtcacttcagccattcataccgtagccaccgaaattagtttctatcatcggactagccaactatctatgattctcggctgagaacttccccttctcagtgtgtgcttttcaaaatttaaaaagaaacctatatagttccttagttaccataaacaaaaaactccactatagcttctccaatttcataacaagaacactccatttctgattggaaaacctccattttggaaccaaaaaaaaaaactcaacaaaaaaatcattttaattaaacacaacatttctagaaataatcaccttaggtaattcattctggtttatgcaaattctataacattttgtgcctgcaggatatcctaaaattgttttgagagatctagcatctagcttatcatcggattgatgtacatatgctgcacatccaaacactctcaagtgtttcaggtttggtatctttccataccacatctcata

SEQ ID NO: 47311 - DNA, 4986 bp, Cannabis sativa
ataacttgcttttgaaagagttagtggggccagttgatatgtaatttctggtttgaaccgggacagtagatgattcaattattacagttaagacctctagcaaaaaataaataatagaccatgtgaacaaactataaatgttaccttaaatatatataataaataaaaaaaaaaaaggaaaaacaaacaccaccaccaccatcaagcaacaagtcgtgtgctttcaggggaataacaaaacttaaatgtatcaaaaaaaaacaagactttagtggaatcaccacctatgcaccaccatcataatataatggtacatatcggatatgtatgtgtgaacattcaaatttccccaccccaccaaaaaataaaaaagaaaaccacacattttacaaataccacacaagattactctctaaaagtcaagcattttatgtcttctcacactttaaatcagattagacatccttcttctatggcgacttagtgtagatctcaagttagaatcagatgatgttaccatcctacttttgggcaagaatgttgatttggagtctgagccattgcattttgggctctcaatgttgttgggaacaacatcatcagcagtagtctcaacaccatgttttttcctgtttgagttttgtaaagttgctttgaaacgacgatccggatagcttattgattgagaagttgtaaaatggatagtacttttggtccctgatctcagaattcttgctcttccaataatttctctttcagccgcgctctgcctttcgcggctggctactgttgaagtcatgaaccttggcaatgaaccagaaatgattcttctagtttctttatggggttcttttactttctttagatcttgttttggactcaaaagaactatttcttcttcttcttcatgttcaagtggttgttcagtgtttgagtacagctttttgttctcatttagtatgaattcaactttctgtatctgcttcttaactttctggcattcttcttcagcttctctcatacactcttcaaggtcatggattcttttctctttttgtttcttcagatcctaaagtaaatttgctaggagttatgaacattgattattgatcatgcatacttgaatagaaaaagaaaaagagacattaatgtacctccacttgttctcggttgtattctaccgctcttgctctttttgcaaagcacaaagaacatattgtctctccaacatcttcttcacatgggctgacatgaacaagcatcaacaccttcgatgcatcgcctgtaacaaataattcaagggcagcttataattatcataagctgtttcataagatggtctataatggctgcataaaaagctttcttacctaatgagtccttgagaatttgagttagtttactattcctgcaaccatagagataccacacaataaaattaggtaagacagttggatcagcagaaaaaggagcatgacagaagagcaatccatgtgcatatctgataggttcttcttaaagatttcatctttatttaaaagaagaagaagagtaaaagctaaagctgacaatcaaagtacaaagttagttaattacctgtatggaacatgaccacgcttccttcttagagcagcaataacatcccccaaagctgaaagagaaagatttatagccctgccttcatcaagtgttagcccactagctcctgtttttaatagtcgttcacttcctccaaggtcaaccatccacagtttgcttagttctgttttagctccagctccattgccatgccggaatatggttatccttgttaagctagatatataaagctaaacagataatgtgactgtcaaactaaataactgcaatgaacttttctgagataaataacaagatcttgaacccaccagtgagacctgctggatgtttcattgacatttgtccatgaagtagatcgagctcgcttccccttgttgtaccaccatttggctttagcataatcaaggatttgcacttctgtaagcccttcaatttccacacccccctttggatctgtttgaatgttgagattgctgcaaccaaatagtcaaatcatagataaccctctggctcagtcatcttctgcaagcactggtatacaaaacaaacagattttacttagtcttaccttctagtaacaggttcatagactctagaagttggccttggagcgagtagatctctaaggctgcccatgtaaacctccaacatactcatggaaactttgaggttttcaccttccaacgaggcttggcgaaagagctcctttagagctcggggaatgatccccggctgctcattggtgccatcctgcagattcatttcaaaaacagttttcatttaaaggccaatgcttgaatttgccaccacttcaatgcaacaataactcatttcaaaagcatccattactaaccattgtaaaggtcttgcctgtgccagtttgaccatatgctaaaacagatacgttatagccatctagtgcagatctcagaattggttccacctcagcaaaaacatcacctgaagtgtttttaagcagaattatctctcactgctagaatattaaacgtgaaaaggaaaactaagagaaaaataggcttgattttggactctcaccttggtttacttcttgaggaaagaccttgtcaaattcaaactccttcttaactccagctgacttcactgtaatcttctctgttccaattgaaataggttctggaatttttcgtctttccacagcaaggaatggccgaactcgagaaaacactcgaatggtgcctgaaaattttgttccacagagagatttaaagcagattaaaaatacccctgtaatctttaataacctgatcactaaactaaccaatatctactaccactttgcgaaaagaaacccaaaatctactacctttgatgtctagtatcttattcaatgcttctctccgcttctcattccacaatctgtgctttagcctcaactgttcaatttctcctattaaagcaatacggtttatattttagtataatggagatgaactccaatgtgtaaagtaatcgaataatattggaaaatacatatatttatatatatattctaccttcaaggtctgatatggactgaaggagcccgctcttctcgtactcgggtaaaatacttacgtctgtatggatggtagaaagaggaggagattcagaatctaatgggaacccatcaggggaaactggatttgcttccatgggagatgatttgaaggactcttttacgttgactgaaggcaatgagatctgttcaatttcagttgaaatgaacatttctcagagaacttagaacaaacagttggacaccctttaaaagaattggaatatatatatatatatatatatttataaatacagacagagactgagaagaaagaagatcactttgcgtaagctttaccccaaaaaagaaaagcagaaactgaagaagtttatataccctgtttaacaagactataaagtttgtaacttcaaacagagaaaagaggtcaaaacagtttatgaacatttaacaaaataacgatgacagactattaattgaagcatttattacttcccaaaaactgacacacttgaatccatatgaaggaatcccataaagcactttaggtactagtaatggaaactaaaacattccattaaaatatatcaaaatttaagagttccaagaaccctagatcatacccaaaaggaattgctgatcaataaaaatgcatttttctattaaaaaaaaaagcagccaagaggttgagaaacaaaataaaccaagaaaaagtttgaaaagcccagatgaaaaaaaaataaaataaaagggaaaaaaaagcaagttggatatgagttactttcaatgattgaacactctaatgacccagaataagaggtgatataagttcatgtacagttcaagggcctcacttaatataataacaattaaatttaaataattatgttttgtttcttcagagatattctttttggttggtcttagatctaaaaactgaactgtaaagtttttttttttttttgcagaccagagagagaggagcgtgatgactttgaggggcaaaagtggaacaggagagagaaaaatctcaatgggtgtttcttggtcccagtactcactctagtcactactctttcttaatttatttaccttaagtttgactaaaggtaaggtaagaagaacatgaattaattgtctacaatgcatcaaatctatagatgctgacatggcaggctggtcagccaacactgttgttgttgcgatcacgtgtcaaatattggttgagtgacttagtttagtagaatggagttcggtgcagtggattttggcctggtagtttgttgcacacttttttacagagaacaatgaaagacttgccgttaacggtaaactgtaaagctgtaataatggcgggtaagtgaggttgatgttcttttaattttcttaaatgttttttctttttttttttaaatataggttatgtttgttcaataaaaacacataaataatttaagttttttattattaaaaaagtaattttataaagagtttgagtcacatattttgtgattatcaaacagatgaaaaggaaaaaccaacctccaacttaattctagtcaacagcataataagattttaattaagaactcaaaattaattaaaggtatgtttagtaatattattttaatcagttttctattttataattaaaaaagtgaaagtgtttttcaaaaatatgttttataaaattatttttactttttgattttttatttgagaatcaaaatttgaaaaaaaaaattaatttcaaaatttttttaatagattttttttttctaaataaatattttagactccgactccaacttagaccttgggacccaaactccagcctcggccccagttct

SEQ ID NO: 47312 - DNA, 1215 bp, Cannabis sativa
atatatatgaacatgtacagatatgcatcgatgcgagctatagagagtccttcatcattagacgatcaacaatggttaacatactgggttttgtattctttcatggcactttttgagctttcttgttggaaagtccttcaatggtacctaataatatatatatatatatatatagtcttcatcatcatattatttatttgtttatatatatattgataataatgtatttgtatgtatatataaatataatagggttccgttttgggggtatatgaagctgttgttttgtatgtggttggtgtttttcaatggagcagcatatatatatggaaatatagtgagaaaatatgttaagattggaaattatatgatggtcaactcaaattatccagaaagtcaaaggaaagttttggagatgatgagccttgatgcaagaaattctgttgagcaatatatcgatcgatatggacccgatgcctttgaaagagtcatcaaagcggtacatttatttatttatttatttatatttaatattctatatttattttagataatgtaataattaattatttgtgtttataatttattattgctttttttttttttttgcaggctgagaaagaagcaaagaagcactgaataaacaaaccaaattattattaattatcattccctaattcattattattgtaatatgtgtccactaatattatacatttaaagagaatgtgtgtatgtgtatatatgttgttgattatatgtacggtttatattagcatttttttttatttatttattataaaaatattgtaagtacctagacaagagaaaacagaccttttacagaaatattcgatcaacaattaaaattgaataaattgatcacaaatggtatgtttcgtaggaagaaaagatagtaggatggatggagagtgtagatcggatggagaggatatttgttcttctttgtgttgtttggtgttaggagtatatgtggaaggatgaagagtaaaataaatattaaaattattattttatcatttttaatacaattatatattattttttaaaaggtagaaaagataatttgtataattttttgtcattttcttgaattcctccaagttacactacgtttggtagaggggagagaaggagggaggaagaggggtggagggagagggatagagggattggagaattcttttgtttggc

SEQ ID NO: 47313 - DNA, 1482 bp, Cannabis sativa
  modified_base (52)..(52): a, c, t, g, unknown or other
agctgtcagatgagagagttatttaatcagacggctgagattgatctagggntaattagggttaaaaagtaaaaacataccctgacacttatttaatgtgaagtgcatcacaagataaaatcatatcccataaaatatattgtataggacaattctactaggacctttgaaaagactcattcatagagactttgtagatccaataaaatgcaacacattagtacatcagttaataagtatgaattttctctagtaaagaaacacttgattattttctattttacatttcagaataatttttaaaattttcttttttcatttttaaattattcgtaattttcattgtttaagaaaagattatttcattttttagttttcattactatgcatcttcttcatcattagtattcatcttaatttcttttttttactgtaaatttataatagcaaccttctatttctctacctctcttctgcttttctttattagatatgcgaaaattgtttgaggtgtagaaatttgggtagcaactctatgactctactgtaaaaaataattataaacccaaatatcattctcttgtttaggattcatattcaacacacataatgaaatttggggttaaaattacatatcaaattagtgtttaaaccagctcacaattaaatagatatgttttaaatgccggttttaaatttggatgtgaaatacacgaataaacgcataaatgtgatgtaaacattataaatggggaaataataatgaatgttttaattaataagaatcgttaataattgggtgtcttcgtagtcttgtagtgttaggtatggagtctcagttaatagtgatttgaaggatagcaatcattattttaaaaaactcctctaaataataaataaaaaatatatattttatttaagagaaataatatgatcataaaaaatagggtgactctttggaactctgataattttcatgttcaaagttcagtttgaccataactctacttccaccaactttgaaccttgataggcgctctaattaggggactggtcatgttgcattttctctttcagcaaaaataaataaataaataataaaaaaaaattaattttctcgtatataatcaccctagaaatcactaggaaaattcttatttgcaaattttaaccaaagtgctaaacaaatatattcttaaattggtagaaacgctaaacaaatatattcaacaatacataacttaaatatgcttagaagaaacaataatgatatctttatatattaaaagtgcctaacggcatttcttgatttcttggtttaacagaatatacttcaaaaataaaaaaatattctgttaaatctaactgaagattaacctttaaagttaacacttctctaatcttatacgaccatccttcggtaaccttacgattagtttcaaaagccctaacctaactaggatctctcactcccactcccaa

SEQ ID NO: 47314 - DNA, 877 bp, Cannabis sativa
attatattatattatatataaataaatagttgaggttaatattaggttaattcttaaaataattaatttttgtactttagaataatttttgtcagttgtcaaaatttgcctaaacaaaaccacaacggttttttcccaataaacttttgatttgacttccatttattacaattgatttgacattaaaatcatatttattaattattaattatcacccttaattaatttattattttttttctagtaaaattagttattacatattattatagttaataatacccatcattttgaagtgacagtttattaaaataaaatattattttatataaatagagaaaggagaagaagttgtttaatattaatattaatattaaaattaaattaaaatcaaaattgtgtgagagtgcctacgtcatacattcccatttggcttagaaaaatgagccgagccgagccgagccgagccatgaaagtaagccagccgtaagaggttgtagctgggggttcagtggtactagacactcacttagttgtgtactataatcatcatcaccatgtttggtcaattacttgtactttttattaattatattgcaatttagtccaccacaatctacataattgcatgtttaacccttgagtttttaattacaaacatgccctttgagtggggatgcacatttcgtccatgagaatagcctcgcgaatattttctatctaaatggagaacgaggtgggaacaaggattgttttgggaataattacatagaacactattttttgaaaaaaaattacattaatttttttttatattttttacggtattttataaaagtaacaaaaaaactgtataaaagtaacatgaacataacaa

SEQ ID NO: 47315 - DNA, 2271 bp, Cannabis sativa
tcaagcgttttgctaaaagtaaccccctgttacaaccctcatgtacttctgccagcaagaaaccatacaactcctttatacaaatgaatacatttctttcaaggtgcataggtgggatgtgttcacctgcatcgtgaaatttacatgttgaagaaataagagacagaagaaggaatttcctaagacatattttcattgcaagtaacttacctaatggaagactacgatagaaaagacgagccttttccaatgccatggacttgacgacaagctcaagaaaaaaccaagccatggctaaaacatcatcatatactggtccaacacaataacctttagccagctgaaaaaccacatccaacaaattaaaagaaaaaacatatgcaatggtaagagtaatatagtaataattcctgcatgcatatagaactggtcatcacaacatacagaaagagatggaaaaattacatcaaagagccaggattaaaaaaacagagatcttcttcatttcgcttaattattattcatcaatatctcttttcattttcatttttttttttagattggatgaaacattgaacaagtagaatatcagaggcacatccatactactagcgatttcagacgggagaatacaatctctataaagaggagtttaaccactagcctgacatcataactatgttgtggaaggaaccttattgataactctaaaatatagagttatttattacacctttagacttaattttgtatgaaaaatagtgatgatttgtggttttagttatttaatttaaagttaatgtgtattttggaagttagtaattcaaatttggagttttaagtgttttagaagctaattgaaattaaataattattttgatatagttttttgtgtgaaaaaggatttaagtgaaccattggcaaattgaatgaaaagggacagatagaagtgggaaaagaaacaaaagctgaaatttcctagattgctaaaattcatgtccataattcgtgcctaggcagaatgtatccataagtggtgccagatggagatattttggactgaaaagtgatccaattaagtgggccaaggaggagaaaagatattgtataccctttctaatttgggaatgaagctactgtataccctagctatataaaagagagctaacatgaaaagaaagagtgtttggcttatcaaaggagtatgaagaagaagaagaagaaaaaaaagaaaacacaagaatttgaaagaggaaggtaaggacaagaagattccaattacaacatcattaatctaggatttgttctcttttcttccctattttttgtattttcttattttgcatagctattctagtattcgtggatattaattttctattttggttatgtttgctaatttagctatgagctaagcttttgagacttgaatggttaaagaacccatcgtaatgttttttcaagtttaaatacattacttaagctaaatcatcgttattcattcaagtgtcttcatgattattaatttttgttgtttggccaacaatggcaattttttaagctagattcaatattagaaaagtagaaaggttagatttagtagttggtacttaaatgttgcaagagaatactcattttctagattgtacttagtgagtagaataagaatattttacttaccttccataacttttgaaaattgttacttattaattctgatttgatataggaatatatttaactagtttggagaactttatccatgaattctggaaaaatctcatgagctttttgggaattctagttaactttgtgtattttgttgaagtgttgctatagcattctgcacatttttagacataggaggattttagctcttcaagtccagttttctattgataactctttcttgttgtcatttctctagcaatcgtggtcacttttaagcatattttcattttgtttattttattttagttcacaacctccaatcaatttattttcttaaataattggttttacactaaattttccttgcaatccctgtggagacatattctatacttattattacttattactttattgcttgttcgaactgtgacacttgcacattaattttcacaacacttatactgaaagataaattagtcaacagaaccagtcgagtaaaggacctaagttttttaaagtaggatttgggcctacttgagcataggagaacagaaagtaaaaaggaaattttgacagtgataatcaagaaaaggacat

SEQ ID NO: 47316 - DNA, 2459 bp, Cannabis sativa
  modified_base (438)..(460): a, c, t, g, unknown or other
gaccttccccaggcgatgtgggattgcacagcttacccggtattttcctttacggatcacgggactactgactgtcacacttccaccagtgtaatagtggttttggtgtcatatcaccgtggtactttttaacatttcacttattataattattgaattaataatcttacaattaaaattaattaatttgatgacttatgcaaagttgtccggttcttgttcaatttctagggtaattgaactcattgagttacttcatcaaaattaattgcattaatcatgcttataatacttagtgatggaagcaagaagaaagtttcatccatctttttctttttattaactttcaaaagtaattctttacataaagttgatgatgatcatcatcatcatagtgggcaactatttatttatttttacaataataataataataannnnnnnnnnnnnnnnnnnnnnnataataataataataaaaagctaacataattaactttaggtaatcttcatgcacaccttaaaaaacaaaagaactccttaagcaacaattagataaaaataaatttatgagtatatttctaaaatgtattgtaacattgttcaataattatcaaacacattttatgcaaaaacaaaacatatacatattcatgtgatatcatttgtgtacattacaataaacatatatatagaaatttagaatgtctttatataattatataaatatactattataagctatactacaaaatgcattgtgagaaaaataaaccttttttttttaaaaacattaattagaatagtccttatataactttctttgtttgaatccaaaattgtgatttccatgaaagactttattttttaaaaattattattatttatatttccattcaaaaccgtgtgggaaattatatggaaaaataaaggtgatttagacaaggcaccaaatattcaaattaggtgatcttatatattactttacaaccacacatcaaacggttacaatttcattttcatttagatttcaagcttaagttttcttctcaatttcaaaaaattaaaacaaaaaagctctaagttttctacctctaaatttgtttgacttatataaatactatttaatttcaaactaattaattttgtctatttaaatattgtcccatatcaaaattgtggtagagaaaaaagcaatgattcattcaattatttcaaactattaaatttataactatatatatatatcagggtcacggttaggtaaatagggccaaaataacgtaaaattatgtatgagacctcttaatatacattgtaattatataatatataaatacttatacagacttatgtcactatactaatataatattttgatttgtgaaaggataacgatatatatatttattattatttttttttaattttggggccctgtaaaatgtgagttctatgcacgaatctactctgcctatcttaaaattgactctaatatttatatatattggtcataaattcccttttattcatgtgaatattattatttgttcacttaatttaaaaataaagaagggagttggaccatacaagactttattatataatagtgttttaaataacattgtagaactctcataaatacaatgttataaaaaaaaataaacaaaatagtaatgtatgaaaaccatctttaccaaagttttcaaacccattttagcaaaacacctaatcaacatgaacacaaaatctcaaaatgtaattaaaaggaaaatcaaaactttacctttcttttaacagaaaataatgtaatttagagatatgtgtaggagttcttactaagattttataagtctatagggtagtcttctttttttttttttatcaatacgatatgaatgttgttgagaatcataaggttccatctcaaaaccaattgacaatgagtggagtaacccatattatatatacaaaaatgtatccgtaaacagtttatagtgacaattaattgaataatatcttaaattttctactaattcagtaatttgcaggattttttgttaaaattcaaatttaaaaaattacataaaaataaaaggacaattaaaaggatttttagtggccaaaaactctaaaataaataaaagaaaaaaaagcaagaactaaacaaataaatgacaaaaaacaatagttaagaaagaaagacagcaaaaggtggggacccacaaagccaaacaagacagctgtttggcaacaaatgtcctatgtccactctctcctcacaaaaatctcatctcaaaattacatgttatatacaacacatatatacacctatatatatatatagctacatacaaccccattctccaaaatatcacatctttacatataaacaaattccaattctctcttcttttctctcaattcaccattttcaatttcaaagttccaaactttatttc

SEQ ID NO: 47317 - DNA, 2891 bp, Cannabis sativa
taatcactcctggtgcttagtctttcatgccacatggcttactcctgacttgccatgtgttttgggagaaattctaacaatgataataatgtatttgtgtcaacaaatgctacttttcttgcacatgactatatgaaaagtcacaagccacaaagtctagtggttatcgaagaaatcagaaatgagatttctgaaccagcaattttagcactattagttgaacgaccgacagtggtaccacatttcctaaaattaaaaccccagtacttatcgtagtgggaggattgtgagataacatgtccgctatgaacgtgaaacacatattcttgtttttgaaatagaaaaggacgatccattgatttacaaagaagcaatggattatcctgaatcagataagtggaataatgacatgaatcatgaaatggattccatgcgcatcaacaaggtctaggaatatgaaactccacctgaggacattaaaaccatgaagtgtaagtggattttcaagaagaagagaaatgttgaagggaaggtaagctttaaagataacttctagccgaagcctaaacatagtgagcaagcgtcgactatgataaaactttctcttccatgggaatgcttaaatctatgcgcaatttaatttccatacctgcctatgagatatagtgaatagacattaataccgattttctaagtggggatcttgatgaaaccattgatatggaacaaccagaagggtatgtattaccacgggaagatcaaaatgtgtgcaagttgcttaaatccatttatggattgaagcaagcctctagatttttgaatatctagtaagagtattaaatattatggcttcgaacaaaatgaagaagaagattgtgcatactaatacattaaaggtaatgttgtggtaatccatttatgttaatggcattctacttattagaaacgatgtagaaaagttaataaatacaaagaagtggttagctgataaattccaaatgaaagatttgagaaaagcaaggtatgttcttaggataaaaaaatctatagagatataaagaagagaacgttagcactttctcaagaaacttgtatcaataaggtgctagaaagattctcaatggagaattcgaagaaagaatagttaccgtctagacatagaattactctatgcaaggatcagtttccaaacaccccgcaagaggaagaggacatgagaaagtatccttatgcattagcagttaggagcttgatgtatgtaatattgtgtacaaggcctaacatattgtacgctgtaaggattgttagttgttatcaacctagtctaggtttggaatactaaagtacattctcaagtatcttagaagaacgagagatctcatgcttgtatattttggtggagaggtaaatctcactaaatatagtgattctaattttaattcgaacaaagatagtcaaaagttgaaatttggatcaatatttactcttattggaggagttgtagtctgaagaagtataaagcaaaccaatcttgtagattcaaccatggaagtcaaatttatagcagcttgtgaagcagctaaggaagatgtttggttgaataaattctacactgatctggaagtagtttcaaaagtagaaaaaccactagtgtgtactgtgacaacggtggagcggtggccaactccaaagaactaagaagccacaagaaagacaagcatattcagagaaattgcaatctactacgagatatagtagagagaggtgatgtggcaatcttggatatcatgtcaaaccataacctggaagatccattcacaaagacgctacaagcaaaatcttttatgggtcatataaactaagggagattcctagtttgtgtttagtgaaagtgagagattgttggggtttatgccctgaaaaatcttataaggacatttctgattattaataaagagttgaactttttgatatatgctttatatttaaataattaagatttattattgaatagtttatattaaatatcgaaaaattccttattcatatatcaggttgtggcttgtagctgtataaagaactaagaccacttagctatgaataaaacagtcagcaacatattaaagttttagaatctttaatcaatggttgatagtatggttcattgatgcccgttctacgctgcaagttataattgttcagattactaatgtagtgagacatttaagtgaaagtattgtatataataaaaattatgtatgacaaggaccgatatgaataaaagttatctttattaacatgacatttatcataaagacttaattcatatcaatacgatgttcaatagtagattggcctaagtcgtgagttatcatgaactcctagtcatgttattagtgtttttaattcactcattaaagttccttagagaagatgattcttacaacttctattttaagaatctaatagtgtagatgggtgggaacatgatctacagttatagaatccttactttcctaacggatctaatgttggttccttttatgtgttaattctagtactagaaagttacgagtgtaaatttagatggaattttgaataacacttccactagtgaattaatggaactaaaggatatataaagaagtaattagaagggtaaaatagtaatttaaccaaaaataattataaaccaacacattgagggctaatcagtggaattgattatattaaaagacactacagttaatcttactaaatataatcgtataattactaagagttcaattctatatttatagtaaagtaatcataaaattaataaacaataaattatttggttgatgagactcaataaataatctattttactagagcttattataggtcca

SEQ ID NO: 47318 - DNA, 1133 bp, Cannabis sativa
  modified_base (927)..(932): a, c, t, g, unknown or other
actttgtgttgattggttcaaaatacaagtttgctattatttggtattttatattttgaaattaaatatatttttgtattctaaatacattaaatatgatcaatataattttatcaatacaactttattattagatcaattgttttcaattctatgagtttcccatttgattttaaatatttaattacatatagctaagagcaatttggtcaaagtgatcaaattttattttagcttaatataataatatatttttaaagagatacattaccacatgagtattatattatttattatgttttatttttgaaacttaaaaaattagtgtatttatataagccaaattgtttttttttttccactcctaaactatagctttttacacttttatcttttaaaattttgtgtttgaattaatgttaccatttgcatattgcttatttttaagtagcacaatgctgtgttgctagtatgacttaattcagggttctatagataatatatatagataatagtttaataataaattatgagtatatgtatataaatttttagaattaatattataaatatacctttgttgctatgcctgtaaatatacccttgtaatgtaattagtgtagctatgcttataacttgtgattacatgagcaaaccgtgtaaaaaatgaatagaatgcaattaaagaataaattttcaaaagttattataattcaagaaattctagtttggtaaatactattttacaccttttgttttgtaaaaattattaatttgaccttttgttttattaaataacaaattagatcctgtattttccaaattaaaataaaacctaataataatccgatctagagatgttatgacaaaattttgttcgtgttagaaattgtcttgaagttgattatattaaaaaataaaattatnnnnnnttgagctcatagtcctatttttacaatttaacaaaacagagggtctattttatcatttaacaaaacaaaaggtccaattgataacttttgtaaaatacagggtccaaaatggtatttaccaattcttatttaagtttgagaaacaaaactttacaagaccaatattcattaaatataaaaagaaaaacaataggctttctt

SEQ ID NO: 47319 - DNA, 1185 bp, Cannabis sativa
aaatatgattttcttgtgttatttttgtgtgtatggttgcttttttctttttagtaaacttttgttaatagctgtacattttttattttaagaaacttattatataagagaagaaattctctataaagaaagttttcttaactttagaaaaattgacttttatcttttattagttgttaattttaattttactatgtatataactaatcatatattctttatatgacagaaattaaagtggaaatcaagatcttagatttatttagaaaattttgcaatttgacattgatctgtcactgcagagtacaattttgtcgttgtatattagggtattttttagaaaagttttgtacaactgtgtaaacgtatttgtggttgcttctaggatttttatgttctaaaaatagaacgtagtgagcagccaaatatttctcatctcttttagttcatattttcatatcttagttttatgggaagagtgtttcttttgggaaatcctagatcattcaactaggttttagtttttctgtaatgatcgaactcttactgttcatagaataagttgaagagaaacttggaacaagtgtagatcttcaggagaagacttttctaagtttcatttcgggaggaagtgagcacacttcagtaattgaagggagttcactacttggtgtatatcagagattatattagcgaggtagattacaaagggttgtaacaaatcattagagagagtctaatttttttagtcaattgcttttgtaatgtttgatactttactaattgattttattctctagaacatggccttatggactagtaatgtttgaaagaatactgatacattctgtcaatctttaaattctacacattttatttttgtttctattctattatagtaagttcatgtttagcagtaacaaatttccaatttgcttgtacagatctttacggttgcatttttctttaattttattaaaaaaaattattggcaaatgcaaaaatacgatttttcaaaattatattttgtaaaatttttatataaaactacatatggtatttattttttttttcgacgaatcagtgattttgtattgctctaaaccaatttgtacaacctataggaacctcaatagaggcccaaaaatgatggagatcggaagagcgtcgtgtagggaaagagtg

SEQ ID NO: 47320 - DNA, 1613 bp, Cannabis sativa
ttgtaaccaccgaatggcagcacctgagctatcccttcttccttatcgccttcggcaccagaaggagtagcatgatggaccttgccctggtcctccacttcttagacttcaatgtccctaacaatatcttcctcgtcaatggcaggacgagtttgttttgccctagctagagtggctaaggggaagtaggtcggttaatgaagatttcctaacagactgtttagttcgcgccgtcatcctacgtttaggcagagttttatcagaagtgtgcctggcaatggtcacattaaaatcagcaacatgttttcccgcaacagcagggcttgggcagccctcgagcaaagtaccaaccacatttggatgaactctatacgtctaattagcaagaaggtaacgcctccaatctttcttgaggtcccagatgaaacgaccgtatgtttgctacttactttccaatcttcgaagttagaatttgaaagatcgtcactagacgaggatgggctagcacagagacgaggatgatcctcatgtaggagttgaagcaaatcctggtcgatatgatgtttgcatccccaaaactcaccagggttcatccacaaaaggtaggggacaagagagtgagagttggtcgaagtgtgagagttggtcgaagtgacgaataccgactagtttcgattgagaaatcaaaagcgaaagtttcacctagaaatagaatttttaatcccaaaagttcaaaacttcaaattaaaatctgattttcactaaaatcttatggatgaatggaaatgtacgttgttaggtcaaattcaaagcgcagtcagataatcaaatgttatggttaagcataaatgagatttttaagtcctaaacttaggtattctatcgttaacctagaacagtttaagaacaagcgagattcatagcaaaaaattcagaaattatacatgcatttcattgcaaatgtgtaaaagaaagaaatgaagaacttattcactgatttgaagctttcttactttactcagatagaattgtcagaagttttcctatgaattcctcaaaggatttgggaagaaatttggctagagatcttttgctctggtgtttacgagttaaaaaggctaaaaggattaccaggggtctttgatcatatttataagtagtatgaaaaaagaattaatcatttcaaaattcaattttttttttaatttccccctaaaagtatacgttacgcactcattacaggggagtgtaaccgtcaagcacacacaagtatcgaaccttaattcgaggtacaactgtcaattagcattaaatggacgattattgaagagacccatagtcagagtcacatcggatcatcgtcggacatcaaggacacgcgtcacccatccggacaagactccaggttgagtgaagtccatgtgcgacaaggaaggttctgctcagatttaggggcaaatgttatcttaaatttttgcaccatgacatggcaataggaatggatgaaacgtgtcccatattttcgatacctggactgaggaaagtatcccatgactgactactcagcttctgtgacattcagacatccgagcaagatggttgagaagatgttc

SEQ ID NO: 47321 - DNA, 3556 bp, Cannabis sativa
gacctggactcaagaactgggtcttagacctaggacccgaccgtggacttgggacctgacccctgacccagacctaggaccagacctaggatccagggcccaaactggaacaggatcgggacccaagaccaagattcggatctggactcgaggctcggacccgaatcgtagttggtgtttagatctgggatccaaactcaaacccgtacccgtacccaaacctagaccgggatccagacctgaactcaaacctagacttatactaggactcggactctaacctaaacttggactcaaacttgaactcgaacccagacccaaaatcataatcgaaacctaaatcggacaaggaccgggaccaggatttccacctgggataagaacaggacctaacctgatccccaaatcagactagaacccaaacaaggacatggaccaagactaggacttgggatccgattcctaaaaaaagatcgaaattgggatcaagtccaagagctagactcaaacctagacccggattagaatcagggtccaatgtcagacctggacccgaacccagactaggagctggactcaaactagaactcgagagatgaacccgaacccgacacctaggactcaaacatagatgggggacccagacccagaacctgggcccccaaactagggctaaaacctaggcctcagaactagattgagacacgagactcaaacccagactaagatcgggaccaaggacctaactcgagacccgacccgaactgggactaggatctagacccatcatttggaacctgatacaaacaacaccattagttgtgatgaaacctgacaccaagtatggaaaactctacgaattcatgaaatttggaagtggaaccgcgacccaatgcttagttaagcatgaaccgttgtataaaggaagatgccataaatagttgtggaaatccatttgataagtcaggtttaatgccacaaggaatacttcttgataagttcgaatagttctctcaagaactcaagaagaaaacctctctaaattttattcaaaattaatttgattttgcaaattgtttacaaggctttatgtagcaaacttacaaccaagaaaaaaggaaactaaaagaaagaaaattttccaaataaaacaaagatagaataaaggaaacaaaattaaaaaggaaagctgcgaaatgcgttgaaaaacgtgatcagctcaattttggtctaaattgagtctactttgatgagaagcacaaatctttgttctccttcagtgttgattgcggtctcctcttattttaaaactcttttgaccaagttgtgagttcttatttgaatctcttggctcacgcccttgtcaccaggccattgggacttaacttgtttctcatgccttagtgttttcatcactgtgctccatccaaattcgggtcctacgtctcaattcaggactaggcttgggtttgggtctcggtcctggtttgagtctcggtcaaggtcctagtgtatgctcagttgtgggtcctatatctttggactatgttcgagtctgggttcaattctcagttcggtgcaggtcccaattgggttgaggtattggtctgggtctagatcctggtccgggttcatgtctttggtctcaagtccaggttttggtctaggtcctagttttggttttggttcaggcttgggttcatctgttgttctagttttgttcccaagtctaggtccaagtcttggtccttgtccagttctagttctggttccgtttccaagtttgggtttgggttggagtctgggtccatgttggggttcgacttctagtccgagtctaggtccaggtctagatctcggtttggtttcggttctgggtcaggatttgggtctgggtctgggattgggtccaggtgtgggtcattggttctgatcccaatttgggtgtgggtctgggttagggttcgggtttgggtctgagtttttgtttgggttcgaggttggatctcggtctagttttgagtttgggtttgggtccgagtctgaggttaagtccaggtctgagtcttggttctggtctgggttagggcctgagtttcggtctcagtttgggtctggggctggggccgggtctgagtctagttctgggtctaggtactagtcctgatcctattccagagtcccaatcttgttcttgttctggttctggttttgagtcctggctttaggtttggttcgagtttgggcccgggtcctggcccaagtccttgttcgggtcgtgtcccatactgagtcctaaatccagacaccgactagtggtcaggtacaagtctcaggtcctaaatctcaagtcaagatctggatcccactctcaggtcacagtttggtttaggttcgggtctcaggtcccaaatctagatcctgggtcccagttctgggtcttggctttgggttagggtccccaatccaagtcatggtcctaggtcaaggttcaagtcccagctcagttcaggtttagggttgggccccgagtctcagttcaggttttgttctagtgtgggtctgagtccgggtctggcttcaggtctgagtcctggtcttgttcctgttctaagttcgggtctgggtcctggtcttggtcctggtcccagctacttctggtttcggttcctgtttcgagtcatggggtacgggtttgggaccgagttttagtccaggtctaggttcaggtccgggtcctggtacagtttgggtaaaggtgcgagtcttggttcgggtttgggtacgggtcccaactctagacacttactacaactcaggtcaaagtcccaggtctaaatctgaatcccaatctcaggtcctagtctggttctagttcgggtcgcgggtctttagctaggtcctagttccgagttcgggtctagggtcgagtcctggatctcggtcctaattctgggtcccagtccctgtcatggttacgaagcttgagtctcgggtccaggtcccccatccaggttcgagtcctaggtcccgatccaggtcaaggttcgagtcccaagtcctggtaggtctgagtttgtccaggtatgggttcaggtccagatcccagtcccgatccaagatcgggtttggtttcaagtgaactcagacccggtctggttctcaagtcccggtctgggtttgggttcggtctggttcttggttctcgattcaggtttaggtcccaggtcctaggtgctgggctttatccaggtccctgtctaggttctagtctggatgtgggttcgggtttgggtctagttccgggcccaggtctgggtcctagtcccaaccctagtccagttccaatttcggttccgattgtggttttcggttcgcgttcgggtcgggtcagggtttgagtcctggtccaagtctgggttagagttagggttatggtctgatctggtctgggtctaggtctgagtccgagttttggtgggggtcccaagtttgggtctaggtgtgggtctagatataggttctagagagggtgcgagtcttaagtttcgattta

SEQ ID NO: 47322 - DNA, 2871 bp, Cannabis sativa
aaatttaatgtaagcccaaataaaagtctaacaatttgaacatcaacaaatatttttggccaaccataatatattttattactgaagaagcttatactttcaaggcatgatatgtttctcaactttgttttttatctcttgcctttactagctgtcatctctttcatcatcaccaattgtaactgactcgatcaaatttttttgtatataaaaaattattcctatgaatctaaagaaatttcggcatactattatatgtttttatcttatgttttagttaattaatcaagttggtatgacttgtgatcatttattttttacttggtccacacacatttacattgattttgtaaatattatcataattatatgtattctatttattttatttcatgtacttttttatatattacccacttaaatatcttaataggatcccaatgtacttttaattttaggtggcatcttaatatttttccattctttattatttactttcccgatttctaattgagcctaaaagtattttatctactttcttattgattttaatttattatttatcatcttttataataataatttcaaaaaatatctgatagcaccccaataataataaatgactacaatttataattaaatatataagtgcatttgtaaaaaaaaaataatataagcaatattattttaagaaaattaatataccttttcgatttgatttggaaaacaatattcactaacaacattttatattataaaaagtatacggttaaattaagatgcaattattctcaattgattatgctataaggatgtgaagaacataaaaaattataaatcatgcatataaaaaaagaattaataagttttcaattttaataggtaatataaaatatctctcattttttttttaagtttattattttgaataaatcactaagcttactatgaatttttgaacttgttttgtcttttctttgtagataataatcttgcttaaatttgctttaagaaaaacaataaccttaaatgctcaaattttgtaaaatttagtataaaaagatatgtgcacgtatcattattacttgatacccattacttttttaaatttattttgtttgttgttattaatttacaattttattatttatctaatccaatactaattataaaattgtacgtatatattattataatgttaatactaattttaatttattaatcaatattaaaaataataattttatatataactaactgttatatattttttttttaattaactataaaagtgttgccttagatttttctcaaaatacatggctgcggttacgtatgccacatggaccagaaggacacctcacccaagaattagctgagtcatatacagacagacaagtgtagttcggggggtgagcccccagagaagtacataaagcatgtccttcctctccgggagctagaaatataataaaagcatctttgggaggaggaaaacatattcgaacagtcacctcacatttaatgcagcatggggaaagcgtctaagaacgtccatatgaggacgagtcagacaacgtaagcctcgtttacggcgattacacaataatcaaaggggctagtgacgactccattatgaagaatcacatcaatcaatgaaagataaagattaatctcacctaatccttgcgacaactacgacataggttatgcatgtcctgttttctatctcttgggaacttggactcatacattactggcactcaaagacaagtgattccttttgaactatccttaccaatctctataaatacccctgaacaaaatgggaagggagatcgatcaatgaaaaaagaaaacaagagagagaaaaaaactcaccaagaacattctttgtataagaactctcattaataataaaggctcgtggactatgctcattaatgcctgaaccacgtaaaaattacctacattaattacccccaaagctctcatcactatctcatttaattggttgtcgaaaatctcagtcaacaaaaagaaatataaagtgtttgattatttagtaagttacaaaactaatttgtaacataatataatgataaaaagtaagtatgtattgaatataaattatttttaatagccatttgtataggcatgtcatgtatacatatgtaattaatttttattaggaaaaggcctcaaccaccactaagagtaatgaaactcatcaaaagaggtggcgagaatgcattaatgagtagcatctgctactaataaattctgaatagaaattagaaaattcgaccatcaaacagtgctagaggacgatgtaagagcaattttagtaaaggtgtggacaacaatattaaaatcttcagaataatgtaaaaaataagtatttttaaaactattacaaagattgggacacatctggagggaaactctaagggatactcccgaatgtcaaccatgggaggactcagatgcctagcgcaggatgagtgccggatgtctaccaaaagatggcgtggtcacctttctaacacataattagatattgttccctatgtcaggtcatggtagtgcgcacaccaacaaaagtatacatcctttttgtccagtagtgcctctaacattgttctttacaggagtaacttttgtgtgacacgtgttctgaatcaagcggtcccttatctgcatggatccttcgccccatgtgctgaatacctactagtgggcctcaaagtcatgtattttgtgtattgaccccattagtgaccatattttttcatagaaacccacatggatcacaggtatgcctggatccaaactcaagcttatataaaccttggcaccccttcgtgcaaa

SEQ ID NO: 47323 - DNA, 3222 bp, Cannabis sativa
ttcggatgcacgtattaatgtgtctaagtcaagaatcatagtggagataggaaggacaactgacatcatcaccacaagaaggattcaactacagttgcggaagatagagacagtttttcaatggatggagaatcattctccatctaagattcttcaatgaacatgggagtggattcttgactccgaatgcacgtattacatgtgtctaagtcaggaatcattttttgattataaatcaattgacaaagataaggtttcaatgggaaatgatctttcatgcagggtcattggaactagaaaggttgctatcaaatagtatgattgtagaatcaaggtgatgacgaacataaggcacattcttaagttaagacacaacctcatatccctaggtgcacttgaaggtgaggattatgaatacaagtccatgcacagatgtttgaggattaccaaaggttcactgatagttatgaaaggtgaaaatatcaatagtctatatgttctccaaggagaaactgttccaactggagaggcaattttgatgaaagggctagaatcatatatgcagctatggcatcacaaacttgcacatatcagtgaataaggtcacaaagaactgcacaaataaggtataattaagaatttaaattcttttgccttatcattttttgaagcttgtgttttagagaaacaacataagttgaaattcactttaggaaggcatacaactaagaagatactcgagtatgtgcatgctaatctttggaggccataaaaagtgtctactcactctagtaagcaatattttctttctatagttaatgattatagtaggtgcatttggacctatttgctagcaacttagaataactgcctggaacagtttagaatttagataactcagatggaaaatcaaactgatataaaagttaagaaccttaggacggataatgttttagagtttattgactcggaatttaagatgttgtgtcaagagtatggatcactaggcattgaactgtagtgaagaccccagagcaaaatggtgttgctgaaaggatgaaccgaatactgttaaacacagttagatgtttattgttatgttccaggtttaataaaccattttggggggaagctctagctactgcaacctaccttataaatagaagcctaaatcgtgttataggcctgaaaaccctttatgaaatgtggtataacaaaatcccaaacgtaatgcacttaagaacctttgggtgtacagtatttgtacaccgatctattaacaagctggaacctagatcagttaagggaacttttctaggttatcagtcggcgcgtgatagaattaaaaagggagattcaccctccaaaaaggtttgttgaggcagacttgatttcatttgcattggcgatagtataacaaactaaaattaaagagcccaaaagctacgaagaggaaattttaggtgaaaacgtcaaaatggctccaggccatgtatgaggagatggattcactcttgaagaacaagagttgggtagttgtactgaagccaaagaataaaagattgtggagttaaaatggaatctcaaggtaagagagggaatcaatgagaatgaaccaatgtggttcaaagccagattagtggctaagggatttacttaggtggaaagaatagactacactaaaatcttctcacatgtggtaaaatactagataataagattgatgttgtctttggcagctcaaatggagtttgaagttgaacaacttgatgtttatactacttttttgaatggatttttagatgaagagatctacatgaagaaaccacctaggtttcaggtggaaggaaaaggagttgaatgagtgtgcaagttcatcaagtccttatatgtttgaaacaatcctcgagacaacggaataaaagatttgataattatatgcaacaaattaggttcatacaatctatatatggatcactgtttgtatttcaagaatctagagcaacctatagctgtgatgttattgctctatttggatgatatgctcaccatgaggaaacacaaatcaatgatcaaaagtatcaaattcaagcttaagagagagtttgagatggaggagcttggaccagttaaaaagatacttggtattgaaatttcaaggaataagaaggaagggacaatcgacttaaagaagtttaggtacatgaagaaagttattcagaagtttaccatgtaagatgcaaagagtacttgcgttccgttaggcagacaatttgttttattgaaggaacagtgtttaaacaatgcgaaagagaaagcataaatgaaggattaccctatgaagtggttttaggattcttaatgtatgtgagggtgagcaccagactttccataactcatgctctaagcatcctaagccagttcacgtccaatccgagcattgaacattggaaggccctcaaatggttactaagatacttaaagggcacttggaattatggtctcacctatgagaaagaaaaaggagaattagaattgaaagggttcatggatgttgactatgcctcgaatagagatactagaaaatcaaccacttcctacaaattcatgacaaattggaactgtatatgctagaaggccgcgttacattccataattgccttttccaacacaaaagctgaatttatggctactatagaagcattcaaggaagcgttatggcttcagggaattttaattgaattgaaacaactgagaggaggagcaattgtgtactcggatagccagtcatctatacagctttggaagaacccaatttattataaaaagaacaaacttgtggataaaggacactattagattagggagaagatagagggaggattagttgaattagagaaggtcagatcagaagataatcttactcatgttgggactaaagtctaatggtaaactgttgggattattttactaggatttagattttctaccatgtatgttacattaacatctgaaatgtgaatatctcttatacaatgaaacaaaatagataagagtttagaaaaccttacattgattggagtggaataatatgactccttccattcagatttctagtccacgattcctttctgtcacagagcattatcaagatctgaacctagatctccttctctccttcgggttggttaccaccatgttctgcactatgattgagtactt

SEQ ID NO: 47324 - DNA, 1125 bp, Cannabis sativa
tgtgtctttacattgctttatcatatttcaatcgttataaactacttgtcgcttactaaattagactaactatcgttggctaaaagcgaggtcaaaaaagtcaaacttaagtacttgccaagaatttgtgagttgattgaaaaaaagggtggttattatctaacactcatctacaatagccaaatgagaacatggttaggaaattctatgctaaccttgaaaataggattctgaacaagaaaaacaagtttctataccttcttatatttggggaaatcgatttcattttgtcccttccactattagttgtgtcttgaagatcaaaactattgccaatccttttttcaatgaggagtataagccttcctttaaagaaataggatctgagatcactagcaactctgagtttgtctggaactaaaaagagttacctgtcataatgctcactaagttctatagagttctttacaagattgcactatcaaattggtgggctagttcacacatctctactatcaactatatcataggaaaatttctatttgtattaggtagtggtgtcagtattgatcttccctccctcatgtatgattggattgtaactctacttctaccaaaggagttcaacacactttgccctattctagtttgattaatcctatggtgaaatgggggtttcctattgtatttgaacaagaaaagattttacttgtttctactcttggtaaaaccttctctcttgtgtgtggcaagcctttgcccttatccattatggatgtttttgctactggtgaagctttagcctctgatgtcccaccatcatcgacagctctttctgtacctctagaagggttcagtcctgcatcttagcaaagtcagatgttttccctggtcaataattttgctaactcttatgcactcgatcagctcaggaaacatcgatttgagaaggttgtaattgatgtattgtctgctatgactaaggttttaaaatctttagaggatggtctttttgttcccactagtggtgatttttcaagttctttagatgatgatggtcccttctatgtgcattccccagaaatgtctccatctaatatgaatgcagatccatgtgttactgaa

SEQ ID NO: 47325 - DNA, 2087 bp, Cannabis sativa
catctctcttcatacatataaacatattattggataatattaaagagtcaacatatgcaaaagaatttatggaaagtggaaaataataataaaaaaaacagaaaaaaaagaataaataataataataattaaaaagacaaatcctatcttttctactcctatataagagaaccttggcatagcatactcaccaccatcaacgtgacctccctttcgctatatatcttcttctcttttgctctttgtaaactctacaaccataatatatataatacatatatatatcggactatatagtcatcttataatctttattaattatcaccatggatgagcaaaaaagaggtttggatcaatttgaatatgaagatgagaatgagaaatgggttaatgattcttctttggatcataaaggacaagttcctcttcgagcttccaccggttcatggaaagcctccttttttatcatcggtaattattaacttcaactaatattatatatattgtcccttctatatcatcaactaataatgagtttttatattttaacttctagtttattcttcttcacctattcagtatagcttaaatttttctaacttttcttggatttttttttttttgttgctttgattagatttaagttgtcactatgtgagcataagtatataaataaaaataaaaagtaagcgacaataaattctgtgtcacacttataatcatgttaaaagaaaaggagagagagaatataataaagaaaaagtaaatgttttaaattcatgtgtaggctagatatgtttatgtgtatataaacaaaaatccaagcaacatcactatcgcacttggataaaatatcaatggcgtatctttccacagatcgaagaggaattaattaatcaaaagttaatatataatccaatattagtaattacaaaccctttaattaaactataataataagtggtttattcatggtgaatgagtggtatacatatatacatagatataatagaattgaatgagtggtttgggagaatatataatgatcagtctttagagaggaggaaggaataaatactattatactatattagacttaacctaaggctgcagtggatacaacttggaagagggccctctataccaccactatatatatagtcaactaaatctgatcacaatatatgtataataatagtaatagtaataataataataatttttctgaaaaattcctcattgaatggataaagtttaaaatggctcgctcttgatgaggcgagagtttggtgggtggccagatatcatgcaagtcttttggacttgttttggcttttgcttaatgataatttatttccattcaaaaaaaattaaaactagtatattttcttagaaaaaaaaaataaataaattaaacaagtggccctttttcttagattgaattagcaaatctatatagtgtagtattatttgcatgtaaatatatataggagtaatcatataggcttaaattcatattattaattaatatagagtttccatttcaaaaaaaaaaaaaaaatcatatgtattaatatattgtttttattacatgtagttggatatggcataggcaaaaaataaatatataattcttttttattatgtcgatcatataatgtttagtactgcacgaaggtggagccagggaagaattatagtgtcaattcttttgagtcaaaaatagatttaattatttggtttgattattcaggcgaaactgggttgtggatttgtgtttttattagccattagttctttgcctttatcatgttcagtctctgttcattatagttattatacacagacatatatatatatatgtatatatcaattataattattagtccaatatatataacattttagagaaaaacatattacacatttcttgctcacaaaagtggacatataatagtggatggtcctactctcttttcatggacagtatctaaagaaacttataagcgcccacaataattaaccaaataacataacttttaaatttttttttatagaacataatttttaaatattaaaatatatat

SEQ ID NO: 47326 - DNA, 3276 bp, Cannabis sativa
  modified_base (3097)..(3100): a, c, t, g, unknown or other
  modified_base (3224)..(3228): a, c, t, g, unknown or other
tatatatatatagtcttggtcaagataattgatcatatattgaaacaatgccccatccctttctttcattaaggaagtggaatctctgctcttcccatatccttcttctccttgtcccttttgataatctaaaaaaaaatctcacagaaaaaagtaataataaaacaattaattaattgaagaatttaacattaaaaaaaatcaataattaatatgtgacttttgtttaataatatttatattaatagataatgggacaatgagacatagtatctagtaatgcatagcctaaaaagcaggcaaaatcttcatatatatatttaaatattctatattaatatattttatatataatgtgtggtgataatcgatatagaaaattaaatatatgaaattaatgcagggtatggaagcatagaatggaagaagagtctttgtttgatgatttgatatattattttggaatgtttgatttttacattatactatattttatatatctatatatcaatattataagtttatattaaaaataagataaggacgtaataaggggtagctagattattggctcttttgtcctgatttattttgaaaaataaactcatgaaaaaacaccatctactatactatatagtatatatattatatatatataattgtttttttgtaagaaagagagttatgttatgttaggttaattaattattgtgatgtcaaaggatctaaatttcagtgttttttctcggagtgataaaataatgtcttatcctcacattacttaaacaaattaatgttttgttttctctcatttataataataatattatatatactctgtatatatacatttacacacgtagatatatatgtatacatgttcattcattcattcatatatataaatatatatatatatccacatttcccaacgccctgtctgaatagttgttttctgttggggttgaggatgaagcagaggatttttttttttttttttaattaagagcactccaaattgaattcgttatctgcaaaatatacatattgtaatgcatgcatttgtataaatatagatatataatatgtatatatgcttatgcatgaacattcatatgaaagtatatatagcatgcatgcgtaaaatcacggatgcccttcatcgatcgatatgtatttatatatatatatatatatatatatataacttagctagtatatagttaagtaaaattgtcttaagtataactatatatataacttacaaaaaaaataacaagtgtttgaatatgcatttatgaatatgatgagtcggttttattatcacaacacatcacttagctaaaactagctatatgtttataataattctatataaaattctatacctttgtggactataataagttttaaccataaatattacttactagttactataagtcttgccttttccataaatatatatacaatatatgtacgtatttatagtgtaaaataaatataatagtagaaaaatagaaagaaaaatgataagaaaatttggaggagggagaaagaaatataggtcaaatgaaggcactaattaaggccagggaggcctaaaaatgggaaattatgaaaaagtgggaaaggaattgcatatttgcatatatagctttaacaaattatagcaaaattaaattctaactttctctttattacaaagaaaaattccccatattggtatcacgtgaagccattgtcacaatttaggccttgaaaaagtaattctttgtgttatctttacatatgaaacccttaataataaaggaaaaaagaaaaagttattacagataagttgataaatacctctttttttattctttaattgaaaatacatttatattaaatttcattaaaatgtatccgtgagttgtctaatataccattacattccacttaagtctagcacataatttacattaatttaagggatataataaggacattatctataaaagtggatatatcttaaaaaatataaaaataaatgtaaagattaaaataaataaagtaaattaagtatacaatattacttcctatacaagcttagtgatgatatatgtccactctgaaattttaatatttgcatttttatttataatctagtcatcttttaacttctgttttttacaattataagttttgtaaatatttttatatttaattaaactctatactctaattaatttctttttggtgctgaacaaaatttatgagtatgcccctgttataatatatagagtaaaacttctatttaataatacattgacatcaccaaacaaattatattctaattaaaaggttattaaatagagttacacaaaaaaaaaaaaaattaaaacaccaaaaaatatcaatgtaacaacgatagcaataaacaatgctttatgctagctatatcataataaaatattttcgagtaaatataatatttatacatttattacaatatttgaaataaattattagttttacgtaattaaatttataaactatacatattttattaagatataattattcttatatttgaaaaatgtataactaattataatttataagttatttttatttataattggtccaaattatggctttatttttttgggtctttttcatttttatactttaaaataattttttttgtatttttacgaaattttacataaaaattcctattgacgaagcagcctaaatcagaacaaaaaatcgtatagcaacctacataaaaactattggagaacctaaaccataaattttaaaaaaaaaaataaaaaaataaaatagtatatagagtaattttcctatttttctttttataatgaattaaaggttattttcaaatagactattcttaaattaaaattctactatatattatattaatattttctttataaaatttgtgtacatatatacactttctctagcagtactgcaccctgctgtaaaaaaaacctagctatatagttatagtcttttatgcattactcagctttttatatttgatcaatgtagcaaagatgcttttgtatataatatatatatatannnntatatatatatatatttatatgcaaccatagatatctggtagcagatgttttcacaatacgcactaacatttaggtgcggtttagtagtatttttgttttctaattttttaatcacaaaataannnnnaaatttttgtttttaaaaattttacttttgaaaaataaaaatgcgttc

SEQ ID NO: 47327 - DNA, 1194 bp, Cannabis sativa
  modified_base (586)..(591): a, c, t, g, unknown or other
ctttggcactttagataatcaaaatattttttaacaggagagtacctgcaaaacaaagttagtcataccaaacaaaactcctcctgagaaacacatcataaaaccgaaatgaaaagctaacttttaatccaaaggtaaacacaagtactgatctcaactccccctggaaaaagggtccagagttgagaaaacaataaattaaaaaacaaactattactccctttttttaaattaaaggaccaaagacaaatagttataaaaatatgtccaacgaaaagtgaaaaagaataaaaaaaaaaaaaaaacttatgccccacttgatcaagatggacagttgcttggacatctctagctgaacctcctccatggcagctagacgattattcacctgtataacttccttcttgacctcttggacatctgcaggagcagaactggaatgtaatgaccgtattttagaatatggataagtaaaggcaattagtattaattattgatatttttatagttaattatgaatatatttaattgtgggtcctcattattaaaagtgggcattagagttataatttctcaattctggagnnnnnnttaaactctaggggtattatttgaattatatatgaattatgttatgtttataatttttgctcggcgatgacggtaaatgcgatggatggccatttgaataacatgggtaattttagaacctttctcttagggtgttcgctgtttcttagggtgttgtagtttccataagagaatttcttctcttacaaaagtttccatacaaagaaaaggacagctgaaatagaatatttcctatgatagaaagagcaataaaaaaatttaaataaggtgagaaaatcggttttattaaagccaaaaaattgcaccataaataaaaaatattttagcatctaaattgcaaaaaaaaaagactttacatatccaaaatggaatagagaaacaaaacagttaagaactttcttcagtttgaataattttccagtacttttcgaaagcaacaaagttgtttagcttcactgatggagcttaaattattatagatgggtttttgcatttttctaaaataattcatccacccccagagtaaccaccatctccaatattctgagttggtgtagataaaatgagatcttacggtgttaaatgctttcaatgaataaccat

SEQ ID NO: 47328 - DNA, 3239 bp, Cannabis sativa
aaataaagattatatatatgtacttaagccttttttcttcaaacattcatatatgatatataagtaaattgaataagagtagatagttctttgattgaaaagagtgaataatttgctgaggtgttgagttctgcaaagcacatttttgtggttgattttaattgattgctaaaccacgaaagtggaaatatagtcgtcttaaaggtaccaaaattaatggggagaggataataataaaggtgcaaaatatatatattatgttcaatttgatactgataggaaaaataatcctttattagggacttcagaatttgataagtatgagagaaacagagtactcaatatcaaaaaggaaagagagattgaaaatgctctgttttattaatctatctcgatcattacatttgatagtatatatacacaagggagctgagttagttgaaagacaactaactaagcttaggccaaggaacctaactaactaagctaaggctttaacaaattgtaacatacttataactaacaccctactcgtaatagcacccctcaagatggcgtgtatatgatacactcatttcggagacaatgttgttgaaggatgagggaagtcaggctttagtgaagatgtcagccaagttcttttctgattgaacgtgaagtagcttgagggtctcttgcttgattttttttttaatgaaatggcagtcaatttcaacgtgtttcgtgtgctcatgataaacagaattttcattgatgtcgatggttgcagtgttgttacagtatagagacgcaggcctgctgagtgatatgccaaaattcttaagtaaagcaatgatccaagttacttcacaggttgcattatccttggctcagtactcgattttagctgaagatcgagaaacaacttgttgttttttttattttcacgagacaagagcttggccaaggaacacacagtagccagatatggagcgacgtgtatcctagcatgtcccccagtttgcatctggaaagaaagagagttgtacattggagggggacaaactaatttcagcataggctaatatatgtggagatgtgttcgaagggaagaataagccttgtagaacacggtgagtggcttgaaggtgaggcactcttagacaagtgaggaattggctgagatggttcacagcataggaaatgcttggcctggttatggtgaggtaaatgagtttaccaattaggctcctgtatgttgtggggtctggtaaagcttgagattaggttccattggagtggatgatggttttgctccaaggtaatatttgtcagctagtagttgcaaggtgaaaggtctttcaaatatcttttgtttggttctgcctatttccaagccaaggaagaacctaagtgagccaatgtctttaagtttgaactttgtgtccaaaaattatttgaagtgagtgataattgacactttgttgctagctacaatgatatcatcaacttagatattaggacaactagcatgattgttgttgttcttttaatgaacagggagttgtctgaaagggattgatggaatccttcaattttgagagtggtattgaatttttcgtactattatttagaggcttgtttaaggccatatatactcttgttgagtttacaaacagtgttgggaggggcaatgtaacctggtggagttttcatgtagacttcttcatggagatcaccatgcagaaatgcattgttgatgtcaatttggtgaacattccaattgtatattgcagctagtgccagaaaattttaagtgtattgaattttactatacgagcacaagtttgatcatagtatatgccttatttttggttgaatcctttagctacaagttgagctttgaatctctcaacttctccttgttagttatatttgactttgtaaacccatttacgtccaatggctttgtggccaggaggtagtttggttacagtccaagtgtgattcttttcaagagttccaatttcagtatccatggcttgaagccaatttttgaattgtgaagcttcagaataggaaagtggttcgagttgagagtaagctgcaaggacagtagccctgaattggggacttaatttggcataggagatgaattcttcaatgggataagttgtgggtgtaatgtgacagacatagtctttcaaatattgaggtctagagatgtgtcgaccagtttttgatggggatggccatcatttggtttatgtgagatggagaatgagttgttgtcctgggatggatgttcaggaatggcaactgattcaggtggtgaatcaagaggcatattaatggtgatttgattctcaggaacaattgctagtactgaattctgcaaagtacatttttatgattgattctaattgattgccaaccacgaaagcggaaatatagtcatctcaaaggtaccaaaattaatggggagaggataatagttaaggtgcaaaatatatcatggtcaatctgatattgataggaaaaataatcctttattacggacttcaaatttggtaagaaaggggaaaaaaaggaaaaggtagggaaaggaaaagattaggaaaaaaaaggaaagaaaaatgtgaaaaattgtgatcacaaaatactataaatgtttatttgtaatcacaattttaagttcaaacaaataacaaccatgccttatgtaacaaaaaaaaaacaataacacccaatatgactgttataggagctttaatgtacgtgcgtaaaaaattaaattaaaggacgtgattgttatattatttattagttaaataatacaatattaaaattaaaatggtgatattaagagattgatatacattattatttactgagatttttaaaaactaatataatgagagcttaagaaataataaagaacagtagcaaagaagatgaagattttttatgtggttcaggcgttaatgagtcttaatccacgagtccgtctattagtctcaaaaggcgtgtttgatgtttttacagtattaatgcaagaaaccctaactgtgtactttttgtttctcttgaggaagaggaaagcttagagctattttagtagagtttcaactattttggttgtcctcccccttcgtatggaaatagaaaggtatttataggctaaagggcatgtatggacatgcccatgacctgcctaggatttttgcaaaaattcgactaatggttggggtaaaatacat

SEQ ID NO: 47329 - DNA, 1269 bp, Cannabis sativa
agatcttctcttcaagtgtgccatgtaagaaggctgttctgacatccatttggtcaatttcaagatcatattttgctgcctttgccatcaagattctaatggatgtctgtttaacaactggtgcaaatatttcagtgaaatcagtgccttccttttgtgtaaagcctttggctacaagcctggctttgtacctgacttcaccagtaccagtttcatcttctttgtgtctaaacagccatttgcatccaacaagcttctgaccctcaggtttgttgaccacaatccatgttctattcttcttgagtgacaacatttcatcatcaatggcctcgttccatttcttgctgtccttgcaagtaattgcctcctgaaatgtttctggttcagagttgtctaactcttctgcagcagcaagagcaaatgttgtgaagtcagcaaaaccaaatctgacaggtgccttgtgcactcttcttcctctatctctagtaagttgataaccatcagtttctatacctgcttctgcaccagtaggctcatcttcttgagtctcatcagtaccattctctgtctgatctgcagtgtcaggctccaccttaaactcaataggtttgtcactagagctttcttctggttttgtttctcccttagacttcatagccatttcatcttctctgaaaacaacatctctactcaacaggcatttcttatatcctggttctaagcaccatagcttgtaacctttcactccttcagggtatccaaggaatagacatttcagagcccttggttggagtttatcttgcttaatgtgggcatatgcagtgcatccaaacaccctgaggtgatcatagctaggtggatgccctatccatttttcgtgtggggttttgaaaccaattgcagcagagggacatctattaatgagatagcttgctgtcttgactgcttctccccagaatgatctctcaaggccagcactgtgcaacatacacctaaccctttcagtaagagttctgttcattctttcagccaatccattttgttgtgggttcttgggaactgttttgtgtctgtcaatgccctctttcctgcagaaatcactgaattggttagagcaaaactcaagactaaactcaaggccattattagtcttgagtttcttgacagtcttgccagtttgattttcaacaagttttctccaagtgacaaaggtgttgaaagcttggtccttagatttgagtaagaaaacccaaacttttcttgaaaaat

SEQ ID NO: 47330 - DNA, 1990 bp, Cannabis sativa
ttttttttttttttttgtagtagtgaatgttgtgtggtatagatatgttagtgttattttgggtttggataatgcgcttggcctatttaattgatacaatttttttttaaaaaaattagctgcttttttatcggttacacattgacacaagttagtgttagtttacgactgatgcaaaagacctatgcttcattttaaaattgacgaaagattgtgttggcgtaaaactaatggtaatttttcttttaatcaattgtgtcagtcatgggtgttgatgaacgtgttgaccaacaaaaataccttattttgtaatagtgttacaaataaataagtttatcaatatgtagctttaaaatataattagtataaatgatgtttgttaacccataaactttctctggtgacgtggacattaatatttgacacgtggcataaggatgacatcacagagttgagtagacccgagttatagcagttaacctgggaggggaccctagccctgcactcaagttgactttgggatctccgggatggaagttcagacttcaataacttgaatccaacttactatctttcaatattatgtaccatgaagacatgaagcaacctaatccaagccccgggagctgaaattacacgaacctgcaacccataagccaacttgggcctaaggttcacccgtcacccaggttgacatccttaacaagagtttcggtttttggggctgtcttagtgcaaagtgatcaaaacttgcatcggcacatcaactagacataccacagacatatttgagatatcagaatcagaatcaaaaccagttaatttttcagcacccgaggtccccgggctcgagcacccaggttaacaatttgtcaacctaggtgccttccaagtgtccgatcgaagatcttttttttgcatcgaatccatcttcatcaaaaacggggaaataggtcctttcaaaggaaaaataataattcatggggataaataatagggctcaatgctcaggttgacacttggggctggccctacgcccaagttgacattttatcaacctgggccatttaaatattaatgaaatttttcaggaattctttcgagcaactttttcgtcttcaaaaaatatttttaaaaattcttatatcactcattataagtacaataaatatttatatataaagattataaaaatttaattaagaacaccgcgcgaaacacgaatatgttcccttaccataaaaagttgacatatatatatacaatttttgctaaaaacatatgtttatatatttaagaaaaatgtgagggtttctgtatttatttatattatagggatattggcggctaaatcacctgaactttacagtttgtaacagttaaacacaaaaaccaaaatatgtacacgtggacagtccaccgtgacacttaactgtgatttttagacggaagggtacagagcaaaacggaaccagagtttagatagttatgccgccaaaattttaatttttgtggttaactgttacaaatggtaaagtttaaatagtttagccgtcaatatctctatattatattttaagaaaaatctagagaaatttacgctggaggacgtaattttaaaattaattttacaattaccactgccattttattttagctatatcttgttacattttaactttttttctcaaacacgtgtatacgttgctcttatttggtatataccttcttttgcatttcacttttaaataattatctaatgttttttaactttcttttctgtttcctctaaaaaaaaaaaactttcttttctgttttctttttagctccttttttttttttttttttaatttattcaatataaaataatataattactcttagttttctttaatatataaaaaaaaatttctcttttttttattattttttattttttagaaaaaaagtttaaaatatttttttagttacaccgataattatttgagct

SEQ ID NO: 47331 - DNA, 2630 bp, Cannabis sativa
ttgagctacctttcaactttgattgccataggcaccaaatcttccgattcctcataatggtttagttcaactgtattagcaatctctcgattcatcccatttcaaaaaccttgccattgttgcttccctatcctcttccacatttgctctaatcatagccattccatctccaagtaatagtcatcaacactcttgtatccttgaagaacaccttgcaacgtgaggtacaagtctcgatcataatgagatggtagaaaatgccacctcatcaccctcttcatagcctcccaagagttaatctctcgttctccattttgcctgttattgatgcacaactgatcccaccaaaaaatagcatagtcagtaaattcaatggcagcaagttttacctttttcatttcaatttagttgtgagaatcaaacaccaattcaatcttcttctcccactctaggtattcttcaggatcattctttccttgaaaagcaggaatttgcatctttagatttgccaaatagttatctacgtagttcctagcttctctatcccgaccaaacctcctatggttacccactggtatcccatctaattcttcattagaaattatctcatccccatctacttcgttatcatcctgttggtgaaccctattcctccgtggactctattgggttgcctcttctaccttatctaacctcgcatgtatttgttcacactcttctctcatcatcctcctcatctccccaatcaaagcttgaagttgtagatttggaaccgtagatggtgtagtttcattaccgatattttcttctggaacttttgacatgattgaattatgaaaaaacaaagttagaacatatatagcaaaacctcaccactctccgcacgtgtttcactcaaaaaaaattgtcactcaatgtcactcgtattttcaatcaaatttgatggcttttaccctgaaataagcttacacctctacctttctccactcgtattcttctttaagttctttaaaaactaagcaaacattacaagaaaggattcaagcagcaattccaaccaacaaatcatacgaacactgatgaaaactaaaagaattgatgatttttggaacacttgtgtgggattttgggaaatttgataccaaatatggcagactctaagaattctcaaaatttggatgtgcaaccgcgacccaatgcttagttatgcatgaaccttggtatgaaggaagacgccacaaacggtggtggaaattcatttgataagtcacgttgaatgccacaagggatactcttagataagtttgaatagttctctcaagaactcaagaagaaaacctctcaaaattttattccaaaatattctaattttccaaagtctttacaaggctttatatagccaacttacaaccaataaaaaaggaaactaaacgaaagacaattttctaaataaaacaaagatagaataaaggaaacaaaatcgaaaaggaaagctgccaaattccttgaaaaacgtgatcagctcaatttgggtctaaattgagtctactttgatgagcatcacaaatctttgttctccttcagtgttgactgcactctgttcttgttttaaaactctgttgactaagttattgagttcttctttgaatctctttgcttgcgccctcgtcaccgggccaactggaacttgacttatctcattggccctaatgttctcatcactccttcttgatgttttcaaccttgagttctagagcttttcgggcagttagggaaaggtccagtttgacatccatcatttgcatctccgtgaaagtccgctccacaaagaaggctatctagaaccaatttaaagcattcagggataagaatggcattttgcgttaagaaatagaaagaggtaaaagtggaaacaggaaatacccaagtggcttgttgtcttgaggtgttggctaggagcacagggtcaaaacaactaatgatagcccatttttagtagtcaattccgctacgttgaccgcatgtcctccatggcttcagcacggaaaggttctaagtccctgcccagatgagggaccaacttctaactcataggtgggcggtcaattatgggagctaaataccctaggttcagaatgccttcagtaatcttaaccctcatcaccggggatagctggtcagtccgggaccggagcaccctttgctcctctactagcctttgcttcaaataggcatccaccttctgaacctacaccaaaccctctaccccaatatgagtgggcttcacatgaaatttgaatggcagaggaagaatgttgggaaaatttgtttggaggccttgggctggtttggttggatgggcagaagaagtttaggtagaaatggcttgactgcccgaagctggagggattattttctattggctgtgtgtttatttggagttcatcttggtcaaagagttaggggtcacaaggacaaatttcctgtcattggcattgttaattggtggtttggtcgacaagggtgtttgttggttcccatcaggaagacttcccgctgtagaagattcggagtttccaggggtagaatgtttggctcttttgtccccccttccatgagggggagcagtg

SEQ ID NO: 47332 - DNA, 2191 bp, Cannabis sativa
ttattcaaatttcttttaaaatttacacgtaatcctaaatagttataatatacacaaacataaaaaaatatggactaaaaaccatttctctaagtgtaccagaacacccattgaagggtgtactatatagaaatttgtttatgtatttataaactaaaaaccatgtgtatatatgtataggatagtagtagtagtagtagtgtagggttttggttagtttatagtgaatagaaagggacaagactactataccctttaatttggtctttggtaaggaagaccatatcttatataatgctccaccttaggtattttagataaaaaggatattccctaataacagggacccccatttaatctttaattgatcatcactcgaataatcttttaatttctttccccagaattagaaatattataggcattttctcctctttatagaaagagccacctcttataccaccactatcaacagtactactactactactacttatatacatatataatcataaaaatcaacaaatataaaagcatgcactacaactactactctcatcaactcgatcaactattacaaacagtacatataattactatattatattgaaaaaaaaaatattatgagactcaaacttacataattgtataatgtgacatatatcttaattaatcaaactgtaaatatttattttttacaatacattttatttaaataaaagtcacggacttaacccacctgtaactagagccggtgctaaatatataactatgcatgggaacaacgaatatgctatctccaacaacaaaatttaatatgatcaccacacttaatatatattatatatattggtacatataccctatatactggtgctttgtcattttgattttcaagtgtgtaaaataattcgagaatgtgaatcttcaaatattttttttttctttttttaacaaaaaaaaattataattgagttaaaatggaatattctacgccaataacaataagaaaatcagtcaagctagcataatattctaagatatttataccatctctttcgaaaaaaaaaatctagaagttatatattaatttagtgcacattaatcaaaaacacaataatgaaatttatatataataataatataattgtgtaaatgtttttagtttttacacatacttgacatattattatgatgtccaacattagatagaatttaaaatgtactaaaaaaattacaatttttagtcacaataaattttgtatctaaaattaaaaaaagtgtgactaggaaaaaaatattgtacgtagattaattataactaaaattatttttttaaaaaaatataaatacccaaaaaaaaaaagttattacacctataacaatatggttgtgattatatgtgtatttgtaatggtatacacctataacaatatggtttcactaataccagccaaaaaaaattaaattttatattttaaccaaaacaattttatgttgtgattatatatatacaagtgatttttatttacaattttttttacgaattaatattctctgttaaaaagttgtgtgtcataatgtgttaaattaatttaagtttgacatatcaattaattttttattttattatctccaaccaaacacaataaaagttttttgtttgtttaatttatggaatggtgagttggtcatagcagtcaagaaataaattagctagcaatgagtctttttcaaagtaattatatggcaagactaagaaataagaagagagacggtagtaattaatggtgttttgacaatcatgcaacgacagttccagccactactttgaatcgatgaattaaaatcaaagcccatatataaagatatatctatacatatatttttatgggatatttgtagtgaaatctttttaacttttataattgttaaaaaaaaaagtgataataatatatctttattattagactatgtattaaatatgttaaaaaaatatgtcattttgtgtttttgagtatttctgagttgacgcttaacatttttaattatcacttaacagctaaaaaaaatacaactacaacaaaattgtaatattttttttattagagttatatgtataacaattataaatattaatgagatttcaatagatatttctatttatatataggagaattatttcatatac

SEQ ID NO: 47333 - DNA, 504 bp, Cannabis sativa
taattagcctaaaataaatatcaagccttgatatgcatgattctcttaagtaaaaagacaagaaacgaataatgggctaagcccaaattgaacaaaagaagaaaaacaacacaaatagtcatactcaattttgattattatcatttaaaaatattgttgacttttttaagtgtcttgacttatatgtctctatgcaaaatgataataacttgatttataatttggtaaatatcagttttggtaaataatgtataaaatttaataataggtgttatgataaaaatagttatatatattttatgggttcgtattaaaaattagctttaaattaattatattataaaattacaaaaattaagtttagggtattattttaggaaaattctacaatgcacccccttaaaagagatattgatatacccctatttgttttagcatccgaaataattttttattcaaattttttctcatggtcatgtacgttatacttatttaagacatcct

SEQ ID NO: 47334 - DNA, 997 bp, Cannabis sativa
ttagtcacacaaattacaatttgttgtgactaaatatatttttagttacaatactgattgtgactaaaactaaattagtgataacttgtagctaaatactagttttagtcacaaatttgtttttgttgtgactaaaactcacatttagtcacaaaaaatttatgttgtgactagaaagttgtcaataaaagtagtagttttttgtagtgttgattatacataaaataaaaaataacgaattgcatgataaatacaaatttatatatataaaagactaatgtaagaataagattattaagattttttttttcactgaatttttacatgtattaatttgtgctccttaaacttttcaagccattaaaatttttctcaaactgttaagataattggattcaaatattttcgttccatttttactaatgatagcgacgaaagtttaggatgcatgtggtacatattaaagttcgaggtacaagatttaatacataaataatcgtcatgttaggcgttcgttaataaaattgaatgaaataattatacagaagcccttaaatctaacaacaatttggaaagaatttttaacaatgaaaaattttaaaaacataatttaatacataaaatttggaagaaaaaattatcctcgttagcctaaaaataaattacatatatacataatcaaagtattcctctccttacaattatttttgtataacatatttattaagagctcgtttggtagaccgtatataagggtcgtactgtaacaaatgatactgtgtttggataaaatattatattgtattaattataattacgactataaattttaaaaaaatatgaatcatattatttaatacataataaataacctgtattaacttgtattataatatttacaaaggggggtctggggtcaaccctggccccagcctcgaccccgaccccgaccccaatatccccgaccccgccggacctaaacttggacatgaacatg

SEQ ID NO: 47335 - DNA, 1291 bp, Cannabis sativa
tatatatattataattataataaatttgtaaaaacactttattaaaaattaagaatatttgatttatgggttataaaatgaaggttttaataagccaaaagttttgaagacaaaattgggccactaacatgtgcaaactcataatgaccagtttttaccacatactcatcatcatcctattcttatctgaactttactaccaaatctttttcttctttatttttttcaaaagggttttatttttcttcttaaacatcattaacacttttcttattttataaaccttttattttatttcattaatgtatttgattagaggctatattaatatttttcttttaaggaaaagcagtaccaataatatacaataaacaatatatgcttacttattacatgctattataaccagaattaaagctggaaaacaagtgtcaaacgtataaaaaaattatgagatttgtcctaaaaatcatgtaattaaactttgtccaatcatttaatttacactaatattattatatattataataataacaaaagatctcagcctgttattcatgcacacaccctatttctcatcagatatcttaattattacaagtaatgcaaattattccaaccaaaaacaccaaattttataacaaaaatcaactaataactaaaataaacataacgtttagttgtcctaataaattatacctttgaacttgactttgaatttcattcaatttactaatttgataattatttatgtattatatcattttctttaaaatttaaattttctttatttaaattataaaaattcacaaatccaacaatttcaatataaaaaattttaattaacttattattattaataataataataaatacaaacaaatttttgttaattaaaaaataataataaaaaaaaaactaacctgatcgccacaaaagtcgaacaataaggaagaagattgcttaaacaagaattttccggtggagagttcccggaccttaatcaatgcctgagctccggtatacagagatgacaaaatcgatattgccaacaaatacctaacaaaattaaatcaaataaaaaaaatcaataataacaataaattagtaatgattaatatgaatatgaatatgaatttgacctgtattcttcatatcgatcaaaatttttccaatcgccgtgtttattcgtagccattataataaaagacaatacagagaagagaaaagccattcctctcagagctaaagagcctcttctcaacaggtcctccctcttccaccgccgtaa

SEQ ID NO: 47336 - DNA, 1294 bp, Cannabis sativa
  modified_base (67)..(79): a, c, t, g, unknown or other
ttacaaacattgggtacttatatgtcgctaaaaataaacattgggtttatgccgcttacaaacttannnnnnnnnnnnnttatgccgctatttacccttaaaatattgtgaagtaatggaggtgatatttatatatccaataacaattataagcaacagaattgaaaattataaagttaatttcataatttaattatataaagtctaaaactttaatgttgaaattctcataatttactcaaccatttcacacataatatatcaacataaagagaattcaatgaggaatgaaactcctaaagttttaagattcaataacaaaaaattttacaaataataattacaaaataaatatgtaattagaaataattaacctatacatatcgaatatcgattgtaacataaattataggtcctaaatcatatataatagttaatttgataccacatgttagaaaattaataatctcaagatacaaatttacaaataatctagaacacaataataattattagataattaagtatgcatacttgatccataaaaattattttaatttgatggtacaatactatcaactaagtctttttctctaaatttctaaatcagaagcagttttattttatctgattattacaaaatatacaattgtgatgaaacaatatctatttataaagttaggggtgtgtcttaactacataaccctagttggactagacatactcatcaaaggtttcagttaactagaaaagtctacactttctgcttcaagtagacttacacacagatactaagtccattaactattgatcagtaacaatatttgctaacactaacacaataaagaattatttaatcaactcatattttattaaagccaataaaaattaatgtaggtgtaaataaaaattctaacatagacaacttgatagaaaagtggataacttacccaaatcagtgctttaacattgtcactagttaaagaaaagccaaggtcatcctttgcatgaaacttgagaagaacatcaacaaaatctgcatgtgtttcactttcaccaccagctttcaatggtgacttgttcttctcaatatgttcttcgatgatgttttcgattattctctctgccctctgcttcagtttctccaatttagaccttgcaggactgatcaggtcaataaagttgagagaaggaaacaaatctgtaaattcaaagcctgctgcaaacgttaaactttcctccataattgatatgaactcgtcatggtctttgcttttcttaccgaaagcagccc

SEQ ID NO: 47337 - DNA, 952 bp, Cannabis sativa
tgttattctaacttttttaatttatataaacacaataaagactactacaagttctttttctaatatttttcttctttcattttttatgatttaatcagatttttgtttcatttgaatttctttttctctctctctctataagattaattttggaaagaaattaattatattctgaaaagaaaaatgattaattatattttaagaaatagattaattatttcatataatatttttttagaatataattaatttgattactattttttatatgctattgattttttaaaaaattacttatttctaaagaagcatatgatagtcgattactatattttattttattttcttctaattttcattctgccctataaataaataaaaaaataagttaaataatttatttatgatgaaatgtgtacaaaaattaattagtatatatcatgactatacaatttgtaacaactaattaaagatagagtagattagatcgtatccattaacacttctcatttgtaaaattaaaaaccatgcatattaattttagtgatccactcattattaattctttgattttaaaatgaacctatgtaccaaaagaacttattcgtttcaaaatgtgttaatattgatactacttcttttggtgaattacattaattcatgatatatatatatatattcagtagagtaatataatattcttttaacattattttgtgcattaattaaattaatatattcttatatatatatatatattgagtaaaatttataataagtttcatctttgcatgactacgtacgtacatagtttcttatattataaaataactaataataacttgatatgttatcaatagggaaatttgattttctatacttagaaaatcaaaaaaaattttccctaaaccaaaaatttaaaacctaaaaaaactattccttttttttcaaa

SEQ ID NO: 47338 - DNA, 1344 bp, Cannabis sativa
tgccactccatagaaagctcctattatttgactccaataagagtgaatagccatcaagactgagttgataagaaccaccctccctccaaagttcaggaaacatgatttgctatatatcaaagtttgagaaacatagtgtagtagatttcatgtaaaacataatttagtacataaatatttactgaattagtaaaattaaatgcaattagataaaaaattttaaatccaataatgtcaataattaaggagaatttttaacgacaaaaaacgttcagaaatgatgatttgatacatgtcaaagtttagagacaaaaatttcaattaatcattatatatttatagataaaaaagtattattaatgagattttataaattatgattagtataatttaatatggataaacacttaataatcgctaataccaatgtgtaacttatattaaaatttggtctccggaagaagctataatattagttggtgattttcattatttatgtcttatcataattattttttgttaatcgtttaatattaattggccttttgatgttagatttgttatgtattaataaaaaataagatcaaactagctaactaccatgtcctacttacttgccaactcctattataatatgccacataaaattaagcactaaattgtaactaaacttagtaatactaataaggaagcttacatgaaatactagcacataataagcttacaaactaaaataaaatattaaatagtacatttgagtcttgttagtatagttgagtgagcttgtagagttagttagctgttataactaactttgtaactgtattcttaagtctgttacattcttgtttctttcggtttttctatttctctcttgtatataaacacattcagaattgtcaagtaatacaagttctggttttactcttttgatacactctgcttcgtttctctggtttttgttactctgttcctcaagtttcacattctgaaactctacatggtatcagacgccctcgactagcgtcatcaatggagtctacctcctccgatcctgcttcggccaccagaacttctgcctctgcaatgtcaaaccagttgcactccaactggaatcccttctctcactctctaacctctgttttgactgttaaactcgatcgtactaattttctttcttggaaatctcaggtgatccctactgtgatcggacatgatctggatgagattttacttgctggtactcctcctctgcaaaatcttttaaccggagaaccaaaccctgagtacaatcagtggaaaagaaaagatcaattgctcctgtcatggctccgatcgtccatg

SEQ ID NO: 47339 - DNA, 2771 bp, Cannabis sativa
ttaagtttataagtgacataaactgaatatttatttttagcggcataagtactcaatgtttgtaaaactgtaattttctctaagtataaagtctattattgtcttaaactgggcatatataaggcccagattttagatcattagttttagacagaaacatgtaatacgagttacatctaaatgttcttttaataaattcaaaacagagtttgtattgacaaaattagaggaaattacagttttacaaacattgagtatttataccgctaaaaataaatattgcatttatgtcacttacaaactagaaactttgagtacttatgctgctatttacccaaactagaaatttattaactttaataaaacttaacttaaaaaatacaaaagatattttatgaaactttttcacaaatactagaaattttttacctatgcacacaatacatattactaaaaagaagactttggactcaacatcatgagtcacacttacaatgcaaaaaaatcttcaattaaaataagacttgaacctccaagttcttttcctagattactatactaatcaaaggtacagtaataagaaaggtatacaaataaacttttactcttataataaatggctaaatgttacaactatactaatttttttttcttaaactacaaagcttacactaaaaagattatttacctaaaataattacacattacatatatatttttacttgtaacaaattcaatattgacattaaaattaaaatgctataaaaaaaatttatgaaactttttaaattaaaattttaattcaaatatactaaagacattttatgaatttttttagctatgtacattgcaatattactaaaaataagttaaatttcacaaaaaaaaatattaaaatatagcttatattttcaaaaatataaaacaatgcctaactttatctaaataaaattctgatactttgcatattcaaatcataatacttagtgagagaagactcaaaaattctccaaatttctaatgaactcaatttttttttgatcaataagaaatgacttcattaatcgaaaaagcacatacaaacaccaatcaaacaaaataaaagcccaccacggctccaaaccagcagctccaacacctaaaaatcaaaataaatacattgcaacctcaacaaataatcgctcttctgctttgtcatttttctgttgttaactatttgtaatatatactttataatattctttacatcatttacaacaccaaaaaatgatctagaatatccattaaaaatacacatatttctgttgagccaatggttgcaaatcactagtgccaaaatcgtgatattgaactgttgaatctggttttgacctttcaaagcaatacaaccagtccagccaacaagacctaagggccaacctttgaatcccatccaagaaatgatcaagtccatgactttttgaaacatgatacatttgaagaaaatgtgatcatgagtctctaattcatctttacaaactggacacatcagggagttcagttctatatgaaactgactcaacttgtgcctagtgagaagatgggaattcatcatttggcacaacaaacctgtgtttaggcacatttaaagagctccaaaaagccttgttaaaattgacctagttttagaccaatctactattgtacaactagttagtcttaaactggccagaagtacctgctttttggatcttagaacacataaattttttccttaaatgacacagtttacgccaataccagcttgaatcttgtttaagttcataagaccataaattatctttcttcagatagatgttatctacccatttgacccagagtaaatcttattttgttgaaatcgcccaaacatacttagcaagaatagcttggttccacttgacgccatctttaaacctaagaccatcataagactttcggagacaaacattatcccacaaaataatgtgaattttacttctatttccattcataccccaaagaaagcctctacaaagtttcccaacctccttggtaatactatgtggaagaacaaaaatgctcatccaatagttttgaagaccaagtaaagcagagtggatcaattgaaccctcttagaaaatgagaggtgcctacttgaccaagtatttaatctctattttatcttattgataataattccataatcctcaactttccatttagtcagccttagagggactctcaagtaattgagtgtaaagaagcctttaaccaattgaaaatcattaagaataacctatttttccttacaatttatacctccaaaataaatttgggacttgccaaagttgatgtgcaaactagaaacaaagctaaagtcatcaagaacctcttcgatatccaatatcgaaagccttgatcccttgctaaatagaatcaaatcatctgcgaagcaaagattgatgatttttaggcccttgcacattggataaaacctgtaagtagagtgaacaacaaccatttgaagtcttcaagtgagatactccataataaacacaaagagaagaggtgagattgggtcaccttgtcttcagtcctttctctcctttaaaattaccatacactctaccattcatgactattgagtaagaggtagctcttagacaaaccataacccactgtataaacttccgaggcatattaaaggcagctagcaaatcctttaaaaaatcttaaggctaattaagatttttttctcccgaactttgac

SEQ ID NO: 47340 - DNA, 1138 bp, Cannabis sativa
agtccaaaggaggcaattactgtatatcacggagtaataatcactaagaaagagaacagaacagaacgactgaacgagactattctgtcaaagcttttaatttgtatgactctcactctctctgttttcgctcttatttataaacatataacataatcctaatcctataacaacatgctttctttcgatatttttttagctgatttttttccaccactccctcagtctctctctatcttttacttaaaataaataaataaataaataaataatgtctaatagaggtgggaccctttatgcctttccaagtttacccttataatttttgtttttttgggttctcaaagtaaatagttcagagaatatgcgtttattaacgaagaatcttttaatgtaacctaagaaaataaatattccccttaggaaaaaaaaattagaaaaccttattctcgatattttaaattgatttaaagatatataatagtatatatattactttaaatttaaatattatatttaaactttttatttttatttattattgataaattttatcttttttttttttcgtgtaaggaattgtaaaatgtttattgaaaacttaaaacttaaaataaagtttacttttagataagaggattcgataacctatcaaactatgataaattgacttcatttttttttttggaacaatgaattcaaatttcttaatttgttaaatatgataagatttaaagtttatttttaaaaaatgataagatttaaagttattataatgaagtcatcttcaatatgagatattttttttaaagaaaaaaaaaatattattataaatcatatgactttcacttaatttatttgtaattattttaagctagttgtttgtacaatgtattatttgaaaatggagtaatttgtatctatgtgtaaatagctgctaacttaaattatttaatttttaattaagatttttataatgtatagacttttaattttttttatcttgatcaatataaaatttgctaagttattcctctacattttactttgtcatattaataagatttaataatattcgatctctccattcaaaaaaaaaattcgatctcttggtatatttttcccactatctacttaa

SEQ ID NO: 47341 - DNA, 1865 bp, Cannabis sativa
aaaaaaataatttaatttttttagttatatgtatttacttatataatatattttttgtttgaatatgttatttacctatattgagtaatagaattgaatacaaatgggtgaatataagatgagtgaataaggcagctgacaagatgaaatagtaaaaaagatgaggtgtgaagcttttaatatagagctgcttttataaatattgagtaatatcataatatgaatgtgaaatagatggaggtggagtatgaatgaactgtcacgtagcccactaatgagagttatttttcttttccttttgtttaaatagatgataatacaacattatctttatatattgtgctaatccatctttatacatctatttattttgtaggtagttttggtcaggtagttgtctatatcggatgccttttgaaggtggtctcaagttattttatctaaattttcgagataactaggtcttatataagttgctttgtttgtagtgactcatattcactctgtatatctttggctagacaattatcttgttggttggaagttcttctgtgtcgacgattatcatagtgtgatttcgatcactctctaagaaaaatacatgataatacatgtgaaatccaaaatatgttgcacgtggcccaataaaatgtgttcaatttaactacaagacaaaaacaagaaaagaatttattttttattttttgtaagctgctcaaaagaatgacacattcatttatatatagagagagatatatataaaatacatcaaatagatagaaccaatctaattggatgattgaaattaattggatcgaattgaatagtaaaatctaacatctaatatatgattggatcatatctggatatgcctaaaaatattggatgtggtccaataaattctcctatatataaatatatacaaatttatgtgtatgagtttatgtgaataggaataatttttctccgcgtcttctatcataaaacagataaaatgcgccaacttaatatattactagaaaatattttagtaggtttagaaataaaatgtttgtgtctttttgatttaatatttctagaaaataaatatatattatatagtatatatttttttaaaagtatatataataaagtgttaatcaaatcagattggttactttttaaagtcaaataacatccaatttgtataagtgcggattttagatttgttattctaatccaatccgctaaagtgtaaatatccacattttacggattagatcgttaggattgaattggatcgaatactttatgaatagtcttagcgtgaacgctgctttctatatgataaattattcttaatttctcaaaattttatatgatttcttaaataactaaaatatactctgtcatgtaaaaaaattaagattaaaactatttagatgtcaaaaatacagttgatgcacccacccaaaaatacatatatggatatatgatgtactaagagtatttttaatggtgcaccatttcatcaattagcctggaatcttcacactattttacttcaatagtacaccaaattatacaataaattagtgtgcaccaaattctacaccactaatggtgttgaattttgaatatatactaatttggtgtatttttttttgcattataactcttattttattttattttaaaaaataatcttacactttagtcctcaaattaacatttataataaaaataaaataattgatttaaaaagttgtcttatggaaagtacttgtaagagaagaaattctcttatggaaagttgtttaattttggtaaacttgactttccctttttctaattgatgatttcgattttgcctttattagaacaaa

SEQ ID NO: 47342 - DNA, 2717 bp, Cannabis sativa
aaaaattttaaaaatttatagagaatgttgtaagcataacgaataccgccgtaaaaaaaattaaaaaaaaaaataaattttgacatatatttttacgcatagagttcaattaaaaaattatttaaataaagttaattgtagcactcttctttaaaataattatatatgactaataagtcttatttatattaataaatatgcctgatcgaatttcttctaataagttttcttttttttttttctcactttcagtcaaattaaccttcttcttaggtaaatgctccgttacttttctcttacgcaaacttcaaacatctgccacgttaagagaataataataataataataataataattacgttttttctaatatatgaacaattccacacctcaataattatagaatgtgatattacttaaaatgtttattatttttaaacctcaattagtaataattaataacacaatgattgggttgatttggtcaaatatatataaacatataattaatcttacataatctccgactttctggtaaactatataccaccactacttatcaaatcaaatattgttcttattatattattaataaactatatgttgtgttttctgactaggtatattatattatagcactttgaagtctcaagccatttaaaaatttattttaatttgctttgaataaagaaagtgatattatatattattattattatttcttccaagtgtctcatatatatacactacacgtgcaacatatatagcctattgctcatagttttacacaatagatagaggataattctaatattacacattctctattatctcatgtctgtattttcattattcttgtttggaccctttggactgaacaaaataaagcaaaacataacacctcatttaagaatgcttcagcaattttaagttggacaatttagtattataattagaggtattcattgacccacattttatatttttttaatttagacctatccagattatattaatattaaattttatcatataatctgatccaattaagtttagccattcaatcgatccaacatttaatggatgttgaattagatatattcaatccacattttagactcagtatttcttaaattggatcagatccattcaatattttaaatccagtatctattagattgaattgaatccatccaatcacaaaaaaaaaattaacgttaattttcatatatacatatatttttttttttacgtataataacataaaatttaattactcattcaaactaaatgaagatattaattagttcgatttgatgttagatgtattagatttttggacaccccatccaacattcgatccgatcaaattggatattcaaaaataatatcaaatctaatccgatcataattggatatccaatatttgatgaccaattataattggatcgatcggttgtcattaaattagatcgatttaagcacaccactaattatgatagttagctaaaggcacaaaattcacaaatgcaagatgttaagatttctctcccatcacgagttgctcattggttagcaccttctgctggattgttaaaattaaatgtggatgttgctattcgttgtgaaaattatactattggtattggcgctttggttcgtgactcagatggctttccgttggggtgttttgctaaatccttagctggttttttctttcctaaagaagttaaagcattagcaatctcgtatgctttaaaatggtacttgcaactggattttttttcgtttcttttgtggagagtgatgctgaaattattatcaatcttgtcaattagttttctgagactgtatcctaatgggatcatattattagatctattagatccttgttatttctctttccgagtgtatatctttaatatgtaatgagaaatagtaatactgtaggacatggattagcaagatgtgctctacagatagaaaacgaggtttcttggttgtaagaaattcctccttgtataatgaccaatgtattatttctctcaacaataaattggttattacattaaaaaaaaatattatttaatacacttttatttattttggtatttacgagagtttttcagtctatttttttcataatggtatatgatgtaattatttagaatcacctgtaaatttttaagaattttcaaataattaagagtgtaaaaaataaaatgtaaatattttgttgcatgtgtaattactttttcttatgcgtgtagtactaagtaactgtttaaactttaattttgacaaattatttaaaaaaatttaaaaatttgtttgtggtctgaaaaataaaataaaataggaagagaaggctctcctaaaactcgaaacaacaaatgggtatcattgatatggtcttgtcttttgacatagtgaaagtgtcccggtgtgtgacttcattgtcggtgtatctatattgtcttgttcatggttgtgtggttctttattttgttagggctagttctgttatccatgaggttggaggaggaagaacaaatgttggtggagtatgatattactgagggagaagagaagttggttgatccacattgtcgcatctagtttgttagacaacaacacataattttttttcaatttaaaagaaaaagaagatatatttttcaatactaataatgataatagttataaaaaaataaaa

SEQ ID NO: 47343 - DNA, 1103 bp, Cannabis sativa
gtgactaaaaagtcacatttagtcttaaaaaatttatgttgtgactaaaaagttattactaaaagtagtaattttttgtagttctactttctctattttacagcatacttttacattacaccatacatcaacttctttaaaaaaaatatcactaaaatctgacttcttaaaaattttattatattttaatagttttaaatatataatattaatataaatacatatctccatacaaaaataataaaatatgttttgagcaatatcgtattctataaatgtagagcctaaatagtatatttaaaaaataaaaaaaaaaactttaaaataaagaatgaatttagaacatttgatgtagggtgtttttaggtatgttttttaaattttttaaaatttttttattttagagaagttgttgtgagtactctaaatgctttatttgatacccattttgttattttgttgtagtgtgtttttaattatttttgttgaacttttctttttgttctatttctttctctcttgtatatattttttttaattaaaatataataataaaatgatgtaataaaaaatataaagaaattgttgtatgaattaatgtaaatatgtaagataaaatagataaaaatagaattttaataataaaaattttgaagaataaacagaaaaatatgctctagagtaagggtttattttatttttttttagcaataatggtaatattttcaataattgattaattcactattactaggataatgataaatatttgattttgtttgattttatatatcaaatcatagactagtgtcgtttataattattattttttttttttgttttgttttgtttttagacaaataatttataatagaaatatgcacatggggaaaatgatccatgtatagtgtggcaatattagctatagtgtgctaatatgacatctctatcattctctcactgataatataaatatatataataatactatatgagtcaattattttagatatacaaataatttatctttattgggacaagtattatgtcatcatcttgttatattggaacaatcaaccctactttaattattataattttct

SEQ ID NO: 47344 - DNA, 602 bp, Cannabis sativa
caaaaataacatccaatccgatcttattacaattggatatctaatgtttggcagtcggttctcattggattggatgatttatgcacacccctatggtcttccatgagtgggctcctagttttttttgtacattggcaggtgggaagctcaagttttgggttcagctgcaccaactaccacatgaatatttctccattgataatggtacttctctgggttcgcttgctggttcggttgtacatgtggagcttgacgaggatagacatgttatgtaggataagtggcttaaaatattagttgttattgacattgagaaaccactgtttttgggttgcttcatcaatctcactaatggagaaaaaatggatcaagttcagtatgaaaagcttggtattttttgttttaactgtggtcgtgggccatcaacaccgtggttgccgcctctcaacctcaaatgtcgttctgaatggacatggagttctgtttcctttgtatgggccttggctgttcaccacgaaactgtacgaggattattattttttttttgtaagaagtgacgtgaagtcactgccacagggtctagcagtgctgctgaaggtggt

SEQ ID NO: 47345 - DNA, 1117 bp, Cannabis sativa
taaatggtgacttacatgaggaggcctacatggttcttcctcctggtgttcctcataatcatagtgaagtttgcaagctaaaataaaacatatatggtctaaaataggctcactaagtacggttttagaagttttctaatgttattttatttcttgactttcactgaagtgatcatgatctaactttggttgtcaagtctacgtctacttttgttgtatgtcgatgatataattataagaagatatgatttttcaaggaattgaaagtattgaagttatcttttctccaaaaggctatctgctttctcatttaaagtacacactgacattattaaatgtgctcaccataatgatactagaattgttgatactttatttgagatgaatgttcttcttctgatggctctcccttggaagatcctactttgtattgcactatttttgacagtttggtttatctcactattactcgtcatgacattgtatgttattcatgctgctagtacttctccttatactgttcacgggactactattcttttcattttacaatatcttcaaggtactatctttcagatcctactactaccttccactttgaaaattctcttatttcttggaagagtaagaaacaatttattgtttctcgatcttctatagggtactataccatgtcgtctactattatttggttgagatgattacttgttgatattgttgtcattcactcttgtcccactcctatgtgttttaaccatcaaaacactattcaaattgctcacaccttaattttccattaacacaacttttgagtttgattgtcattccattacgatttgaaacttgacactactattttgtcttttgtttcttattcgttgtagcttgatgatttctttactatgtcacattagatttctcatttttgtgttctcataggccaactctagatgctttcttattgcatgatgatggtttgagaggggatgttaaacaattgatcaatgttattttagtcaatataaggcttactattatttgtattattcacatttttgcttttcaaatcaatgaaaccttaacctctccatttttctccatctctttcttctgttat

SEQ ID NO: 47346 - DNA, 905 bp, Cannabis sativa
ccatcgtcttgggcttccaattgaccatgtgcaaggatgattaaaggatccttacttctttcagcaacattttttcttgaataaaccacatgctcatgattattacaaatttttatcaatcgtagcatttctttatctaacaaacccatttcagatttgtattcaatgggatttgtttcctcactagaaatatcaagaatggtttttggtaaaggttccacagtctcccaaaaatttggttccactatattctccccttgaattaaatttttagagaaataagggtcgttttccaaaaaaaaaaaacatccatagtcatataaatacacttagtaacaggattaaaacatttgtatcccttcttattagagggataacccaaaaaaaatacattttttgcgactttctaatcggggtagaatacttgtaaaaattttgagggcatcccatttattaaataaaaagtagtaagaatggcatcacccttaaatatttagaatttgcatataaaacatctatcatagcacgagttgtttctaataaatgtctattttttcgttcaactataccattttgttcaggtgtatcaggacaagtaggttgatgtgaaatacctttttctttcaaaaagttaccaaggacgttattaaaatactttgttccattatcagttcttaaaatactgatttttgtttgaaattgaatttcaatcattttgtaaaaaatttgaataaagtttctcaacctcgtatttttcactcattaagtatatccaacaaagacgagtatgatcgtctgtaaaagtaacaacccatttttttccataactagtggtgagcttagaaggtcctcaaacatcacaatgaaagcaataaaaaggtttttgaagatttataggatgtttt

SEQ ID NO: 47347 - DNA, 1415 bp, Cannabis sativa
aagttgtgatgtttgttgttattacttacttaagttgataatttgaatgtggttctcgtgtataatatagatgcatcaaatgggctaattttggggaaatctttctctgcttctactcattatatttcttgagatattcatggcctgagtagtgtatgtgttttaggttattaatttcataaaaaatccttcaactttgaaattactgagatggtagcaaactgaatgcaaatatgagatcgaagggttttgtttcaagggttttgttctactaatgtttattgtattttctgacagaggttccatcgcctgatgaagtggagtcttatattgtcattcaagaatgcctggagttgaggaaaagatacttattcagcgaggcaattgctccttgggataaagaagttatatctgaccccagcaccccaaagcctaatccagctccattcttttatgctcctgaggggaaatctgatgtgagtttgaaattgtggctcttgtattccattctacagctgaagaagtttgttttttaatattttttgttattttcattaacaactacattttactctgcagcattattttgagatgcaagatggtgttgttcatgtttatcccaataaagatggtaagaactgtaacccttttttggtctatctttttgtctgttcaagtgaatgtctctctttctatcacatttgaatagtggaaaggaaataaaggaagaacaaagaagaagaatagtatgaatagagttggagtttcttacttgcatttttatccttttcagcaaaagaagagcttttccctgttgctgatgctacaaccttcttcactgacctgcatcatttacttcgtgtcattgcaactggaaatattagaaccttatgccatcatcgactgaatcttctagaacaggtaaagtttctgatctgtgcttcattgcttaactgcactctgatggacctattttgttacaaagttattatggtaccttgacaatatccttatgtgtttgccattcagaaattcaatcttcatttgatgcttaatgcggatagggaatttttggctcaaaaaagtgctccacatcgtgatttttataatgtgaggaaagttgatacacatgttcatcattcagcatgcatgaatcagaaacatcttttgaggtttattaagtcaaagttgagaaaagagcctgatgaggtaatataaattttctgatatattattaagtgatcttgtctccctttcatctctctctcggtctctctctcttaatgtgcaatttcactttgtttaacaataaaaagtttctaactctggtgtggagatatccacacagtaactaataataagaatttatcttatctattttgtgaaaactgcctagcactgtatagttactgaaa

SEQ ID NO: 47348 - DNA, 2542 bp, Cannabis sativa
cataaacataatacaatttttttaataatcaagttagggttgaaaaaattggatgtgagtcaaaaatgagtcaaaacgtctgacacgaaatataaaaataaatcacgtcaaatacaacataaacatgcatatatgcatgtcatcatgttttgccacccctaaccaataccaacttgtcaaatttttccacaagaattttgtcacactcaagttttgggtagaatggatcatttctatttacttagttaaaatcaaatattatctttttgacgtataattttttttcttttaaaaaagtaggctatggcactctatctctgtcattaattatattattttctagaagaaaaaaaccaaataattttaaatatatattttaaaaaaattctcaaaaaaataaaataaaagaaaagaaatattatcttactttttatgttaaataattcttaatttaaatggtatgaaaaaaaaatatttcttaaagcattttaattttcaaaagaggcgaagttactatcttactaacatagaaatgcttatacaattttgagtgatgattcacatgtaaaatattatggcatgcaaatataggaagaagaagagaattgaaaaaggtaatgttgggattcatcaatcattttgaattattattattctttgtctgaaaatcctccaataggcatctttttctttccttcaacacaaaatattcttggtaaaatattcccaacgaaaaatgcttccactacgttcaaaattgtccacgtgcctgatgactccaaggttgctcggaaggaagactgtaagcttctgccactcttaattgctggaagcttggagataaatattatctgtgtttttggaagagagatacgtggcataatctgaagatcaccacttaaagttaggcctaagccttcccactctcagaacgctagtccagacctcgaacgggcctaagcctaatgaaggcccagaactttaccttggggacataatgttcttacaaggcatggaagcctcccaagccttttgagacatgaaaagaaagaaaaccttcgaatgaagataagggcgcacttggaagcagacctcgcatgaaaattttggatgcctgccacaagatggcagtgaaacatctaccgggggtgagtactggatgtctaccgcgagacgagaggcacacgtctttcctaaactgatgtgtccacctctcgaacacatgatcacatattgtcctttgtgtcacatcatggtaatgtgcacaccaccaatgcatttgcatccaccccttttgtccaacggttcccctgacacctttgtctgccaaacgtgactcccgtgcaacacgtgtcctacaacaaacggtctcctaattagtacaaaactgtcgccccacgagctagaaatccttagtggacttcatagtcatgtatttgtgtattctaccccataagtggacttgcttttacaaaaaaacttgaatgagtcatgggtatgtctgaacccaaactctagtctatagaaaccccattactcctttatgcaaggtctgctggttttattcaaagatttcttcttctccaagagaaaccaccttatatcaagagttaggattccttattataaaactcttttgtaatatatttaaagcctaaaaggtcaatacactaactcgtggactagggataattcacacccattgatgagtgaggtcgagtttaaggagtaaaccccaatcccatcgagatattgtttagaacgtcgtatgatgaggcactatcttgaagggtgggaatgcaagccgaagaggatcatgcttcacatgtgcatgatcggcatgcatgcatgcatgcacgtcaaactaggagaggaataaaaacacaacccgatcgggtttggattttgtcaaacaaccaccgaagggacacgaggtcccgtagctcatgcaaggtggtcggtcggacctaaggatctcatggtcaatgtcaacaacatgcagagaagaccgcaaggtttgggagcctttgagctctgtccagcttctttcgtggttatttgggttcgagtgacctaattttgctataaacggagctctgcttcgtgcacctccttacactgatgacctaggctgttgttaagctgtcagtcatccctctccacaactagtcatggtggctggaccactaccccaccgccactttatatatgaatattgtatttataatataattttcttattataatttaattaatgtattaatttaattttaaaaattggttagaaagatatttagatatctaccctaaatatgtgttatagaattaactataaataacatagctaaaaatttatttattcattaaaataagacaatcaatgtgttattgttaattatataataacatatgtataactatgaaatgtgttaggtaaaagggtttgatctataatagcactgcttttcttaagtcctcataaagtgttatggtatcttttcattagacttttatggtcttgttgaaagcaatttttgttata

SEQ ID NO: 47349 - DNA, 2496 bp, Cannabis sativa
atctttatatctttataatacataatactctgcgacaaaaaggaaaaaaggaaaaaggaaaaaaggaaaaagggttagagatctgagtggaagaagatatattattttgctgcaatcattgtaaggtttctcaactttatatgtgtttaaattctattattttagagaattcatatttagggtattaaacaacatacatgttagtaaatctaagtcctggtacaataatccccaacagataatcatatccaaataattattaaattaaaatgtaatatttaaatattattattaattacaaaaaatattttaattaataatttcagcatttattcttttttttcttctaaatttcaccaacttagtaaaaattctcaaaattgacaaaatcaataatgtgaatttaaattgattaaaaaatcaattattataacctactattaaaattattcgtgatactgcggggagcatgtgcttataaaatcaagctcacaataagtacatccaaaatttaacaagtaaatttcctaacttattaatttatcatgactccactatagaatcgattatttttatcatatcaatcaatgatactctatagacaatctataattcataggagcttaaaattaccgtcttactctttaattgtattttatccttaaaatacttacttattataaatgatatttcaataaactaatttaattacataaatgagtgatctatcatttaaggcttcaaccaagcttaaagaaaattattatttcacttctaacataatagaaggagaaatgctaaaatgtaccagtggggccaagcaccctcctacgtgtcaatatcgctattggtctaattaagtatcgagtcccatgtagtttaatataatagcttttagggagtatcgctagccaatcgcaaggcgatacgtcttaagggtgctaggcactactggtgcccaatagcaatctatagatattaatatctatgactaacactcctattcaggggcataagtacattgcagccaatgatggccttggcccccacccagagtatatatgtattatttttctaatttttattatatataatctaattttatgagttgttactaagtggccccttgatcaaagtaaaatattaaatactaaagaattttgacagttgctcgagccttagcatttcaatcacacttacctcttctctactggagttacatgattaaaacaacttcttatataatcaatcgaacaccttctgttctcttaaatgacaaaacatcattcgagcttctccaccacaaggctcccacttatactcatttaagaaattttggttgtctagcttatgcttctcatgttaaccaccccaccaaattctctccaagagctcgagcatgtatttttttaggataccccgacaacatgaaggcttatacccttcttgatcttcaaactaattacatctttcattccagggatgtaattttttatgagtcaatttatccattactcaatacatccaacaaaaacacaactcaaattgacacttttttctcaacctcaaatcggcatcaccaatccgatgctcctcatgatactgcagcttcatctgctccacttcagtcaattgccaaagaacagcttcctagtgttccaaacattactgaagtaacaactacatctgaatctattgcaaccacctctgaatctgctacaacatccaacagcaaacctataacaactaccaaatctggtagaacactcaagaaacctggttttttgcaagattacatatgccaaattcaacaacaaaaaaccagcacatcataccctattgccaattatatctcctaccatagactctccccaactttctgagcagccatccatgctgctcacttaattgaacctcgttcttatgcacaggcttgcaaagacaaggtatggaacacatccatggacactaaaatagatgcacttgaagccaataacacttggatcgttgtcccacttccttcagggcaacatgttataagcaacaaatgggtgtacaaaatcaaatacaacccagatggctctgttgaacgttgcaaagcaagattggtagccaaaggctacactcaacaacaaggagttaactattttgaaacatatgccccggtggtcaaattcaatactcttaaacttctatttgcgcttgctgctattaacaattggcatctccaccacatggacatcaacaacgcctttctccatggggacctccatgaagatgtccatatgacacttcctcaaggttacacacccaaatctccaattcctccaaaagcagtgtgtaaactaaagaaaagtctttatggccttaagcaagcctcaaggcaatggtacgccaaacttatcaccactttactacaacaaaagttcactcaatctaaaaatgatcactctttgttcattaggtataaacctggcatctttcttgctttactaa

SEQ ID NO: 47350 - DNA, 931 bp, Cannabis sativa
ccacaatatggctatattttcttttagctagtccattttgatcctagcttgtaaggcaatatgacgtctatgtataactccatgggattcaagaaagattgtaaaagttctatattctctcccccagctcccccaactttgtttgtagtgtctttagattggtgcctaattgtaactcactctcaaccttaaagttttaaaacactttaaaagcattagatttgtgtttaagaagatacaactaggtgagtctagaataaacatcaacgaaatgtatataatacttgtagccactagataaagtgtgtgagggaccctacaaattagacaccacaagttggagaggtgttgtatattcagtgagagaagctttaggaaagggtaacttgtgaatttttccaaggcaacaagctgaacaaactttgtttctgtcattattattattatgaggcacattgcaattggtgagaacagtttgaacaatcttggtgaagggtgtcctaatctaatatgccaaattgaaaaaaaaaaaatattgacagtataatttgagcaggtgtttgcttaaactttagtagcattagaagagtgatgatttgtttaagtagggagagatgaatgactaaaactcatgaacacctttctttcctagtatcttcaaaccaccataattgaaatgaccaagccttatgtgccatactaaggtttgatcctctccatcagttgcaacaatattagcttgatttttctttgtggtgccttgtaagacatatataccattaacaatcttgcctttcatgataattaaagaacctttcatagtcttcaaagtgctagtttcaatcttgacattgaatccatcttggtctaacatggacatagaaattaaatttctcttaatatctgatacatgcctaacctatttcaactc

SEQ ID NO: 47351 - DNA, 1059 bp, Cannabis sativa
agagggattgaataattaccttcaacatcaacaatcttgagcaatagatcacttgattttatgtccaaatgatttttttccctaaaaaaggatttgaactcatggtaaataaaggagatgtactcattctctgtaaaacttgaaatttgtagaagctcatcaatgttctcatcattaaggactagaggtgtagtctctatacttcgcatcttatttgtcaaattcttattacgaacctttagccaaaaaaaatgatttttgaaacatttttcctcacgttcagttagagtgtgaattaagtcttgaaaagtgaaaatagagtcttctttctttcttatttccaccagttgattttgtatttctcctgagaatttccaagcatcgtctcccactatctttaacttcacatctctaagatctccctttagcatatttatgatctgtcatgttcaagccatatgtaataacttatggtcagttatattaaggaatacttttttttctattttttttatctattaataaaaaatatattcacaaaaatctatccgtggtgagttgtctaatatacatttcatatataaaagtagatatatctcaaataatataaaaataaaggtaaaatttaaaataaataaattaaaatggatatacaatgcaatttagactactttttcataagacttgaataaggccggtcttgaaatttagtaggctttaaaaaataaaaattattggactttttatttaaaaaaagtgtaataattttaaaaattattgaaaaatatgtatatttttaaagggataatattttttttggactcgtgggttgaatatcttaagtgcaagcttaatttgccttaattcaaacccgaccctaaacctgagctgtattataattacatatactatgtaacaaaatagtattattacatgtttttttttttaaaaaaaaaatgaacacaactttcgattaaggaaatgaatcattggcaatagaataataccaggaataattacataagacaccattttttttaaaatatttacatttttacg

SEQ ID NO: 47352 - DNA, 1221 bp, Cannabis sativa
gcgcacaagtcattttcaagaaacaaactagtggaagacattgttggaacactagcatttttgccgctgatatacccatatgaaccatggcgctttaagcatgaacggcatcatgcaaaaacaaacatgtgtgttgaactttttctaatgtttttttatcgaaatatttataaattatttttattcattcgcatatgttctgttttagcatcttcactagttatatgatggcaagattttctcttcataagcatgtttcctgacttattaacattgaatactagaatttagtaatttctactgcatggccttgaaagcatattaagcttatggaatctaaacaatatgtatgttttcattactcccactttgtctggctcaattctctttgttgttaacttgtagtttatctaaatcccaggctttttgaggatactgcttggcaacctgtttgcaaagacgaatttgattcatcgcctgctttgcgcaaggcaattatttatggatatggcccatttcggccatggatgtcaatagctcattggtaatacatatttctaatgttttgtatccttcgatatggaattaagttttaaacttggtttcaccagacattattcttgttactgttctggttccaattagggtgatatgccacttcgatttgaagaagttcagatcaaatgaagttaaaagggtgaagataagtttggcttgtgtatttgcttttatgttcgtcggatggccattgattatatggaagacggggatcataggatgggtcaaatactggttgatgccgtggctgggctatcacttttgggtattactacttattttgtgtcttcctattaatatcttgaaaagttaaatgatgctagtttcccttttgtagttaaaaacactgtataatcaccaacatttgttatagctaaccaattttgctagttcctataacaaaagtgggcatgcattttagatttttatctgcatttctgttaacaagttaccctgtttttgaatgattattagtactttcatacatccaaattatttgaacattgagattcacttaacaggaagaatatttgtttcaatctatacatgatgtgttgtgtaccacaaattcatctcgcaatgttgcaattatttcagaaatttaatttgaaaatgctactgctgtaagcatatcccacttgaatgttggttactagatttgcc

SEQ ID NO: 47353 - DNA, 2567 bp, Cannabis sativa
tttatggaagttttaataaataaaaaagtttaaaaaagaaagaatataggtagagaaagtataaatgtaaaaattcccttgtcaaagtataaatgtaaactttgaagaaaagttagtataaggtgtaaatatccgaaaaaaggagtacaagctggttgttggtatcgtgagaagcaagcagtaggcaaagaaaaaatgagaaaaagatagggaaagaagagaagaaagctcgagagagaaattaagttttttgctaatttacattgacaatcaagtggttgattctcatctttttttgctcaaattttggatggtaaattatttcaatcggtgcaccacaaatctatcggttttcatttgaaaattgtcctatgtaaggtgctctcaactctatccatttggtgagactcaaactttttctttgtatatccatcttctgaggagatgattattatattggtgatccaagattgtttaatcttgatgttattgtgagcctctaatatttgatattgctaatttttatttttcttaagtatctcatttttgacataaaatgagagagatattgtgattaattacaataggtttttcaaacaagtggtattagagtcaaggttgattggtgttgaattcttgtgtgttgaaaaaaaagatgaatctaatataacgatgaaattgaacttatcaaattattttgcttggaaccaattgatggaagttttgctcaattgtaaagatttatataagcctattgaaggtagttagaagccatctaaattaaatgatgaggaatggatagttcaacatagaaaagttattgcctattataagacaatgaacggatatagatcttcatgagaatatctctactgaaatcagagctgatgttgtttaaaaacaacaataaaatctctttgtgaaaagaacgactgacattaaaatttatcgatttagaagacttgtaaatttgaagtataaggatggtgaatatggataatgagatggaagcatcattactcctcagttcactattagaaaaaatacctttgtcatcaatttttaactcagtttgtcttcgatttcttaaatgtatttgccaccgaagtcgtttgtggcgaagatataggtttcgataacattgtagacgtaagggaggcatatgtcgtaaattattttgtaataatcaaagacataggtccatcctattttcatatttgcgttgggggagagagaaattacctcttcggttattacatataaccaaggagataaattgtttttattcttggttattatgtaataattgaagagataagtgccgccaatttttttttgtttttatttatttaaatttgaatattattttaattttaattgttttatatttgttaatgattatatcttatgaaataattataaattaattataagaataaacatttaatttgaaataaaaataaattttatcatataacaaagttaaggtttacaaaagaaaatttaattatattataacaaagttaaagtatactttacaatatgctaagtattaataaaaatacaaaataagtactattgcataaaaatagatgtctaaagctagctagtacaagtattgtgtcaatttaaataactatgttaaaatggtagcaactttgtcgccacaatgtatttttagttattttcaaactataaaattaaaatgtaaattaattatatattacttacttataaattagtatattagttatgcgtatacataaatgaattaattataatatatcttttcttttataagaacgaatgaatttagagatttcataattttattgatgtaccttagtacataaaaactatattcgtatctcaatatttattttggataggttgcaatggttactcctaaaaacattccaagtagctcgttggaacctccaagcatttcatatgtcgtaattaaatttaataatttatattagattcaattagctatagctagtataaatttaataaaagttaactttaaaatgaaaatagaaatgtacttttggagtatgtggtgaatagttttcttagggcgtttatgtcctgtccaagggtccaagtgaacgattttccctgcacaggcgatctctcgacacaagtaagtttaaaataacttaaataaacaatttatcataattctaccaaaattttgataccataatgactataaattggacgtttccaaaaaaattaaccatacaatttaaaacatagaaaattctagaacaataaaaaagtaatttctacccattctattgtagtacatgtattggcagaacctacttcactacgaataaatatttaagatattcaaactcctctaacatgcatatatatttcacccatccagccgcattacatttattcacagaacttacttcactacaaatgaatgtttaagatatttaaactcctctaacatgcttattcataattaactttaacaaatcaaaagttagaaaaagtttacctttagctaggtagcaaaccaatcaacacttgccaaaaatcgtgttccc

SEQ ID NO: 47354 - DNA, 1258 bp, Cannabis sativa
tttccaatcagactgaacagcatatttcttagagcatttttcacacttccatttcttctcaccatgctttctacagaagtgttttttgatcccagtcaagtccccgagagcccgggtcgggttgtggtggacacacgatgtttccgggcagatgtagacccgttttcggattacctcgttcggacttctctgccgaagcttccatggcaagttgtgacctcgcctgtgaagctgcagattctggtctctctgaaaccctttgttgcaaatttcacacacaaatcggtttctcgctagtaaagtgtttggtgacaaggctattacctccgcacttggatctgtacgtacatcttacaaatattaataataataataataacaataataataattattattatatcttaattaataaattcgtgatgattttggttgaaacttgaaatgtattttttggactaaaaaaaaaaaaaaagaaaagaaaagaaaagaaaagagagagaaaatgatacagtataaggcaattattgcaatgccaagccaataattgaactccccccttctccttcaactacttagaccatcaataattcatctcatttttgcttttaattattattttaaatgagaaaatacaaatatatatatatatatcaattatttttataccgaaacgggaagaaaaacaaaaatctgatgagaagtttttgtattttgttatatcctatatggtttttgaattgtacttctgaatcaagatcatgaggtgatcagctgagctgagctagctaccccccctctcacgatcttaatttattttcctaccaaaaatatgaacagtagtaggcccagtaacacgtgagcttataagcttgggaaaaagcttacaagaatattcattatttttaattttgattttttttcaaaattataaattcaaaaaagaaaaggaaagatgttagagtaataaattttttgttctattctcttttccatatagctataaactatatacaatggccatatgatcagttgcagtcggccaacaacataataattgattcaacgaactgaaaattattaattaatttcaagcttttttttttggaacaaattagtttctagcttatatatataagcatgtaattaacataaataagaatataataactcatttttatgctcaatatacatcataattctcaacttttaagcatgaaaagaaaaagagcacaaaatagagcaagaattccactga

SEQ ID NO: 47355 - DNA, 1216 bp, Cannabis sativa
tttaaattaatttataaaaaaaaaaaaaaaaaaaaagaagaagagataaactaacatattattttctttttgtataccaaaaccagtcaaatatgatagggggtatcaagttatgtgtatatgagaatgaaaaagcaaaagaaagatattttaattgtagttttgttttgaagagaatgtatatgttgaatttatttttaaaatactcatatctacaaaatcagtgtgaattatgttatttagtacggttaattttctttttttattttttaaaaaatcacaaaaagttcgtaataaacatttatgtatgtttggtaacggtcgtattatgtttaataaaaataatattatgtttatttttttaagaaaattatatttggatagaattttatatttattaattattacgatcataaattttaatgtagtacaaattatattgtttaatatataagaaatagttgctttcaaaaaaaaaaaatataagaaatagttcgtattaacttgtattataatatttagaagcagttcggggtcaaggcttagtgtcgcggtcgaatgcagggtcagggtgcaggtccgaagttcaaatttgggatcaaggcatgggttcaaggtcgagtccagggtttggagccgagttcagcatgtgtgtctgcgattgaggtttgcattcggacctaagggttcagcctggtcggatttggaattgggatcttggtttggagtccgaaccagacaagatatgatcgagtttacgctacaaatagtataattttacacaatttattaatacaaatctatattaaatgtaatattatattaaaataatactattcaatataatataatacaatataataccgtttataagtactctaaataagtacaaatatattgtaattatattccaaaaagaagcatggtcaaatatagggatttgaaaaaagcaaaggcaaagcaataaagccatgaatattgtgcaatatttggtgggcctttgaaacactttgtggcccattcttttataatatttggcccgttctttccgcccataattaagctcctactttattggagttgacgtaatcttgtaaaagtcgaaatttacgacaagttaaaactaaaaatctacttgatcttggtcaataacaaacaacaaaaactaattttagaaaaataaaagtttaagaatattaccttttattttggtata

SEQ ID NO: 47356 - DNA, 1292 bp, Cannabis sativa
agtaacaatctgaaaggattgttgaaaccacgtacaaaaatcttgtatatttttactattctccactgtttgtttttctggttaattgtaaagttacagagttgccttctacaactacagaaaaactgtttcagtaccggtttattttctgtcgcatttaattaagaaattaattaaataataattaggtaattttaaaatacaaaatttcatgattgtaaatgttttttcttatagtgataaatcctcgtgccttttttactattttgcaatttaatttatttgactaaagttacagcgtagtcctctattttttactatcttcttagactagttgacgaaaaattgcgtcaatacatactaaaaataattacaacaacttccttattaaaattccacctaacaatgttctcatcccaatctaccaaagacaaaatcaaatgaatcacgatattgtaattacttatgatttactaatgtctagtttgacaaaatatttattaattacacataaaaaaatattaatatttagtagttaatatttaaaatctaaagtttttagcaattatatagcataactacattcagttcttctgagaatatgataaataaaaagtgtaattgaaacatctcaattacttaattacctagttagtctaaatacacggtcaacaaacatccaaaattgtataattacagacccaatttcaattctctcttagtcctctaaacgccccgttagtaaaggtaagtggaaaagattatcatgttataaagaacaattttgcttagacgattatatttaatttccactgccactattaatcaatcatctttaactattttgtaaaaagacgacgaaacatgaaaaatggagcatcactaaaatgaagccgccatgcgttctatctatttcttgttgttctctaaaacacaaagtactccgactgcatacagttctctgtttaatgttgacaatatgtaattatgacacaccaactaatgatatagttactgcctcgctcccatttttctatatatgataaacaaagacaaattttagcccttcccacatagaaatatatatgtatatcaataaaactataaaaggcgtttcgaaaaaagaaaaccaaaaactatatatgtaaggcgtatatacgttataatttaattatttatttaacgtaaaaaatatatatttatagcacaataaataaccatgtgctgtctatctaatatattcttttgcattgtgagtgagtgagtgagtttcttcttgtgctgttgtgctt

SEQ ID NO: 47357 - DNA, 1296 bp, Cannabis sativa
ataaaccaatatttgttagttttcaaaaaataatttttctatataactacaccaattgcaaccatgaacctaacgtcacataaaaaaaggttataatttctataaaattcatttagaagtaaaggttatatatatatatgaagctcactatatatattattttaaaatattaaaatattaatacaatacacatcttaggctagtgaaattaattatataaattatcaagtataatagtcctagctaatacacagggagaagcgcctaacgatctctctccaaggcattgccaatctatgtgattcaccttaattaatgttcagatcatgaagtagtacttaattcatatatatcttaatttcttcttcttcttccaattattataccttgatcaaagaggagtatatatatatatataatattcatatatttctatatagatataatatgccaaatcaagtagttgatcaatctatagaatccacgatggagatggaagctgaagaaaataactcaacggccatagtaaatgaagaggaagatttttctgcacaaaagggactgaaaggcaagaaaatttcatggcaaaggttaagaaggaacgactctttggacatcgaatctcgcagtgttggaggtcaccatgcatatgctcatgcctccaaggtttctatttctaatttaatttattgtatttgttattaataattaccaatttgtattattactattattatatttgtgagtgtttgattatgttggatatgtgagtgatattttatatgatatgaaagtgtgtgaatcaaaatttttgtgtagggttgtgatgattggtcagtgataattcaactagcattccaaagcattggaatagtttatggtgatataggtacatcacctttatatgtgtactcaagcacattcacaaatggaataaagcataacgatgacatcttgggggttctttctttgatcttctatactatcactttgattcctttgatcaagtatgtcttcattgttttacaagccaatgacaacggtgacggtaagatcactttaattcttcctcacatttattaatattgtgttattatttacacaatagctaataaattaatgagttagagtccatgttcaaagttgaagataatgtaaaataatattcaaaagaacatggaaaaactttttatttccagtaaaatattagtaactaataaataaatttgtgcgtacacatgaatatatttatatgtatattttttttatatgttgtgtaaattattaattaaatat

SEQ ID NO: 47358 - DNA, 1215 bp, Cannabis sativa
tatatatagtggaatcaattgactacaatttaaatgtgtaatgattttgtttctttcttttgtaaaaattatgttatatttgtcatcataaataattttatgatatatttatattaatttttagtattgtattttaatgtataattataaaatttgatgtacaatttaatgtttaattgatattttcatcaaaaatataaaaattaatagctttatctttaatttcattgttatttgttatgtaaaattatagaaaataaatgtaaaaaagtttatactttaatgcattagttaaatttaataataaaatattaaaaatgatataaaaataaatataaaaacaatgtataaattttacatcatgtcatattataatttaaatttgaatcaatttttgctatgtgataaatttaatttacaaaatgaactatattttaataataaatcattaatttatatttctattaaagatgttgttaaaattttcttcttactaaataagttgatattttataatagctattaatttgtgcagtgcaaataaaaaatggacttggtttaaatttaaagtatagacatggtaagactatttctaatagaagatttaaaatttatgttaaatttaacatacaaaataaatttgtgctatatttgacttaatatttacaattgtgctccaatgcaaaatatgtaaaataaaaaaaaaaaataattgattatattaaatcattgatggtcatttaatattttattaagaatatatagataaatattcttttttatttaaataatggcaatatggtaaataagaaaatgtaaactttagtaaaagtcaataaattataataattagtgtcattatattaaagtagcatttgttgtgagctaaatttgatacaatgttatatattgtgccaaatttaacataatttttagtatgtgttaaatttagcacataagcccttaaggctagcttagtggtgagggagagataggaaaaatgagaggtcatgggttcgaatctaagacttttaaactacaagctattaattgattgtaaaatattattacgctatattaaaaaaataaaattagcacacgttttaaaatactattggaataaatttttttttttatataagtatgttgaaatataacaacatgtcatatttttggcactcaattagaaatactgttgtaatcatacaacacaaa

SEQ ID NO: 47359 - DNA, 1539 bp, Cannabis sativa
aaaagtccttaaatctaacaatgtcaatagttcaaggggaatttttaatggccaaaaaagatctagagacataatttagcatttgtcaaaattcgggaaaaaaattactaattaaccatgttaatcttgctaatccattggtgatgtcaaataccataagtagcataagtagctttatagtcttctctataatgccaatgtgactccataacatgagcttttcctcatagatgatgtaatttctttcttgatcgttggatcagttggacgattaagattaagcagcaaaatcgatttctatattttatcctcactgctgggactacaagatagataaatgataaccaaactaattgtactttcatttagatgagcagtaccagtcttataatatagtcttattcaatctaattagcctttatttttcaactcactcataaaatttgctttattttcatctaagttgtttagaacaaacgaagtttcttatttatacgtaaactattttccaacccaaataaaagaagggcaatctctgcatgtcttctcaagttatgggtcatggattatatggagagccatttgtgcacgcctttaattatcatctcgataactttgttgcttaacaatatatgtttattatttttagtttgaatttattatgaaatgagaagtgaagaagtaatctcaaaagttgttatgtttatacattattactagttttttaggggatgtttatttgaagttagtatatgttagaatattttatgatttattattatagatggtttatatgtataaatcaataattgattattcataatttaaagattttatataattaattatatatttgatattaattaaaaatattttaattatggtcttattttgatttattaaatagtctattattatttgattttatttcttaaattaattgtcaaaatattttgacaattagtgacacataattatctaaatatttagctaaagtctttattttaagctcatctcacctaaacatagtcctaagtgaatgcatgtatataaataaagagaaaaggattgaaaaacctaatattgtcaaattgtcacttcttcttctctttgtaaattcaaaattcactagcaaaattctctttctaaaaattgttcaaatgtattttgagtattagttcactctattcaaattgatacacaggcctttgtggaagactataatgaacacaattgaaggaggagaatagatccaggttcacttcttgatcatactttgcaacagaaatgatcaagagctagagaactaaatgaaatgagacattgtattccgctgcaatcgatgtaagattttttctataactttatgtgttttttcatcattttaagattgttcatatttaggttgttagattatagatatataatcaacatacatgttagtaaatattagatcctagtaaaataagttccaacataaacatgatacgctaatctctcaaaaacttttcataaggcttatatccccccccccccccc

SEQ ID NO: 47360 - DNA, 1572 bp, Cannabis sativa
aaagatgaactaaggtctctattgatagtatttaggatcacactttgaaattcaataccctacacaccataactgttaccatctattaattgagtgtagatgagtgattttgttgttatgggagcagttagaaagcgtccacattgttaaaaaacgttccaataaaacagtaattagctactaattaccaaaattttcaaattttataaataactctccaaagcatccccattttattttatatcacttatacacaatataaatgataaaatcaaatctccaccaaatgtacttgtaatatagctttgaattttaaaggattaagttgtctaaactctctttacaaacttaattagtgataatgtagaacttacaaagtgtagtaatcccacctcttatgttacaatctatgtgaatagtatatgtatgtaactcccaattacattacatagtgattattacatgtgtgtaactcctaattaaattatatattatactcataatataatatataatattttataattttaatcttaaatattatattattaactaaataataaagaatatatcacaccaataaaattttcgcatgcaacttggacacactattgtaatgaaaatgtaaattaattagtttatttacgtacgtaactaataagttatactaactttgaattaagtaataatttaagtgacgtttagatgggaggaatgaaaatataagaatatgagtgaaaatgagaatagaaatagaaatagaatggaaaaagaatataaaatgcataaaaaaatcgataaaaaaattattaatttttttctcattatgcataggaatagtcttcactttcatttcaaaatagaatagattccattaaaatagtggaaagaccattccattagaatgacattccaatgcttaaatatgcaacctaacaaagaaatagaatgaagattgtttcctttctattcttttctatttctttacctccagccaaacatcaccttacattttaattttgtagtttggaaagaaagttacttaggagagggacttgtgaaagttgcaatcagtggttagcaaaattaacacaaaaaaagttatatgtactaactagcttttagatttagactttcaattttataaaagtacttattttgtgatctaaatttttatgatatactcagacttttaagtgcttatcatgttgtaaactttaactttgttaatataattaaattgtatttttatttcaaattaagtctattaatataattaatttataattatttcaataaaatttaatatataataattaaaaataatattgagaactagataaataaatacaaaatttaaaaaaaggcaagacctacgtctttggttattacataataaccgatgtatttggttagtatgtagtaattgaagacgtagggtctgctctccatgcgcatttgaaaattagttcaactttttttttttttgattattttgtaataacctaagacataagttccccttacattccagtatttttaaaaccaacgtttttacttcaattttcttcg

SEQ ID NO: 47361 - DNA, 1363 bp, Cannabis sativa
  modified_base (27)..(34): a, c, t, g, unknown or other
agcaatacgtggctcggcacgtacatnnnnnnnntatatatatatatatgtatacttctttatggatagaataaatattaatttttcaaaaaataataataaattaagttagatatataatattaaaataaaataaaacaagaagtgacaaaaatatttatcaatgtatatctttaggtatatatattaaattatcccaacccaacagttcaatacaattttcacaatcatcgccaaagccacgccgaagctccaacgacaagccaccacctcacggtggcttttgggaaagttgaggtattagtttcaaagctcatcacaagtggagaaaggatatggaattcatttgtcttgaaggtttcaggatttgcttagatctaagttcagttattccatcatggtgaagggcgaggaataaaattcttttttttttttaaagatttttatggtatatatttctaaaagaatgaaaagaaaaaacatagacaacacaatgaacaatatgatatgtgtctttgttcgggtcagataggaagaatccgaactgcctaaggctgcttccatattattagggtgttgctttgcatgccaactgattcttttgaggtaaagcctgtatttctgaaattcaaacaaagtaaatataaacagttaaacatatgatcatagtgaattaaacaaagtaaatatacctgaagatggctagcaacattttctcttgtaagattatcaacattcatcagatgaagaatctttttaggtacagcctctgcattggaaaattaacaaatatattaacatttgaataggacaatatgaacattgttaaaaaatgaacatcacttactgtctatgccaagatgattaacagctgtgacaaatttttgatgcagctctagagaccaaataactcgaggcttcttttgtgttgatggctcatcatcatcaaactcattctttttcccccttattacatgtttccagatatttttcagctcctcgattctaacaggtttaagtaaataatcacaagctccttcagtgattcctttcatcacaagtttaggatccccatttccagacagcactaagagaaaaacatatataacattttagaaatcaaacataaaaacttcaaaattgatttcttatgctagaaactaatcacgtgtcaaattttctttgagattcaaaaactataatactaaattctttaaggggtttttcagtattagctagctataaaagaatattttgtggcttactaatgacagggaggttcatctccaacctcacaagctcaagtaacttaaatccatccatgtctggcatttgcacttcactgataaccaggtcaaagtta

SEQ ID NO: 47362 - DNA, 2704 bp, Cannabis sativa
attaaatctagctaacaaaattctaaagtcaaattaatatagtattattacaacaaatatatatttttatgttttgtgtgaaagatgataaaattattattactttctactattataccctcaaatattcaaaatcatatttaattaaaaataaataaaagtcaaataataataaaataagtcttagagtaatacaaattattttttttaaaagtttattaatacaagtgcatcaattaaaatactactgtagcaatattttattttataatattgcagtttactgaatttttttaaaaaaattataaaataaatagagcttaaggaatcaacaaaacaaaataaaagagaagaagaacaagatttttacatggttgaggcattacaaggtccacgagtcaatattattagcttgaaaagcttttatgtattacacaagaataatattcttactcaagcttaagaaccataatttcagtcttagcttttgaattatgattttacaacccttcgcatgaagatataatctcctatttataggctagggtttatactgttagggttctcgtatgaaactagacccactgaagggttaatacatttaatattgactttgggctgaattaggaaagacctgattcgtaagataacgatcatccacaattgtagggtctatttaatgttgacagttgttgtgcgctgccagattcatacaataaatgtcaaaggatatagcattaagggaatccctaatttagtgggatcctatactggaggcatctccagataagccttcacttctggatatctcttagacagttcttagaggaatatcccatgagggtattgggataggccatattgggccttcttcttatggccgagaacccttcctggacttggacggtctggccttgcaatgaatgagtttattatgttcagctcatcctacaagtatacaaatttctggcgagatggtacatttttttcaagaaccaactggtagaggttctgtctcttgacgaaatcctctacttttacaagttggagtcgaatcctgatatggaaggacaaaactatagtcggcttctacttgttgaataattggtctaacgcgatatgttccatcagtacatgcaaatacactcagaattttgagaatattggtttttcacatcgaaattcccattaaaaagacatctgactctttcattggatttcaatgttacggggaagcactaaaacttttcccaaataattttctttgactattccaccacttttggtaaaagtctgatcagggtaactttttctggccttcaacatgatatttcccgtcttgagctagctccttttctggagaatgatggtgaaccttcactgcagtacaaactcagaagcgttgcaagtggatggtttagtcactatggagaaccataggcgagttagcttgattgctcctcatcagagcataccctcacaattcttgcaagatacatttcgatcaagctcatgtcaaacaagctattgccgagatcattaaaaacgaagcaaaagaaagccattaaaaaagataagtgctggcttgagaatgggcgaggatacatccagagcccatgaacgaagatgaggaacttgaagcccactttgttgacatcttcccagatgggggcacaccgggtgccagtacatttggaagaggtaattcttattttttcctagttcatgctccccatctagaagagtttgtcaacgctaatcaatgagggtttaacccttattttcttgagttagaccaccttaagtatcctgccacccacttctaaattagggtagatgaaatcatagagagtccaatccacttcatcccactatcgcaatgccctagagtagatccctttactttgatgaactacccatgcttctttcgatatggtagtttcttaggctgggaggacgtagcactatttgcatagggggatcctttgtacaataacaataacggttaaacccaaaccagatttttgcatttgtttattaattttcaagcattttttatttttctgtacatctgaccttgcttcaattcttttttgcaaagggcccagagacattataaatgagcatccttaaggccttcatcagccatgtggacattcaggctgatgtggtgtgggaggaatctaggccagcaaagggaaaagctagagcttctagttgtagaccacaaattaaagcaattaaatcccctataaacatggtggatgccactattgcggccaatgcactggacgattctgattctctgaatatcatggtagctccacagaactagattttgctagccccaaggcacccatcctggatcaacttgtggtcttcgggtgatgatgatgaggatgtggaagggcaaatctttccactaaagaggtcaatggaaaattttgagaggcctgctaaggatgccaaacttgaggtagttcagaagttgacatccaagtatttagcccttgaacggagggtagaaagagagaaatatgagcaagagaaggcaaaaagggagaaagataaaaaggagaagaggaactccccgagtgataaatatgcaaggaccacaaggtatcgagaatttggatcatcaaatcccaagcagtttacgaaagcatgaaataagggctaattcctcatccatctatttcctcag

SEQ ID NO: 47363 - DNA, 2445 bp, Cannabis sativa
  modified_base (2224)..(2242): a, c, t, g, unknown or other
  modified_base (2408)..(2418): a, c, t, g, unknown or other
tcttaaagtcaaagttcccttttggttctccttctctttttgttcttttttctctaaagttacttccttctgaaaatggcagttgagcttacaaaattgatgaaaggggttgtacttcattagttgctcagtcattagcgtacaatgtaataccgtaaaatagaagcatatttatttccattcttgtcccactaagtttggtctcctctctccacaacagccagttaccatgaatttgaatggctaccacatgagtgttagcctagaatgttaaatttgtttcagcatttgctcagcaatttagcccagtttcagcttcaatgcccactttgtcctcaccacctttccttttcactggtactttaactcttattttccaacagcaaacaagtaacattttaattagataaatacaactaaaaataaccatttttacgagacttaaaagatagcttcttaaatagaaaatgaagataaaaactaattgaagtaacaaacaacacactttcattattcttttcatgataattgaatgtttaaagccactaaaaataactgtataccataaaattataacctatacatgatgagtgtttcactttgaccatcctcttcatctttttcaagagacatcgaccaagatcagaaaagcgagtgtctacataaactcgctgacaagacattatctgcccaactttgtgaagatttttagcagtaaacaaagtcttcccatctctctaacatgcatcaatttcagtaagcatgatatctgctattctattcatgtcaatcaatggagatggtctcttaagagggccagccatttggaaggtaatatgtcttggtggaaggactggggtgtagaagtattcttgatggtaaagattgcagttacttttggttacatattttctgtgtatggactgaatttatggaagtggtaaaatccatcctcttttcaatttggacttcttttctagtcatagaggaagttaatttcaaggggagttaggaaaggccaatttcttaagcggtaaaatattaagaaggttgataggattctgtaactatttgaatttattttgtagggactaactccaaaagaaattttctattaatataaattttgggtgtaaaggtaagtaagcacccacattcatatcaaacttcaacaaagcagtacaataaggattctagaaactattgggacatccagatcgtggtttttaaatgactatttcaggaagaagataatcatctctaatcaattgaacttgatgttcagggatggtattgaatacaaaatgtctcaacttgaaacaccaatctcttgggtaatcactttcaatggcagctttaagaagctcagttgcactcactttcccaccacgtgccttgtctaagtttttagattttggcataataagcttgaatctaatgaactgagacacatgtgcatcagattcatcaagaattcttcaatttctcttcgtctgagggatggtggcttcaaaattttgattacttacaactgaagaaaagttattcttggtcttcaaaagatagattcaagtgttttgaacttttgaaagtcttaaatatgaaattcaatgatttctagagagttctagaatccttggaacaagcttaacaaaggaagaagaaggaaaaaaattccaaaaaaatagaatttttctacttcagcagataaagaaaacttgatgaattgatgaagaaaaaaaatcaaagactctcgaaaaggcttgtgagtgggaagcaatgtggaatgtgagaaaatttgattgaaagctgtcttagtggagctaaatcccttaattctaaggcagttgggagtcttttaaaatttaagcttaaaaggaaaagataaataataagaaaaaatcaataatcatttctcttcttcattttgcttaatgaattttaaaattcctatgagaataagaattctaaatttaaaaaattaaacaattcctaatgccaataagattaaggagaatttagagttaaaaaggaaaaagatcaaaaatcttttctcttattctttttttttttctataattcgaatgtcatatccaaagaggagcaggatttaatctaattaatcctaatggcatgagaaatacatgaaaattttaagttttcaaaggaaaagataaaagataggttaattaggatttttgtctcctgaattttgacatgtacnnnnnnnnnnnnnnnnnnnttttaagatcgttaaaaatgcccactgaactatggaggttgttggatttaaagactttttttccaattttagtaaaaaaaaagtctaacatggatgaaagttcaaaggccataactaagaacatgtcaaagtttgaggggcatgatttgtgtaaagcccgcttagnnnnnnnnnnnattagcagttgtttatgtttaattatg

SEQ ID NO: 47364 - DNA, 624 bp, Cannabis sativa
ccgattgagttgttggagctttggaattggggatcgaaccaatagaaataggctctattgatgacactagtcaaaggcgactgttactatgtcaatgtttcagagtatgaaaatagagtaaggaagagagagagagtattgaattaataaagctcacttttattattatagtaaattaactttactaatagtgtttacaaagtgccacttagtattttaacgttgaaagtaggttttacattgggcacaaaacccgcacaatagctctcacacggtttaatttaatgtaggtcgtcttatttttttttcttgagattcttataataggtcaccttggtggaacttgacttctaaattaactaaactactcacaaactcacatgcgaatgacaataagttttggcaaaatgtgtgtggttgagttttatttctcttgggatgctcgttgcatgatacttgtcttcgacctcgggatgggtagagctcactagaaaatgcagtcaaaatttacagttgtgtgacttttactaacgtgtgtagagcgatgacaagctcatcgatggcttaacagtacatgaagagaatgagagaaaaataaaagaaattaaagttgactttcgatca

SEQ ID NO: 47365 - DNA, 1454 bp, Cannabis sativa
aatagcgatattgacacgtagaaatgtattaggcactactagtaccctttagcatttctcttaaagaggaggaagaagggtcatgcatgcatgtttaagtagcactaaattaggcgtgagatgtgtcggtgggtctctaattttcaatgtttttgtctcttttttccatagagaagttaatgtgtgtgttggagagcccacatgccacttccattctcatgccgtgatttgctctttaaactcctctctacaagttactcaatatgtacgtatgaacatagaaatgtattcaattaatgatatgttctcacataaattttatatacacagttacatatgtggttagtctctttaataagtaggacatatctaaaataaaaatatgttgttgcatttacttgttatataagtatgtgtctaatttatatgtgcacatatcattactctattgcataatgttaaacaagataaaagtaatgttaaatactcatttgaattgcatacttattacaacgagtaaggttaaattacgctaatataattcgtgttgatttaaaaagtcagtcattattatttcagaaagtaaccaaagtgacataccaaatatatactaagtagatacaaataaagaaggggcattatagttatgcatgttgattaaagtttcatgtaatataaactcaatttggtgaatttgtacccttaattattaataatctatcaattcaactataaattaagaaaaaaaataaatagcaatataaatatttaattttaaatttataagccgtataaattttataatttcttagtagcataagtatttaatgttagtaatagtaaaattttcatttaattttatcaatactaaatagactatgttagtatcttgaacaagacacgtgtaattgtaaattcaaattcaattgggtctgaacaaaaaatgtagtataatttacttctaaatttttttttaataaatttaaaacggagtatatattaataaaattggacaaaaattataacatcgcatatttatactactaaaaaaatcattaaattatatggatactataaatacaaaactttgagtaaaccgtatgtaccttttaaccaaacaaaactcgttctcctttacatatttacttgtaatatatataagtgtgttctctcttcccattacatgttcttaaaatatttttccaaatatgtttatactttatactatttcaaaactttttttcccattttcttttattgactacattttttttaaactaacatatctgagaatttcacggtaatgcctgacaatcatatatatatatgtaaacatatgttagaatcaaataataaatatacactttattaatacagtaaattattaaagaaaaaaacaatttaatcaatgtttatgagtaagttctctcatatgttataaaaaaaaaaaaaaa

SEQ ID NO: 47366 - DNA, 2229 bp, Cannabis sativa
  modified_base (1117)..(1118): a, c, t, g, unknown or other
  modified_base (1545)..(1547): a, c, t, g, unknown or other
  modified_base (1798)..(1808): a, c, t, g, unknown or other
gtttcaatggcttggaaaaatagagaggagattgtcaaagctagaataagtttctcatatggggggtgtttcgtttctatatttcatgatgatataagattctaaatttctcttcattgttctctctgtctttttttttttttttctttttactatgatatgtctttttggacattatatcagatattacaatctctaactatgatgtagttttctttattttatgtactattactcgtttgttgtgtgctctttatatatatttatgactgtataggagaaaattcatgtcttgatcagaaaatgaaagaaccaattaattctcactagttatatgttcttcttgattcatttttttattagattttatcatattatcatttttgttttttcattattaaattatgtcataaataagcatcattaataagtatctctaagcttgtattctttacatctctgttggtaaggtctaggttattgttaaaattggttggcatatttgcattcattagatgactatgatctcactaactcatgtgaataatttttgtttgtttatatttgccataacttgcggtaaaaaatacatttcttttgcgcttgtacatttaattttgcaaagattcttttaaaaatagtatttttctttgtatggtcaatatggtcagggtttctctcatttaaaagccaaaaaatagtgaatcgtttttcacttcatctttctcccaagaaaccctaacttttgcagctttcgaaacactttgtgccttcagaagtgtttctgtcttagtctatcatggagaatgccgtctccttatcgacttctacagaagccatacaccctccaccacttgcacccatgtcgcctctaatgtgatgactagtctagttgaaaaggttttcaccaaagcctttccatgtctagctattgttttctatcagacaccagttgttgctcctcatatctctataaggttagcctctcctccgtctcctctattgcaagatctttaaccacttaccttaatgatttttaacattgttcaaatatttcaaatttctttacataaggtaaaatttagagtgatcgtcttaagaatttaacgataactcnnatccacccctgaatgtacattcatatgttcaaatacagatgatcctactttcaagtggatagaggcatgttttttctttgcaaagaatgatcttgtcaaaactactatgaacaagatgcaaatgccataaatatagtattgtggttgtggtcttttgatgacttaggcttagttacaacaaagagttcttagaatagtccaattgagttctggtcacagaatacaaaactcataatccgtatattaacatacagtttggatccattgttagacaatggatattaacaacttgtgaaagttatacagtattgtccaatgtattcttggaagctgaaatttaaaatttttatttagaatctaaaatttaaagttaaagacttaaatttataataaatatttcttttgagtaattattctttcttggacnnncactactaatctaactataagtctaagttgcttttagtaagcatatacaagtaagagattctataagatcgatgatttatattattttgggatagaatatctggaatatagtcatttgtgccactcaattttattgaagaaaatagaatgacatcataagcaaatgatttataatcttttttatccaatgatatactatttaagaaattttttaatgaaaaagcttagaggaaaaactaaaggataatttnnnnnnnnnnnagaatccaacgatgtcccagtaggcgagagtcaaagttattattttataaacttttttattgtttgtaaacactagtctaagttgtcatctttaaatgggtcaattagattttgtacttataaatatttatctatcgagatctaacactattatgttgtctaacggatgacaatcctttgggatttgtcccattaaaacaacaaattaagttagaccagcaatgaagactcaaaatttataacttcaataattaataacaaaaaacaacatgaaggttcaatataaattcatacacaattcaaaaattattaagcatttagcaagtaataaaaacatacaaaacaaacacatcttaaataatttctaagattttcaacaaactgatacagtgtcccggtaggcgaaagtcaaagatatcat

SEQ ID NO: 47367 - DNA, 1845 bp, Cannabis sativa
gcgatattgacacatagaaaggtgttaggcaccactggtaccctttagcatttctctttatatatttatgaaaattccccttaaatgttgttgataatttcaatgcacagatggacccatttctaaaaaaaattcatattctagaccacacacctaggtaggtgccccaagcgaatggaaaataataataataacaatggaattgaagaaaaagaggcaaataattccataacgccccttctattctgaccttgcaccaccaatgttctctttcctttggtctaaaatgctttgctacttaaatggtatcgagaagccttggcttctaatctttccattttcaattgttttataattctttttctacacaaaatacttagacatatttgctattataatagaaaccagaacaatataagtagttggtccagttcccacttcccacttcagtgaccaattcatctgaaacaacctataccaaagtagacttctgttcatgtaaatttaacattatctactactactcaagctctccattccaactatcagctaccacacctcatccgtctactaaaaccactctgaatacaacagtttgttttcatataaagatttcaaatttaagaatgattagtttttcattagctgatcactttaccatgtacctttattatgttacctaatgattgtaacagacgcaatacacaatatagtaacaccaaatcaaatcaatgcttcaagtgcaaatataatgatgtttttgtaagtatgggcttctttctttccttctgtaatgctaaagtataaaagggtttatcattaaagtcattagtggctaatgtagtaccatgcactccatttccatttcaactcaaaaaattgacctatcaaaggggcagcaagttttcctaacatgaacacaaatgctttccaaacctttcttcctgagtttacctccatatatgtgtgtgtatatatatattaagatcattgccaagaaaagacgtaacgatgtagtaagaaaaatgaatgaatgtagtgagaaaaatgtttctctatgaaggcttctcatcaattacctcaaaaaggaaatgaaaaaaggagtacatttttaagtcttttaaccaaaatcacccaattcttgaggaatgggagcaaaaaattgtaaggtgatgaaaaaacaaaaagtacagcagatgtttaaactgatattggcttgccttgcttagatagttactatttatgcaacaattaataagaaggtaagcaaccattttcaggaggtgaactatactcactagtcaattgcactcaactccagcttccgcagcccggtgaggcttgtttttccgcctactgctaatgtggcggaaactaacaaactgtgctgtttcatctggtgcggactttgtttcaatgccattctcatcttttactgaatccatattttctttcaccggagtagacctttgtcttttcctaccattctctgaggcaccctgatataacaaagtctttgcttcttcactatcttctcctattttctcagtttcttcctctctttgaacatcttcgttcaatggtttctgtggtcttcctcttctccgataagctggaaccttttcttctccactttcaggatcttctcgaacaactgtaacagtgttctttttccctttacctctacctctgcccattgtcaaagttctaagattttccttcaactttcaaaactaatgaaaacttctgcatatagaaaaaaggtgatctttagatgccaaatcaatatcagctaatttaatgaactagatcaatataggaactgcatagtttataacaagacac

SEQ ID NO: 47368 - DNA, 947 bp, Cannabis sativa
agaaatttgacatgggttttcatacaaatggaaatcaaaagagagataaaggtagaagaagaagaagaagaagaagaagaagagtaacctctcacgctttgaggaggcggagagttgagtaacaatggattgaagcttgagcccggccaacatttcttccttcctacggatattctcgagcctctgacactcgtacgctgtaagcttcgcgggcgccatggaagcgaatagaaggtccagagagagagaggaatggagaagaaaaccgccacaaagaaagtggtgtgtgttaattttatgaagtcacatttgctgatggcgggaactatgtagccaaaatgggtaagtaagtatttgttccccgctaaaaataccttttatcactaacctcagtctataaggtagcctaatttggaataatgaaaatatagaaaaaagttaaagatagaaattggaataaaaataaaatttaataaaatttaaaatacataaaaaattgataaaaaaaattattaaattttcaaatttagcaatagaatggtttttttttccattttaaaatggaatattcattctactaaaatagtagaaaagtcattctatctgaatgatattctaatcattttaatggcatatttacttagagagaataggaatcaatggtataatattgatttctatacaattgtttactaaatttaaaaaaaaaaagtagtagggttcacacaaattagtgagaaaataaagaaaaaagttcttctaaaatagggaatatattttccttttctaatttattttattttcattttgattttattaattaaaaatgaaaaaataaatatgtcttttaaaaatttataaacaaaatataattacatgttttaataatggcaatttcgtcaaattaaagcattacaataatattttttagttatgtaaataaaata

SEQ ID NO: 47369 - DNA, 2110 bp, Cannabis sativa
  modified_base (44)..(75): a, c, t, g, unknown or other
taacatacatgtaatcataattcacttcaaaattctaaattgannnnnnnnnnnnnnnnnnnnnnnnnnnnnnnnggcataaaacccaacagttcctagtctgggacgtgcattttaatctggttatatccagaatatgcatccatgaaagtcatcaattaattggtcaatccatcgtagtgggaaacaatcctaagcacatgccttattcaaatttgagaaatctagacaatttctccatgtgccatttggttttggtacaaggattggattagagatccacgagggatagaaggcttctcgtatgaagtcattagttaacaatttgtcaacctcttctttgagcacgccttgtctctcaggatccaatggccgtcgcttctgatgttttgctaaataattgtggctgatattaaggtgatggcaaatcacatttgggtttattccaaccatgtatgagtggctccaagcgaactgatcttggtttgccttcaaaaaagtgattaattgctattttaattcttcctccaagcttttcccaatgtaaacacacttcatgggattgtctggatctaaaatcacctcttccaactctttaattggtttgagttggttgttatcatcttggatcctaggatccaaatcttctattttcccctcgatttcttcagtcagaattaccatcagttgatgattggctcttttattttgaagttccactcgataacattctcgagccaataattggtcgcctctaactgttcccactccaaagtgcatgggaaattttaaggacaaatgctttatcgagctcattgcccccagtccgattaaggctgggcgacccatcaacacattatatacataggcgataccgacaaccaaaaattcttgcatttgtgtcccagacaatggtggttcccccatagttaagggaagctcgattatgcgcctaagatagcgacactgtacctgtaaagctgcacaaatttaccatgcaaggtcttagttttgcctcttccaatcccttcttcttcaatgtatccttgtaaagaatgttgacagagcttccattatccactagtactctcttcacccttttattggcgacttgaatttttatcacaagaggatcaccatgtggataccgcacatgttttgaatcttcttcagagaagatgataggtggttcatttgacttcgctttcctcgaaggttctggagcgaatgctgattgttcaatttttacttcattaatgtatctcttttgtgcactgtgttactgatgtggtaataatacatatttgatgaaagatatactttacaacactctaaaattttttttaaatagtcattattatttaatatatttttatataaagccatagctttcggcttggctgactggtcgcccatcccatccttgttccagtttccattcccatccacaattattcataataaagatgaattaagaagcaaatataaatacatgataaacttttgcttttaattaaacaaataaaagcacattttgaaaaatgttaatattttctccttttatttggaaaaatgctactgaaaaaatttaagtccctgactttctaacctaagataagaaaagtagatcgtaatgcctttacatcgttttctttttttaaatagtaattattgatactacttagatgtgaatatgagatttgagccatacttttcttgatgttgtccctcatcatcgtggaatataaaaaaatcaattgcaaaggatgtataccctattatgatcacggctggccgtacgaggccggtagtaaaaagttgaaattgaacctttattaaaaaaaaaattatcaatcaatactttataaaatatttttttttaaaaaaaaaaaaaaaaaaagataaattttaaaataagtaaaatttttagaattatgtatattggaatttgaagactttattaactttttatataaatgctaagtgtatatttactcttataaatatttattatatgtattatatattggaggagatttcaataattacattaaatatgtaactatggttacattttttttttagacattagattattattgaatagttg

SEQ ID NO: 47370 - DNA, 1877 bp, Cannabis sativa
tgcttttggaaaataaacaagccatctaggagtcgaaagtgggacccatcgcccaggttgactttgtgccaatttccaaacatttttcctgagaagtctttcgggaatattccccatttttaacaaaaattaagttatgagtgttttggggagtcaaacatattcatctggtggttaaaattgggacccaacatccatgtttacctggtgcctggtcccagcgcccagattgacgttttgtcaacttgggccagttttaagtatttttttagaagtgtcctaggaatctttttcatttatagaaataacaaagatacaagtgctcttgaggagcaaacgagatcatttaagggctaaaacggggccccaatgctcaaattgacatgggtgttaggccttgtgcccaagtttacatacaacacggttcacatattttttctcctcaaacacaaattctactctgagtattcttgttattttggtcaaaaagaaggtaggagacctcactagcagtctcgaataccatagaagtatcaaaacaagccgtgagaagctctccaaagagcacttagcgcaccagcccaggttgacatgtagcctagtgcactgggttctgcttatcagattcgggtttcgtcttgagcatttggcaattttttttataataaatgagatatacgacttgtgacaagtcaaattcagaccttgatatttcacatttttggtaaagtggaatatcgacaaattagctgcaaatcaggatgttttgagtctacttgattttgtgaaaaagtgacatctttgagaacttgtgaaaaactataccagatctatgaaattgactaagtaatctcaatatataactaaagcataaaaaacaagttagacatgttttcccactcaatacaacatctatgttgacataagaatgtcaacctcggcgctagatgtcaactgggctctagatgtcaacttggacactggttgcagacccgcccttagtaaaatggccataactcactcaatattgatctgattgatgcaactccagttgcattcgaaagctcttttcaagataattcaagacatgtctcacactcatatcgcaattctgaagatttcaagtctaaatttcctcctcaagacaagtgtagttatttctacaaattacccgaaaacgatccaatagacacaattcgagctctgaaaattgacgattattatcttaagttaatttagccattagatcgttatcagtggtccaaattagcctagagtaattttttttatatattttttgtattatttattatcattttaatggacctcgttgcctataaaaagagagctctattagctcatttttacattttactaagtccctataagattatagcatctctctgtactttttttctctataaatttgagtttttttctttagtcaattctcttgtaatcctcttaaaaaaataaaaacttgaaatagatgtagctctattaccatcgcgacatgaagagtataaattatgtgtgtcactctttaatatttacttaactcattatttatctcgtcaatctagtgagctagtgttggccaattttcagtgtcaacataaataataagagcacttaatacacatatacatatgaattcaagaattaacatgtgagaataaaaatatatacacaaatataatatatagataacaaagaagaaaaatacaaaaaggttattgacattatttaagtcaaatgattgtatatataaatatatatttaatgtatcgtgattttaaaacaattcaagaaatcaacaaacaatatgacagagggctagtttggcacatttatgctgtgggaaaaagcagctgtag

SEQ ID NO: 47371 - DNA, 2003 bp, Cannabis sativa
  modified_base (91)..(111): a, c, t, g, unknown or other
  modified_base (1413)..(1418): a, c, t, g, unknown or other
aataatatttattattttattaaatataaataaaaagttacccataaatttctcctaaactaagaattcaattatataggcacactttatnnnnnnnnnnnnnnnnnnnnnatatatatttatatatataggaaatagattgcatcagacattagacattaaacagcacccatgcatggtgttaatctagaacgtccataacaatacaatactaaaaaatatcctaaccttttttgactcaaacatcaccattagaaaattagactttagaggcaatttttaagagttttgtgagaaaattatgactaaatgtgtagaatccaatcaactaaacttttaacaattaaataattagcaataataaaattatcaaactaagaacaataatcaatagaaaaatagaagcaaagagagtgttaaaacccgaaaacactaaatgcaaaaaataaaaaaatcaacaccaagatatatagtagatcaagtccgatcaatcgatgtgatctatggttctactcaagttttggaacaccaccgcaatctttcttaattgattgtgcaagaataggtacaatacagtcgagacgagattctctgttaagttctcacaaagtgttttaactctcacactttccactcaagaatcttcttttatctaccgaagattcttcttacaaagcccaaacccatgtctctctctcttttctctgcacctctctctctacctgtcaatctttctctttctcaaactcttaatctcatctgatctgagtactaaaatcttgtcctctcgtcctctcgtcctcaagttcgtctaaaatgataagtggaggtggtatttataggcttaggatcaagatcctaaagtcggtagctgcaagaaatgaggttgttaagttagttaggaataactaacttaaccaactcctctttgagcgaagtctccatgtcagcgtaagtaccagggcctccgagaacataaatgagcttctagactcgagggccacgaatccttgctgaagacgcttccaaataggataaagcctatagaagtcaactatctggatctgccattctagaagggataactagttagctggaactcctttctagggaagagctagctatcctaagaactggacctggagaggacgtgatagtcatccgggaactcccttttggacctgactatcattccacatagctgatcctttcgggattgataatagtgagtgaacagcttcccaaaaataaaatttgcggagacatatttatttggcgaaacaatagcacaaatttcacctatttacttcaaattaaaagaatgacgatgatgaagaaagaatgcagccattattggtttgtgttctaggaatctcagtatgctaacttctgagattgatcaagttcaagcannnnnngaacttgtttaaggttaagaccttagtcccaacatctgcatgattatcttcagtactaaccttctccaaatcaaccaggccttcttctatcttctctctaatcaagtagaatgctatatctgtatgtttgctcttttcatgagaaaccggatttttacaaacactactacaaaaaaacccctttagaggcagttttttagccctttcagcgtcagttttggtgaaattcgctaacgacgctgatcaggccgaagctaaagggttttaaaaaaccgacaccgtatataccctatggcgtcggtttttagcttgaaaccgatgccatagggtacatatggcgtcggttcctagctaaaaaccgacgccatatgtggcgtaggaaccgacgccatatatgagcattttttcagtttttttaatttatataatttatttaagttatatatttaatcaattatatattattttatttaatgtaaatttaaattacatatttattttttaaaaggtaaattaaatattatttaaattaattttaaaattggctaaaatacataatttcatttcataaaagtaattaaatat

SEQ ID NO: 47372 - DNA, 1432 bp, Cannabis sativa
  modified_base (160)..(165): a, c, t, g, unknown or other
  modified_base (1026)..(1042): a, c, t, g, unknown or other
aacaacatagaaggtatctcttttcaagggtgcattggagaagctatcactttctaactaaaaatgacaccttaaccaaagtaccaaatttactaatatttttctccaaaataaagtacaaaactctacttcacctttttcaactctctctctctctctnnnnnnctctctctctctctctcacttgacttcttagctttcactctgtgtctgtcttacaattttgtgagctgtaatgggagaaacccaagaaatcacactgacccagatgaggacatcagttgagaagcttggttcttccactgaggtaattaaagatcaaacctttttcacaacccaacaacatatgagttctcttatatggctaatttatttgttttggatcttaaattgcattttgttgtactatatgctctttttttttttttttttgtttggaggcagaaacatggtgatccaacactgatgagattcttaattgcgagatcaatggacccaaataaagcggcaaagatgtatgttcagtggcagaaatggagggcttctcttgttccaaatgatttcatttctgactctgaagtaacagaagagttagcagccaaaaagatttatttgcagagcttatcaaacaagggtttcccagtgttcatatgtgaagggagcaagcattttccttctaaagaccagcttcaattcaaaagtaatacatgattcatttcttttgacaatttcatcacattgcattcactagcattgggtatttagcaatattctataatagttattaaattagagcattgttattgggtaccagtaatgtctaatattttctagacgtgttaccagtaatgtctaacactttctagacgtgttgccttgaaattagttaaagataagcaccaaatgctttctattaaattatggagcattgctattgggcacttgtggtgctgagcaccacctttcataggtggagtcctacgatcggttagcgatactccctaaaagttattttattaagttatnnnnnnnnnnnnnnnnnattacactaatagcgatatgacacggtgctagacatcaatattaatttttagtatttttctattaaatcatgtacacttaattaatctaatacccttataacatgccttttagaatatttctttcattgatgccttttgataaaagtttgtccaattagtggtgggaccattattgaatatgtcaacaacaaaatagttcacatggtagaattaatgatttaggtactttggttatattatagtgtcatacttcctttattacttgttatgtggcacctaaccatataataagggacctcaccttaatgttttgtgctgattttgtttggtcagtttgagtaaaatttatattcaaagaggtcagcttatatgatcttacttgtcttttt

SEQ ID NO: 47373 - DNA, 892 bp, Cannabis sativa
agactataaatagaaaaatcctttctttgattttaatgaggattaattggattttttccaatttaaacttgatcacacaataaaactttaataacaattaaaagaaatcggctaaaaaaagaaataaataaataatctgattttataatattatattatcaaactttacagatagaaatatttgttatattattcttttaatatttaaatcaattaaaatatatataaataatatgtatataaacagctagattaaatgagaagataaaatatttttctcaaaataaaaaaatacaaaaataaaactaacagatatgtttaagcaaaatagtcatgtcttaatagactgctggatttatttatttatttttttatgaaattttgtcaaagttcttaaataattatactgtataacactattaaaaaaattagactacaaattttttttcttataaatttactcacaccaaaataacatttatctaattactaaaatgttattattgggttataggatgcttcgtagacacattttttaggattgcattatagaagaaccctacattagtatattttatttccctaaagaggagtgtaaatttagcatgcttcaaacttcaattgggccctaacacccacaaactcatgactcttatacacgagtgttttgccctcactcgcacgcttcctggaaaaactttctaggacaggtcaagcacgcttaactgtagagttctttcgtggtgggctaccgaaaagtaagatgcatcttgttgatataggtagtaccaatcaatctattttaacccttttaactgtgtagtctcatgcctacacagtctcagaatcatcccacttgacattccccaggcggtgtgggattgtacagctt

SEQ ID NO: 47374 - DNA, 1019 bp, Cannabis sativa
tccttgtggtactttaatgaagttgggcaacttgttgatcaggctatagactatgaatggctccctgcaaaatgcaagaattgcagctcatttggtcacattcaggcagattgcaggaagacagagataccagttgagaagaaactaggggtgaccaagaaaaagtctgatctaaataaggaagccaagaaaaagataatgaccaagagttagtaaaaagaggaaatcaagctacaaaagaaggctcgatggctgaacctgatcttgatgtgaatgatcgtgctgttggggaatccagtgtccaaaaagaatggaaacaccaaagaaagttgtgtctcagcctaagaattctaccggaggtcatgttgaggaacaccaggctacaataacttcatttgctgctcttaaagtaaggtaggaggaggggataggagaggtaggagttggtgtatccatgttgggataatggattgttgcaatataggatgttggaatgtgagagggttgaataataaagagaaacaatggactgtttttgatattttaagtttgaataaagtttgaattggagcatttcttgagaccaaattaaaaggggacagaattagtgatatggtttataaatacactagttgggatttctattctagtgctacaattgaatgtagaattttggtggtttggaggaaagactttgttaaggtgaacatcataaaagaaacttcccagcttatacactgccatgtcaagatgattgggcaacaatatgattgttgtatttcttttgtctatggagctaattcgattgaagacaggaaaagcgtgtggcaggttcttcataatttgaatttccctactaaagcttcgctggtgtaggtgacttcaatgcagttttttttcatgatgacaaaagtagaaggaataaagtcacagtggttgagatatttgactctactaattggctgacctttaatgggaacgctgaaaaggacgggttcaaactatacttggactaacaa

SEQ ID NO: 47375 - DNA, 1610 bp, Cannabis sativa
aggttgtgatcttctattatatgtcaccttttgttgaatccttttggatttcattttcaatgtatattttccttggatagttcctcattttttctttgttttctttgattttgggtcatgattgagtgcttgctcaaaacacttctcttgattagacatataaacttgaaatttacaaaattaattctttattgatctttaaaaaaatattaaaataaatatatgtatatattatcaaacactaaaataaatatatatgcatacactaacaactattgattaaatatttctaagctttaatatatatgttgttgactgttttatttatggctaagtgatcttatttctccgtacagctataagtcacaacctcatatatcaataaataatttttcaatatttatatataaattatttaatattaaatattaaaaatttaacatttttgcatatattaaattttttagctctttattataatacttagaactatctttacaagccattcagtacataaactctaatagttcattaaagattttagtgtataatgtttcaaaatgttataaactggacatatagatttttataattacgttattttttttcacaatttttatattatagtaattttgattgtatactaataaacaaaaaaacataataccaaaatatatttagtttaagaagagaatatgcaaatcacaataaattaaatagataaacatatgaaatactctttttttaagtagatttgagtaatggcaagtaactattttccaggatacaatagtcaaaagaaccactaattccggcgaactcgaaaccaaacattctttcaaccactgaaaaagaaaacactagagaaaaagatagctagagactctgtgttagtgtgctttcctagtaaatactaattatatatgccgatatttgatactttgatagagactctgttatatatatagctagagactctgttatatatataatttgataattataattaaataacatatatatgccgaaatttaactcaccatattatgtatatacatatcatattgtaagagtactgaattcagtactcaagattgagcaaagggaaaatagatggagagaaaatggaagaagaagaaggatgaatgaaaagctcaaccgaactcagttggcaagctatctgttatttatatataaaagatccaattgattacatcagtaaagaaccgaaaataaaggaactgaataacagacactctaacaaactttaactaccttgatacacggttaaaaccaataaaacagtaaaggaaaaaccagagtaattgcagtagttattttcagtgctaacaccccccctcaagtgacactggtattaccaagtgttaacttgccaagaaaatactgaaaggacaatgctggtagaggttttgtgagaaggtctgcaagttggttttcagtttccacatatcgaatgtcaagttggtgtgccagaaccctgtctcgaacaaaatgcatatcaacttcgatgtgctttgtacgagcatgaaaaaccgagttggaggctagagatgcggctccaagattatcacaccacaggataggagctt

SEQ ID NO: 47376 - DNA, 1782 bp, Cannabis sativa
tgcttggttaggacttctaggacttgcgtttgtctgctgaaaacttggtttcttattatttactttaataacttgttcaaacaaaagtgtttggtttcttgaacttcaaatgttttgtatcttggaacttagtttctgggtactagttgttttactttgcaatagtctttcttggtagaggaacagattttcactataattttcagaaatgaattatctaggaagtgccatatgggttttagttcaggttcatttagaagaaagaaacaatttgttagctttgtctatagcaaaaaagataaacagaaaagttagcttttacatatcagggttaggaaattatcttgctctcatgagtgaccattgttgcgttgctgctaacaagaaagaggttgggttatgtaattcctatataatttggttgatgatctcataaaataagaataattatgaaaaagagtgagaaaaaatctagagctttgttatctttgccttggctatgagcaattcctgaggttagcttatttgtgacattgtttttgtgattttctattatgattgcccataacccctgccctgcgattgaaatgggtggtgccaccaacagattcttcgctctcctatcttcctccaccaccacctaattttttttcatactttgtttctgcaaattctgtctgaatcggagcagttcctcacactccttcctttaattattgtccaataaggggaaccataaatgagaaattcacttggcttgactgtagtttatatgcaggtagcaatgtacgtttttattgtttttgttacataaataaactccattatcatttagcttgagctctaacaagaccattgctttttttgggtttcgaaatataaaggaactaaatagaatgcaattatacttgtcaatttcattattttttaaaccaaaacaaaaatgaaaattgagatggtgttgttttgactggattttgaaaacaggtggggttggagatgattgacacttttgctcaatcgcaaggcattgaaataaagacagttcattgaacagctatttttggacagagtatgtttctattcacttatttattatatttttggtacttatttttatgtttgatatataggtgtttgctttttctatttgctgggttttgttactgacactcatattttccttgtaaagcctcaaatctatccgaattagtgaatttgtatgtaatcgagccttattcttcttatttactatttttttaggtgatagaaatttttgaatatgaagtaggtatattatttttttaattggtgtctatataaaagtatctaaataaccaacgtttgaatcagttaaaaaattggagtatgcctctaagcttattaacattatatctgaatttgtttattgattttcacaaagaattctgtcaaaaatatgatatttcaaacaagttaaataagtgctcagaaactccccaaaaaatttagctaaatcaacaaaaattcatattgaaacttaagtaattaaaatcaatgcagtaatacatcaatttgacagtgttaagtacttctttcacaatttgacagtgttacgagatctagaattgttttttccactgttcttctactaaatattggtttttcataatgatcaaaacttctatggctgttgtctaaggacttggctttggatattaggaatgttgaatttataaattatgcttttcatttcaagctggttctctttcatcacagttggaacctcagaataatggcatc

SEQ ID NO: 47377 - DNA, 709 bp, Cannabis sativa
cgaggggcccgccgctattggtccttaatgttgtagtgtttcatcgtaagccattgattatttcacaacagcagagtatgcttctactcttccatcaagctggctaaaaaccatctttcaaatattgttggatgaatgactactaggaaactacctttcaaagagctgttggtgggtgaagttgctgcctgtgaatttgctatgaaaaatgcaataaataaagctaacctttttgtgattgtgaaaaattgattctgaaaaagtaatcaaagcactgaagaactctattgtggagatttgtaattagggacagactgactatttaaaggcaataaaaagttgcaacaaaaaaattaaatatttttcttttcatttaataattatactacaaaatattaaaatagcccaaacaaaattaaataaattatttaaaatagacttaaatattaatttattttgagttattctaggagaagtttgtaatgaagtgttcaaaataatttaattataagaaatattatgaaggagaatatatatgattgtagaaaaatgtgtaaactgtgtttggttgtatagagtaatatgtaatcatattcctgataattgaattacacagtttaaaggagtacaaaaatcttatatattattttcaaaaattaaaataaaaataattttttattatatctgtttaatattaattatacataaa

SEQ ID NO: 47378 - DNA, 1671 bp, Cannabis sativa
agttcggttggctataggtttccagggtgttttttcggttgattgtagagggaaaagtggaggtgtggctttgttttggaaggatactgaggatgttactttacttggttttggagttaattttatagatgttgttgtctcgggtagtgaaggagttcaatggcgtcttacgggattttatggtgagccaaatagaagtcttcgtaagaatacttgggatcaaattcgctatctcaagaccaagtatacctggccttggtgtattaccggcgatctcaacaatgtttcttctcaatcggataagagaggtggtaatccgtatcccaattggcttattgatggtttcggggacatgttggaagattgtagtttaattgacatggatctatgtggttacccttacacttgggagaagggcaggggtactaattcgtggatagaagttcgtattgatagagccttagtttccaaaagttggttggatattttcccacttgcaaagctgctgaatgttgaaggtacaacctcagatcactgtccattgcagctggtgttaaatgcagagaccaaaccagcttttaagaagcatttcaggttcaaaaatctttggctaagggaacccggttgtttgcagattgtgaaggacacttgggaattttattttgggtgttctatgttggaaaagatcaggttttgtggtgaaaagttactggtatggggcaaggactattcgggcaacttcacagatcgtattaagagttgcaaagctgagatcaaaaggtggggaaaaggcagggattcactttctgttcaaaattaccaatcggttgaagctcaattacaagaggtcttgatgcaaaaagagattttttggcgtcaaagatcgaaacaattatggctgagggaaggagatcagaattctaagtatttccatgctatggcaacttcgagaaggtgaaataattccatccaaaagctgaaaaatgaccagggagtttggattgattggcataataatctgtctgggttaatggttgattatttttgcagtttgttctcatcttcttcaccagatatcgatgaggtaacaaatgctattcctagagtcattactgatgatcaagctaatatgttgatggaacccattgtggatgatgaagtgagaagagcactttttcaaatgcaccctgttaagtctcccggtccagatggcatgacaccaggattctttcatgaatattgggatgtggttcggcatgatgtaatcactcaggtaaaagattttctttgagtcaggttattttcctcctgttttgaatgaaaccaatattgttttgatccctaagaagaaacaacctgagactatgagtgatttgcgtcctatatcactatgtaatgttgcttacaagatcatagctaaggtgtaggctaatagacttaaaggcgttcttccttgtgttatttctgaaacacaaagtgcgtttatacaagggaggttaatctcgaacaacatcatgatagcttttgagataatgcattatctaaaaaggaaaagaatgggcaaaccgagtactatggcgctcaagcttgatatgagcaaggcatatgatagggtggaatgggtatttcttgagaagatgatgactcaaatgggctttccttggaagatga

SEQ ID NO: 47379 - DNA, 1232 bp, Cannabis sativa
  modified_base (1185)..(1205): a, c, t, g, unknown or other
tgttttgcctataaactatttctttacatgaaaaataaaacacaatgacggccaatttggctcgagtgatttcaccaaccaaattataaaatctacatatttttgtaatagaacctctatttctttctcactttctcacttgctatgtgaaactatatatattatatatacaattaaataatgaattagttaatgaaatacttgagaagatgcataaaactcactctcaatgaaaaagggtctcaaatcttcttgacacataaattgtagaggaaaacacacaagatgaccctttatacattccaatctttcaattgaatctattaacttcacttttccatcctcatcataaatttctaccttttcaagagctattcccatatcaattgtagtgtgaccaagtttttctttccaatgaccaatgcattgtctaaaagcagctctgcaattatgtggaaattaattaaatgataattaatggtgaagagaaaaatagaaattctaaatgtgtatatatgtactaccttgaatgtataagatcattgggaacgcaagaaaacacttcttggtaaatggttgaattcttctgtataacataaataatgttcaaattagttggcaaaaaaaaaaaaactatagaaattatgaacaagcagattgcatgcttgaagaaactttgttccattttagaaattattaagaagagcactcaatacttagaagaaccaactatcctctattatttatcactattaaaaaagagcactcaatactattaatctctgttttttgttctttgtccataaaaatttttggttaatccaaaaaaaaaaaaaatcctctattatttaaaatatacaagtatttttattcagtttatacagtaaaataaccagagaaaacatggagatattgttaaaaatatattaaaagaataaatagtaataatatttaaatgtagagaagttactctaacattttattatgtaaataagtgatacaaaattaaaatataaattacttaaaaaatgtgctaaaagatgatttaaatttggcatatagtaaatgatgccaaatctataatgcgtcaccataaattgcacaacttttattgaattttatatcacttttattattttattagtatatttagctataatattaaggggaattaccccatatacnnnnnnnnnnnnnnnnnnnnntttttttcaaatttacggttttggttt

SEQ ID NO: 47380 - DNA, 1551 bp, Cannabis sativa
acccaaaccgtaaattttttttttaaaaaaaaaagaaagttaaaaaaacagtatataaagtaataaattagactaaaaaaaatttctcaacgtcaaaacaaaaagaattttattagaacgactagtagcggactcaaaatttaaagtgaaagggcataatttttttttttttttttttataaaatagggacaaaagtaaaataaaaattctatcatatacattcaatctagtttaaccattacattaaaattaatattatatttattaaattaaaatgccctctcatttctgtatgggtccgcctataagagcgatcttttgggtttactacaaaaacttccctttaagcttctctccgccgcgggacaccatttcaactgtttttctttttttcttgacattgacttggacggacacttttgctttcttacttacaaaggaaaataaatatgtttttttattccttttaaccatataaataactaaataagatttgttagactaacaaagtagtacactctattttgaaaaagaaaaaaaaaaggtagtactcgaacaataaaaggtttattcgattcctgtcaattttgaaattatttaattacttagttattatatagtataggatatattaggtatcaatttataataatttggttttgaccttcgaagctaatatattaaaatattgaatggacggtttgtaatgtttttaccaattcattttttatttttggatttcgaagtgcaagcattctaataataaaaaaagttttagtcttttattcccaaaacataaatatatatttatttgtaaagaaaaacaaattcaaaattttcaattggtaatcggttagatgagaatcaaaagtattttctatatgaaaaaaagaattttttataaaaatattgaattttggataaaaatttataattaaactattgacacggaattttttacaaaaataatttttttataaaataaccgtaaaataataaaatagaacaattaaaataacagtaaaacaactcaaatataaccgtagaacaattgtaaaaacttaacacagtatacagtaaaacttatacaatatttttgaaaaaaaattccgccctcttataaaaaagtaaaaaagttaaaaattttaatatgtggtgtaaaatccctaaaacaaataaagataaatgtataacaccaaaatgaagaggaaagtagattctataccctttttatattgtcttcttttatttttatcttttttttttaagtctatcatttttacctccttttaaaaatattataccaattttgcctctattacttcaaaatactccctatgtgactcccttatatcagggtattttgggtacaatacatataaaaagaagatgtatgcttcaattaaataaaaataaatggtaaatttgattaattgattaataaaagaaatactttttaacttactcaaaaaaaaacgcataattaattttggattatgtatgggcctcaggctaggcccaattaagatttgcttcttggttaagcattt

SEQ ID NO: 47381 - DNA, 4259 bp, Cannabis sativa
tcaccgggccaactggaactttacttgtatctttagcctttgtgttctcatcatctacggggatcccctgttatcaaaatatttacaatcttgattaaaagtacttttaaaaaataagtttatattccaaaatacaatcaaaatggaatatcttgtccaccgggtcgtggcatcgcgactgatatgtatattactgctgcgacctcagactcatggctgctcaaccttggtctttcctttactgcaccatttagtacccgcgagtcacagagactcagcaagaaaagtgaataaatctaaaaataatacaacattcatttaatcacacatcatatattaacatactctaaaacaattacacaacatcgtaatcacacaatcttggtacttcataaagtatccttaccactcgttacccacgagctaaatatgtcactatcgttgcctgatacagcgaacgataagtaagaaacctatttgcagttcaaggagtaattactcgtaacggtaatgaccgtttccaaccctcggtcataactgaggcttaaaaagcatatattcagattctcaatcataatcgagaatataacaacacaattattaatcacttaaccctaagtaatgcataacatttttcttacctcagtccataactcaattgtgcgggccgatatgagtagaaacaaaactgggcgctcccgatcctatgccatgataaccaaaattcaataaatgccttaaatcaaaactccagaacaaaaccctaaatctgaaactagacataacttaacttttaacaatcccaaaataggctacacaacacctaaataacctaaaacgggtactgcgcaccaccccgagccaaaaatagaactcgaagaaaacccgggcattccccttacaaggcaaccggtcgacaggttctggtgcactagcaccaactagtcgactagatctggcagaccaaaaaaccttgggttttcttcctcaattccaaaccaaataaaacataaacttgcgccacagttccagaatagtataataccataaatacaacaaatttaatacattaaaactccacaattaatcaaatctcacaaaaacctaagctggaaccaaaataagcttctaatctaaatttgctaactaaaatactaacaaccatttgaattgcatagccatttgaattgcataatttaagctcaagcatactctgattcagacctaacaacttatccttatttcaccttaatcctactgtcacaaaaacataaaaccctattctaaaaccaacctaacaactaggaattcttaagtccataaagcaagaaacttaccgcaaagcttctaagctaaatttggatgaagataagctaaaattacaagagaattggtgagaaaatcctttggttcttggctgctagaaggagaaagggagaagactaagtgttatctccaaacttctaatttcctttatgcttaattttcctttatttacctttaatatacataatacactaataaaaggaatcaaccactaattcataaaggacaaaataagtagaaattctaactctaaaatgaaatgaccatattgcccttcctaatgaaacctaaactatttaaaatctaggggcactttggtaatttaactaattcaccaaaccgacaacctaaaattctaaactaatccggtagaattccaattcattccatactttattgtcgttatatttctgaccactccgccaagttcccacggtcaccaagcccaaaatattttatttcaaaaatggtatccagatacccacatattccaataaaatcttcgtaattaataaattatgctttatttaatcatttattaaattcataataatcaacctaagtaagatcataatctcacttcattaccagaataattacatatttaataaaatatgtccaataaaataccattttattttctgggatattacataaacggtttagaagatctcctctgcagtccaactgttcctgcttaataaggtaagaagagaacaacttctgtggaaggcacttctgagtcaaacccagaagtttcaaagaaaacctagaagaccaccaacaagaagtctacctcgactgacatatccatcgaacctagaaaagtcaccccagcaacttctactgtgccagcaattgtgagcactagtggacaacccttagggtctgtccatcaggttaaattctctaagtctcaactcgagatggctctcttggagccttcctactccttgcccacatatgcaagcgttgagggttcccaagcatgcttaatgtatgctacacaaagttggcgccactttaggactttctaacatgaggactggaatctaatcaacaagggcgattaccaaaaccttatgatgagaagcgttgatcttatgtagtgggtaagttccaacttcataaaaaattatttttatgaatatattttacattttgatctcttcttctgacctcgttctatgcaggcttccttcttatccttcgtgactcaacaaaggggctttcaaagtatcacccaacttagcacagagcttcccaagtctaatgcccatcgctagcttttggctaagcaatggaatgatgcccaatcggagatttcttggtagaagacacatgttgagaccccgaagaaatctgagaaggcagtaaaagctgagaatgaagccttgaagactaagaatgaggagcttcgcgaagttgctcggatggcccaagagagccttacagaagccaacaagaagctttccaaaaatgatcaaatattagatcccttaaagtgttaattctaggggtgcattcagttggccccaaatctatgattggaattatacgttaatcgttcacaataaattaatagtacttaaggaattcaagagataattaaaagggtaacacaataattttgagaaactttaattatgaactaaataattggaggacaaactacttatattgattatattaatagactactagaaagaatcttgtaaatataattctatactgacaatgagtgaaattctatacttatagtggagtagtaatgaaattaataaacaagaatattttattgttgggatcaatagtaatccaaagtttatcggagcttcaaaatataggttcatggttcctagatcacatctataccacactgtataatgaaagatttcatatgaggattaatttttttgagaaagaattaatttctttaggaaattattcttcaataaattaatttttttttataattgtttaaatatgaattaaataattaaatttaactatttagttttatttacataaaattatatattagttaaatataatattattgtttaaataatattatgagaggtaataaattattttagtagaaaataatatttatctaatccaaaataaataagagattagtgagaattaatcaatttttatttattgaaacataaataataaatcttatttacgacaaagaaatcaatttcgggtattaaaatatatgtcacatgtgtaggtgatatataaatttcataagatttgtcttgattattttattaataaataactcaaaataaactatttatttaattaagtattttataagataagatatttattattaaatcattaaataaataaatacatacctacttagttatttatttgcatttagatttaaataaattattattttaatctttatggggttaaataaatggctatatatatgatatacgaaaaatgattagaatatgatcgatacaataatctaaaatatagaaaaataagtggtcaacccccctctctctctctcttgtgtaatttaattgtgggttcctccctctctctcatcatcagagtgtcttatgatttgagttcacactatgataataaatccatcattatgaaattgatcctacaagaccatacttgtcatgtagtgttgaggcagaattagaagatttatagtgtggattcttgccaaatcaaatttgttagattagatgattatttgaatgtacgaaaaagatacaaggatatcctgataagttacaaaaggtatatattattcttaactcatagttagatttaatctatgtaaatatgttaagatcttgtagcttatagttcatattataataatcttaaaatattttataagaccccttatgcatttgacccttatttagaccataaatgaaaca

SEQ ID NO: 47382 - DNA, 1241 bp, Cannabis sativa
aaaccataaacatgaaaattacatgtaaacataaatgacttctattcttctattgataacaaatcagattagattgaaataagttttatttagggcataaaatcccaacaagggaatggggcttctatagatattctcaatgatcattggatccctacaattagatgcatctcttacaaggataatcttgtcccacactcaagatttatctcctattttatcaatcatcttggttattaggatcttcaaaagcttaaaagtcattttggggtctaactaactctaatatctttactgttaagttttcctatcatcttgcctcttccactgtccatacggcttcctcctcaaatccactttgtcttaagagttggtggtcatccttttggtctgcgaaaatcccatataaaatcaagcacttcatcttgagggcttataattacaatctccctgtggccactaattcgtattccaggaaagttctcaataatctagtttgttctagatgccacaatcgaatggaaactgtatctcatgcactgcttgactgttccacggtaagagaagtttggaagcattctcctttttatcaattcttccagattaataaaagacttgacattggacagtttttgtaaaaaaaacttatgaagagtttagtagtgagaatttggaatctatttgtggtttgctttgggctatctggaatggcaaaaataataacttatatggaaaatctaatcttttgcctcagaatgtgtccagctatgtttctccttatcttcaggaatataaggctgctaaccaacgaaggggcatgtggaacaaccttaatctaaaagctaattgggaggttacttggaacccgccaccaccaagaggtctgaagctgaatgtggatgctacaattgacaatcaaaaagtcatggttggcctggctggggttgttaagaatgataaccagacagtcatagcaggtttccgcaaaaaaatctcaggtttcccaaacacaggcatagcggaagctcttgctatctatcatgcaatcatttggtgttctgctgtttgataggctacaaaagcctaggcttgtcttgtttatctaatgtgttcaagtgtgttaatacctctttggtcttgttccctaggatttccctttcttatgttcctagagaagctaaggcttgattggtttgagatttaaaaattatgttttctaaaagagtgttttggaaacaaaa

SEQ ID NO: 47383 - DNA, 1877 bp, Cannabis sativa
aagtcaaaaaaagtagcttccaccaccccgttatttggtggtggaattgggacagcattggctgctgatgatgaggtgtcagcaggtctgacacctctgagttcttttcctataaagttgaataattcggtaagagttttggtagccaggccaaagactgggaggagtaagaaagagaaggaggatgaggacgaggttttggttatttcggggataaattataataggaatcaaccagtgaaattcgatgtttatgtgaacgatgaggatcaggactcaacgagcggtcctgacaaatcagagttcgcaggaagctttgtcagtgttccgcacaatactaagaacaccgaaaagaccaacactagtttgaaactcgggataactgagttgttggatgatattggagttgaagatgatgagaatgttttggttactttggtcccaaaaagtaacgaaattgtcacaattggtgggattaggattgatcttgttacttaattaaaaaagaaaaacatatcaacataatgtgaccagtatcattatatatatagtatcgtactatgaataatgagtgtatgtgtgtcttgttattatcatgtgttttgggattggatattatattccaattagtgatgataatgatgagtagtagtgatggagaatggtgatgttttttgtttttttagtgggttttaatctgtaaaacaaataagcttttgggcaagatttgtgtttctttttctttagtggggtttgagcactttttagggttttattggtctcatcttatgatatgtacccatttgccaacgtgattataatttatattattatgtacccttctttgtttatatatatatatgatcttgtagttaatgatctttttattttctttgttaatgatcttgtagttataaagtctataatattatacatttgacttgagttcttaccccttttctcatgtacaacttacatattaaaaattactacacatagttttggataaatatacaatacactttttgaagcagtatttcggtcagtgcattctcttcagtttcgacatataatagtgtatattatagttatttaaaattgcatgtaaatagttatttacaaataattttaaatagttacaacgtacgcaatcatatcaaaacagataaaaaatctattgaccttttggagatttactatagaaatttccaatagtttaatgttctcttactcactagtaggatcaaatggcttaaaaaaagaaaagaaattataggatcaaagggtgaccttaataactttacaataataatttgttagaataattagtttattaattaaaaaagttgttacacaatgcctttttaattagatagatatatatatatcttaacaataattttttttttcgataaatttaattacacttagggcttcgtaaaattttaaaaataatagaattttgacacactctaaggcaacgctaaataatatatcaccctatataagtgtccttcatggcaatatatatatattttttttcattttataataatttaataaccatttaataaaagaaataaataattaaataattcatttataatcgaaactcatattatattaataaaatactataataataaaaaaatatatttgtaatttttaatattatgattaaaatgtgaaaaaaaaatagtattaaaataatgtatttttattgttgatataataccaaatttaaaatttactgtaaaaaaactaaatttacagctggtggagttgaaatttcttgaatattattcataattaagccaaataatttttactttttaaacggaaaatatgctatttattacttaaatccatataataat

SEQ ID NO: 47384 - DNA, 926 bp, Cannabis sativa
atagttttgtggctataacacttttaaagatctgcttgagtcttcatctgcattaattgactgatagcttaatttcgagttgaccgactttaataaaaaatcacatcacttgtttttttctattgaagttctcggaaagatcttgaaatgttccttctaatctgtagatgcaattcacaattatataaacatgaattaagatgtcttgttaaaaaatagtgttcttgactcaattaaaagttctattttttttttaaataaaaaattagttcacgtgtaaaattttgattattttaacacaataaaaatgttgtgactacaatttctgtggctaaaggtatttgtcacaaatagtataatttgttgtgactaaatgagtttgtaatcacagtatgaataaaattaaattagtgacaacttgtaactactaaatactatgttttagtgtacaagtaaatttttgttgtgactataagttacatttagtcacaaaagatttatgttgtaattaaaaaattgtcactaaaaataatagtttttttatagcgatcgggtccacttaaaacaaaaattctataattttagaatgaatgaacgtaaatcaattaatgaaaatctcaatgaattttctaaacttttatctaatataacgtgactattgaggaagaggataagcatatatctcctcaactctaccaaaactttcttattttaaaacaatgtataattaactgaatgcactaaaaaacctccaaaaatatgcaatcgatcttcatattatataacattattgactaattaaattttgagcttcataaaaaataaagaacaaaatacatattacagaaaaagaaaacatgtatcaatactgaacctcactttcaacatccaataataaaaaatttgggatcatgagttgccctact

SEQ ID NO: 47385 - DNA, 2137 bp, Cannabis sativa
  modified_base (625)..(639): a, c, t, g, unknown or other
  modified_base (2111)..(2111): a, c, t, g, unknown or other
tctaagatcatggtaaaataaattccaacatttttctacttagacataaaaatgatgctctatctagatttatacaatggagaactcttatggaaaacttaaataaccatagggttaaaaccctaagaattgataatggtttagaaatttgtaatgatgagtttaacatgatattgtggctcagttggaattcaaagacatagaactgtggaatcttaagctttcatgactatgggtttcttatcaaaaaatatgaaacctctagccatgatatcaaaaaattgtgttttgcttttgagtgaggaaaaatctctaaattaattgattatatacctctttttgtacttaatgaaaaaattgagtaccaaaacttaataaatatttctacgatgcaaataaaaatagctcacggaaaaatttaatgtagacacactacaaaaaataattacttttagtaatcacaacataaattttttgagactaaaaagataacttttagtcacaataaaaagttacttgtaactaaaacatacatttaaatacaagttgtcactaattcagttttagtcacggattttttagtcacaacataggaataatagtttataattagtcacaatttttnnnnnnnnnnnnnnnttaatcacaaattttgttgtgacttaaaaagaagtaaattttcttttgtagtgggacataaaaacattaacaagaaaatgaactaagtacaaaagtaaggaaacaaaagaataaaatgaagaaaataaaaaacataagtctaaatgtagagtgatgctgcactatcatcactacccctattgggtttggacataggatagaaaagccatcatatcatggctgagatctcaagttagctttttcaagggcgattcgacaagcagaattagaagtactatctttacagattgcctccctatgtaaccacaataaatctttgttttctgcttgtgctgttaagtttgttagtaaaaacagattgtgtttggtgaatgagaaaccaaaaacaatgacaaataatcgtacacaatcatatattctaacgtaaaagtatgagtcattacatacctagttagaaattgatagatgagtcttatttttcacagtacctgaaattatagagatattccatgacacgtggatagtttgaaagctttaaggtggcgtttggctaaaggaaatgaaatgaaaaagaaacaacttttgttctatttctttattcagttttattttaaagtattgaaatgttatttttattctagctatgttttcatttcttccgaccaaacaccacctaataaggtgtttgttatgtaagtttgagttagagagagtaaagttgaagggagtagagttcaagggaatataaaactcatgcgtttgagaggattaacattactactattttaatttaaaaagtgaaacctacttagaaacacaaatccatattgtcattcaaatttaatttaaattttacattttcattgccatcaagtctaaatctcataccaaatgtcccataatatattgacaatatcattgtatatttctcaagtgggagcacttcaaaatgtaatgatccgtcttgttgccttattatcttcattcttcccttcgccagaaagttttttatcacatgatccctaatcaaaattgccaaagaaaaatatttgttaatattacatgtaagtagttattggtgaaaggagacaaaataaattttgctaaaatgaaaccacaccaaacttaaatgctacaataaggttttactttcccagttgcattgctcaaattggaaaaaagcttctacttgcaagaactcaggcagcacttttgaactcgaagcaacataatttgaaagtctttcacacaattggaatagcactatcaacaggaatattttaacaatgttctttgattttctaacatccaaagagaaattcacattctaaagaatcaaatatgctgcaataatagacaaaatttgttttacctagcacttaaccttcatgtcaaaggatgctaattaattgattttgttcctcctagcttttgattttcagttgtaccaactgttaggttttatgccctanataaaactctttacaatctgattagt

SEQ ID NO: 47386 - DNA, 1912 bp, Cannabis sativa
attaatgtgatattttgttacatatataggcatggtcaaatggtagattacattctgcaaatcacagagtaatgatgagaggaaatgaggcaaggtactcagctggattgttttcaaacccaaaagcaggttacatggtgaaagccccagaagagcttgttgatgaagaccatcctttgttgttcaaaccatttgactattaccaattccttgactatttttattccatggcttatcgaacaggcccaaagaatctccactcctattgtggcctctgatccagaacaattcctttatatataaagagtattattatttatgtctgtcggtttgtttggtcttaattatcttctccacgacatgtactatgtataatagtacatattacccacattggagatatattaataatttacttttatgttattcactgctaaaaaaaaaataatgtacttttatgtttttctttatgtcataataatgtaattttataaatacgtacaaccttggctagctaaaaatttctaggtagtaaaatcatagagcttatatgcaaatttaaaaccaatatatatatataacaaagattctaaaaggagaagtcgataataagatgaaagaatcaaaattaactttttttttttttttttaccttctctttacgtacaaagccttttcttttttaatagaaagatgcaatttcattaacacaaattactctaaagtacttcatttaaactgcttggcattatagaatccgaataagtataattaatatttaatcacgaagctctacccaatggtgaacaacatgattaatagtttgcttgacaaaaatcaaaagatattattcaaattagctagtagggtgttcttgaaatattcaatatccatacaattcaattcaattcgcaaagtatagatatctgcgcatttgtgcagattgaatgttgattaaaatataaaagtaactcatttaatctaatctacatatatataatttaataatctaatatataaatcatatatatatactccattgatcttatttataagaattttttttaactgagtttataagaaaatttaaatgtaaaataaaattaaacatttatttatataccataatttttttcttttttttttcttttttttttgttttaaattattattaaagacataaaacaacaaaatttgttttattttgtaattagttatgtgtaaaaaattatttttgtaataaataataaataatttaatattaaaaagtaactaatctaaaataatttatttaatccgcacttttacgaattggattggattgaatttgggttactgtacggattggattgaatccaaaatatgaaattcacacttgtactgcagatcggatacactatgaataaaatagtgcggattggattggttgaacacccttacaaattagaaagaatacgtaccccatactattgtaccctaaagtaccctatttcggcggttcatgatatgcgtgaaccacagagattgggtctctaaattaagttttttttttttttttttaatttcatcaatctcagcagttctgtgtataactgctgagattgataccaatctcgacgattacactcgactgttacacacataaccgctaaaattagggtgccgagatagctcagttttttagtagtaaaatttttggtaatatcaagaacatgtagaacaaaggtcaaattcaatggattagaagaatgagaagaaagggtagcatattactaatatgagaaacaacaagctttaccatttccaattactaaagactcttgaccaagaataaggcacaacagagtcaagatactccatcttgaatgcaatgtgatttgtggaaccaatatctgcataccactctgcatta

SEQ ID NO: 47387 - DNA, 2246 bp, Cannabis sativa
tgaaaaagagaaagaggcctttgtctaagactgacccctccccgttatatatagataacctcacttgtggcggaggaataccgtggttacaagtgccataccaaaaaattgctacagcaaaaaaccaaaaacacagtacaaaaaaaaaaatatttgtgtttaactctaacatcctcaatagctgaccagaatgttattttctcccaaagttcctcttctgaactctcgtcacggccctcaaaaatcgtagaatttctttccaaccaaacattccaaattaatgccataatcactgttctccacagtttggtattgtgtttgctgccccttagtttactcaccatggattcaaatatgcatgacgattcattcactgaatgcaaaaacagagttttctcactctgattgactctccaaccattcccctgaaattcttgacaacaccaatcttctcattaactgaattttgaatgtgttgaaatgaaagaatgagactctgaaagtattagttcttttccacagctaactccacttatgtctccatcttttttgttggtctgatcattgccccgtctcctttcttgttgagctgaacaccacttccgtctctccattggttcacaaggatgaattatacaaattaacctgtttctgtttcatttataagcaaatcaaattaatttcagattaatgcatgcattatgcttcataaacacattaatctaaattaaaaaaaaacacagagagagacttagagatggtaaactcacatgtataatagataaataaacttcaattacattatgtctcttcaagctttggacaacgcctaatgatagaattcttcacttttttgaagttttcgggaatcgatgtcaaattggggcaagcatctataaggatagactgaagggaagaaggttatcaatcccttccagtactgatgtcaaattgtgacaatgttctatatagacagtcctaagggaagcaaggttttcaatcccttcaaggagtgatgtcaaattggagcaactttctatacgaatatactcgagggaagtaaggttaccaatcccttccatcgttagtgatgtcaaactggggcagcttcttataacgatagaccttagcaatgaaatgtttgggtgagtgttgtgtgccttgcttcccctcatcattttgaacgtttcttctaatgccattgagctagttccaatcagtgtgacttcttcaatagatggaaacaagggcattgaagtgaggttatgactgacttctatttctaaattggaaagacgaggaaatgatctaacaaactcattattcccatccacttcctttttccaccaccaccacttgagattaaaacaatatctaatatgaagagtcactagggatggaaagaacaagttggcgtcaaaatcatcatcttccgcagaggagcacatgtactctgcttcaacctcataaatgtgaagttcctcgagagaacgtaattgatctaattttgggaaataatggcacttcttacacctatgtaagttcaatttaacaaggttattcaatgaagaaagccaacctccaaatctcacacccatgaaaccccacacatgcaacacttttaggttggaaggtggctgcaaaccttcaattgacacttcatcatttctcactacattccactctaaagttaatgaatgaagattatgcttcccttcacaaatgactcgctttgaagttgtttttgatgcagagtagtttgttgtgtgccaaagtctttcaatacgtaagcttccatgtaagttgttaataaggttgctcaattcatgaaccccactggactcagatgcaacaaatctatctaatgtgcgaagggaactcatatacccaaattcagggggcatctctctcaatctattacatccaccaatcataagatgccttaagttgattaatttcttcatgttcaaaggtaatctaacaagcctattacaattcttaagattcagagtttgcaaattctgtaatcttataaaagagctaggaagcacttttaacataaaattaccagaaagatttagatatctcaaatgttccaattcacacaaattccttggcaacacctcaattctcatggaaggtacacttaaagctcgtagacacttaaagttggacccaaaaccctctagttcggagaagctcaacccttcaaaattatgtataagtaaagttcgaagtcttttttg

SEQ ID NO: 47388 - DNA, 1054 bp, Cannabis sativa
aagaaacattgtttaaaagagataaaatctttcgacattccatcaccactcccacaagcagtgaaaccatgactatattgctttgaatagcttgaactattaggagacaatcagactcgagttcaaccttatgacactcgtaatccttgatccaatttaaagcttcctttataaagcttcagccatatctggtgccattgtaccccgatgaaaaattgttttggcctgaatcagatggccatgatgatcccttgccactaactcaaaacaataagaggattacattctcattaggcttaacccacgagaccgccccatcacctgcaataactgagggaaagtgagcaatattcgacttatcttgggcattcttccattgcacaaaatactgagaagctcagacacaacactagctagagtatgtcatttttcctgccaaaccagatcatttctcgccccccacaaagaccagcaaaccatagctatttcaccacatttttcactgttgtaagttgaacaaacccgatcaaatcagcttgtaaaatcattgatattttccacaaaataactaggtagaaccacctgccaacactgagctatactaaatcgtaagtcatcgattttttctatttctcacaaaaaataataaatatgtaaaaagatttattaaatttaattctattatttttctttccttaacaatgagtttctttccttaagatttattaaaatatattgtttgttattctttttaaatataacaattatatgcatacataatcacacccttttcggttagcatctgtttcattcaaatgttaaaataataaataattagtctttttgttccccaaacatcgattatcaccaaatttccccctagatttcctaaaaaagaaaaaaaaataataacaagaaaaaagattcaaaatttattatattcataaattcatataccttaaaaaaccaaaaaaaaaattatgaaaaaactccaataaatttcgtaaaattaaatcaagaaaattaagtttactgaaacaagtacgattttctc

SEQ ID NO: 47389 - DNA, 776 bp, Cannabis sativa
aaacgatgcattttctgtaccatgacccactggtaattgaaactcccattgccaacaagatggtagctcgaattttggtagataatggtagttcagtaaacatcctgttcaaataatctttcgttgccattggcctcatggaccaagatttatcaccaagtggttcctagctcatggggttcaatggaaattctcttatccccatggggataattaagctcccaatgaccatgtgtcctgacactcctcaaagtacatttaagtattgtaccttagtcgtggtagattgtccaatagcttacaacgccataatgggacacccaacattagtggattttggagctataacctcgatcaggcacttgcgcctcaaattccctaacccattatgtgggagtgggaactgtttaaggaaatcagggggagcatgaaaatgctatagtgtagccaccaagcaagctgtcctcatggttcaacacacgaaagaaggacacacagtggagatacaagatgaattggatccctgagtgggaaccgaggccactcttaagcctatgaaagaagtaaaggagattcaaatatgtggttaggatccaaccaaggtaattcaagttgggaaagaccttactcctgatgaaagaaatgaaattgtggagaccatcaaggagtcagcatatgtctttgcatgactcacagagatatgaccaacatcagtccaaatgtcattacccatgttttgaacgtcaacaaagatatacctaccgtttagcaaaaaa

SEQ ID NO: 47390 - DNA, 1007 bp, Cannabis sativa
taagttttcaaaacccatattatatcaatacacacttttctttgaaagcaatatcgaatgcattgtcatacactaataagtctttagaattactttataagaaattttaatggaatttataccacctataaattatatatttatagctaactgcaaagaggggtgattttcttcacttaatcagatacagatcaaatgaataaattgcaggatataaaaaagggagggcattatgtggggggcgtatcaaggaatatcactagaaaattgtccaatacaacttaaaaactaagaaatgtaatttttatgtattgaaatacatcagtgacagcgtcgcatatgtaatcttaaccattatttaaccgatcgaaaatatgtaagttttaattatatattattttatttattatattaataaataatctaatatacatatataataatataaatatttacttcttttgacaatttttagaaaagaagacatacgatgtaaaaattaaattgttaccgttacagcgatagtggatagaacaattagtgaccgtgattcacgaatgcttgagttgataatgaaatgtttaataaattttcttcccttattttttttatgttaacttgaaatttttacatttattatttttctatgtttaattaaatatattaacttatattaacagttaattaattaaaaaatatttgtataatatatttaattaaaataaatacatttaagtatgttgttaatttattttttaattgtatgaatttttttttgatgaatcaataattttattgtactattaactcttttgattacaaactatggctcacagaggagcaaaacatctatacatgtataatttgaaaaaaaattataattcactaaaccaatctatatccttttggtctacacattggggcattacacaagtaattctatttttcactaaccacttgatttcttgcactagtatcttcgaatctgtatcttccttgcaccagta

SEQ ID NO: 47391 - DNA, 1167 bp, Cannabis sativa
ttgtgactaaaagtcatatttagtgacaaaaaaattatgttgtgactaaaaagttatcactaaaagtagcaattttttgtagtgtcttaaggtaaattgttgtaagaatttttactgtattgttttacatagatttgatttaactagagtttatatcttgacattgattcttattgaaggttatttaccctagttcggagaacccaagcactagctgcctagaatgtgtttctaggacagatgaagcttataaatctgcagagttcatttggatttaatttttgcattttaatttttaataatccttataaattcgtagtaaaacaactaggttttatattatgtgattgaatatcagtatttcaattagaagcatctgattagatcgatttttttagtattaattgacagcaagatagaattgataagaaccattcttccagcataaaaaagattcctcgaactccactaaatcttcacaattagctttcaaaattctttttgaattaattgtcattctaaaatatttaaaaagtaataaggtgttttttttaaaaaaaaaaactcgacatatcaattgaataaattaaaaaactaaataaattattttaaacaataattataaaaatctcttcccatttacctaatcacactaaaaacaacatttacccatattaaaaatttgttaaagattaattaaagcttagtataatatatatcctacaaattaccaatcactagctgtatgtatgaatagagtatacaagtcttttaattaattaccttgttttccacgagcctataaaatagtaaccacaaattttcaaagaaagcaaatttcaaatactcttcaaaacttgggatgtttggaccactaaataaacattaaaggcatgtacatcatgttcttccctatgaaatctccaaaaaatctatctttctgtatcatcaatcacactattatgtttatatatatatatatacacataaaactagagagggaattatttcgaaataataaagaaacaataaaataatatgtcttcgagtgataataataataatatgaatcgtcctaattctatcccattttctccaagcatttggaaagattatctcatgtcaaatgtttccaataactctcttatggtaagtaagaaacaagta

SEQ ID NO: 47392 - DNA, 1588 bp, Cannabis sativa
tgtattatcttttattgtaacaagttatgtttgaaaaataaataaacaaacttagtagaaggtaacgtaatttataagagataaatgaaacaatagaatgcactgaggaggactcgttccattccaaatgatctacatttacatgtatgtttttccaataaatattacaagtttacaactactttctccagttgtacgcggcttgaagatggtctttgaatttcaacttctttgcccatttcaaacgacataataatatgatagtatgatatgtctttcttctttaccaatataaattttgtgtgtgaatagcgtttttggttttttgtccaagtcaactaccattttgttttttcttttgaaaaagtagtaactttcattaatgaatggtccattaacaataaggacaaaaaaattaacatcatacaatcaaccttaaaataaaaggtccttaccaaaataatgattcatcgtagaccgttttacaaaattaacaaatacattcctcaacttagctaacaacagtttatactaattaatagaataattatttatgatttttacttcttaaattatgacttatattttattgtgcctcctgaatttttcaacttattaaatagttcccaaactatttatggtgttataaattaatttttatgtcaagttttatcacacgtggcacatcagtatcacattaatgtcacgtgtataattaatttgaaaaaaattatttttttaatttagtttttttttttgtaatttttttaattattgattgttttttaatttcatgatcttttaaaaaatacatatatatttattttaaattatatatatggcgttgacgtgataactagttaagtcatacgatcatcctatttactacgtgtgacaaaacttgacaaaataactaatttataacattgtgaatagatcagtgactatttttaacacgcttaaaaattcaagggtcattgtaattcataattcggaaaaaaaaaattctaaatagcctaattaaattgtgccatataggaaaatcatatgaacactacttttaatagcatgcaccgcattaatacagtgttatttctaccgccacattggaccaactatgcatatgatcttgtatctaactcaaggctttgaaagaagtgcgaatactatttcagatttaatattttgtaaaaattattgattatattttttatttttctaaataataatttaggctttatattttttaaaatcgtataaaatagactctagaacttaatttttctcaaattaaaatttaataataataaatagataaataaatggataagtacgtttccaactacttgttcaaagtttgagaaccgaaagttggacaacttttaaatcgggtacacctatatgagttggaagataaacataaaataattatagagctataagggtaaatatgtgtattacaggattttttttttttttgaaaccatattacatgatatttagatatatatacataaggctaattaggatttttacccccttaactttgacatgtaccaaatcatgcccctaaacttttaagatcgtt

SEQ ID NO: 47393 - DNA, 2099 bp, Cannabis sativa
taaaatgatgaacaatgaagttatggacgtcacgtgttctgggagctaggtttacacaactatgcaatgtctcgcatcagttttggttcctaacaacttcttatggacaatctgttcaaccattttcctaggatacatgagagaaaagccccagccatgttttgaactttggagataagactacaagaaatgacactcgagcactctaatgggcaccgaagtcgacattcagtcgatttaggcgcactatagataggatttaggaatgtcgggacttctttggaccccgattcctcaaatacatcaaggagcaatgctaggacgtgatatttcatcaacgacatcttgaaggagcccatttacaactatgggtgcccaggttgacacctaaccataggcaatgattttgtttcaccaagtaatgcccatgaaaattaaacaaaactaaaatttgtggagtacttttcacccaaaaaaaaaaaaagattaaacataaacgagacaaattttagagatgtttctccccacttgggtgcctagtgcataccttcatgccactatgggaactcgggttgacgtatgtgacctagggcacttcatcacatctttctagagaatttttttgggtatttctcttattttcatccataatgaagatacaaatacattgtgcatgcactaatggtagataatgaattaattttgttactttgtctaccatttgatgtactcaactttttaattatcgtcgatgaaaatgttcattgttaaaaaaatgtgttgatagcaacaatacatgaaatattcaataatacatgaatatctacaactcgtatgaatgcaagtctttatatcatgccacactattgataattagtacaatgaatgtatacctatatataattaaaacagatctcccaaccccgtgatattcctttgggacacaaacactacatgttgtattttcttataagctacgtactacgatcaattatatatatgtcttgccatgtttatttaattattgaggaggatgatcatgaccaatttcttatctcttcggcgtgtttgattgggagttatatatagagaatgagaatgggaaagataataggaacatatcgtagaattaaagttgattaacatatgagttaaaaaaattacattgtagcatcattaatttacttagtatttttgatgtaagaagtcaaatcaataattctgaaaaaattattatttcattaaaatacctttctaatactttataaagaaatggaatgatttttctttttaattccattccattccctatatttaccaccaacccgcggcctgcttatataattttcaccgatcaaaaaataattactcataatattttttatgttccctcgattaaattgtttaaacgtaaagaatttttttgaccgtatatagatgtttgccaaactaatggagttactgtacgtatgtatcatataagccaagcccgctctaatttttaaagataaattaatcgaaatcctggacaatgtatatatacatatatataattaagaaccagcttatagtaaagacaatttttatgtcagaagatcagtatagacaaattagatctactgcgcaaaaatataaatattttcaatagaataatcttgtatatattatttcgtcatctttattggaaaatacatctatatatacatatatattgttatatgaatttattaaataatctaattaattctaatcaaatctgcactcgccgacgaaccaaataaagtctgcacatatatgtaatacgattactatatgtaacggttttataaattataataactcgttatatatatttatagagttatacacaaaagtgtaacatatataattgcacctaaacaatattctataatatcctcgttgttatagattacattaatttttcaattattgaattttcatgcaggaccaatctaaaagagctagctacatagatgaacatattttaattaaaaaatgtagaatttaaaaaaattgcatttttagcattcataatcatataagagaatacacacttttgctgtagtgtattgataaaa

SEQ ID NO: 47394 - DNA, 2140 bp, Cannabis sativa
tgtttcgagggtgcatcctcgtgatcatttcaatcatgtcattttggctgttgttggatacaaaccgaaagagtttgcagctcagatcaatctcaacacttcaaacatgtggggcattgtgaaatctattgtggatttgtgtatgaagttgaaagagggcaagtatgttctcgtgaaggatccttctaaacctcaagttagaatttatgaagtgcctactgatgcttttgagaatgattacgttgaagaaccactgcccgaggacgagcaagtacagccccttgctgaaaatgctgatgttgttgaggctgcaactgatgctgcagttgatgtggaagataagccagttgaagctgaagcttgattaggtagtttttctactactactagctgtctactttatttctattgacccgtgtttctagttttgtgttgatttcacttacaatgatttctgctttagataaacaatgtgttgatattggtttcggtataattagatttgtaaggaagtggtagttactgactctagtaatccatcagtacacttgtctttagaaggttttgcatatattgatgcatggtgttgaggctttgtaacctagcattgttatggttatcgggtaatacaagcaaatatatgacatagaactgtgttagtataatttatatacacaatcacgcataaaggagtactgtactgcttgctgctcctcattctcttagggtttaatatttgagcatggctatttcattttaactggattgggttcctgatgttgaaattgttatagtggattcttcaaatcttataatttgtttaaaatgggagccttcctttcattgttgaattgatccagttcatcatgtttgatttttttaggggtctgttaattttagttaaagtaatagtctctctttcgttgatagctgtattagtgtatttgattcctcattttagattttgttagctgattcttcaaggccttagctctttctttcgcagtcaactggatttgatttgtgaagtaagattttgtcagaggaatcttcaactatctttaaatttgattaccatatctttaaaatgaatcttcaagtttcttttttattcgagttcaacgagcattgctagtaccataattggttagcgattttttataatatttataaaagtaaaacaagtgggactcaatattaagttacaccaatatcgatattacacatcgtgttactaggcaccatgggtgccctttagcatcgagttcaataggtcaagttgaatttatttttatctttcttaattttagttggcatgcattgtttagatttaaattgttgatgttcaattatcagctgctcataatggaaaacaaatgattattgttttttttttacagagataacagaaggtggtatgaaatgaacagaagcagcagcagcagcaatgttagtaatgagaatcataagataacaaaggcttcatttttgtttatttatcattgtcttctcttttttttgaaaaccctgtaatagatatctcaaaagagtacactttcttttctagttgtctactttattatttctgttgatttgtttttttcttttcgtgtcatactatgctatactataataatgtggtgagtgtgactgaagtttttgaccaatgattgatctcttttgctagttttacttttgagaaatgctaaaaggcacattcatattagtattggcattggtaaatatcccatctaggcactggtagcttgtagcaatgctgctatgggttgtacatatacaaacacaggttcttcttgcctatgtttgaatattttgggaatttgagtttcaaaataatatcttattttgttttaatttttcaagtaaaagcttttcaaatgtgtatttagtatttacattacagccgttcaaaaaaatttacatttacgaacttctttgttttttttttaaaagtagaatgaataattaaaaaaaaagatttgcagtgaaaagtttagtgagagcttaataggaaatcataaaacacttatcaagagagaatgggaatttacaaaaatactggaatttgagttaacttttacaaaaatactgtcacatggaaattttttcaaaaatactg

SEQ ID NO: 47395 - DNA, 1933 bp, Cannabis sativa
actataacaaaccaaattacaatccgacacaaacactgcttgtttcatgcagtggaagctatcgttttgctgcctttctaaaagacctccctgcattacaagagatagattgaaagtgaaagactgtattttatcattgggtaattaggaaaaattataaattcttcagtaaatttagtgaccaacaagaatgtgtgttaattattctaatttatatcagaagtagggattattattgttgaggtttgaacctttgaactgttggatcaaaactgttagttgaacagttatgcagctccctcaactaacttaactaacttgacagttagttagttatgtttgtttctagtttgccggagtggctatatatatatatatagctcacacttgttgtgtgtgtttagttgagttgagaagagagagttttgagagaaaattcagagtgctcttgagggttgtaaattgacctctcatagtgtttgattgagaggatcacaagtgaggttcattgtaaggagcaagtctccattgagtgaagggttctatccctggttttgtaactctgttctggcatcaataaagttcatctctacagccatgaaaggctgctttctccggtggattaagctcatgatcacattgattgtgtagcccaaccacgtaagttctttgtgttcaatttatgctttcaatagttgattactttctggttttatgtccagttctttcttgatcattttggtctgtttttggtgttgtgttggttcttgtttggggtttgagactctacaattattcacttttcatttttgtctaacgggttaacttcgctcattttgaaaaactcataaagcctgtaaaagtaaaagctagaaaggtaaaagaaaaatggtgtaaaattctaatatttaaaagaaaaacagcagaaacagaaaaaaaaaatggtgtaaatgttatgaacatgatatgctcattgactttataaatgaagtattttattttagtcattaaatctggaaacagtagacatttcaacatctgaaaaacttcacttagaattccaatgagcatatatacatagcaaaacacaccaaattctgaaatacttgaatctcagtccataccatgattccacataatgatgttggtagctctttctgaaaattaaataggattcttctaaacaatccatccataaatcttccactctcagattctcagtatatacctgtcaaaaaataaagtctgaaaatgtataagaattccaatcatgtaagtgaaatggagttgaacatagatttttataaattctcaaatcttgacactaagtgtgggagaataacagaaaatacatacctcaattaaatcatttgcagcagttgttgtgtggatgctaaaaggcaaactcatctaaattgtgacattgggtatgtgacaaatcttggtccagtactcctcattaccgctctccttcgggtcatactttctcctcaccagaggacactcccttacatacaaagacccgagtgaagttggaaacccttcttcaaacaatgtctccaacttcaagtgtttgcaaggaagtgagttgtctaagcccatttttatcaagactttacagttttgaaaacatgaagatacgaagaaaggtaatagtgggaggcagtagcccttcctcaggaaatgattctgtatcttcatatagctttccactgttgcaaccaagaaaagtttgataattcatttgagtactttcttaaataggaaaattccaataactaacaatattgcaagtagctcctatcacacataccattataaataagtaaaggaaaaaagggaagaacaacaaattaatcaaacaaacctcaattataaaaaacataccgaggattaggatgttatggatgttagtaagtgcaagctcaatcta

SEQ ID NO: 47396 - DNA, 1276 bp, Cannabis sativa
catcattaatatcttttccaataaattaactctgtgcataaatcaaacaatgatcggtaaatattcatttttacacataacgcgaatcattagttatcatatacggtaatatattttgtataatttttaattaatcaataatctctattttttaacaaaattaatgatctttaattaaataaagtagaataaaaaataattaattaatgatctttaattaaataaaaaagaataaaaaatggaaaaataaaaaaaataagatgagaatttaaagtggaataaaaaaaatagaaaaataagagaattaaaaagaaattgatagaagtatttaaaggtcaatatacctaattagttattagtaaatgtctaatttaaatttaattcataaataattttattattgtaaatattttaattgatatttataatattttagtacatcttgcttaataaatttatgatcataacaaattaattaaaaggtttaagtttgaaattattaatttcttaaaaaaaaatgattagtatataatttagttatagatattttagtttttgttttctttttataatactaaaaattagaattaatagatatattagtttttatttatatatttattaatatatatatataacgaagagacagtaataaaacaaaattattacaaatcatcattcataaattataaaatagtaatctcgaataagaacttagattaacataaaactaaattaaattaaagtattacatagacttattaaacatttgttcataaagaaatgcttattacagtgtatttctttatttttgttacaaccttgttatatagcataaatgctagaatagttatttataatttagttaataaccttcatcaatagctctccctacaacatcaaaagatcttttttccaataaattcgccctcaccaaatatagttctttcctaattggctctatctactaacgacatgtctttgttttctttaaattgtatgtatgggaatgtgaaaaataatattaatatgatgacatatttacataagattgctaagaaaaaatattataaaaaaatactacttggatcacgaactgaaactttaatagtgcattcttaaatatataacctctaatgttaaatacaaaaagttttcttgtgaaaataaaattctaactttagtgtcaaatcgtaattacaatttaaacaaattaaggacaaacatacttacttttattcaatgaagagttacatgttagactataatatagtat

SEQ ID NO: 47397 - DNA, 1745 bp, Cannabis sativa
agaacttggaattgcactcacagttatacataacgctctatatgttccacaatatagatacgctataaatatttaaccatcgtttttgcttccaagaatcaaagatcctctatagatgagttacatcgagtatggataaatttaccgttttacccctcaatatattttattcttaaagcactcagcttcctataaatgattgattacacccaaacttatcttcacaaagcagttgttgtagtctagtatgggcggtcgtgtccacagagagatatcttatcaaaaagtgattagtagaactttaagcgcaaaaagtaaataaatcgttggtagtttttgaaaaaaaaaaattaaaaataaaatttgttgaaaaattcaataacaaaagtgataaggtttcaagaatcacttatatgttttgctcatttacttagattttgattaacacatataacacaattaaattgttcacttccaacaatttaatcggaagataaaacatgaatagcatatataataaaatgtattcgagtaataataattctcatgttaggatcatagaaaataatcttatgaaaaatctaagaatgacaacataccttattggcaataatgcaacaaaagactaatcataaaattataatattaatatatttgtcctaatcatattcacatagaaaattgagatagagaaaaatagagtatattacccaaatgtcactttaagcatttggtgaatcaaaatacaaataaatttcaccttgcatataggatcatcttttaccttatctagaaaactagccagaaatattaatcattctcacagtattctaaagagaaaatatgagaagaaatagacaaaataagactaaaatttactatagtttttgccaatgaaaattacaccccaaatgtgtacaagaggtccctttttatagtatttttttacaaaccaaaactaggccaaaatcaaatcaaaagccctcaggatgaaaatgaaaggctaattaattagaattgaaattctcattaatttgtctttaatataaataaaatgagaatcaaaagctgattgaacaaattcattttttttgtcaatttgtcatgatgcagtcctcgaactgcgtacaatcaaccaagtaattgatgatctaggatttggtcactcgttttcaatatcatcagtactcaatgtcaaactctagtgttagctggactttaatgcaatgggcttgtctcttctttatgggcttgcacaaacgggccttagttgctttagaaaatggactttgaaaacgccaatttttcttctttatttcagctttgctttgctcttttatctttatgtcaaagtgtcgaaaatgcttcacattttttctacaaaatgacataaattaaatacaaatcaaatatttccaatatacaaatatattacaataatttcatggaaatattaattaaaacttcattattttgcacttttagattattaaaatgatatttttgaacactaatcacaacccccaaccagcttattgctagtccttagcaattcaagcggagaagaaaattatcaagctgaataatcgagtcaaaccaatcgaaaccagccatgcattttaaaatatgatcaataaatcagaaattgttatgcaaactactcagttgtaaccccagagttgtgggtgtgtgcaccaaaccatatccatttcttaccacaagccataacacaaatagtatcgaaa

SEQ ID NO: 47398 - DNA, 1010 bp, Cannabis sativa
ttggtatacctataaaaaagaaatgcctaaattgtgagtattaaaataggtaagggtaaattcttaaataatttaataataatagttattggtgcaaatatttcaaaatataacatgtaataatttgggtttttttagataaatataaaatgaaagagagtacttttgaaagaagtatgaataagtgtagtattgtcgcaaacaataaatcttctctcacttgagtcgcacatttcccttcttaactctccatcgcaaatactcaaacccagggccagagaagatagagggacacccactccagccgccacacccacaccctctctgtctctcactctctccgccggaccacttctcatccaccagcctccaccgtatctccggttcccactcccagccgaagctgccgctccctactttctcgttcagtcacatcaaaatcgaagtgagctggtattttcttgatcttaatcccttctttcgttgctaaatttctaagtgctaaatcggctaacgattttggtgatgacactttagtccagttagaagctttgtttcggtactttttttggatatgataccttaatttatttattctgtattgcgtgtgctgaactgctgataaattcttacgattaagtttttaatattttgttgcgtgctgatctgagaatcatatgatattatttttgtgctgtgtggagtgaatatgtatattctttttctttgataactctaaaaattgattcttactagttctaaacccccattgcttccaaagttcaaaagaaaaactagggtacagtctgaagtttgggaacattttactagaaataaggatgatttaactgacgggaaggttgtatcttttttactgttagggttatgctggttagtaggaaaaattgtattattacttcttagaaccattgaacaacccattttcggaaatatctatttagattggaggcgttagaagcacaaaagaatgggaatgagaatgtggatgg

SEQ ID NO: 47399 - DNA, 949 bp, Cannabis sativa
  modified_base (899)..(900): a, c, t, g, unknown or other
aaacacaattacacaatatagacattaattgctccacaattcacattaaattcaagcttaaagatatgaaaataactctaaatcttagagttatcaatcatttacccattcgttggagtaatgtcagtgaacgaaggaaccttggatctgatgcgatctaagaatgattgaggccataggaaagattcgagttcgtatgtttgctttatagattgaatgaaagagttatgctgatctagcgtatagggatattaaattccatgttgggaagaaaggaaagttaagtctcagatttattggtatgtttgggtttctggaaacggggagattaggtagcttatcagctagccataccctctgccttacctggaatttacaattggtaattcaatgttcagaattatgaggcagatacgattcgtatactgagttacgaaaatataaaactttaattagacttgtcatctaaggaatagtagattcaggttcttggactagaaaagagggagtactgcaaaataaagacaataatgttagcaaaagcgttgtgaatgaacaacaacattaaaggcaacttaagaattaaagttgcagtcgcatgagtagtatcctgagttgtctagataaatttggaggacgaaatttctataaggaggggatagttgtaatatccaagaaattaatacaatatttaatttattttggtaatgaagtaagattatgatcttacttacggtatttagtgagaatatattaaatgattatattaagcgtaatttatcaattacgaagattatattaggatatgtgggtatcgaggatacaatttttgaaataaaaatattttttcgggcccagcgattgtggaaatttgacgatgtggtcagaaatgtcacgannttaatggatggattattttgaggatattctggactagtttagaatttta

SEQ ID NO: 47400 - DNA, 1290 bp, Cannabis sativa
gtatatttattgttttcacatcattaaataaatccttctaattataaggacataacactctctaaaacacagtacatatatattcaggctccactcgagcttgccaattattttcttctttatttctcttccaaggtacagctccctaattaataaccacacatacatatattatatatatatggtcacacctattaattatttattatgcaattgctgaataaataaatgagacttgcatttgaacgataggcgaaaagcatattcgaaatttaacataattaattaggggcctgagaagatgtatatatatatgtcacaagaagatcaaatttattattcatctttaatgttttttatacttctttaaatgcattttctcggaatataggtattgttgatggaggattattaattataatgattttttttttttaaagaaaaatcttatttactgatgaagttggtaggggacagaaaaatacttttccctatattattatatatatctctctctgaataacaacacttgacctttaatgagaaggcttcagccctgagtacatatttattatcttttcatatatgaattaaatgtttagagatgacctaattaattaaaatatgagcacacatagcaaaactaatggaacataattattgcatatatatctttatgtaatcttgggaccaaacctaactaatcaacagctcgaagaaaaacaaattcaatattaattaattaagaacattactattaagcaccaataatacttagaggtgacgtcttacgattaattagcagtattctacaaaagttattacatctaattatataatacccgatacttaatcgcaaagaaaaagatgttgttagttgttgttgtgttgctgactatgttcacatataatgaataccttgtgatgtccagttctttcaggtttagttaaatgtaaaagattagtctaacatcgtcctatatgctcaatgatttgtaaccttatttcacttggtatttttattgcagttgagtgttttcttaatttataggacttgatttaatttatgtacaagttctcggtatttaaaatcctatgcaataaatttgtcactggcttcatacttaacataatatatttgttggtcaaactgtatattgtctatctatggatttcttataatatttgttttttatatttacctttgctatggaatagactatgaaaactgaataactttcgaagtccagcttgacatgtttttcttcattttctaatggttttctcata

SEQ ID NO: 47401 - DNA, 1619 bp, Cannabis sativa
tatttgcatcttggtgatcatattcaactgatagcaattatgaaaccacaatatatatctctctaacatgaagagatcatacaactttgggaggaatttgaatttgctcaatggggccccaattttgaactcacttctctatagaaaattattctgggtctgccaaaaaagttccttttccaattctcatcttgggaagaactttctttcaaaatttagtatatttgattttccataaggttactgttcttggaaaagtaatagaaaacagataaactgtcacaaaagaaagctctagaactaaaagttcccttggctccatggtttcttgtttaacaatcagaccagctgcaaccaggattcttttgtattcctttatgtctcattaactttctaacttccgctgatcctccccactccccatacgaggcaaatatgttagataattgtacataagcacctgagtttccaggatcaagctcaacaattcgttctgccactttctttcctagagtcttatttccagtcaccaaacagcctctcaaaactgatgacaacatgctgatgtctgccttaaaaggcatatgttcaatcatattcattgcttcatcaaacaaacctgcacgggagaaaaggtctatcatgcaagcatagtgttcgatgcttggagcaatatgataatcctgctgcatcatgttaaaccatcttcttccctcttcaatcaatccacaatgatcacaggcagacaacaccccggtaaacgttataccattcggtctcaaaccagcctgtaacattttattgaaaagctctattgcttcaagcccatgtccatttgaagcataacccatcaacattgaattccatggaacttcatcacactttgtcatttggtcaaatatttttctcccgttttcaagaagaccgcacttgcaataaaaatcaagaagagaattggaaatgatttcatcatactcaagtccaataatgattgctctagtgaaaatctgttcaccaaattcaagtgaggagatacaagcacaagcactaatcgcactagctagggtaaacttgtccattttcaagtccagcttattcatctcgtacaagagattcaaggcttcaactggacatccattttgacaaagacctgctagcattgaattccacgatattaagcttctgataggcattgtctcaaagatttgttttgcttctttaattcttccacaatttgaatacacagtgatcatacaatttagcaatattgtgtcaaatgctttcagctcgctaaataatttgcaagcatcatcaagacttccgcacttagagtatgcatcaagaagagagccagaaacaattacatcatcaagcatcccaagtttgaacgcatatatatgaaattgtttggtatgaacaaggtttcctaaaatactgcaaacacctaaaacactcacgagagttaaaaagtcccctcgaacgccattagctctcatctcattaaagatagttaatgctccaaggtattccttacagcaaacatatcccgaaatcattgagttccataatgcactactaggattatttttcacattaaaaattcttcttgcatcactcat

SEQ ID NO: 47402 - DNA, 1658 bp, Cannabis sativa
  modified_base (1075)..(1079): a, c, t, g, unknown or other
acctgccgctgacaagaccaactgtgtgttagaattttatgccctaaataaaactcaattttaatgtaatcttaatttcattatcaataaaagaacaaaatttgtttcattacttattttttatattgcttggttcacatgttaattttatgaccatatgtttgacatgtaaattctattaaatccttatcatattgttattcataattatagtgttgtctacacaatagaaaataattatgattatgtgatattaaatattttaatctcgtgatttatcagacccaatagactgaattagtccttttaccctgccaaggcacgaagcacttgttgagctaagagtttcaagcggtacatcctttccttcaagaagtcattctaggcaagaaagccaatcagggaggaaagtaagttagccaaacggtagcaagccagttccctcccattggaggaggaggggaaagaagtcactcgtgtcaattgttattacgattacgatatgtagtgctcaccctataggaatgcatcttctatagacgactttccactagttccattcttgatgacttctccgaatgaaggttcacaaggcatactaacaggataccaatgatgctgaccattaatgactagttcaaactaccaaaaacttgaatagaatagatgtttcttggcagctccttttatgtgcccaaaatctcagattatgagccattttctgattccctcatccaatctcatgagaagaaacccagtaggcctttgtttaacagtgagggtgatcgcaaaagtcactgaatgggttagtattttcctttagtttgtcctatattaaaaaataagtgtgggaggacgttgcagatgtttgggatggacatgacttcttctaacgctagaagaccactggaagacattcgggaccatgagcatctcgtgaaagaagcacattgggcgggcgtgtttcgaccgtatccccagggcatatgtgaatgtaaatatcatgaatatgagaagacctttccctagtacgagaggaccgggaaggacgtgttggaacttattttactaggannnnnatttactaacatgtatgttgtttatagaaccataatctaacatcctaaatatgaatttcctaaaaaaaatgaaataaacacatataaagttataaaaaaaccttacattggtggcaataggttataatgtctccttccgtttagatctctaatacttgatcctttctgtcgcagagtatgatcaagatctaaacctggatcttcttttattgttggaattcttcacaatcttctacaaaggcctgagtattggcttgaattgtgtgggtaattcctcaactcactaagggttcaaaaattttagaggaagaaggatagggttttcgaattcaggaggatgtctctttattttttaagttgtctgacaaaatagtctaataagaatcataaaataagacccatctttttctatttataggattttatctaaggttagtatttgaattatacggaattaaaaaagataaaataatggctctaatttaaaccttaagtggtcgaaccctattgtgggccctataggtttcaattttgctattttatttaacaacttatcttttctttcacaaatgtcatatt

SEQ ID NO: 47403 - DNA, 1370 bp, Cannabis sativa
tagcaaagtgtaacattaatacatcatgtgcaacattaacttaatttatgtgtgttcacaagtgtaaattgaaacactaaaaaataaatgataaaattataataattgcatacaaagtatgcttaaaaaatagtaactctctaaatcatttcaagctatagggattcaagaaaacttcatccaagagatgggaattcaagcatgaaaagttccaaaaagggtgcaagcacttgttggtggagatcactcgaaaaaaatgcgaacctagcgtttttccagcctttcttaaggcctcgttcgaggagaacaccacaaccaccacccaaaaacacaatcggttacaacttatggccgaggagaacaaaaatctattgaaggagaaattagaattgcaaacacaaattgcacaattcaaagcattagaggataagttgttggattgtcttgctcactacatgggggacaataagtttaagggcttttgttagttttgattaattattaggttaacacacattaaattggtgtttttggtcaagcaaaaaaaaaaagaatcggttatatacttttgtatttttgttattattatatgttatgatatggtcaattaaagtttatattaagctattcattatgtctttttttatttaaattattctaccgctaaatgcgtccaaattttattttttctttgttatatagttggactatggaataaaacaaattataccgtttttgacaagagttcaaatggaatattgattggaaatttggttacaaaagcatattgtaatgtgggtcaattgatatcttattgggctagctatttagtgtaaatttaactattttatttagtattattttataaatatctaaaaattaaaaaaaaaaaaaaaaaatcttgaatctacaacattttttatttttattttacagattttcttacataaataagtattgttgtttaatgttgttctaactaaaactttaagcatagacgggttagatttgtgcctaaaacatatctagtccaaggcctaatttttttcaatttagaaatacatattttttaatgattttgaaaaatattacatttttttttaattaaggattcaaatttcttttttcatggcccactaaattggagggtgtgctatgtattattttctcatttaattttattttaggtaaatactattttagaccttatattttacaaaaattacgaattagactatttttttattaaataacaatttagacccagtgttttttaaaatggtacaaaatataccttgaactcaattttcagtaatttattttttcaatataacaaacttgaagctaatatctaacacgaatatatgcaa

SEQ ID NO: 47404 - DNA, 1246 bp, Cannabis sativa
gtatattctgttaaccaagaaatgccgttagataggcacctttaatatataaagatattcaataaaaattgtggggtaagcctaaaagagttgttttgatacattttttcatttatttattttgatgagtattttagtttatttttgtttttatgattatgtacgttatagttatttaaaattgtttataaatttttcaaaaaattttaaataatttacagtattgcaattatcatttaaaaaaaaaaaacctatttttttaataccaaaataaacaaatggtgtataataaaaaaaaatagataaatggtgtttagggtataatatatattttttcaaataaaattattattagacactagtagtatttagtatttttgaggaaattgtattgtatatccattttattttatttgtttttaatttttacctttatttctatattttttaagatatacttactgtttataatacgagtgtatttttgattaatggataaaaaaagaggtatacctcaacttatttcaatatattctataagtgacgtttcataattgattaataatattttataaaaattattttcttaaattatgtgcgacacctattacataattacagtgtaacactgagaatagtggataccttttaataattttcttttctaaaataattgttgtgagcattaattcagtgtgactcagtcactgagtgagcagtgcatttgtattttatatgatttgtgttgtgtcggcggcccaaaacaaaagccaaggaatcgttgtcgtctttttgtagtccacgtggcgtaaaatgattaggtgatgaaatgtgttagatcttcctcttaccttaccttaaatacttttttaatattatttctttccttaaccaacaattgcgttacacgatccaaaactataggatcacatttctatttcttttcttttttttgggaacatatattacaatatataactgcttctcctttgttttttcttatcatctttggaattttctccccagcaaaatattcatttttgatactttttatacaaaattttggatttttaagggtttaaaaattttatttctactctaaaaacttataattgcataataacgtatttcaataattttttattttacataaaatacataggcaaattctataatgcacccccttaaaagggatacactgatacatctttatctgttttagtattcgaaataattttttagtcaa

SEQ ID NO: 47405 - DNA, 2379 bp, Cannabis sativa
tgtgtgtgtgtgtgttgagattgtattgtaggtatttacaatagtggtattgagctaggttctttgaggatccaagactcaacaccaaagctgccaagaatcaagaaaagttgattggtggaatcttcatcaaccagattcaacctagagaggtttgatggatcaggggatttcaatctttgaaaagagaagatgatggcaatcttgatctaccagaaaatgaattctgcactagaagaaaaggttgaaaactagagaaagaaggagatgcaacaaagaagggtgaatctgaaaccataatgaagcaagctagataagcaatcataatgaatcttgctgacaatgttctaagacaagttataagggagaaaacaaccttggaaatttggaaaagactagagcaactgtacatggcaaagtcaacaaccaccaagattttcttgaaaggaaaattctatggatacaagatgaatgctactgttccattggagcacagaatttggatgatctcaataggattgttttgtctctaactaacataggagaaacaatcaaggaggaagatcaagctgagatcatattgaatgctttgccagaccagttcaaagaaatgagaacggttatagaaatcttctcccaaagatagtcgtgcttgcttcctcccaatgcaagacttgtagaaattttctctcaaagatagcggtgcttacgtcctcccaaagcaagacttgtagaaatcttctcctaaagatagtggtgcttgcttcctcctgaagcaagacttgtagaaatcttctcccaaagatagcgtacttgcttcttcctgaagcaagacttggatgaaccttctcctgaatgttgttctttatgttcttcactttagaatttccttcacttcaaagtaatcacaaagatacacaaactcaccaaggaatagcacaacaactatcctttacagaagaaacactctcttctaaaaatataagaaattaaaaagtagaagagttcaaccttttattgctagtttaggtcatatttatagtgataaatgaaacccaaaattgagctcaaaaggtctgaatacaaataaaaatattaattagtttccttacaaaaactcattaagtgacgggattcatgaacagatatagaaagtgtgcagacaaaatcctgatttgtctaatcagcattgtgaatctagactccatcaaagccaagttcatccccatgaaattttccttggtcatcacacaacctagctgaagagattaatgagtttacatcagaaaaagaataaaataatcaattataaagaaattccatatatagatatagtatttattatataataaaatatttaattcttcacaaataaaattacaacctgagtaaaaatatactctcaattaatacaccacaagtcgtactttacaagtaaagaaacaattagataattaatgaaaaatattcacaaaaaagaaagtcagaatctgttcaaataaactatcaattcattcaaacagattcattataccttgatagattttcagtaaaatttccttacataaataaggaaacaaaatatacattaatgacacagttgtattaattcacctaaggtgacatttttcaatggaccacctttaattggacaaaaatgatttgtctcccaatttgacagtgccactattgatagttttgtagttagagaattaatttctgtcagggcaaatataaaatgaacaccatgtatcaattatccaacatgtgtcaaatctatcctttgagattactaatatactagcactgtcatagccatctctttcatctccattagccactacatctacatttccacctttcttggagatgtaatcttccaaggttggacaatctcttctcaaatggcttgatttgttacaaagaaaacatcttctcttgagcttggcgtttgacgtccctttgtttgcatagctttgttccttgttctccttttttgaacactttcctcggacgaagagcccttcactagcattgtcttcttgctagtctgtctttctctcaatctcctttgacattaatacactttgaactttctctaatgtcaaagattctctaccatacattatggtatcaacaaagtgctcatagctatgttggaagagaattcagcaggattatagcttggtcttcatcctccaccttgatcccaatattctatatagatttgggatcatcttattgaaatcatcaagatgatcttcaatttcttttcatgacatcattttaaaataatacagattctgcttaaggaaaaacctattttgccatcaattttatcatgtacaagctcttcaatttcttccaaaccccagctac

SEQ ID NO: 47406 - DNA, 1992 bp, Cannabis sativa
  modified_base (438)..(438): a, c, t, g, unknown or other
aatatacatacatgtttagcacattgaaacttagtgtacaaattataaatatattaatttacgagtacaatagtaataattcaacttaagatgtttttggctatatatacatatttgtctaaaaatttcatataaattacacatcaccacgtgcaaaaccaatattggtcataaagtgaattataccctaaaaattaagagaaagacactcctaggattcttaagctaaatatagcaaaaggaatctttctcttttcttttcttttcactcttactctttaccctattctcactttctctctcatatcaaatatatttcattcaacaaaaaatataaaagattttttttttatttaagcgtttatatattacaactatattttacccgtgactcgaacccaagacctccaagacacacacacacccacctatggccanttgagctagcctcaagtagttaaataaaagattcctcagccacacaaaaaaaactaatcaaacaaaaacaaatgtaaataaataattaaaacttagggttagtgattttatattatttatttcattctttggcaaatggtcccttaccatcatcatcatcaacataaagtatattatccaccaaatatagcccatatttgaatagtaattaatcaaggctctatgccctatatgcaacaaagtaagttaattatagggcactcctaaccataataattatttatttattgtattaatcattttcttacatgaccacaaggtccaatggtcctataactatagccatacatatagatgtgtccttatatataatatgcatatgatttaataatcattctcaaaagaatttattaaagggtttgaggtatcaatccaaaaacattctttatatatgtactatcaaattaaagaaataataggttaggaagatgactaatattttcccaatacatgtttgaataataaaaataaatgtaggtgtttatatatggtaaattattttatatattattttaaatttatcgttttgattgttctgttagttgctttagtaatttttatgtgagttgttatatgaattttagttgtaatttaaatcattttgttagtagttacttacttcaaaaaaaaaaaaaattattttaaggtgaaaaatacttaatatataatataaagaaatatataaatgtattatgttgtatgtttggagttaaaaaacatgtagtaattaacaaaagaaaatatgaatgtaatatgtatataggattggtgggtttgcaatttccaacatcacatgtttatgtttgtcccaatatgcaatgcatggtgtccttatctaaaagggtttattggccttagatttttgaccactctctctctctctcatcatattttgtttactttgaaaattcatgtgtgaaccaatgtttgatttgatattataatagtcaaaatctttgaccacattgtacacgtggcatctaatgacggcaccatattctccacatggcaagcgttggtgggaccacatcactattgtcctttacactattttcataattttttaatttgaaaaaatgtcacaagatttttttttttttgacaaaacaccatccattaattataacgtatccacaaattttggatttttattataaaaagaacctgtagtttgactagattttaagtttgaccttcttatttatataaaaacaaacaaattacaaagaaatgttataagatattaatggagtttagtagttttctatatataattaaatattaaattttatataatttaatatattaatttttataaaatatcactaattatcatttggtagacagtagacacttttaaaattttataaccatgctctaaattatattaatttgaaatgaatatattatcttttttttttgaaaataaagtgatagattgatcagaaaactagaccacacggtcattataaatgatagtctttggtattgagg

SEQ ID NO: 47407 - DNA, 1145 bp, Cannabis sativa
  modified_base (1105)..(1116): a, c, t, g, unknown or other
ggcggctacggatcccctgaggtactctttatccaacgtcatggcaacgtggaccagagaagggtcacaagaggacacagccattctccgaccaacaacgctagcaccgccgaacgctacggcacactcagctccgttacggtactccggtgcttcagtgaatctgagcaacccatcaggcgacccaagctcgtatccgtcgactgtcggaaatgaccgaatcccgaagcaaaatggtaacaaaatgaggcaaacgacggtgaggaagaccaaaacgacggcgtttactctcaagggaaccattctttgaagtcttcttgggaagaagaaagagcctttgtttcggtttcttgaaaagataagttgcatgtaaaaagtgtggggagaagattaaagggactagaatgagaggattctagaaatttaatgctctgaatggaaataagaccaaattaaaggctcaaaaagaaatgatgagcagggcaaggctgaggctgtgctgctctgtttggatttcacgcggtaccccttccttcccaagcagggagacgttgacataaaaggaaggagggacccgtttaggcgtttagtctctctggtttgggcttcggacaaattatatatacacacatagtttctttaataattaaaaaaattaatatatatatagcaattatgtatttatacatctattatctatagatatttgtatcaatacgtatggcctattggattctcttactgtctttttctttattttatcgaggagttataaaaaggggaaagaagcctggttagagtgcggcgtaaaccactggttatggaagtaaggaatatataggagagttcaatttatactccgcaaaaaaaaagataaatacactttattttttaaaaaatttaaatttaaataatttttaaaaattattcttaatatcttttttattatttttttttctctcattattttatattaatttcaatacttattttgatttcaatttcataattttttttaagttatgtatatactttttttattatttttttaagaagtttcaataattttttattttaatatttttatcataatatttaaaatatnnnnnnnnnnnntttgataggtatattttttttaagaatat

SEQ ID NO: 47408 - DNA, 1400 bp, Cannabis sativa
ctactagaaagctccagaaaaagattgaaccaatattgttctttaaatatgagaagagatatacatttcatataaagttataaacgctttggtagacagtcttaactattctaccagtacaaatattcatttatagggttttgtgacaaatactaatagtttgttatcttccctatctgaagctactgttagctacatggcacgagaggccaacacaactccctatttcttaataaagtatgttttaggcttagataaagaaattatatggttttctgaaaattcctattttcttacttgtatccggggctattaattttacatggatacacaggttcttaaaaaaatatatatatttgaacagaaaagattgtgtaatttcgtgaataaacaaaccaaatttccaaatgcaatcacataattttactttagtaaaattcaattatccaaacgtagtcttacttatatatatattttaaaaagccacgtaacataactcactttcagtcagaaacctaagtccaacgcgtgtccctgctcttatgtaagcttgacattataaatttacaaaaacacccctcctcaccgcagttaaattacaattttatgaaccaaacaaattggccttatggagaatcatttgcatacatttttgtcatttttaaaaccgtatagaaaccgatataatattttatttttaatttttttcatgaaaaaaaaaatttaataaaaaaatacacaagagtctatagctacaagcaacattatattttctctgttttatgaactaacacactctgtttccatctctctctcttcaaattttgtcactcttttttgtttctctctcaaaaattcctttgtttatgttttttttctattattcccagaaactgttacagggcttttccacaatacttgggttgttcgcccttttgctttttcatcttttggtgagtaatctcattattcttctcgtttaagtggtaatagtcaattttcatgccggtatttaattatatttcttaaaattctgttatcactcaagatttttcttattgtttaagctggttttctgtttcaaaatttgacttttggggtttgttttcgtttaattatatttaattttttacgcatattcgtagagtttgttggtttaggactaatggtcttcttttgagggttactgttaatttctatgtatcacgggttttgattatatggattcttatatgatagtgtatttgatcattttatattagatgattccatttatgatcgtaggagtaaaaatagtctttggttttgatttacttcatatatttattataatttatagttacgaatttactacttgaaatcaaaatagagatacaaattatgcgttggattagtataat

SEQ ID NO: 47409 - DNA, 1720 bp, Cannabis sativa
  modified_base (260)..(270): a, c, t, g, unknown or other
ttttgatgatcttggaatgtgtgtccatgttcttactatttttttttaatttgtattgtttcaacacgtgaatactattttctattattttagaaaaaaaaaaaaaagaaagtattcttctgctgtaactgagaattttgctataacagacggccttttgatgattctatccagtctttataccaaaaattctacaaggcgaagtcattaaaaaggaagatgcctcatatcatgttgctcacccaatagcccattatatnnnnnnnnnnngaatttcttgttctaagccttggtatgaagccaactatattttgttcattgtaaatcttaggaaagagatccattgggtgtttgggagtctggatttgaacgaggggcttatatttctttctaattccttgagaactaccgaaatgaatgctgctggaaggaatacaatgaaggcgtattttattgtgctcccattattatttgatcttcttggattttggaagaataggtccaatgttcttgatttgggttctaatttgaaagcttcactaatagtggtggagatcgctagtcttctaattcagcgaaaaaagtgaatttcttttgtgttgttcctttttgtttttttttttgtgtgtgttgcataatagttgattaactgttgtgtttttctatttttgtcaaacagtgattgtggcgcatttgttgctgcttttgcagagttcttcatcaatagcaaagatatccctaatgactttgacattaaagtttaccgcactcgccttgctgccctcttgtttgccaatggtcaaagaaaaatgacaaaaatataaacaatgaggatgagaagcagaacaattcttcgaatgctggtaaagggaagaagtagggtcatctgatgaggaattgatttatgaacttgtttgatttttaaatgttaaatgataagactttttaatggattctattatttatttttcctggttatatgttatagtttaatttatgtatgacttattgtaatttttttttgagacaattgatgcttttttttttgtaatttggttcttaatacttttgttgttagggcaactgtttagcacctgttatgtaattttaaactaaccatttagtatgttaatttgtttttcatcttaacaccaaatgtgttatgaacttataatgaaccttttaagtatatttaatttcacatacaacattaaaaaaactattatctaactcttaaaaaactaatttagtagaaatcttattagcaatgtatttttaacatggctcacaactgtctagcaactgttatgcaatcttaaaaaaaccattttagtattggaaagtaataacaatctatcaaagtaattttttatgctgtaagagttcacatagaaatttaaacaatttaaataaatgtcatgtctctatttaattgcttagttgtggcatgtctttcagttgtgaccttgttggccacaattattgcacctattctatttttttgtttcccattcacctataaattttctttttcttggtcttcaggatctcattttttggtttggtggcagaacaatgatatctttgatgttttgatgtacatcccatattgtgtgattatgtacaggatatattgacccgctatatgtttcaaaccttattttggttgtgtaatattgtgaacagtaattgtagacatttaagttcatctctttcatca

SEQ ID NO: 47410 - DNA, 936 bp, Cannabis sativa
ctggatgtctccctacaaaaatccagcttcaaacaaagcatgtaccagttgatagtacctgccctttctgcaacaatgctgctgaaactatcatacatgtgctagtttattgtccctttgcaatctcctgctggaacagatcgagcatcagctcttgcaccagcaactttgctgattttgggacctggtttgaagaaaaaaaagcacggcataatgacagcattcagaaggagatcttgatgatagcttgggctatttggaatgcaagaaacaaacttgtttggaatcgaaaaactatgatagctgctgaagtagttttgtctgcaagatctacccttaatcaatggagttttgctcatcaaagaagaatggagcctttgcttttgttcaatgaacaggatgctgaggttgagcattggatttcaccggcgcacgatacgattaaggtcaatgtagacggagcaatttttgaagcttcaaatgccttcgggtttggttttattgctaggagcagcgatggtaagttgatagaaggtgtttcaacttataaaattggtcgcgtagctcctgagattgctgaagtaactggcattaaagaagccctcagctggataaaggataaaggatggcaaaaagtctcccttgaaactgattgtctagtagctgttcaagctttacacagttcggcttctcttccttcagcttttggcttgctgattcttgattgccagcaactattggctgagttgcataatgttaagatttattttgtcaaacgttctgctaacagagccgcgcattttcttgcacgaagctcttgtttttcgtcagttcgtgttttttatgactacaactcaccttctgagttagtagagattgttaagaacgattataattattaataaagtaattcatttccattcaaaaaaaaataaa

SEQ ID NO: 47411 - DNA, 1230 bp, Cannabis sativa
tatcaaccaggtgttttgaggaatgaccgctttaacggtcttctacaacttatgtcaagctgtctcagtcgaccaaagcctataaataaggcttttatagacttggttcaagagcagattagatcaagaagattgaagcgcaaacagttcaggaataagtgagagtttatgagggttgtaaaagagtgtcttgtgtgtttgatcaagagctctcatgtgagatatgatgtaaacgaaacttttgattccctgtacctcaaattgttgtactgttcttgctgattgatctataaagactcaggacaaactacgtagtgttttctgcccgaacaacacttagtttgatgagttggttaagtgttgcttagtttagctgttagcctgtctagctttttgaatactatttgaagctgttttctcttttgttctaagctggtctttaccatcttttttataaaagtctcagtgactctttctaaataataacaagaaagcttctgttcattctatattagagaggaaattagagtacttattaatattttggtgatacttgctattcttctacactatctcttcatctaaatgaaatagttgtgtggttttttttttttttttgatttcttgcatgaattacaaaataaatatgcttatgaacctgtaatctcttttatgttctttgtaatatttaatgagggaagaaagaaaggtctgaaatggtgaaaggatgttgcttctaggtgagttttggaatcggagggttcaatctgttgtcagagaaatttagataacgctgaatctacttggattggattgggtgttgtttcagttaattttaaggctcttaacttttagattttttatttcattggaatattgacaagcaccctaaataggtatgattgataattttttttttttaaaattaaaaaaaggatagccaactctaaactaagggtaagttcaaaaataccacttttattaatcaattaattaaatttacttttaattttatatttaattaaaacatgcctttttttatatgtagtgtacccaaaatatcttgacataaaaaagtaacatggagagtatcttgaagtaacaggagtaaaattaatacaatgtttagaaaaataagtaaaattgatagactttaaaaagagagtaaaaataaagagtacaatataaaaaaaaaaaaaaagtatataacgtaattccctcctctatcac

SEQ ID NO: 47412 - DNA, 1553 bp, Cannabis sativa
ctattaatgcctatagcaatgtgaccttattagtttgattttttctttttctttttaataaaacaccattttatattttatcaccatagattaagttttaagtataaagatggggtgagctgtaattggcattattttagtgagagctttaccttctttttcttaggttaagtgtccaatagatagaaatattttggtggaacatcacaagaagcttcacctttttccatctaaaaaattatatataagatgagcaattaatgtaatggacaaaggttttataaaagaaagtacaatgtgacatgacatgctactaaggatgtattatcctatgttatttatttatcttttttacattttttttttatttattttaaaaaatatgattatttgactctttattacatattattattatttttattattataagttataaataaatgactagtttcttctattttactttgtgacaaaattagtgtcacataattttttttttgtttggtgaataataagattagactttatagtttttattttcttttttaaaaaatacaacaaatatatttttgtatttttaagtcttgatcaaaactttataattaaaaaaacttattttttaatttatttccatttcagttaaaaaaaatatcaaaattttttggtatataaattgattaaaattaaaattatacacaataaagtatattaaatttatgatataaaatattatattactttaaacaagaaaatatttttcataattagttaaaaaaacatcgaaatcaaaattcttatgtatataaattattttaaactagaattatctatagtaatttaatttatggtaaaaaaatatatattataagaacaacaaaatattatttacaatgtggttatttgacattttagtaaaagaaaatgtcacattttttagagattaggagcaaacatcataaatattatttatatccaacatttgattttaatattaactaaaaaaaacaacataaaaaactaatacgtgaagtgaatttttaggatttttttaagaaatttctttaattaagtataacaggttcatcgataattaataaacaacaaataaaaaatattttttttattatatacaaataaacataatatatttttaatatgtaattatattagataggtcttcaaaaatcgattcaatccagttagaatacaactactcacatgcaatctaatttaattataactggatgtccaatatttcgtaattagattgaatttgattggcttgatgatgtaattagattggttcagtgtaattaaatcattaatcgaatatttgatgataattaaactttgtgtatcattatactttattttacaaaatacaatatttaaattataatttaaccaatcatttttaaaatataaaactaaaatttatattttaactattatacataaccacactgattatgtttactagtattagtatatatagataaaatgagaaaacaagatgtttggccttatattttgaaataattttgagtaaa

SEQ ID NO: 47413 - DNA, 1430 bp, Cannabis sativa
atatttaaattatgcgatcattacacttttagtaataagttttgttgtaactaaaagcgatatatttttttatttcatgatagtgtttcactagtatatatatatatgataaagataagttggctgaatttcatgtctcattggctatattaaaaaaactcttaggtacaactacattttcttaaagataaagttgaagcatgtacaatatcatatttgaggaaaaagaaagaattatagaagaaatggaaagaggaacacaccttgatggatgatcattcataataatgactatatactacgtaaataattatatcaaatttaaggaattttaaagtgtttatatatatatatttatatctgtatatatgcatgcttctgaatgttccttgatcataattatcataaaagggagtttattttgactttgactataatattcccaatatatatttcacttctagttagttactactaattaatcattcttgttcttatatatatttatataatattgagagagatttttggtagggagtttatttgttgccctaattgtaaaggtatttatatttatatatatatatacttagagaaattacatcctatatatttttatggaatattccaattttcttttatatataacatataattataatagatattttttttttgatgaatgaggaattgtattagcacaagaacaattgattacacctaaatagcacccaataagggcctataataaagaacaactataaattgataatatatttacaaactttgaaaccattgtgtatctctctttgaaacttttttttggccaaaacatctcaattctaagtttcaagttagcttttaactccttaagtagggatgggattgattgctcctctttggtccataaaaccttgtttctcagctgccatatactgtaaactagatcggctacagcagctgtgtacactagcagcttgaattttgcctcctttgatcttcttagccatttgattatgttggtgaggcttgtgtgtattgttctccaacccaggcacctcttgatttcctgtaaacattccttagctctcagacaatcaaagaataggtgctctggtgtttcagcctaattatcacagcaaagcaagcaagttggttcggtgatgatcttcattttgcacaatcgatctctagtcttgagtcgttggtgcattgcaagccaaagaataaaacaatgttttggagcattaaaacggctccaaacttgccttgtccattgaagtttagatggagtttgtaccaaaatctggtaccctgcagaaatgttgtattgttgtagtactatggactgattacttgctttgaattggtccttgagcctcactaaacacctccaataccagctggtttggcttggtgtttcataggcc

SEQ ID NO: 47414 - DNA, 2208 bp, Cannabis sativa
gatttctaagtgacaatggaagcatttgggtagtgaagggaaattaaagaagtgcactgaaatgttacaatgtctcggccatatcagtatttatggttcgagaagggaatcaaggagatctcacaacacccatccagttagcgcaagggctaatcaaagaggaagatgagttagatctctaagtgggtgtagaaataataatgtaagcaatggaggaggtagaagaagtatgtattgatgaataagatcctaccaaagtcataaaggaaggatgaaatctacctctaaccatcaaagaaaagaatgtatccaggtgaagaaaaatcatgatgtactggtgtggaaccattctgatatgattggaatcaatccccacataatttaccgttctttaaatgtttgcaaaaatgcagatccaatttctcagataagaacaccattagatcttgtttgagctaaagcaatgaaggcagaagtcgagaaattaacctccatcgaattcctctgagaagccttatatccggtttggttagccaatgcaacctggacgatatgtatagacctcatggacttgaacaaggcttttcaaaaatattgcttcccacttcaaaagattgattagatagtggacgcaaaatttggatacaaattcttgagtttcatggatgcatactcaaggtacaaacagatcaagatgcatgtggcagaccaagagcgtaccagtattcaaatgaacgagggtgtatactatgacattgtaatgccatttggacttgagaatgtcgaagccacatattaaattctggtgaacaaaatatgttggtaaaattcaaaacatccaaggagcatatcgatcatctagaagaagctttatttgtcatccaaaaatatgggatgaaattgaatcccaaaaattgtcccattggagtttcctcagtgaaattctgggggtttcattgtcagcttttgaggaatagatgtcaatccagagatgattcaagctattttggacatgcctttccccctagaaacataatgtgcatttcattttttattgctctatgtggaagtaacaagtttgaatgtactactgaatgcaaagatgccttcatgcaactaaaataaaatttaggaaaagctcaaattctatccaaatttgttgagggaaaaccattatacccacatttggtcgtgtctgaccatgctatcagtgttgccttagtgcgagaagaaggaaagctataacttctagtgtattatgtaagcaaaaaaattttgggcacgaagtccagatatccaatgattgaaaaactttcatattgcttacttattgcctcacaaaagttaagaccatactttcaggccaatgcaatcatggtactcatgaaccaccctcttcgccaagtgctacggatcccagagtcctttagaagtctactgaaataggtcatcgaggtcagtcaatttgatatttcttattaacctagggtttcaattaacggtcaggccttacaagattttattatcgagtgtacaggaattaacaaaaatttggaagagtcagttctaggacttgaattcttgaaagtgtaagttgacagagcaataaacgaaaaaggttatggagctagaatcaatttcatctctctacaaggacataaactccaaagtgacattaggtttcaatttattgtcttcaacaacaaataaaaacacgaagcaatgattgtaggcccacaattagacaaggatgttgaggtccaaaacattgaactccctagtgaatctcaatttatggtaaataagataaccgaagagtattaaacaaaaggtgagaaaatggccatttatgtatccaaatcttgagatctacttcaaaatttaaagagatatatagtcaaaaaggtccttaaggccaaaaatgctttggtggatatgttgtcaaagctagcaatggacccaaaaatgagcaatacaaactagttcccatagctcacattgtttttccaagcacacaatcactggggtaagtgtgattgatcattccacttcttggattggccttatataaaagtttataatttctagagagctttcggatggcaaagtcgtagccaagaaaaatcaacgccaagctcccaagtatgtgtttctggatggaagattttaccgatgagggctattgatatcctatttgaagtatataga

SEQ ID NO: 47415 - DNA, 803 bp, Cannabis sativa
tttattttactataaatagcataaatgttacacctatggttgacataagaaatgtaattgattggtagtgggcgggcggtaggatgtacatggaatgtttacttatcatagaactgcccccgaatcatgatatattgttaatcactcaagaatggcctaaaatcagttttatgtatattagaaatgtatcaagcactagcttgtggaaagaaactacgtctctccaattccattgtcagtcctgttcctacttcaataaaaattactccaccactttcttcttccctgtctatctgtattaccattgtgtatcatagtacttgactattttgttaggaatttattaaggtgtatatataaaatgtgtgtttgggtgatcaaataaataagtcaaatttatataatctattttgaaataaaatttatgacttaaggcgtaattatcatgattttaatatgtcgataccataaggacaaattctaatttgatgagaggccaaataaaaatagtcaataaatattactaacagttttgtcaattagtaatataaacggtaatggtccacaatttgcagtatcgtatcttttcattttcttgaaaccccatcatcaagagacaaaggttactaaaaaagatttcaatgcaaaattagaagatcatacccttattcaagcgattcaatggactctagtacgcttccgctaatctataattctattgtttaattctcatgaattaattagggctaaattaatatttaaagtgtttataacatatagtatcaagagcatccctaaattaa

SEQ ID NO: 47416 - DNA, 3132 bp, Cannabis sativa
gaaagtattgctcgaaatcgaaacctcaaggaaatgaaagtaagctactaccttattatacttaaaaattcgaataattagcaaattttaccctaaactttcgacaatactgatttctccccacaaatatgcggtttgttaagaatcctccctcaacttttacatctacggaaatttagtccttctatttggtttcgtccaattattctgtttaaatgacgacgtgtctttgtaaattagcaactttgctccctaaactttgacaactatcgaatcgtaccccctcaaaaataaacatgaaaaatatttaacactgtttttagtaattcttaaaaaaataatttagatcttaagaaaaatttattttgaatgataaaaaagattaaaaaaaattaaaactaattaagcaattaaaaaaattatttatttattatttaaaaattcatttagataataaaaataatatattaaaaattcaatttttgtaaaaactaaattttacggcaacaaacctgagtatattttgtttttctcaaaaaatgtagatttgtttaagcaaagataaaaaaaaaagtttagtttgctttataacttttttcaaaataatttatatttttattgaatttttaattatttttacttatttgttatgatatgagtataaaaatataaataagtttgattttttttttcaaaaaatcttaatttatttaaattatttattagattctcaataattttggtttgattttttaagaatacccgattataattataataaaatttaaaaatattatttaaggaataatttaagtttttttaaataaaatattttttaattaatttaatatttttatcggttttttagtattttttattctttttttttccagaattaatagaatattatgatttctttaatattataatttgtaaattaatttttgaaaaaaaatgggcaaaattttgtattggtcaaagttcaagggataaaaatgctaatttttaacggtaaaataaacgaaacctaacaaaaggggcataattatgtaactgttatattttagggagataacaagtattattttaggggacaaaatcaggtagtgctagttcaggggtaaaaatgctaattattttaaaaataattttgcatttaattaagtataagtgtaggaaatatcacttaaaaccagaacctcggggaattggaagtaagtcattaccttattatacttgaaattaatctaatatactacgcagttaactgaggataacttaagatagaagttcagagttcatggttagctcaagttaacttaatccaaagcatttatgtatcttaaatagagtaattaattcaggttaattaaatattaaagtttaaagaagtcctaaaaataagtaatatttaccaagaaatgtctaattttaaaataaataattaactcaggttaattagttatttaagtttcaaaatctttaagtaaatatcacttacaaatatttttcttcaagacaagttattaaggtaccaaggttcaggccattggaagcatattctaaggcatacatacaacttgttaaaaagaaaagtatttaagtctaagtatttaattaaaaatctaaaggttcaggcctttggaactataacctcacaaggctggaaacattaaaaccttgcaaactctatatattaaaatgaaaatatccaaagagtcaatcaagtattactacatacttaaaaaccccacggtaagagggtataaaatattatctctgcacatgtaaaaagggggacatttatcacccaaataacacaaaaagtataaaagtattcaagtaagacaaggttggatagatacggctacttctgggttaagtcctatggtacctgagtaccatcagtttgaacatcaagatagacctccgagattgcataactagtcacagaagaaacaacggaagctggacgagtcgtgtcatataagttctcaccctttaggagggtagttctaggatcgaccacttctatagtttgagctacttccttagccttatctgcttctaccaatgcaaggatttggggaataaaaaaatacctatcttcagcatctaagagatccatcatggacttgtggtgctgccagatagtgtatataaagtacacaaagccctattccaaggcttctattattttagcctcctaatcctacttctcttgaatttcctgttgaagatactcctttagccctgaagtttcctcttctagctcgataatcttcttctaggactctttctgagcttttttagaagaactcaatttagttgcgatgtttttacccctttggatgactttcttctcatcttcctctgcttgttgttgcagctccatatgatgcttcacattcctctcaagagtcgcctcattgacaatttggtcatttatgatccccattttcttttcttattctagatataaggtgatgagttttttctcagattgttggagatccagctttgcttgcttcaagttcgcttctaggtccttgatctgagtaagggcgttgggatattgatctttatatctatctctgtgctctgtctcagtctttgtggccctccgttcatgggttatagaatagtccaaggagtcattcacccttgcttaatgatggcctccattttagcattggcctcagctaaagctttagcagcctcctctctcctctactcagcattggaacactctaccttcagcaactcaaattcataggccaactttgtgggcatagagtagtttctttcagccatgaagctcacttgtagaaaggaaattacaaaagagttagaaaactaaaagaggattatttcttaccttaaagaagtcaaaatgaattcaacttacaacattggcttttgtcctcataatgtcttccatgttgacaggatccccacccatcatcatggcaaacctgttagccccaagtttgcaaattgtggttgcgctctgatctagcaagtcagccaagaattgagccacgtctgttccaacttgagggcaaagcttttctgtcatctcagccctattgataaggttaggaaaaggctcgtcccacttgtcgtagttgg

SEQ ID NO: 47417 - DNA, 1598 bp, Cannabis sativa
  modified_base (62)..(68): a, c, t, g, unknown or other
aaagttaataccacatatagttttctataaaaatattgcataaaatacaattcaatataatnnnnnnnaatacaatacgacctaatacggtgttccaaacgaaccctcttatatatcttccaattgtgatatgtagatgttgtgctgcatgtagccttcatatttgttaccctgccaaaaagggctatcataatattatcactcattccaacttttttcatcttttagatacattggaaatgatattgtagaagagaatttatcaatcccactacacaaggaattggatgccttagaaagaaattattacttgaaaagcatgcatgatatacataacattttctttacatgctctctgctcttaaacataacttactgcaaatagatattttcagccacatgatagttcctacatttcaggaaggatgttgttggcaattataccatgagatctttttaccatgatgtcttcacccttcaggttatgacctatttttgcatagtaaataatacctttacataattggcaggttgcctgagttgatagttatatgagattgttccaatacggcctgttgtgcatatctaacttttgtttatttatttttaaagcatttattcaaaggaatcaattgccaaaagtttaatgatcagtcctctttttccatcctctccacaggaaagagtttccttataagtattctgacacattttattttaactgaaatcattcttcagagtttagcaaaaagcttgccgaaggaatgtgtcgaaaagatgaaggaaccatcagaggtaggttatttaactcttttcctctttgattttcatattatgcatcaagtttgagatgtagttcccatatttcttctaactcttgattaataacatatgcctttgttaccttgctttgcaatgccagtgcctctttccacatgaaattatcaagcacataaaaacaccagtgttccttgtcaacccagcttatgattggtggcaggtaatttcctccaattccaaacttcatttgattactatggattatagttctccattaatttcttttatgctaattgggtaatcatcagatacaaaacgtgttgataccagatacatcagatccccatggctactggcagaaatgcagacaaagcattctcaagtgcaatcctaggcagattgaaatactacatggtaatagctgaaccaagtcacattgttgtagggatttctaataaattttatatgaaaatgatgctggtatgtaagtcatgcacttacatgcaagcaattttctgaaactagtgaatgattagaatacataatagttgccttaccaaaagaaaatacataatagttgcagatcctgtggaaacataaaaatatatgaataaaagttcagaagttcatacgtaaaattcggtccacttcctggagatatcttgcctaatactccattagaatcctcatctagagtcagttgctgaagtctcatttgattattttagaattctcaagtctttcaacttagcatctagctggacactaaaatattacaatgtttggcaatgtacgtggtttactgtaattgacatatt

SEQ ID NO: 47418 - DNA, 737 bp, Cannabis sativa
tatatatatttatataaataaataatacacgacacccaatatttgaatcagaatacagagaaaaaaatatataggaaagaaaagagtagatggagaggtaaaaaaaaaaccatttaaaaataaaacactaacaacatcgcaaggcttaaaaaataattttgaaatagactaaacaaaaaataaatgaacaggaaataatttgagcaacgacaaaactaaataaacaaataaataagtatgtaaaacacaaaacactaccacaaaacaagcttttagcttcctttttttgaacgcattttataaaaaaggaagctaaagggtctgaaaatacccgcttattggaaaataattaccttaagaggctgttttttttataaaaaccgtaagtataaaattagagtataccatttagaggcggtttagagtcaaacgacatagggtttgatagtttaaccttatgccgtacgttgttatagaataaccgacgacatagggtacacgtgaaatttgacacgtgtccctatgctgtcggttattctataacaaccgagggcataggattatataaagaaccctatgcatcgtctccttcctcacgagccaaacccatcagtagagaccagcccagccaccagtaaagaaaaaccctcgccaaccaccacctccgccagcccatttctcccccatttcttaacaatttgagcccatttttgttgcaaaatcttctattttcgata

SEQ ID NO: 47419 - DNA, 1864 bp, Cannabis sativa
tacaaagcgtggtgttctgggttcgcaccattggcggttggtggggatatggactcggttgcggttcaagagtttagtcggacccttttcaatatgaggcccgatatagcgttgagcgtgggccagactatattccaaagcgacttgaggcagattctgggcttggtcactgttccatgccacataatccaaagtatgaaggacctggctgttcctgtagttgtgtccgagtacctacaccagaacctggggtccgactccatcgtcgaggtcatgtcaacagaaggtcacttgccccagctcagctccccagacatagtcatccccgtcttgcttcggcatattcgttgtgacatagctgtttgaaccatgaacaacatcatcattagttaccaacataacaaatacgtgagtatatatgcattttatttggctcattgtttgttgtgatcttcacacaatcacacactacatccaattttcgtaatataattcaataatttaataacaattttttttttcacacttgcaggccgtatctttaattagttatcggattaattggattcgttgaaatttgcaaggggatgacttcaactataagtcgatggaaaattaagtgtacttcagttctcggattaattagtacgtacgacgtcgttttgatgcatgtacaactgtaaagtctgtattaattaattggtgtaatgtaacaatatttgatccgcttggtgctactagtacttgtttgactattgtgacaaaggtcatatatcaagcgtaaatgtaatgtgttgactattgagagacttcgtgggtcatataacgccagcccaaatgcagataacgccagatgctgccgataacgccagcccaaatgcagataaaattgagtagtgacagttattacaatcttcttaatggcctctttcttttttgttcttgttttattttggctgattatttgtagttggtggctcatatatgtgtttgttgtaggcatttttttctacttggttctaattctttttacacctcgagttcttgatcttttaggatcaaatgtatttttctttttaagccttcaatcgttttacttattctgtaggacaggtaaaatttgctgttttattaaatagactttgcgcaaaaaaaataaaataagttaatggtaagtccagtaacgaatatgttgaattgcctactctgagtaagtaaattatatcttatcaaaccaacaattattgcatgagaaatgagttgattttcctactctgagtaagtaaatagtattgttttttctttctataaaaatatatacataaacttactttaacaagcaccttgttttttcatgaatgatattatgtgtttccttctagaaattttatggtttacattgttaatttcccatgggaagagttataatagtgaaagaattattttggtcatttcagattggtaaaagtctcgttgtggcctccttactcatatatacttgcttctttttgtttttagtagaagaatatctaaattatcctattgtttggtgagtctctaaccttaattgacttattgcacctggtcatttaaaatattttaatctaagggtgtaaaattgatctaaaataatctagaaaaagttattttttgaatgagtcctggtatatattatctctgatgctagtttaatgtagacagaaattgttttctcttacctatttgtttggtttacatgacaattgtttaaatcctatatagggtgacattctgtaattgagtatgagaaacgatgcaactcatgtagaagaaattgttctctttaatctaaattaagttgctctatatgctagttaatggaata

SEQ ID NO: 47420 - DNA, 1643 bp, Cannabis sativa
  modified_base (1202)..(1212): a, c, t, g, unknown or other
  modified_base (1397)..(1398): a, c, t, g, unknown or other
cttgactcctgaattcataagatcttatgtagctcctagtgctgatgacgtgatgccggtcttcctagtagacattgtttgtatctttgtggatgttgcttgtagaggctcgtgggttgtgggagctatcattgtgaaggacaatagtggagttgtgttggaagctttgacagtcaagtttgatatctcctctcttctttaaggagaaatcattgttcttcttcatgcagcttctctctgcttcttgcgtggctggcagagttcaattctcctttcagattgtaaagtgttggtggatgatattttggctaaaaaggctccatgctggcaagataagtatttatttaatcttcttttaaattggctggattctttgattgatgctagagtggtgtggattcgcaggactattaaccttcatgctcatgctcttgtagcgtgggctgctgctactcattctattttttggttttgtgtcctctgaggaggtggagcctcttgtttccacttaagactttatctttttggttggcctttgcctttttaatgaaatgtttttgttaagaaaaaaaaaatgtacgttatatgtatggatttgtactacgtaaagaatatattagaaactatattttaatttcaataatttttattttatttataattttttttaattaatattcaaacactttaaaaataacttcattacgaaaacaaaagagttacagaatagttacccaaaacaaggtgcaacttttatttattttgtattttcagctttaatcaaaatcataaacttagtcaaatagatcattttttatggctatttaggatttttgcctacaaattatgatatatctattattgtgctcttgaatttttcagccgttaaaaatagttcacaaactattcatactaggaatggttcttctgttaggttttctcacacgtgataaatagaatgatgacgtagttgtttagacaattttcatatccgcgccacatatataatttaaaattttaaaaattatattttaaaaaaaatcattaaactaatgttattcgggtttccagaatgatgacgtgtgcaatttcaaagcccaataccagttaggacaggcccagacatgggtccaatctggttaactccaaatccattcctcttacaaaaaaaaaaaggaaaatttacaaaaatactggaattnnnnnnnnnnnttacaaaaatactgtcacacggaattttttttcaaaaatactgtatttttataaaatatcaataaaacaccagtgaaaacagaacaactcaaaacaacagtagaacaactaaaaaacaccaatataataccagtgaaaacttaacacagtatactgcagtataaaacttataaaaaaatacagtnnaaaagtaaaaaataccgactgacagtattttttgtaaaaaaatagcaaaaattagtataccatgtaaattcccaaaaaaaaaaaaaacaaatccatatattaacacttaagcaataggccacttgctctgagtcaattcctatagggttgagatgcaaaatgaccctcaatttggtaactaagttagtaaatgtccactttttaaaaaaattaagaaaatggccaaatctaataaattagataat

SEQ ID NO: 47421 - DNA, 4484 bp, Cannabis sativa
aaatagcgatcattcccaagacttacacgctgctgcaaaacttcattttgcaaatcttttaacctttcaactctccatttcatggtaacaagctgcccaactctaaggccagggagaggaagaaatccaacagctaaacacgggtcaaggacaggcctctgcaaaacaagagcactccggaaaactaattcctgtttagcatcctctggtgcagaagtcattgtaccagaaggagcatgtgctcccaaatttctatcaccagaaattccatattttatgttcagtatactctctgattgtagatccttaacttcatctgcaccaaaaggataaaaaaaaagccacatcaagttacttgcataatcgtgggctctaaatagcatattcgctgatgttaatcatatgattatccataccctcaggtactatcttccctaagcatataataaacaagattccagctctggcattcggagaaaggacaagtggaaagaagccagaggccggtctcccatcacgttgtccagcatggacaaatccatcttgcagatcaagccaagcatcgtagactgtcagtgtggcttttacttcagaatgtaaaaaaatctgaagtatattaaccgatttgagatcagtgaattgagaaataatccagggtcaattaaaaagaagtacaatcattatacagtgcacaggtaaacttttgatatctacagaggtgatcaaaaaataaaaattggactagcctcccctagcttaaacaagcctggtatatggaaacacaataaacaagcctttgatatctacagcagatgaggtatgtattaatgagtaatcaatatgaactatgaaacacaataaacaagcctggtatatggaaaagaagctagagaattcagaataaattcataaaagtctggacacaaatgtacacattaaactcttatacttcataatacagcagttttcatcttctttgtgcatatgcatatgtaattaatttgtgaagatgtgcagctaatgtcctgaaaaccaaaccaggtgatcattatcaagatgaataaacaacaaaagaaacctgactggaggatgctagaaaattagctatgcttatagtatgtctacctgattctgaacaatattccaattcatattggtagtcattgtcactcttatttaatttataatgattagcccattacaatcattactctcgacatgttcaaagaatagatgaactagtcctttaaactcaaaatatagaatacctgcagaagcaaagtaccgtcattgcatttatcagcaactcgcatgctcacatggaaaggatcagtgaaatgcacagcgagagtcctgcagaaaatatcaagtgaattcgcaaataaatttttcatttgaaagaacttctatactaaacaaaaatagaagaacaaattaatatcaaactctaggagaatgaaagttgcaatgcctgtcaaatgtttggttatgagatattccgaattcaagttttagggcaatagtcctcatgccatctacaatgctcgttctctggggaatagctgctcataaaaaatgatgcaccaaacacaggtaagtatctggatgctatattactctttatgcgatgcatgtgtacgtgtgtgtgtgacatatatgaaatgactttgacttgaggaattgcatcattgtctctgaacctgaagaggatcctcttgccagcttgtcactgatagcgcggacaggaatccacaaaattgacgctatattgcttgcccaatccggaaactctattctaccatcatggagtgtcaactgctcatattttctactgacagtagaaccattttccaaagcactgtcacttttcttttcggtggaacccttagatgaatctgcatagctttccatctcaattacatgcgactcttcaattctaaggccaggaccagtatcgatatgcaatacagcatctttcagggagtagttaatgggcctcactataatcccaacccactgtgactcatttataagcaaagcagatgaaacagctgcagcaagatcaaccaacggtcttggtttgaaaacctaaaaaacaagaagaatcagatactgaaacagcctgcataatctggttagaaagaaacctactgctcaactttatcaccatgtcacattcagcatctgactgaaaatttaatgcaatcaggttagtttattatacactaggtaccttcaagattggtcttgtaggcttttcataactcaaaaaatcatcagtgtctgcagggcctccctttgaaaagctgtgagatctgaatcttaagtgcccaatctgcccagtaagaacacccaagacataggaacctggcttttggggcggtaaatctaaggtaattgtgttccgaccaggttttagtacaatggcacttgagcttttgagtgcctgtaatgtaaatgaaactttagcaacttaaagtacaaggatagtcgtaaaacatgtataagattatgtccaagaatgcataccttaacaccctcatcagcattaaaagtagccatcagtgtcaaactaagtgagtcaagagttatatcttcaggaaagccactccaaacggttacagagagaatgccaggatccccatcgcataattcaattggaggcccaggattcccagagaatgtaatcaatgaagatacatctagaggcacaggttgtttcatttcactatgagcaagacgaacaacctctgactgaaatgcttggcgttctttggttaaaaacaagcttttatctagtgaaagtaatctcacacaagatgataggtaaccagcttcgtcatccagtatcttttgacactctgctaaattgggcaggacctctgctaatagatcctgccatccttcaccagcataaagggcacaaaccttctcatatgattttgcagctagatcaaagttcccatgcttaaaacaaacagctgctatttcaccatcaagaacaactccatgtcttttccaccaagatcggtggtaattgtctgcagcaccctttgttaggtccaagtatttttgctgcagaaccagagtctatatttagagagaaatccaatgcatgtgcatggcagagagagggagagagacacacaccagagctccaacgcaacaaaaattaaatttccacactttcaggagatataaacattaagaagaaatttaacagtaataaaaacaaataagattctaggagccgtattgtcataaagtaaatggcagctaaaaaaattcagaagcgcaacaggatacagattatataaacaagtgtctgactgtgttagaaacctcgaaatcataccacctaaatcttctacaaataatttcatgaagtaggaatgacataattcaaaaaaattaagaagtagatacgatttatcttattaagcaagtgcctgactgtgtttgaagccccaatccatacctcaaaatcttcaacagatgagaaggacttccacaactcagtattggaaatagtattgtgcaaagcatgttcagcagcaacataaatttctgcaagtctcataggtctatcaattgagctgtccattcccggagaagaattagtacgtgtcatggagcttgtatgtaatttatttgttggggacatctttgaaattgaatctgaacctgatctgccaaaatacatagcaacttcggagattaaaaaaatttgtacaataaactctagacaagcatttatcaaaattaatgcatccttggaaaatgatagcatcatttagaaaaagaataaagaaaaacgatagcatcacaatactcgctatcctttctgaattatgatttccaaacaataaagctatggtgaccatcatacatttcaaacatatttccaacagacagagaagctcttcgtcgattagcctcacgtagaagaaaagaaggttcaagaggcaatggtttcctctgaataccaaagtgcttgactactggagtttcttgaagaatcatctacaaaatgaaaatgaaggatcacaagaaattttagtaaattattcagttccagtttagatagtatggaaattcctttttgacttttaacgacacatataacacatgtcagatgggaaaagatgcaggagaaatcatttagatggtctatttatgtgaagattaaatctttttttaccattattaaattcataggttcttatagatagctatgcagttcaaatagatagaagtccaaccacataatagctactccccagccctaaaagaagtccagttagtgtgtgaattgtgcatcatgtgctggattacactaatgataaacctccatgacactttgtttataatagaaggccatagcctttggttgggggcttatttgtcttttctggtctattagttttcttttagttttattttaagtggctgttttgtttaagggcagggttgtcttttgtatt

SEQ ID NO: 47422 - DNA, 2543 bp, Cannabis sativa
aaccaaaatcagagttcaacctcaaaccccaaccttgaccttggccccgaatctaactttggcctcaaccctagcctcgaattctaatctcgaaccccaaccctagtctcaagtcttcgccctcgggcttggacctcaagctatttctactaaatattataatataatataaaatttttattaatttttttaaaaaagtggatgataagttatgggaagatgcatggaagaagtgtgaatgtagatatagaatagatagagtgatttgatttgattggggaaagagtgtaaataattgaaggcaaagaagggagaagagttagtttcatttcttgtagcagatgagatgagatgagtcagagtaagtaaaggtagggacacgtcacacatgtgactcgcaccacacacaatcacatccatccaatcaagtcggtgtaaagagggaaacaaacaacatctactgttcattcacacacccaatcaatatcacccacgtgtcctctaacaatcacatgtggggcggctcaccctcacctgatagtgacttcccaatgcttccacacaattctttaccaaaaaaaaaatatcttctttttttattattatttattttttgaatttaataaaataagatatttttaatataattttttttaattaaaaattattatttttttaatataaaataagataactctaataaagttataaatcaccttattagctaatcgtttaatagaatagatagaaacatttcataattctttcaataaagccttacaaatattaaccatttgaccaaatatggaaatcataacaagtaaactatgcaaggcttgtatgacagataaacagttagtttcaaggatagcatggtgtggtcgattcttcttgatccaactcaaagcttctttaaccccaatgcttcaacaaattttggtgtaatccgagccatttaaaagtttggtaccaccttctaaaatcatgcctttgcatctcgaaccacgaaacccaccccatattggttaagtctcagaaaatatagcatcgtcaacattaaccttaatgttatctccatgtggtgcctgccattgctcagctccgtcacttggtaaaaaaccaagaccaaagaattctaagtctgaactatgagcaattagccattgattaaggtaacttctagccgagacactatattatccacacttaccactttgttttgccaaatcttatcatttttcgcattccaaatagcccaacaaaaggcaaccagcaattttttcatgtccgaatcaagcaccaaaaaattagacacgcaccagtccaaaatggaggaaattggctgcactatagtgctgattccaactctttcccaacagagtttaacaactgggcaagaaacaatggcatggagtatggattcttcctctatgttgcatattgggaagcacctccacgtttagtctgaagttggaccatggttggtagacatccttttccaactctccataacaaatttttcatttatggtggaagttttaaaccccaaaagttctttcaaaatctatcaactactgtctcctcttgaatattatcaccacgaacatcttgtgccagtttgtaagcactcttgatagtgtacaaactagaattttctcctatccatgtaagataatcatgcccacaatcttggtgaagtagagtttggaggatcaaatctcgatcacactggtcaaataaatctgccaaaagctcttcatcccaacctgtaccatccatggaaaacaagttgcatatctttgcaccaataagagcaaggtgcgatgaataaaccaaggagttgacagcatcggttaaccaagaatcacctaaaatcgatatgcttatgccatccccaacagaccaacgaacccctttagccaccagttggtgagcttcaaggacactacgccaaacaaaccttagattggctccaatatcagcagtaaagaaagagcctcgcgggtaatacctggctttaaatacacgggatacaagggaatcaggtttggagagaagcctccatccttgtttacccaaaagagctaagttaaaatctctcaagttacgaaagcccataccccattcgatttgtgtttgcatagtcttttccaagacatccaatggatacctttagatgaactattagaatattgccaccaaaactttgacatcaagccttcctttatctcttgtaacctcttgtggaatcaaaaacacactcatggcgtagcttcggagcgcttgagctatagtttttatcaaaatttccttaccagcccgtgaaagaaacttagtttcctaaccaagaaatcttttcctcaccttgtcctttagaaaacccaaagcaacagatttgttacgacccatagaggtaagcaaaccgaagtacaggctgccctcagtagccgtgaccatacccaataaaagattaatcctatctctctcaaggtatttgaactaaagaagatagaagatttagaaagattaaccttttgactcga

SEQ ID NO: 47423 - DNA, 656 bp, Cannabis sativa
tgttgttgtagtagtattattagtagtagtggtagtagaccttagtaagtgtaaaggatcaaacacattatgattaacatcaaaggctgtaatataagcataaacaatcacagcaaacccttttagccccaatttgagagtttgtttcccaagaaagcttcctatattctcagcaagcttctcacatattgactcatcatgaagcccacaaaacctcttaagcactttcaaaacgaacgcctttcgcgaccaatcaggcgacccaagaatccacgaaggaacactcaccacataactgaatacgggtgaaacgacgtcgtccacattaaaaactacattttcattattattattattactattattagatagtaaggacaattggagtatgttccttttcttcactcggatttcaagccgtgacgtggcatttgcatcttgacacttgtaagtgtacatatcaactttgtaacgacactttcttgtagttctcgccattgatgattttaggtaggtatcaagatttacgtgcattatttttccagctctacatttacgtacaaaaataatactttatcataggtatataatcatattcatataaacgttgcatatattatatgggtgtttctatactataatgcacactcttgaga

SEQ ID NO: 47424 - DNA, 1216 bp, Cannabis sativa
ttagcaacgtacaattaatatcggtaagatacactattattcttttttagacataataagtacttattatattacaataaaatttgtaaaaattagtattaaaatattattttttagtagcaattatcacttaaaggtagggtttttttagtgatcttcttatagtctaaaacaagcactcatttgattttaatcaagatttatatacatgcataatgcatgtgttgttcaaattgttatctttaagaataaaatattatggtgggtctaatatggacatacaaatttaacttattatatatcttaattatatgagggacatatttaacttattgtagtggggccaaatcacaaatgaattatatatatagattatatttttttagagatatatattagattttcagtataccaagtcggtctgaaatttttagtgggctataggaaaaaaatatgagtttttatttaaaaaaaaatatatataattttttaaaattaataaaaaattatgtaatttgaaaaaaaaaattaagccactaaaataaggggaccctaagtacaaacctaaacctacttatatccaggaacaaacttggaacaatgtgattatttttgtttcgataattttttaatcatgtataatttttttacctgattaaatgtcgtgaattttaaatataaaattattaaaatattttgctacaataaatttactagtttaaaaggagataaggtttaaaagggtgtattataaatttttcattattattattattttattttaaatataggtaagctttctactcactacatgattgcttaatgggcgacatgcagccgaatgggcaaatttacaattatttctaaacttgacattttttttgcaaaaactaatttagggaacaaaatcatacaagtgtcaaagttcaagccaccaaaatactatttacttttcaccatacaatgaatattatcaaagaaaccataagagttaaaattatataattaacaaacatgcaacttgatgtaaaatcactataaaaaatcttctttttagtcacaacaaaacttgtgactaaaaataaaaaaaattgtgactaatcatcaacaattattgctatgttgcgacactaaaaagttcatgacaaaatgtattagtcataaaaattacagtttattgtgactaaaaatattttagtcacaatacttgttctga

SEQ ID NO: 47425 - DNA, 1620 bp, Cannabis sativa
tcccttctgtcttcagtatgaggagtcaatattgcatattctggtcacatgcgaagtggtgcaaccttgctggaacataattggtattggcactaacatggccatgaatattgattttttcggctggtgtgtgcattcttttgagaccctggatgttaatcatcaatgcattttagcaatgatttgttgggcgatttggaatgctagaaataatcttatttggaatggaaaaaatttcaaagaggatgatgtagttgctaatgcaaaaagattccttgataaatggatgagtgttaagaactcaaaatttgagttgtcatggcctgatttttaggcaggtgacggagtggagcactggatcttaccacaagctaacatcatcaaggtaaatgttgatgcaactctatttgactctgatcataaatatgggttggatttggttgctagagatgaaaggggatggctcattgaagggcgcacaatgatgtccaatggtagtactgaatcggagcttgccaaggctatgggggttcgagaagctcttcgttggattaaagagcgaggatagaataatgctttagtggaaacagattgtttaaatgttgttcaagctttacaaaactatattgttatgatttctatgtttgctcatgtaatcaaagattgtaaagttttaatttcagaacttggtaacattcttatctatttggttaagtgatcagcgaataaagtaactcatagttttgctagagcttatttactttaccctggttgtaatattaatttgaagtttgttccaattgatttgttactattgttggtaacgaaatttaatggttagtaaagctaaatttttcattaaaaaagtatatataataaaatttttctttaaaatattatttttttggtcatccacataaaatttaacatattttcttataaaaaaataatgaaataattaacaactcaaaagattacctactataacctcatattttacttttaaagtattaaattaatcaagtttcttagtctaaattacttttttttttccttaaataaaaagtaaaagaaaagatgacataggtccttgtctcttttcagccacacccaatatatatacagtatacttttattttttaaaattgaatcattgaccattctaattctaataaccaattcctattagagatattctaaaaaggacatgtggtgtctagtaatatctcaaagagactgtgtttgtcattttaaaaagtggggaaccttcaagtcaggacaaagataagttggtttggactaaaaaaaaaaagtgggcgctttcttgcaagtctgtttatctgattcaagctttacagagagtccctaattgtgaggttgccccctctccctgtaataagcttgtaatagtaaaattctagaacgtcataaggtcctttggtagtgatcctgtctaacgctcttctggttcgagcgattctcaataagaaattccatattgagaataagatgtgtcctatctgtggggttgaggaggaaaccatagaacatctttttttctcctgtaatttggcttttcatttgtagcggtcttctctgtggaaaatctttcccattgtc

SEQ ID NO: 47426 - DNA, 2491 bp, Cannabis sativa
catcctttgattctcaatctttctgctttctctttctttcttcttctttgttcttcatagtattcaatcatgtataagaaagttaatatggtatcaaagcttgattttctgccattaatggaaaatgctgttactggcaatggctaaagcattgtctctagtgacactttgaacttaggcaataacaactttcagcagaatcatccatattctacttcaggtcttcaacgagccaaaaagaagaatacaaatgaatcctctctgatctacttcaatcacagtctctagatcaagttgagtgattataatttcctcttgtggaaacaacaagttcttgtggcgatccgaggaaattgattgcagagctttgtccaaggccacgatccaccatcataagtacttgagtgatgaggatcgcattagaaatgtctataatcctacctatcttgattgggaagctcaagatcaacttcttgtttcttggattttatcatcaatgactcccatccttctcatcttgattggggagctcaggatcaacttcttgtttcatggcttttaccattgatgactccccactctgctcattcttatggttggttgtgactctacaagtcagaccttgtccacattggaaaaatacttcactcttcaagtgtctgccaagattctggagttttaaacaaagcgacaaaacctcaagaaaagctctctatcactcaacaagtacatgctcaaagtcaaataaataattgatttgcttgcatctttaggtgatgttctttctccaatgtatcatgttcaagtaatttttaagggccttcctagtgaatatgacacctttgtcatatccacaaatacaagacttgaacagtactctattactgaaattgaagcactcctgctagcatctgaatctcagattgaaaagattcatcgtgaaattgatctgagtgctcatgtagctatgatggaaccagatccaacactagaagaaaatcttgctaactttggtcgtggttgctatagacaaccgtttcaacaatcatcatacaattgattttacattaactttggtcctagaagctagcatctagaaactatcaaggtggtggttcctatggtaatttcaaaaactacaactatggctcacctttttttgcactaggtcgaggtaatcctaactctggtagaggatcactaacaatagacttcaatatcaattgtgcctcaaacttggacatactgtttaaagttgcttttataggtttgacaagaattttccagctacatcatctcccattgggaacacgaattcaacactaactcatgctaatttcttgacttcctccaatgagtgggacatgagatggtatccagacacctgtgcaactaatcatttcacttcagatgctgccaatcttgctcaaagctcaaagtattttggacaagagaaactatttgtccgtgatggctcaagtttgtcaattgagcacataggtcaaacatttatgtcttctaattcatctaagtagcctttagttcttaacaactaattacatatgcctactataacttagaatttattgacctaaattttctcaagacaacaatgtttctatcctgacagatgctatgtaaaggactaggacattagattaatccttttgcaagggaaacacaagaatgacctttatattttttaggatctcaacttgcttcctgcaacagctactcataaaatagatacgtattttttatgaagcctgaaaataattaatcttattaaatcttttttcatcattacttttgagagttcttgttcatgtgttgacaatatacaagaacacaatatacaatacatatcttaataccccaaactattctttgtgtgtggtggaagatttggaagactacagtgtgagttcttcgtcatcatccaagggtacaacttacagaaagaaacaatgataccttgatagctaggcttcaagaggtaaattttattttcgtacttttatttcagatttaatatatgtggtgatcctgaggatgtggtacgatgataatcagtaaatattattccgttgcgtacttgattgatttagtaccacaaaaccaacatagacaacaagacagatggagaaaaggtcggattctgaggtgaaccgcaattattaaattcaaaactgcaaaccgcaccgcaccgtgcggtttggtaaaactgaaaaccacaaccgcaccgcaaaaaatttcaaaccgcattttttatacggtgaatgcagtttggacggtttgataaacacccctattacaaacctcccacaccactccaacacattccccgcaatcggattgcaaccaccatgagtaatggaatttctaatgttccaaatataccaggacacaaccagaaaataagcaaaagtgtctgcagtccaagccttagccaatttatccataaacaacaccacatcacttgatttaaact

SEQ ID NO: 47427 - DNA, 1220 bp, Cannabis sativa
tttttttaatctacttggaaatggtggaggagtggcaaaagttggtacaattggtttgtatggctttttcagtgattgtagaccaactaaagtaggagattcaacctttggtggagatgatccttcaagggaggaattgttgactcctttaattggaatcagcttatgtacttcttggtgtggtgatgattcaagttgtgaaccactttgaagtgtaatggccttcacattctccattggctcagtatctttttgtgtaaagtaaactttgaatttcatacccactcataaatgtttccattggctcctcaagattctctaacttttgtaaagattgttgaaggctctgtatagtttcatgaaagctttgcttaaactgcaaggtattagctgcaaacatgtcaatcagctcagcagcaattggcttttcactatatagtgcaacatcagtagtgttatcaaattttttgcacaatgatgtggcagaatactcaagtgacacgtgtcttgcatttcttatagctaggtggaagtgaatgtcccgaacagactccatattgcatgtcagcatgtataacccttgattacccgagcaggatgaaagaaagatcatccaggcaaatataaatctggcttgccaaactacttatgaggagttaattacttcagaatgatcttgtgaagtccaaacacgaaggcaatccctacgatcgtgggatttcattagagaaatatagcaacctgttttgatttcctatttcgtaattatgtaataaatgtaatttcctattttatatattgtaagaaaaaggaaaaccttccctcatgcattaaggtcctataaatagtgacttagcctcattgtgaaagggattgaaagaattacttcagagagagagatctaagagaattacttagagattcattgtaagagcttttagagagaaaaacccttcgttctttctctcgagttaatacaattcacggggagtaggctattaccacactcacgaggccaaacctctttaaaatttggcgttctttattactttgttgtttttgctctattttaattatattcttaatcgcttattaattgactcactctcgttgactaagcaaggtcaacattttggtcctttcattgagagcaaaaatccaagttttctatttttcttaagttctaacaggcgtacaggattgtaacaccctaactatct

SEQ ID NO: 47428 - DNA, 2484 bp, Cannabis sativa
tctctcttataaaatggctagttctcataacaagtccatcttcatcttcattgccttgtttgtggttcttagttttatgattgtgaagcaagcatcaactactgatgacttttcagctgcccgaagaatccacaatagaaaggtggttagcaatagttaatgtatatatgtttgttttagttcaataaaacagtagtgatgaatgttgtgtatatataaatttatttttacaggttcttattggcttaagggagaagatcaaagtggttagctatggaaatggaggaaaaagtttgaatgatttggaggctttgaggaagattccttctggtcctgatccacttcaccacaatggcaacaacaagaaaaagccccgaactccatgaccttaattacatatatatatgagtgtctctgtgtgtgtgcttttaagtttttattttggaagattttagaagagggttggttcctttttgggttatatgtatttcagtttatttgtatgtaaattatatatatatatatatatatgtgatagttagtcttttaatttgtaagtttcataattatatgttatggtataactttttgttacgaatgagtatatctattgttaaaatttttaatctagtgatagcgaaaatatgcaagatcttagtgttttttagttactcaaaaatgtattaagagagaaataaatcaaaatagttttgacttgagaaatatgaaaacagctgtttggagatgtgacatttttatttgagcgtacaagaaaaatttgaaaacgcagcgtcgtagttccttttcttctcacaattattgactattgtatggaatagaatatcacttgaaaagaagtttgggtattatattagatgatgtcatgccaacccaattgtgattcaatattattatttttaattatggaggagctgacactggtcatgtcacaaaatccccggatcaaataatactaattctttctcttaaaaaaaataataattcttaaggcatcttatacaatacgaatgttgaaaatgagtcaacagtaagtagcaacttttttgtattacatttcttaatgtgaaaggcatacatgagatatgctatgtgctcctaacacatttttgatttaataaataacccaattaataattacacagtgtttgacattttaatttaattagagttgtgcatttttttttttttttatctaagcaaataattttgtaaagaatgctaattagaacattctatttagttaatctccacatttttaataacagaatttgttataattatatataatattaaatttgtaaatttttgaaaaattctgattagcttacaataccgaaataaaatttttaatattctaatttattatgcatatttaaaaaacttcagtacaaatgttttctgcaatattatgtgaaaattcagtaataaagcatagctttagtatagttgcttaggttgtgttagttaagttagttaaggttttaattttgatgagtattttattgagagagaatgaaatctgaacaagaaaaagagtgtgtacatgttgtgtttggagggatgttaaaggaagtgtccattctagaaatggcctccctcatgtgagtttttcattgcaattcttataagtttgcatctgaagttcaattctatgtattctctctaatgattgtaataaaagatcaataataaagctcctttaatgttcattatccagtcaaatattttccgatgaattcattattttacagttctggttcattagtttgattccttgatttgttctgtgtttttctgtgtttttgtatgtttgatcttgctagagttaaattcttgcactacaaatggtatcaaagccaaggttggcctaaagagttcaagaactgctcgatcgaaatccagagcaatcaagaatgtcaatggctgaattcgagatggataaattcactggtgaaaatgactttgggctttggagacttaaaatgaaagccatgttggttcatcaaggactgtatgaagctcttgatgtagaagccattgcagccattgaagatgagaagaaacagaaggagattaagatcaaagcacatagttcgatcttgcagagtcttgggaatgaagttctaagagaagtatttgaagaagagactgttgttggcctttgtggtaagttagctaacatttatctaaaaatatctctagctaacaaattatacttaaagaaaaagtttatactttgagaatggataaaagtaaagagttgagaaaacatcttgatgaattcaataaaattattcttgaattgaataatattggagtcaagatagatgatgaggatcaaggatcaactctactctcttcattgcctaaatcatttatacattttattgatacaatattatatggcaacgaatctctaaccatggcagatgttaaatttgcactcaactcaaaagagattta

SEQ ID NO: 47429 - DNA, 1247 bp, Cannabis sativa
ttattattttaaaattaatatgacatctcacatcttatacaacaattagtacacaggtagtatcggaaatagaaaaaatatttttgatattatttgtagtttttgtgattgagttgtagtaatataaatatatgtacacattttcttaacatttgtagtttccattgtcccatatcgatatgaaagtaggagtaccttatttccttttgaatataagtaaactcatattctttcaatcttctaagttcattttcctaattatctctttatatatcaattaaagcaaaatttgaaatttaatgatctttttaaagaaatcatcaaaattgaatttactttgaaggtattgtgattgttttgtaagtgtgataattgtaaaaacaaattaaagaagatgctctgaaaaaaattaaagctagaaaattaaattaaaatattttttgcaacataaaaaagaatacaaaatattaattagtaaaatatacctaaagtaatgacttaattttttaatttgtatagctaataagtaataactataaaactaacaaacacaaaagtttaaaataaaaagtcacaacataatatacataaccaagtatagtttatcactttatacttattattatttgggtcaaaattatactcaaccatccacatgaaattattaagacaactaagagagcatttttatacaaatagtaaggtgattgttttttattagaaaattaatacaaatagtaagatgattgttttttattagaaaattattgtggagattcttataactttaataacaaatcaagtaacaaaaaaaatgtggagaaagctcaaaaaaaaaaaaaaaattaaagctcgcaatcgcaacccacttgtattttgttgaaacttttatatttttaaggaatatttacgatataaatactttatatttttaattttatacgcttatatattattattttttaacggattaaatattatatattacgtttttgttgcagtcgttacaataaatttcgttaagtgttgaattagttaagtaaaatgccacttattagtatattaatgatccaactctttttttatttataaaaaaacattaaataatttaaaaagaaacaacagaaatattgaaaaaaaaaatacaatagaattatcttattatttatttgtttcatttttataattaaataattattatttagttttgaaattgtttaataataaatgagtaatttgcggcataa

SEQ ID NO: 47430 - DNA, 1804 bp, Cannabis sativa
aataatttattttaatttataaaattactctaaatataaatatagatatgaatatgatgttgattaataagttaatacctacaattattacttatgaaaaaaccttactaaacataaactatacatatatattgtaaaaaaatcagggggccactgccccagtgagcttgtatatagctccgccccttctcacactcacgttctaagtttcactcacactcataagcattatagcaataagtcttctctgtcttctcataattctcacttgacaagcacattgtaatactgaagagagcctaactacaaattacaagatcttagcctgaaatttacttggtattatctcaagagtgaataaaactaaaactatagtagatattaactgaactaaagaggtcaaacctttataaatgtgtctcttacatttactatcattctcatgtaacaaccataagcaaaattcgatcctagtcggactccgtgttagctggctaaattcatagtcataacaactatgttaccttttttttgactaattagcactactacaaatttgggctttaatggtagtttttaaggtctttcagcgttggttttaataaaatttactaccgatgccaatccaggcgacgctatagggttgaaaacaatcgacgttaaatgttaccctatggcatcggttattatcaaaaaaaccgacgccatatgtgccctatgaaattggttatatacaaataaccgacgctatatatgcacatataaccgacgttgtattcctaaaaaatgatactaaatcattaataattattatttttagttaaaaacctatttctaatcaacaaatttaatttatttaaattatatatttattaatttatattaaatattatttaatttaaatttaaatcaactatttatttttttaaaagctaaattaaatattatttaaattaattttatgattagcctatatactcaatttcgtttcatagaagcaattaaataaattacaattatatattacacaaatattgtaaaattattccaagtattaacaagttaataaatctaattacaagttaaccataaaaaataagctagggaaaaaaattcttaggcctttcagcatcattcgtccaagcctacatgaatcccccccatcaatcgttctatccactgtcgttgtaaggacaataattcaatttttcgaatgtatgtctgcttttctcgaaattataaaatgacgtaaaatttatattagtttaaatatatatttttatttgttgatataataaatactataattaaaaattaaaacttacagctttttgatcttgtatataatggttggggtttgcacatgcgacgatgcaagtcgtgtattttaaaacctaaaaaccacattctcggttcttaggttgtctaggacaatttgttaatgaaattccttgctacgacccaagatacgaatttgatgcccctataatctggtttgctctgttttaaaaattatactaacatttcaaatcattggttagttaaaaaatttcttacataaagagtaattaaattattacctttctaaaacttcagtattttgttgggaaactttgtggccacgtatagggtctaaatgaataattttccctagcgcaatgatctctagcatccaatgcgcactaagaaattatattaggatgtatgtaagatagtataaaaataatttcaagttataatatagaaaacaattagcactaacaaatttaatagtgtttagccgatattctagggaataaagaac

SEQ ID NO: 47431 - DNA, 1206 bp, Cannabis sativa
tggaatcttgctatgccaccaaaggtaaaagtttttgtttggcattacctgtagcaacacaacttatttctcggaaagttcaggtacttttttgttgttcacgatgcggatgaacatgctctatttttctgctctggtttgattccagtgtgacattagttgggggtatggtcggtgctccgtcgatgtgtatattaactaatgcagaaaattctctcgtttctctttgacaggctatcctgtgagagttttgaattgataactaccatatggtggctttggtatgatcgaaactcaatattgtttggtaataagcagtcaagattagatgttatttaagatttagtccataaccacatgtcggagtttaaggagtatgttcggtggggtcttcatttgagattgtgccttgcaaacccagttgaaaattgacctactcgatggatgccactttctcctgattcctttgctctagcgactgatgcttcggtgatttcggggaagggctttgtcggattggggggagtgattcgggatgctgcgggtgcggtttgcttagcgtggtcatctagtgtgttaggtggtatttctgttaatgtggcgaagttgcttgccattcgtctgggcctaactcttgcacatcaattttgtttaagtatctcaattattaatagtgattctaccataacaattagttggattaataagcctcatataaattttatttttcagtctattttattagatatatattctttattagctgatgttggggtggttcttgtagtgttattccgcgatcggcgaatggcgttgcccacacactggcaacttctattactagtttaggggaatttgtttagacggatgcttgtccacgatttttgagttcttctataataacatatttatcttaatgaattatgtcattctttcaaagaaaaaaaactaatgcttgttaatcctaagatatattggggcaaaattaaattttgggggtcctatacatatagtttaattaatattaaaatgtctagtggtttagtttaatggtaaaactttttaaaactcttaagaattcaatcctttgtagctacacattaaataatttttataaaaaaatagagaagtagaggctaaaaattatctagcaagactctttacaactacaaacaatgtttgttacattttattattatttaatat

SEQ ID NO: 47432 - DNA, 1167 bp, Cannabis sativa
tatcttttctagatcaattaattgacagatgtacatatatatattagatattttttaattttggcacctaaaaaaagtatattattacggttataataaatgtcgatcttactaatttttaaatttttttaaataatttacaatattaaaaataaaatattttaaagaatcaattgtacagtgtttatatatttatggaatactttttttgggtattactaattgatagttactaaataaatttaattataaatattaatttaaaaatactaaacttaaaagaaaaatttgaatttctatgcttaattcagctacttaattgaaaaaaatgtaaaaaatatatctctttttacaatatatcaaaagtatatttatatgaaaaatatttaagtaaaactcaatatttttattttttttttgtcgaaaagcttctttttttaatttatttttggccgataaaacaaccataacccatataatgtaaaagtgagagatttttctatttagaatgaaaaattaagtataaaaacttaaattttcctaaaacaacttattcatgggtaatacccattaaaaatagtataaccatagatatattttaaaaaaataaataggaatcattaactatttaaattatatttttatagtgtaaattattttagatttcgagttagatactaactataattataatatacgctgacatattatcatataaaataatcgagtaattttttcatacatgaaaataaaaataatccaattaacgtaaaagtgatgaccaaaatttttatttaattatttattattattattattattgtttaaaaaatattgttagacattttcttttgtaagggtgactttgggacaaaatcattagagagaaaaaaaaaaaactaaagtggaagtagcccacaaaaagagacatacatgctaccttaatcacaacctaactattattggtataataatatattatacaaactattttcagattgtcttttttaggcaattattaattagttaatatggcttgagattattatataaaacattaaagaaaaaaaatagtgacagaatcaattttgcctttattgtataatcacatgttttaataaattataaacaaatttttttatctaatataatgcatattatatataa

SEQ ID NO: 47433 - DNA, 1024 bp, Cannabis sativa
aaactaactaggtttaggtggtaaaggttagtaattacttgggccttgaaaaggccttgactttttgggcagagaagtccaacttcagtctttgatagacagtgaaaaagcaggagtttgggccctaatttcacatggtgggcccatatgcacttgcattttttacagcgaacagctgtcacatgttgacagggccaggctggcaggcccaatagatgcatgtgcatgatggcgttgcttgctttatatggcccacttccacgtccgcatcacgtgttatttactcaaattagagcattattaagccacacatacaccctttttagttactattgtccattttagtcaaaatacgaaattgataaataatttaggcaaacttcttctctaatctttccaagccaaaaaagattttgatcatatttaaacgcatcctaacttatttaaataagaatttatattgatatctctctatgaaaagacagtttcaacgatatgagcaagggtatattatgtatatatatatgttaaatctctttcattgtattgtcaacttaatccacataattatcaagttaatatcaacgaagattacataacattttttggaatgctaatgattacaaatataaaatcagttattttatttttgtcgattttcaaaaaaaaaaaaaaacctattatggatgtagtttagtggtgagaacttgaggaaattatatagtatacctttactactttatttgttttaatttttatctctattttcatattgttttaatacaaattatatgttagacttaatatagagtgaaggtatattaggcaacccactcaaaaagtgggtatatcttaataaaaagaataatataaggggcattaccttgtttatttggaaggtttagtcttggaatgttattcccctagtaatataactacccttgaggagggtaatgttcataccttaaaaaagggtaggattgaattattaccttccatgatattaatttgaataatattttta

SEQ ID NO: 47434 - DNA, 3705 bp, Cannabis sativa
  modified_base (2775)..(2782): a, c, t, g, unknown or other
atgccgctaaaaataaacattaggattatgctacttataaacttaaaactttaggtacttatgctattatttacccataaataaataatagagcttttttatttttaaaaaaaaaataggtgttgaaaaaagtgttctagattatgaaaattgtacttatatttatttaaaaaaaaaaagttttcttgaaagaataataaagtgtttttaaaattagataacattaatcttatataatttaatactttttaaatgtatgcaatgcattcaagctaaaataaaatacactaaacgtaattttatttcatgtctcctataattagtgtcacatatcgatcatctaaaatagagatgttttattgtatttgaagaaccaaactaaaaacatattatataagtgcatgtttgacatcataattgaaaaactgttttttatttttaaaaacaaaaaattgtttttcgaaaaacaaggcctgtttggccttgtgttttgaaagcagttttcagaaaatgaagttacaaaaaacaagaattttgaaaacaacaaaatattattttctgttttaaaaaacaattcacttttggtcaatattgtttttaaaaaatactaaccaaacgtgacttgtttcaaaacttcaaaaattatttttttgttctcatttctaaaaatactttttttgaaaacataaaatagaaaacaatactaaacatgatctaagtaatttttaaactcttttattcgaaaacttctttaaaatttattatttatgctctgcatttataaaatattatttattgatctaaatatattttattaattgttttaaaaattaattttatttttacatgtagatatgtgtgtacattaatattatatacttttaaataaatataatatattaaaatattttttaataaaaaaagagattttaataatatattttaaagaatctgatataatgatttataaatgtttgaggtaagaaaataaaacaaaaagatgttttcgtgatgcatatttttttttttacatagtgattagaatccatcatgaatttacgatgcagacatccacaaatatattagttgttccttaaaatcttataagaaatcatgatatgaattaataatccactatgtgttaataatcacattaactatattagaataaatttattcaataaaattgaaaatttatgggtgtgatttatttttctgtacagtaaaaatttgtacattctagatgaagttatcagaataaatttttgaaatttctactattatagtagaaattttttaatagtgatgtaataaaattatataatcattaatgtatagttttgaggtttaaataaattgtatttttaccaatgtataaacatgcttaaatataaaattttattaaacaaaatttcccatgagctaaatttttaatttaataaggttagatctagatgtagattatgatagattttattaaacaaattatgaaaaacttaaggttgatatttctatctcaataaactgtttgaaacatttaagtattttatgaaggtttcaaaatttataccttatgatgaaaatataaaattaagtccccataatttcttgtgaggtatatataatttcttgtgaggtatattaagagaatttaatggtatattaagagaatttaatttaacatattatcctaattaattatataaacataataaaattcttgtgggatgaaattattatatccacataattaattataattcatgtccattatgtgatcgtgattcacttaatatatataattttatataatttagaatgttgtggatacttcctaatcatttaaaattatgcggttcactagacatcaaagtataaaataaagatgaaaattttactaaatctaaaattgcatgcgggctaaattataaatttcataaaatcatatacactttatgatatgtttaatcaaatatttgctttataggaaaataaaaggttattatatatcttatgtaaatttgtaataatactataaaattaaatcctcataactccctatagagtagattaagagaatttaacttaacatattattctaattaataaatacaataaaattcttaggggtaaaattattacacgtatataattaattacatgttatgtccgttagattgaatttttaatttatataaaattttaaataattaaaggtattatggctactccctaattatataaaattatattttacaatgatattagttattgggctctacctaaatttttttttattattaacataatagacaatcactaaaattagcgatcttagtgtggtcatctgaagatcattataaactgttctagatatgaacatttatcccaatttcatgccttcttatgtcaaatcacaaaattgcttataatttattcattttatgaatgttttatgaatattttatgaattattttatgaaatctaatgaaaattaatgtgctaaataaaatattcaacttatcttaatgtttgaatattttcttaatatatctagcactattatagaattaatatatagcatttaaattatataaatattaattaattgcactattaataaattgaggatttttcatttttacacttcaaaacagtttatttttatatttttacggaattctacaaagaaatccccattgcaactagcgttgtaacttaaattacaacaaaaaatcgtatagaaactcccattgcaactagcgctgcaaccnnnnnnnnaacccaaaccgtaaattttttttaaaaaaggttaaaaaagtagtatatggaataattcccctaataaatttataaaaaaataaatacaaaatagtaaaattattatatgataataaattaaatatttaatccataatatgtaattaattatgcatttatagtcatataatatcttaaatatttatactattaatatatttgtataaataaaataaatatacaaattagtataatataattatatgaatatatacttaatggaaaattattaattaattcaatgtaataaatcacttaattaataaataaatataattgcacacgtaattgtagaatactcaaatattcacattcttaaaatattaaaatattaaaattattataattacgtgtccaaaaataatcatgtaattatttcaccaattaaaaattttccattttaaattattaccaaataacatataattactaaatatatgttgaataaaaatgaaaaatttcaaaaaacatataaattttattgtctaaattaaccaaaaataattaaaatatgcatttccaaaaataaatgaaaatacttaattttcataatttttcttttgataatttgttgtgggaaaacgacgaggaaaacactaggaaaacgacgtgttgtttgttatggtttatgctctgaaaagtctataaagacatttctaattattaataaagagttgaacattatgatatatgctaaaatgttaaattaaatatttattattgaataattgatattaaatatagtaaattccttattcatatatgaggcagtgacttgtagctatacagagaactaaaattaattagttgtgaataaaacattcagcaacattttttttttcgatgaatcaggtgaacttcattgcacaaactcttatttacat

SEQ ID NO: 47435 - DNA, 1270 bp, Cannabis sativa
gcccgaaacctccccatggtgatttctagccaaggccaatcgcacacatcacctcatccccaccttaacgacacaattgatctttagcctatcattagaagggggtccaatatcacaagttcgcaacaacattagttggatacaagataatacaactctacaagaactataatttgcataacggtaaacttaatataatatttaatgttatatatattaggctcgtttggtggaccctataagattcgtactatattaaataataagtaacattatgtttggataaaatattatattgtattaattattatgaccatacaatttaatacaatgtgaattatattattcaatacataacaaatgacccataattaacttgtattataatatttgcaaatggtccaaaggttagggactttggccccaatcccaaatccctagacctagactcagactccagacctggcccctatcttgaactcgaccccaaacctagctagccccaaatcccaaacttgaactcagacccggactcagaccctggacctcggacctagaccccgacctattctcagacctcgaaccccaaactcaaaccctagacccgatcttgaatccccaaaacttgaacgaggtcagagttggagtcaaatttattgtaaagatattataattttacacaaactattaatacaaacaaatatcaaatataatattatatgaatacaatactatcattcctagccccatatattagtcaaataaatattatatagtatatattaatttaagaattaaataagtacaatgtatatctagtcttctgtagtggcaattccactaaaattacgtactaaaatgtccaaactcatgattgtttatcttttcctcgtgcttcacatgatatatatttgggtaattgtttttttgacaatgtgttttataaaaactaatgaacgaaacttttattttattaaataataatttaaatttgtatattttaaaataatataaaatagatcttaaaatcaattttcgtcattagttttttttagtataaccaacttaaagtcgaattttagcgtaaataaaaacaaaaaatataatcaatcttgtcatgacacttttatatcaagttattattaaattttaatttcattagaaaagaaacagaatagaaaacttagaaacacaaaagaaaaaagttttgtaaaggaaagaacaacaatgtgcctgaggagctttgaaagcgagaaaaagaaagcacaca

SEQ ID NO: 47436 - DNA, 786 bp, Cannabis sativa
tacttttattttgtgattaaaaaaattaaaaaacattagtgttaccaaacgacaccttaagtaataagacccaccaactttccctattactagataaaagtaaacaaatcaataagaaataccctattctcttggcaagtaagtaaacatgccatataaaaatataaagtctaggggtatacattagtatttttactaacctaatataaatgtcctattgtaaataagagtgttcatccaatttattttgtactatttttctcgtagatttgatttgcacaaagtgcaaatttcatattatgaatataatccaatctaatttgtaaaagtgtaaattgaattatttactttttaatattaaattattgaataattattattttttcacataaaaagaacaaaataaatatattattgatattttatatcttcaataataaattaaaataaataaaataaaaataacaaatttaatagaagaaaaaagattgtatgtaaaaagaaatgtttgattttattttaaattgtatatagaaaaataataatataagaatagaatgtacatttgatatattaaatttttaaatgtatttgtattatatgtattagatttttaaattactgttttttttttacattaaaatgttaattgtatatatagttttttaaaaaatttatataaagatgtgtgtattggattgtatcgattacttttacataggggtggacattatccaatccaatccaattgaaccgaaccgatccaatccaatccaattacaaaaa

SEQ ID NO: 47437 - DNA, 817 bp, Cannabis sativa
gaagtttcttgtgaactggtaactaatagaaacgtttccttcccttaattagttaggattctattttcctctctaaagttttgggtagtttggatatctaatgatttgaagacattaataaggcattgatcgacaagcttggttgggccctaacctccaatagttaaagcctttggtgccaagtgtatcaagataagtatttcaaaccatgttagtcctttcgaatattaatattgggaatttgagaacttttagagccaaaggtatcattgcttctaaaatgctgattcaaaattaggcatgctaccgtgtttgaaacgatctctcggtcaatctttgggaatcactatggctctgtggttttggtgggatcattatcgggttaccttcaacgctagagtgcatacgattaactctccactaggcaattcatttgtggatgatgatgatggtaattggaacccaaattgcatctgaaattggtttgtcccgagtcttagtagtgccatttgtatggttctgagattgccaagttctaatgatgatgtgtttagttggaaagcctccttaaataatttcttctctgataaaactacttaaagagctagtactcaatgagattttagtgattcacgtttactctagaagatactttagaaatgtccaataatctacttttgggttatgtttctccttcgaaacttggtaataaaatctttgttaggatttatgccctaaaaggagtatttaatgaataatatattagagaatacatggaatacaagtataagataaatgaatatgttaattatcaaaa

SEQ ID NO: 47438 - DNA, 4070 bp, Cannabis sativa
cgtccttcatatagttatggaagtaacgactttctcaagtaacgaaaccattgcaagcctttgctcctaaaaactctgcttcgtgggaaagggtaaggatgggatcaaaaagctacacctcaagaaactccaggttaaaggtaaatttatgtgggtcttgaaccacacgttttcctttatcccgggtcgagttttccatgactttctttggggatgaggggcctcgacaataggttctatcacggtgttagatggaggagaagcagaagtttccatggtatcaatcttcttttttcgagaaacctttcgctacttgtaagagccatctgtggaagaatcttctcccttatttcctctttttacatgaatagttggactattgagtgttgccacgatgtccacttcaagatccatatatatctgtaaatttaaagtagagaaaaattgatagtctaaaaagagataataataataataatagggtggcaaggttataactcccacctaaatttattttaaaagaactaggcgatagtagattgctatgatagttactaaattctctagattcaatgatcatataaagatcaaaagagtttaatggagacaagtcccaatcccaactagcatccccatgagaatttgtactatactagtcggcaattccatagtaagaactattactagtaaactgaacatgaaattttaggtaccaactttcaaacctatgacatagaagattaacacagttctagatgtaaaagttgtactaactatcctaaacctgaccaaacgagtatgggttgtatcgaggacggtaggggaccatccataaaaatgagatgaattacctcgaggagcccctttaggattcttggtggcttctcgagttgcgaggttatttctatagcgagagcaagtcacataatcacattcctagtcatcggcattcacaaggacttgttcccaaatagagtacttgtgatcctttacacccatggtgctttaagtctttttgagaaggccataagccctgagattgttttcatgcaacaaaaagttaggtgtagcagactgattggggaggttaactagttgctcatgacaacattgaatagccatattgggggtatgtcttttcaaaagggctaaaaaataaaagaaaatatacaatgagtaatgagcatgaaatcataacacaagaccaatttaaacaagaacaaaaatacacttatatgtattaattggaaagtagttgtcttgactggatgaaggctacttgtccataagaaatcttgcttgaactccttatttgcaagtttgacaatcatcttattgtcaccactatgtgttcccaaataatagacgtcgcaagaaaagtttttccttgcagggtaagctttaaaggcgtagaagcatatgacttccaaaggagaagggccttcccatctcagaatatggtagaaatatttcaaataggcaaggatcatgtaagccttggggatatgttggaaaggtgcgacgccaatgtagtcacagatatccttgaagtattggcgaagagaaaggaggttccttgatgtgctaaatactccacgctccaatacacaaggagttgctaatactgcatccagacccacttagcaagcgagttaggggataacagctatgctctcccttctctacccagcgcacaacaaattcattgtccttttatataccataagaatatacaaagggtctaatgtatgaggaaatcaacctaacattagaatcaatacgtttagcctcgaacttaacatctggattatgaggaatctcagattctaatctttggaagccatgatgtcaaagttaagatcacttggtagaaaagcaacagtcactcgaggtaaaaataatgaccttgctaagggaattttcacaaagcttggacattcaggcaaggctacttctcgcaaacaatgtcggctaccctcagttatttcatcaatataatgcctatagcgagctaatgtttcttcttgattaatcctaagggtatgctctctaatcttttcatcatttatttcaagtatggatcgaggtttgtaggtttgaggtttaaaagaaatggcttggaattggaagttaccaagtcttacaaattctgggtgttcataatcatgctcagaatgaggtattgtctggtttaaaagaaaaatgcctcaaaattttgaaaatgcaaaacctaaaagctcagagcacgtaaatcgtcaaaccataattttcaacattaaattgctatgacccacacaaagataactccttacaaataaatgaataatgcaaataaggatagagaacaaaaaaataagaaatagccaaacgaatcaagataaaacacttactaggttttcagaagaaagggatccgtgaagaattcctcgctgaaaactttttataccaaggggcatgatttgaaggaaaaagttacgagaaagtgaagggcatgaaattttgaaagaaatgggggttagcagtattaatttcttgaagcttaatgaaatggaaatggcaaaatggaaggagatgttgatcttatatcgagctatggtaactgtttgattgtaatgattgctgatcaaatgagtgggaactattgggagaagaaaagttaggttattaaatgttgaaatgatgttctctcgaaacactaaaactgccaaaatatagcatgcattcatcattaaatgggggaacaatacgatcgtacccttcgttactagaaagtccttttaaatcttaagaaaaaaaaattaggtggcaattgttataactatatttcgagcacaaacgacacatgtaataatgctaaaaataaaccagctcgtgttgtacaggaataaataagtttaataaagtgagagtaagcatatgatcttagtattatatattagtaaaaatttcttgccacagttgatatactcattttatgttagggattcaagatatgttgacactgttccagggatattcttgaattataacaaaagagatatagcaataaaatgttcaaaacttttggcatgacaaatactatacaagtgaaaggtttgtagttaaagaaaataatttgtctaagtcgttgccctaaaagtaaccatagaattcaagaaatatagaatattcttaatttatatttaaaatctaatatatgctcaagcatgtatgtgaatttgtatttaacatacatatcaagaatgttagataaatatttaagtaatcatatataaaaattttaatatgcagttaaatgggttataaggaatttatcgtgaacaaaatactatatgttcacttattagaaattagaaaataaaaaaatttagagatcattaagatttctgattctgatcttataaagattttagtggtgagatttttgtcacatatggctacaaaattaagaatgatattaaaaattattaaagatatatgctgtgacaataaatcaatcatgttgcatttaataataacatgagctctacagggtcaaagtcacattgaatttgagctaattgttattaaaatgaagtatagagtaataaggtgtttagagaacatatgagaacaaactcctatttttagatctatatcattaaggatataacatttaaggcttttcagaagcttgttgttgatatatagatgtggtattatttaagattgtgttgacttagtgggagtttgtatttgggatgcactctcatgttgacatatatttatgatttgaatctgaagataaagtataaagagtattctaaatgtattctttctattgaagtataagtataagggtagaaagactaaagaattgatctcaattaaggaggaccagttggagataggcatgctaagatcacattttcatgtaatttccatactatgcatccatgattgatccatgtcatttggttataatgatatatgtgaccattgatgggtttagccatgttaaatgtagcgaaagtcactttggacctatattagtataataaatggacgagattagttttaaataccgataa

SEQ ID NO: 47439 - DNA, 908 bp, Cannabis sativa
attcttcagaggtttctgatcagaattttatggaggataactctggagagaaacccaggtgtgaatctgtagtgaaaaggttgaaaacggctgcaagcgatgattccaacagtgatcaagtaattaatatttgcagcactgaaacacataattttggtggaataaattttttcaatctttataattggagtggagaactcacttgtttttaacattttcagattgtgccatcaaacaagttccacgcagcagatgcatcaatttccaataacaaacaaggacgccgtgaattgctttctaagcaccctgaaaactacgtctgcccaaaatctaacagtcactattatttgaaaggaagctgatagtgatttgtgatcttggttttgaagcttgggatgttacgattgacaatgacacagctcaaaagaaagttaaggttagcctcttagcttccctacctttctcgagaaacaaatcaacaaccctatatagctaccctacaattgaaatcgtctgctggatgaatgttgttgccttttaaggttattaagtgttccacacaagttcaaggccaaagaatttgtatatactggagtcatgtccttatacggttatacatagtatgtatggttgcataatatataaatatatataatatagtatgagtagatgaaattactatacaactctgaatgttagtaattcgatataagttttccttctggttagttccttcaattttgtagcaatgtaattctgatagaagcaacatgtaatagaattagaagataagaaatcaattcattggttgtatggctaagttagtttgtttcaatgttgtcattgtatatgatttttattcttctatgcccttaaattactctttcagggaatgcaatgaatgtcct

SEQ ID NO: 47440 - DNA, 1022 bp, Cannabis sativa
ccgaaataagttaagggtgtatcagtacattccttttaggaggatgcatagtagaatcacttatattatataaaaatagataataatattacaaaaaagaaaaacagaaattccacgtggtatggcattacaaaccacaatgcaaaacaacctgtcattgtaataataattaaagaaaaagatgattaattatacaaattataattattattagggttaattagccaaaaaattagcagagattaataaaggcatgtttgtaggtaaccactcgtgcgggtgggggtggggtccactgaccaattaacatggccaatcattgtcaccatttggttacaatgggtagtctccacgtggctccaccacacgtgtgattgaaaagacctttaattattatttattattggaatttattgcttatgccaagcccaaagtactttacaacccaacttgattagaccggacacgagttttgaattaataaataaatcgacaaaaatatctttgaaaattaaaattctattaccttatttatttatttattgttattactattattaatgaatcaaagaagatatttgagttttgacactcccatgccaccaaattgataacattcaaagtatttaaattggtagaataataagttgtgatattattaataaaaaataacaaatttgtttgaattcgtacacaaataacacttatatatagagaattgttttataccacttgtgtttaatatttttttcagtgtcataatgttatttgtgtaattacgtatcgaatgaaaataattttttgaaaatattactatattatggaacactattgaacattactgatactcaataacaatatatgtatatatatataaatatgtacagtgcatttgcttatccaagcaaatcattgaaggttaggtagacttagaagtataataataataataataatagggtaaataccattttggaccctgtattttataaaagttacagattggaccttgtgttttgtta

SEQ ID NO: 47441 - DNA, 1025 bp, Cannabis sativa
gtaggtgcagagtggggttgtgccgtcagactttatcacgtatggcagtttcgatacgcctcctcccatgcggcattaaatgcgagatgactgttcacatagactctgacaccacccggagatgcttttgtgcaatcttgctctccgggagcatacgagacttacatgccttctccgggaggcatgtctaaggtaatccaacgctttaaggagacttacctgttttatttaaatgctaacccctttccgtccatgtgttgtcatcatctggatcatctggttggtccacgtattttgggcaaaatcaggggcaacagcaactgtcagtccttccaaagctgcatttaattgggctttggagactataatctcaacgtccctttgtgttataatctaattttgtcgggccaaggttgccctaatttctgtcagttgttcttccactgtttgtacgacggaagagattggagatgaatcggtcgtagtcattgcgggtaatattactagcccacaatgtgaagggaatgaactagctgaagcttccgacgattttgacgtggctaaatttaaatttttagaatatttgatttaccaaaaatatataaagctaggagataaaatgcgtttatttaatttaatgatgactaaatcataaaaccatattaaaattttaaattttatattttttatagaaggtttttttaataataagagccgctattctacaaattttttattatttttactcaaaaaattagtattgtaaaaaaaaaaatattgtacaatttttaatctaaccaaacaaagggtcatctttaaatgtcataagaaattgagaattttcacacaaagtagatatctaaaaaggcatttgataaatttatagtaaatttatgatatgatttcaaacttgttatcaacgtatcacatttacaatcgccactatattcaaggtcgttatcattactatatctcacttatagttgttgctatcattcccaatagatttgttatgtatacttaaa

SEQ ID NO: 47442 - DNA, 1146 bp, Cannabis sativa
aagaagaggtgttttatttgtcacaaaatatctcatctcaaatgagactgtcctgaactaaccaagaaatcagctggtggctccgagaaatatggaaatgttgatcttgtatcaagtgaatataccagtgatgatggttatgaaagtgcaggggttatggtggcttctataggatattctgatctcgattggatcatcaattcagggtgctcatttcatgtgtgccctgacagaacacagttctctgaatacaaggaaattgcaggtagaacagtcaagttgggagacaacagatcatgcacaatcaatggaattggatctgtgaaacttaaactgacaggaggattaattagagaactacatcaagtaagacatgtcccagagatcaaaagaaacttaatttcagtagctatattagacaaaggtggattctcagtataggttgaaggtggagttcttaaggttacacaaggagcaaaagtaatcatgaagtgatcaatggtgtgtatgttctgcaagggagtataggcaagaacctagtatccattgcttccaaagaaatgataaactgataggtgctatgacacagaaggttaggccatgttagtcttacaggactagagattttgatcaaaaagggattactagggaagaaggttgaaagagatctacaattctgtgaacaatgtgtcttaggcaaattaacaaagcagaaatttggaactcgtttgcattgctccaagtacacattggaatatctccaatcagatctttgggggccttctagagccacttccagaggaggagcaagatattgtcttaccctaattgatgatcactctagatatgtatggattcatattttgaaacacaagcatgaggtgatttcaaagtttaagtagtggagaattttgcttaaaatcaaactggtagtaagctaaagaaattaagaacaaataatggcttggaattctgtttaaatttcttcaaagaatactataaacaggaaggaatagccaagcatctaattgttcccaagaaccctcaatataatggtcttgctgagagaatgaacaaaaccataatagaaaggttcagatgcatgttaatacacacaggtttgccaaggaatttttggggagaagc

SEQ ID NO: 47443 - DNA, 1240 bp, Cannabis sativa
gagatggtctaagaaccattgaatgtagtccttgagggattcatcttctagctatttcacatttaccaaatcattgggtacaatttggcactgtcgagaaggagcaaatttattaccaaaagaatccaaggttcttcccatgaattgatagatctagggggaagcttgagataccatcgctgagataaaccggttagtgtggcagggaaaattttgcaccgaacgtcgtcccttactccttctagattggtatacactttgaagtaatgaatgcgagacaataggtcttgtttcccaatgtactaatgtcaagaagtatatttgaacttaggagggatcgacagagcttccattcggtctaagagcgatgagcatcgctctctatccaattcaaattctaacaaatttggtgttgtgattccttttaccaaggtcgctacattgtggaaatctatcatgttgacaccatgcgttgttgtttgtattctagtcagaaattctattgcctgagtcaattctagaagctcccgcttccagcaactgtcttctggttagggtgtcacgtaggtctctcgatcttccaagtcgatcttaaactcccatcaacttgtgtctgattgttttctcttgaccatggggtcgtgaacgcaacattagtgatttttctagaatgaagccaggttgggatgatgcactgcaagagcgatcattctgaacattattatagtgactatttccctcgaaatagtcttcagcaggataacaagtgtgaagagaattaaattgattgctcaaattcaactcttctccatgtacccaagggaagtactcatattgttggccaccgggtccataggcaaagtaacagcataaatcacctatctcatctcgaaaatactttcgagtatgaagcaagttgttagtccttactctttagatcttatttttaggattttatgccctaaataaaactcaatgcaatataatcaaatttactaattaataaaagatcaaaaatcattttatgtttcatggttcacatgattactttcataattatatgcttaatgtataaattttatcaaatcaagaacatataattattcatgattatagagctgtctacacagtagaaaataatcataattatatgtttcaaagtttagtccagggatttatcagtgcactggatttacattgacgtgataatcagtgataaagtttacttacacattgatat

SEQ ID NO: 47444 - DNA, 1767 bp, Cannabis sativa
attgacgttgtgcattaaaaggagttaattaacaataataaatgaatggagaagaagaagaagatcgaagtagttgcggactagtgagtgtggagatgtgcatgcaatagataatgaacgtacacaagtgtcttacacaaaaagagtaatattaatacgattgaattctttgtgagttccacgaagatcaacactacttttaaggcgtgtatccaaaagtggaaaaattaaaattgtctttggttaccacttaaacaactatattctatatcagttaatggtctatctcaaccctcaaatttattgtgtgcaagtaataatattgtaggtgccgtttcatacataatataaacaatgagtgttggagtaagggaaggagataataatcaccaaataatattcgttaatataaataaagtttggatataatttataaatctataataaattctctaaaaatattaattataaaataaagatgaagatttttttatgtaattttgtagtgaagtctacatactcaacaaatcatttttacttgtggctttcttgatttacagaatacaatttgatagaatttttctaagtgaaaaaattgactgtgctttcttcaacgtgtataggattccgatagcagttatttctatctaatttaacaaataattataaaacgtgagcattttccaagtttgatatattttatctaatagacagaaaatattatgcaactacctttaaataagataactttcagtcacggatctgagatttaagttaaagggggacgacacttttctttgtaagtgagggggcgtcatttttttctacattgtataccatgttaaaaattgatacaaatttgtattcagtattaaatgtagtataaagtaaaaaaaataataataaaaatattaggttcaataattaagacactattgacatccgagcactgttcagtgaagatatcccaaggtatggacactaatacccctgttctgaggtctggttctgttgtacgaagtctattttcgaattccttgaataataaggtgaagataacaaaagatgatagatgaagtggatttcttgaagccttcaatattgtgctatattttaggagctaatcctcctttagccgtgtttttgtgagaagaatatgggcagataagatagaaagggtaggattactctcttatggcatatacataatacgatttaactcagttgaaaccaaggagattctgttctccaaggaagatatattttctttaatcgcagaccggtagtcataaaaccttgggcagccctcaatcaatgtgaagaaaggggtcattaggatggtaccgatttgggttaatcttgatgacttagatttgaaatactggacggagaatttgtattcaagataattggacaagttgggtagccagttatggtagatgaagatacaaaagaaaagaagagaaaagttgagttttccaagggttttaattgaagttgccattaaacgggaactgccagagctcatagaatttgaagatgacaagggttgcaatactacagttgctttatcatatgaatggaagcctgttctatgtgccaactgtgaaggattgggtcatttgacagcagaatgtaggaaaaaagagccttcaaaacaacacactactacaatcttggcctttagaggctgttttttcactcccacttataaaaagggaagctaaagggtgtgaaaatacccgtttttttcgaaattgacattta

SEQ ID NO: 47445 - DNA, 1098 bp, Cannabis sativa
  modified_base (1056)..(1057): a, c, t, g, unknown or other
tataattataatttacactatcatatgaataaaaatgaattaagatataattgtttcaatgatttgtagagagtaaatctgcatggagaacagatgaagaatttggaagggaaatgcttgctggtgttcaccctgtcctcattgccagccttaaagtaatctaattttaattgtttgataaataattaaagaattttttatcaatatatatctatataattttttgttgtatatgaatacataatttagtctaattttaattacaggaattcccacccaccagcaagctagacaagaaattgtatggtgatcacactagcaaaattacaaaagaacacattcaaaattacttggaggggcttgatgtagatacggtattgctcgattattattttgacaaaattatattgtatattcactttattttatttgtttaaatttttacttttatttttatattctttaacttttatagatgatgtccccattataatctttaggttaatataaattatgtgctagatttaagtggagggtgagaatatattaaagaacccacatcataaaagtgggtatattttaataaaatttaatatgagggtatttttaattattaaatacaaaaaaagaagtatttctcaatttatccctattattttagtatttttagagtctttatttagaaaaaaatgtggtatttttcaaaatcaataaaaaaatgtgtattttaaaagggaaacaaatttttttggactcctggactaggtggactttaggcacaagcctaacccgcttatgcccagagttggtggggatacctagggtcgatcttgaaatttcgtaggtcataggaaaaaaatatttttggcccttatttagaaaaaaaaatgtggtatttttaaaaataagtaaaaaagatatatatttttaaaagggaaacaaatatttttggacccctggactaaatggactctaggcacaggcttagcccatctatgctcaaagtcgggcctggagtatttaaagtgcttaaagaaattaaggttttttgtttannttttttttatatatatatattaatgtggacaatatattaca

SEQ ID NO: 47446 - DNA, 2560 bp, Cannabis sativa
ccaatccatactttctaaatgccaaacatatatctgtttgtatctcagtgtaactctatgtacaccttaccaataccttgatatgctaatctgatggctactaaacatgcacgctaaacatgtatacatatatgcatctattatactaatcttatctcgattctgaaatcaagcgtgctggttaacttgagtgaaaattgctattcgatgatttaaaagccgtaagtcacaatttacgtaaaactataagtttctctatcaatttatagtgttgtaataacctaactatcaataaaacacaaaaattgggactcccaaaactatcccaaccaatgaactggattccctaaaacagtggactattttctaaggttctgtctgggaaaaaggttcactatttctgaaaaacggtgaaccattgttctgcaaaaaactagaaaaacttcactccaagctcagtgctaccctaaacaggttgcttgtggcttgaagatagtctctaaaggtgacatctaacaagcatgtatggtcatattttattttcctgactttgaacatgttagtttttccatgttttgaagctaagaaactccacttgcaattatcatcaacacaaactattttataatcaagagttgatgatctctttaccttcaatggctggttatgtcttattgagtataggctgactgcataccttagtgtttctttgttcaaaaaacacttgcccaacatgtatgttatcaatatgagggtttgaaattacttgatttatttctaattttgtttccatttcttgttgtggatgttcaaaagcataatctacaatccattgtgcatattctgttcttgtaggtaactattcagtgcactgcctgctagtttctccaatgtctaaatagttgttgttggcaagacatttagctaatgttgatgattccaatgtgtttaccatctaagggtatcttgtttcatcattatttttcttccttatctgttagtaaaacttgcagctattgtcatctttgatggttaattgtgctttcccttctttaatttgaaatttgatagtaatttcataattgtttctgtctattgataatgtttcgtaaatttcctgtgcgagaatattatacaaacattttgatgggattagtttaccgctacttcataatcgttgtatgttgttctatttacccatcttctagaaaagaatggttgtcatgggatccattttttcatgtgtgttttgatatacatattagtttattactatttttttatgaaacattaagcatttttgaagaataataatgatgatacttttaggtttttagaaattttttcttatattttttttagactatcttttgtatacgaatatagatattatttgcatattaatacgttcacactttttttgaaaaaagaaattgaagaattgcattagcataaatcaaaaggaatcgtaatgtgtgtaggaaaatgtatgatcatattatttacattgatcattttttagcaatgtaataatattgcaatattttagcttacctctgtgcgataattctatttcactgtacagaacaaagcactattgagaagcttttctttagcttttgaattttctccactgttttgtaatttgtccaacaacaattctaccaatttttttttggttgagaatcgttttcttttgttaagaaaaaacttcggttctgtttttttatcgaaattctagcaatcgttgctgaatttttctttgtcaatagtgttttattattttttttttggttaagaatcttttcagatttgctagtgatttttgcttagagtaacactgaattaaatttgtctataaatttagaattgattttgattttgattttttgattagagttttggttgtgtttgacggttttttttgtaagaatgattcaaattgatttgcaatctcagcaaatcgtaaattttaagttttgtatatgcatttgtgtttcacgtatttttttaagtaatctcagtctataaatcgtgggttgattggcgtgttattgtttcaaaattgcttttatttttttcaataacgggagaagatgactacgtgttacgatattaggaattaattttattaatcaaggttattttgttaattaaatatatttttagtatattattaagaacttctctttattttatatattaatgagatttttaataatcattatttattccatttctataatagaagtatattatttatttatttcgctaaacgaatgatttatttactcatgggtgtatagtaaattgatatgataaatgttgaagttatacttttttatattaaaaatataattaattaatataatatagatttaatgtataaatttttatatatttttaattgaaatattatatttatctatatatataagtgagaaatatgaggcagtaacatgacacttgttatacccaaaattcggctggcacttcagagaatgacacgtgtcaacttgggagaatacgaatcaataaatataatagtaattatattaaa

SEQ ID NO: 47447 - DNA, 2148 bp, Cannabis sativa
aagatcaacaccctttttcaatttcacaaataattgtccatcgtatatatttcttgtacaaatatttgaactgaaatcaagcaagaaaataaagagtaatatctttcctaaaccaatgtataacacaaaagagcttaaattgaagaaattgcatactccgatagatacactgtcttacaatatgtcgcgtcaatttcttcaaagagacgtaaactgagttctcttcagagattcagcaatggagatcccaaattacgaagattcatttcttcaccttcaagtttcgattaaagatagacgacgacaaagaatggagagaacaacagaacgagcagcagtactgcaactacgacgaagctgacctccttctccttcttctgtctccaccattgcaagaaagaattctcctcgattgaagacacaccgatgaattgcgttggtaaaagtaatttttgccagcacattagtgaattacgctgataaaaataatatttcttatgctgagactatataatttactttctaaacaaaaactaaaaatgtatctttcatattaactagctgttaataatttgttattaaagttaaacttgacattcaatacttacgtgacaaatcacttttataaagtacgacctaaataaagatgaatgtttgaaattattttttactgtgtgtcaaatgtatgtgtgcacatatcagatcaaagttgtgagtgtaatattatatgagtacaatactaattagtggtcattgtaaaagaatcttattttaatttattacaagcaactaatgtattgttgttataaacagtacacatttatatatttatgtactacaaacaagaccaaaaataaaaggaggtctgaaccatgaaatttgtggcaaaggggaggttagcacaaagacaagatttttccacttgaaacttaatcccattgtactactcctactaataactatcaccacacaagtggatggatggttggttatataataataaagtcatgcaagcctagtcctttttagttggtgctataataaattatcacaataattgttagtatgttggaatgggaattgttatttagatcataaatatgtgtacaataataataagcatatgcttggtaccttattaagatatttcttaacatttttcgtagttgaatgactagtattttaactaaagtagtaataactcaaattgaattgaaaaaaatgaagaaattactgagtttttattgtcaatgaaagaaactatgtccaagatgtatcttcttttcggtagtccatttaagaactcaaaaattaagcgtgcttgacttggatcgagcaatcttagaatgggcaacctcttgagacattttctcaagaagcgtgcaggcaaggataaattatattgtaaaaactcgtgttggtttgcagagttagtcatcattttaggaagtagtaagtagtgtacccatgtacactgtgtaggtatgtgactacacaggtgaatcatgggtattacaaatgtatcagagctttcacccagtcaaaagtgtgattgacaaggatgtctgtccccatatgaggtgattgtgacaatcagagtcctatgattcgcaagagaaaaaccgtgtaagttgtgctaacccacatcatgacttgaaaaaggtatcatgtttgatgattctaaaactatgtatgtataagactacacagctgaagagagtttaaatggattgatgggtactacatatatcaataagattcatcttctcttaagaactctaaagttaagcatatttgatgacctataacaatcttaagatgagtgatctcttagaaagttttttcaaggtgcgtgcgagtgaaaacaaaacaagttaaaaatacttgtattgatttgcaggatcaatcgttattttaagaagtaatttactaaagtaacgtacttgtgtatattatgtaggtatatcatgtgattacacatgtgaaacatgtccattacatataattataagataggtaattttgtataagtgtaacacactttgtgtagtgtatttaaatagtattgtaagagcgatagaaaaagaagcttttctttaattactctcaaataccactaattacaaattaaataattaactcgattaa

SEQ ID NO: 47448 - DNA, 1756 bp, Cannabis sativa
gaagaagtcttacattccaataatcctcctgagaaatttccaattcctaaaagaaagcttcttggaaccttaattgttgaagttcttcgaggaaaaggtatgttcaggcagctgtacttggaaatcaatttctcttttatttagtaccatatggagttgttttccaagcctttcttcaaggcaatggtttttggacaatatggattacaagaaattcaatttttttaagggaaggcctttactaagggtgattgtagctataaatttgactacatgtttaagagctaggatgaactaatgatgttcaacttagccatgctagattttgatgctaagctctatggggtcattgaccggcctacgagcaatagcaagaggttggcgacatatgtgattggaagtcatcctagggactttaaggacaagcattccaattttgtgaagaggagtagattgtttaacaagtttgtaattagagaagattatgtagttgctgataagtaggagaactgtttagagaactctcaaagatgttttgggtgatactcaaacactgttgtgttgtttgtttctggtttttgaagaggacaagggatttaagtaggcgcttgtaaaggatggctttgaagccttggttgactaggtttttggttttgggtttcaaaacaataattttccttactattttggaggctgatcaaagaaaagaaactaagaaagaggaaagggaaaaaggtccatagaagaatatcattaaactactctctgtaataatgcattgcattattacaaaatctcctagtgatatccttttaaggggttcattagctattggactaaccatccaataggtaataaacagatttctttactcgcgattcattgacttcttcagcgtgtccataactggtaagtaggccatccagatacgacctcttcggtgaagttcgtaagttggaggcattggaaggatagtctgttgttgttccattgttgttctcttcaggatcaacaacacaccaatttctaaaatactcgttggatacatttggtgagtatattgggcgggatagttggtgattcacttcatcattgcaagatgcctacaattatgtgttataaacaagattaataggaatactttgatgatgagaaatgtagaatagaacagtgcttgttcttatgaatggacttacaacaaatggtactggttcttgagtgtcaaacatagaagttaatgtctgcttgcagaaatctaatgaggatatttgtgagaccggttgaaaactagcatagtcatcataatgtaactgcaatcacaattacaacaagcagatgtttaagtttggcttcacttcccatgctttatacaaaatagaataatgatattgtagaaactaggaagagtggtgttgctttttcttactggtggactaataacaccatatgctaatggattttgaagatcagatgaaatttgcacctcattgtcgggcgaggcaaactgactactcacttcattgtgacgatattcctgcaacttattaattatagcaagcagaagctcaagctttgattgtcatgacttaaactaacaaacaatagaaagagcaatctttttcttaccgttggacttataacaacaggtcctaatggagcttgcatctcattgccgagaacttgtgcaaaatcataaattaggtcacttagtttaccttctactccagatggagcttgtatcgcattcccaaacaca

SEQ ID NO: 47449 - DNA, 581 bp, Cannabis sativa
aaatgattattttctatacagtttcgaaaaattaatcctatattatttttctcttgtttattaacataaaaaattctgggaattggcgagaaccaccgcaggtaccagtaaaatgaaagtaaaggttttgtcagaggttaaagtaactattcacttatcctcttaaagctattatatattattattaccattactatttactactcatttaggaaaactacacgtacggcatgcaatataattaattatatcaataattacgtatcaaacacacttttgccctaggttgttcatgaaaccctaaaaaacccattaagtaattaaaactgtcttataagaaaagaaactaagaaatacccaaagtcatccaaaaaaaaaaaacacaattactaaaaagcattattggtgtttagcgttttttttcgatatcatattgctattggtataattaaatattaggtcttatataatttgaaaaattaattttcaagatcgctaaccaatcgtaaaacatcacttataaaagatgttaaacatagctagtacctactaaatgctgtaatataatttttagatatgtc

SEQ ID NO: 47450 - DNA, 1678 bp, Cannabis sativa
  modified_base (1646)..(1647): a, c, t, g, unknown or other
aaaaaaacttaaagtgtacaaaagtaacagctgccgtgtaggagtatatatgtaataaaaaaaccattttgtatttttaatgtaaaaatttctaaaagaaatatcataaaattatatttttatatttggaatcttcttaatttaatcaaattaacaaacgcttgcataattctgatggctcaaagtctgtccgaaaacctatttaaggaattggtggaacttccttacctccaagagatgtaataattataagtgtgcataaatattaagtattttttaaattaattattaccattaacattataagtatgtgttcactaaattaaatgtatattaaagtactaagactcaacaattgtgtttgtttctgtttatttatttaattactctttttgttgataaattctgtttccctttatcattaacacaaataatataatataccattgcatgtcattctctactaaatttgtatataatcatatcaattttttttatcatcttcagtgttctctcgcgcaactattttaacggtacgatctctttgaaatggggctccatgaaattagtcaacatgtaattttctttcttaatttctctttagaagattagtatcttatcttatcttatttatttatttatttattgagattgatagcggaggtttttcttgcagtacccttatgggtaatcgattagctagctcaatttctagagagctagcaaacatcaccactctctagtgtttgttagtttttttcaatgtcacataccctttgataattctatatgaagcctattctttattattaaagaattattgtaatagagtgtatttaaatgtgttccagttgctatgctggattatttgtactcagaaagttaatttaatgaagtcgacatttcataaaaaaaaatgtattcctcatgcaaagttgttgagtttaaaaatactgtgagcatctctctttataatctggctagaaactcttttacttccttgatttttgtaagctttaagaaatactttttttttttttgaaagagaacctcagttcaatcatttaaggaaagaaaataggattgacagggggcaatccatcccctacagtgaacgagttcacaactctcagcactctagcttggacagctagatcattcacaccagtaatacaatcatgtgtaacatgtaaaaaggaacaaacattaaaagactttgcaagatcaattgctttaaagaaaacagccgccagcttccaatccggtaaggttttcgccttcaaagcgttaactgccaccaaacagtccgcgagaagagttatagaagaccagttcatgtcgatcgcccattgcatagctaaggccattgcctttatctcagcatccaaggttgaagtcccttcaccactgctacagatctcatgccactcttgggtagtcatgtccaatgcgattgcagccataccacaacacccgtctttgaaggaaccatcagtaactataagcttaaaattgaagggggccccgagagagacctgttgcaccatccaagaaggaggcgacaggccacacaaaccagcaacaatctctgcaaaccgactgtggatatccttcagaagaccaggggtgtaaagcccgcttagttnntttggaaattagcagttatttatgttaatca

SEQ ID NO: 47451 - DNA, 1629 bp, Cannabis sativa
  modified_base (849)..(867): a, c, t, g, unknown or other
tatataactactctttcaaaaagagaatatatttattcatattaaattataatataaaactcaatctgttgtgacacattgatactgatacatagccttaattagatatacatgataatatacacatataggggcgatgtaacaaataagtggtttcctaatgtaagtgtttaaatataaaatatatatatataatatttatataataaattgagacatggatgattaagcaatgttttctggcacatcattatcttaaatattaatttatttatttttgtgtagtttggcatgattttaatgatcattacgtaccacaaaatcccaaaccataaaagaaaagaaaataagaagaagaaaataaaataatctagtttccagcaaagtgggggatacgaaaagttgatgtaattaaaccctatcttaattcattgataccgacatatgaatggtctataaatctaaattaatgttaataaaattatcctaattgtatttttgtcttatttatataaatgtatttgtatatatcgatctcccaatacaacaatatatagttatatactaatactattaattatatagctagatgcttgacagtcttgcaatggctaaccttttctgataataatgcttaaccaatatatataatatcttattagaatcaaagttgttaaataaaataataataacacacttatatatactaccctacatatatatatatatatcttccatctatatcttgtaacttttatgatgttttccgccactgaactttttctttagtataaatatatatatacaataatattgtggtttattttcaaacataataataataataannnnnnnnnnnnnnnnnnnaataataataataataatattgtggtcagtttatttattgaaaaagagaaagtataagaaaatctatatctaaaaattttacgtatccattaattactggatatctataatatattttaatatacgtacacattagcattatagcaagttttgattggtctcacctaaaaaattgttccaatggagagacaattatttttaggggggaatattatctgtttacgagaaaataataatcaataaatattaattggggctatcgcggtgagatataaatataaaaggattaaaaccatgtgtgcagtttaaaatataacaaaaatatagggattagtgtgtattgcataattttcaaaaataaaaaagaaaaaataaggaaaagtaaatttccgctcaaaaaaaagaaaaaaagaaaaaagaaaagtaaagggattaattgttgtcgtgatgagaacaaaattaatcgatatagtgtgacaaaaaaaatgaattgatataatagggataaaaattggacggataataagcgagaaatgttctttatcctcatccgcgccatgaaggaagctacattattttaggtgaggcaattagataagatatcataaacttacggttatatttttttaagttaatgttactggatgatcttatgtcaataaatttaaatcttgatatggataggttcgatttcaactgtgttattaatgttcttagagttgttctttaaaactcgaccagcctaatacttacatattggga

SEQ ID NO: 47452 - DNA, 2061 bp, Cannabis sativa
gttaagtagttgtaactaactattaactagctactaaaaaaataaaaataaatgaataaaattgaaaatagaaaaaaaatgataaaaaatagaattaatttgtaaactaatttttagtaattaatttctaaattttttattttaatattctcctatgtcattctcattcacaatatttaacaaaattatttgttttaatatatgcgtatacaatatataaaaaatatacaatatgattataatatttgtatgtatacatatacaatacaatacatatacatacaatatatatacaattacaaaatatgtgtatatacaatacacattcaataaaatataaaatacatatacatactattaaagtttaaatttttaccttattaccgaaatttgtctaccaatattgaccaaaatcaggccaccatgcacaaccacaagaacataatcttaataatatgggaaaatcctaaaaaaatttataaaataaaaataaagcaatttacattaataaaattattagagattagatttataccttaatggacgttgagattcaacgatttctccaccaaaagcggcagccggagctaaaactaccacaaccacaacctctaagctcgatttaagctaaaagaccaaataaaagatgatcaaactttggggatatgattttgggtatgaaaaatacaagatttaaaaaaatgggtaaaaatggatgaaaaatgaagaaatagggttgaaaaatagggtggtagggtgagggtttcgtgggtttgagaggaagaagggctgttggttattttagagtttggaggaagacgatagcaaagagggttatataaagacttatggcatctgttattaaaaaataaccaacaccacatgttttttgtcattaaaattaaataatcacctacggagtcgattattacaaaataaccgactccgtagggttttttcattgaaattaaaaaaattatcacctacggagtgggttattttgaaataactgattccgtaggtgtgtttattaaaattttattaatttattgaaaaaaccgcctctaaaggcttattttgtagtagtgaatataagttgaaagggtattcaggacaatatatggtcctagaggatacttatatggtgctcggtgcccggcacacagtacccgtctaacacaatcctgagaaatctagcgacctatcccatattccagattttagaaaggctattgacaataaggaagtcacctttttgaggaatacaccactactctcacattcttttttccaacgatggcgcatgatagaatgtttttagaagttaggccttacctaccagagggtacaggtcaccagattccttaggattgtgtcatccaggaatagaagttgaaagagtatttggaaaagtatatggtttagaggatgcttacttggcacagtgcccctttgacaaaatctcaaaaatctaggtaaatattttagtgttttaattgagagttaaagaaataatctcaccatcgcttgtcatctaaaaaaatgatggctacaagaaacatggttacgtggataaccaaccaaatagtttgaaatgttgctgaaaacttcattattgacactttaaaacctcctcctctggatgatgcttagaaagtaaatgtgggagaggtagaagcatcggttgtgggtggggaccccttccgaaatgtcaaccaacccaaaaaactccataaagaaaatcttgatggagaagatgacctaaataggtactacaaagatgagtgagtggaacattttgacaaagaagaggagaaagaagacactcccttttaggatgcggatatggcatttttaaagaaacttgtcttagacaatgaagcaaagttggcgaaacatgaggaagccacctgccaaatactagagacgttgttccagttataactctcattgcaacaaggggccttaacccaaaggttcctcccacaaactaaaatcctgggcctgggatttatatcaacaccaacctaatactgtctacaagaaagtttgaccaaatgg

SEQ ID NO: 47453 - DNA, 1664 bp, Cannabis sativa
  modified_base (69)..(74): a, c, t, g, unknown or other
  modified_base (371)..(371): a, c, t, g, unknown or other
ctaactgtcacacaaggcccaaagaagaggaatttaaccattattcaaataattgttattcattgaatnnnnnnaatactaattgggcctaaataaacctatcatgtgggtgataatttattttagcaacctagtccatttagatattagaaataaatgcgcttcctatatgcatttaagcccaaaagcaaacatataggctcacacaggtcaaattgatttggatgtgccctatcatctttctaggtttacacagatgaaagaaatataaaatttacctgttacaaattattcatcggatctattgacaattagactatgattaaaattagatcattggatctgtcagcaagttaatcatagcaatttanatcaaataaataataggtttgtttgttaaacaaagttttgaataaacaattaaatataacaaataatgtccatttaacaaatgtgaaagaagatattaattactcgtataattaaagtattagttaactaatcaactattttgaaaatttaagattgttaaaaacaacctaaaatatcttttcaaaaatttaaaattcaaaaatgaaactaatttaaaatatctaggtttatttaaattattttatcaaattaacttaaataataaaataaataaaatttaataaaataaaccaattttaaaagggaaatttgatatattatgctaaaaaatagcaaatggtgtttaattataccaaaaatttactcatggaaaaaatatgtcaattttttaatttccttcaaaaattacccctatcctttcactttccccccattctctctaacactctctaacagccctatctttctctctctctctctctccattcgaactccaatccaaccgacccaatcaccgtcgaatcaccacagtcgaaccaccatcgtcgaaccagacgacccacgaagacccagtcgacacgaaccacccacattcgaactagacgaccccatcgaccccgacctcgacgacccatcaacccactcgacacccagtccaccctgacgacccatcaaccaactcgagacccccagcaagaaaaatctggggaaattatgggggtcgtggtaaacgctattttttcctgcttttgttttttgtgcgacgttatgcgatttaatatgcgatgttgtgcgattttaacataggttaatacattgtgggtatgtttagcgatatttaggcgacattgtgcgatgtttgtgcgatttagtatatatggagtaggttatgcgattttagcaatattatgcgatgtttgggcgatgttaactgataggagcttgattttttagttgttttgttctgcattgttttagcgatattatgcgattcttgttgacagtggcctaatttttgctgcctttatgcgattttaggcgatgtttgtgcgattattatgcgataaaatctaattaatctttttaaatgcagttggctcctgaacttattctcccattgtcagaccactttccagggcgtattatatatagagggaacatatactttgcttcaataaaggccaaatttgaagcttttaacttgactctgaaggtgaaggagacgccttttggtgttttttggaatgccagtgaattgaaattcagtggggttattgtccatcagttgttac

SEQ ID NO: 47454 - DNA, 935 bp, Cannabis sativa
aataatcgacactcttttaactccatcaaatctctggttgatgatcatggcgtggaacattcttctcttcaaggcatcagtagcacggtcgagaactattttaacaatatttatactactgaaggtattgacttggaagctcttcaacacgtccttgctactgttccgtgcaaaattactgctgatatgaacaacattctaacacttccctacactgccgaggatgtctttattgcgcttaaatccatgggtgaagatagcagtccaggtcttgacggtatgtcgattatgttttacaccaattattggcatattgtgggtgatttggttaccaaaactgtccttgacattctcaacaatggggctgatccatctatttttaacaagaccttaattaccttaattcctaaggtgaaaaagccacgagaagtgtctcaactacgccctatcagtctgtgcaatgtgctgtataaactggtttcaaagtcaattgtaataaggttaaagcctttcctttcagaagtgatatcagaatcccagagtgctttcttgcaatcgaggctcattacagataatgtattggtagcttttgaattattacactctctgaagcatctaaaaagagggaaagaaggttatgcagccatgaagctagacatgagtaaagcttttgacagagtggagtggcatttccttcgtagcatgatgattgctttaggatttgctcctacggtggttgaacttatacagcgatgcttaaacagtgtctcgttctctttcctgataaatggttcaattcaaggtcaggttgttccaagccgtggcatacgccaaggtgatcctctatccccttacctcttcatcatttgtgctgaaggtctttccagactttttcaatatgaggagaaccgtggtcatcttcaaggattgagagt

SEQ ID NO: 47455 - DNA, 1115 bp, Cannabis sativa
gttgatgacaaggagaccatgaaattaaatattcataaaatatgtattttttttacaagggcagggacaatacttctcctacaatgattattaggtacgtaagaaaacataaacataggttctatcaataagtcaaaatgataggatctaatgctgcagataaataagaaccttgtcgaattgaaagcaaaaaaatcaatttaagggcaacaatctaacagaattcccttcagaaaaaggaatgaaatttgcaacacttgggactcaaaagattaatccatttcaaacctttcacttaaggtgtccttgcacccggtgccatttttgggttcatcatttgtccgatgttgccatcatcagccattatccacaccattgtcattatcctcatcatcactatcatcctcattttcacgctcttcagaagccatgaggaaaaagtccaccatgcaaaaactattagtgactgacaagtatttttctcatagtagaaatgaaggtaagtcccagtacttcaactcgagacaatatttgtagatgtatttcaccgaccagagaaaaaaccatgattctgataaacatccggcgcgttaacatacaaacatgtgtgggaggtgtgaacttggtaaccctagagttgggttggtggcctgtacatggtaaacatacataacatagtagggaacttcaatgtgcagggttggagtcccatatatggtaaacttacatatggaactccatttgatatgtactaaaatctcgtgacattttgtgctaaaaaaatatataccataccaaatacatttaacgagaattatgagcatgaatggtaaatccagaccactaaagtggacagttatccaatggcactcaaaaaaagtgtagtgctttgccgtgtatacaaagttcatcatttctacttgagaaatgtgtgtttataggatgctgatgcaacaaattccacattttcggctagtttatagcactgacttctgatgtgatttgacaccttataaacaatgtgtttctcgaacagaaataatgagcttggtaacgtgaattttcataattggtattgtttgcatgtgtacgtaaaaggtatcaccagattatta

SEQ ID NO: 47456 - DNA, 1193 bp, Cannabis sativa
caaagggatcctaaataaagaaaaaaagaagggtttacatttctgagttcatcattcttaagctctctcccctgattctcagattcacaactaaaggaaactaataggaacttgcccaccaacaaatggtttttacagcagaaaaagaaataatagagtggaagaaaataaaatgatattgatatcccagggaactggaaagccctcttctccctccctctttttattctatactaacaaaccctagctctgctactgatatggcggtggcagagttaccagttaagtctccaataaccaaacaatgaaatgaatattggtaagagtatccccatcagtttaggtaacaagttttactaacaaaatgaaactaatcaatgaaacagtttgagtaatctacatttgactgaattgatgcatacaaaaaccatttttggactcaaacaccaagtagatcaaagtttcaagaagctaaacaataataaaacaagaaacttatgtaagactcttggatctgatacaagaaagctcaatcatcaccctaatcaatgccagagtctcagaaaagctcaattgggtttaaaatgtgtttgttcgagtagagctattaaccaaacaaatgatttgaagcttaatagccataactaatattttcattagattcttaataaatacaaaaacagaacaagattagatcctaataaaacaaaaagaagggtttacaatacatttctaagtcttatcattcttaagctctctctcccctgattcttcgagctagctggatatctttaggcatgatagtgactctcttggcatgaatggcacaaaggttagtgtcctcaaacacacccaccaagtaggcctccgcggcctcttgaagagcggagacggcgctgctctggaaacgaagatcagtcttgaaatcttgagcgatttccctgacaagcctctggaaaggcaacttcctgatgagaagctcagtgctcttctggtactttctgatctctctcagagcaacagttcctggcctgaaccgatgaggcttcttcacacctcctgtcgctggagccgacttccttgccgccttagtcgccagctgcttccttggggccttgcctccggtcgatttgcgagcagtctgcttggtacgagccattgattgagaaagcttagttctttgctgtgtttgt

SEQ ID NO: 47457 - DNA, 2513 bp, Cannabis sativa
  modified_base (48)..(48): a, c, t, g, unknown or other
gttttgaaccatcgcctattatgctcattttacgacggtcgtataggngacggttatagaaaccgacgggaatactttaaacaactatttaaaaacatcgggaaaacccttttttgtagtggtggttgtgttccttagtcgccctggctgcggctgccacctgttccaactcagcattttgttggtttgcctcctccaaacgtcgctggagttgacaattttctaagcttatttttttcatgtaggctctcaatgaaagcaccaaactgtaaacacagatttttgttaacgataaggagcctaattttgtgataggtttagcacaaaaaatatagagaataaatgaagtaaaactaacagcaagttttttacgtggttttgcagttaactttgcatagtccacgagtcaatcttattcagacttttctgatactgaactaaggttcttctttttatctccaagttttttcgtccctttttctgtataatctgcccctatttattgtaacataggttggcagttgattaaatttaaattcgaatcccgtaacaatatttcccaaaattgtgggccttaattatgctccacgtaaataaatacaattattatttgaaaatcatacagctgtgatttaaaccgctttcaaagagtcaacgctaacgtggattaagacacgctacaaagtgtatcttgccgggtatctcgcttggcataatagcaacaataaccctggcagcgagctagagcttttcccatacctttccaaggtaaataatgtaaatcctatcgtttctgcgcttgaagacataatgctccatctggaaatcacagttcttagtgacaagatgaactccagcagtcagggacggacccacttgtattaatgtgggggctatagcccccacaaccaaatatactgccttttaaaaaaaatagatgtaatttttttaatttgataattatagattaaaataatagaaaaagactccacaaaattaaataaatctaataagagtgattataatataagtataaatattttttaattataaataagcccccacaaaataaaaattctgggttcgtcactgccagcaaccaacatcttttgaatgtcagcttctttttgagacagctgacgtgacggagcagtggagctcattgaaagatgtctagagctaattagtgaaggtaccaagagtatgccttcccaaggcgagatggatgtctcgttattctttatccatgtacttcaagctactacacttagttagtataatgtatattatacactaagtgttctaacagcctatttgcctcgtcaatacctttttacacatagcgaggttgatgcctcactatgcatcgtcgatgtcatccctatgattatgtcctttgacacgaaatggtttctcgtcaatacgtgaatcaatagtttgtacatctttgtctcgctagagactatacagtcagggagttatagatatgctctattaactttgcatttaatgagttattccatttgatatcttttaatttaattgccattatatttgttgattcgtatcccccaaggtttacacgcatcatcctatgaagtaccagccgaaattcaagtacaatagccaatattaaaatatctaaccttacaattaaataatcagtaaatttaaagaaattaacaaatttttaaaatctaaccataatttaaaataaaataatcaatttttaagtttaaacctcaaaacatcaaaaattaataataatctataaaaattattaaatattattaatttgatatttaagtttaaatattaaaaataatattttacttagatatttagggttttgaagagaaaaaatcaaaattgggtgaaaacatcacccaaaaatcgatttttgggttgaaaatccctaactacccaggaaggctgcacgcagcctcgggcgcgatcggaaggaggaacttgcagcctccttgactgagcaatctcggtcagctgtaggatttctaggcgcgtatcgtgtctgaagtgggcgtgtgatcgagttgagacactgtgatgtctaaggcatgcgcgcgcacgaacaccttgttcgagtgactggtgcatgcgatgcgagtctctcgacaccactttgactcaaaacttcaaacatccatatctttttaaatttttatcgaaatcgagttccataaaaatcaaaatttcttaatttttcacaaggaatctaaaaaaattattttcatggacaaatttcataaatcacatacaatcatcaaatctcacataaaccaacatgaacacatccaaacaacaaattcatcattttaaatcaatatttcatgatagtaaatcattaccatggctctgataccagttgttaggatttattttacgagaatcttgatttactaacatgtatggttcattaacaccctaaatatgaattttctaatacgatgaaattaaacacataagagtttagaaaactgtaacaccctaactat

SEQ ID NO: 47458 - DNA, 999 bp, Cannabis sativa
ataataataataataataatgcacacaacataattgaaaggctcaagtcactatttacatgtccctactttgttttgtgatgtaattgagttgatatattggcttatatagccactatttcttacatgtcccataattgaagtaagaaatttttttactattctagaacagaaccaacttttcattggagtagaatctctagaaaggtttccattgaaaagttggaaaattatcatttgtttaaacaatgaacttgaagtcaacctatttagtcaaagcattggaataataatgaactattataaaatgatatgccattgaaataacaatatagtaatatgtttaaactaaagaaaaactaatacattaaactttttttttatgactttacaacatgaatacttgaaataaagtgggaagaaacatttacaaaacattcttggccattgaatgtgtgttctttagcctactctttcctgattgacttctcctatagcttctcaatggagttaagtagaatctcaatagaccattgttgtcgacgtgattgggtgaataccgagcactcctgttacgctgcaatgaaaaatcttctcttttcttaaccgaaatgcctctggtctcaccaccagcgtttggattactcaacaaaccatcgattttgcaggtgggttttcgacagctgacactatagctacgtataagcttttgacttactgatccattggtttcaccattagccactctccttagattctcccaagaattagggaccgtgggatcagccacattccctccaactaaaatatcttcttcgttaacaagaccgcattttggctgatcgcctcgctgtttctgcatcaagttcagaccccacaaattccactttctttgccacccttgtgatttcttcaaccccttttgagttcgcccaattggaggaaccgaatctgcagcatccttagatgaagttgattcaacactctccaagctctcatc

SEQ ID NO: 47459 - DNA, 660 bp, Cannabis sativa
taatttttcgaatgatttagcgtatgtttggtagataagatttattatgaaatggagagggatagaaagaaaaataaatacatttgttcatagaaaggactagaggagggagagaagaagtggaaggagtgaaaatctttcctaaatgttttttttttcaaagaagaatgggaggaagatagagaatctcttattaatatttactcccaattaaatttcattaacaatttttttatgtgaaatgactaaaaaagtaaaaatatttataatagataatatagtaatttcataatttattttctccacaatctttttaatcatatactctccccatctttcctaccaaacacatccttagttaatttttttttttttttgatttaagcgtttatatattacgttttacctgactcgaacccaggacctccaacactcacacacccacaagtggttcacatccttagttaacaaacattattataagtagtttgatttcttaattataatggttgacatactataacatatcttgtaactacttcaccaaaaaatacaaatataaatcttgtaactagccttataaatattgtattgacccacatgcatatggatatagattatagttactatagtgcttagtttacattaataacattgaaa

SEQ ID NO: 47460 - DNA, 2110 bp, Cannabis sativa
ttaatccaattccctgtgggatcgacctcacctgtgtgagatttactacttgattgcgtatacttgcgtagtgtttaaaaatatagcaacacattgcggcggaggaagtcgataccaaagaagaaaaacaagagggttgttgtcgttaagcggtcgcgtgtttttcaatggtttttgtctgcctgtagaaagtgccatgctttttgaaccatccaaaaaataaagttagaaatgtcaaatatatatgaactttctttttttttttttttgtcattttatttctctctttatcttttttcttattaatgtcacaaaataataatttagttggtattcatattgctattagacattataatgtgctcaacattattgatgtagcgtattgtaagcagttagcgatcttctatattatttcttaatcatgatggggagccgagatcgataccacagaacaaaaaaaaaagaagatcgctattattaattggttatggtttttcggtgattcttggttgcctgcagagtgtcatctattgaaccttgtcaaattaaaatgagtttttcttatttttttttctttttcgtatgtaattaatagtttgatggtatttttattttgaatgttcatatctcaaataataaatgtttgtttctcatcgtaaatgttttttactttttcatattttatggaaagatgttattttgtttagggtaaattgtagcataaatacttaatgttttagattttaaatatttaaatattttatctttattttttgagataaaaatatttattgttacaattctctaacactgtcactaccatttctgttaattcatgaatatggacacgtagatggtccaaatgcattatatttatttttttgttttaaaacttaatattctaacttcaaattgtaaatattatgagagaaagcttaatggcttagtaagtatctctgtggcttgaactctatgaattgggaattctgtgttgtttttgatagagaacaacaacatgttgagttgcttgatagggaaaaaaatgataacattcatgataaatacaatgcagagatgattctgaagcaactaaaaaaccttagccctaaaaatatattgaactataatactaaattcaatctaacacagtcttgtcctctgacatgtctttgtaagtccggtgaaggtgttctgtccttgtaactctgaagttgtctgttctggtttttgttttgtgatcgtgctatggcgtcaagtagtcatagtgctagtatattagctgatcaatatgaccaaattaatattgaagatgaggaggaaggagtattgattgaaggggatacggaaggtgaggaaattatttttgatgatagatggtgtcttgttgggaagtttttgactggaagatctgtagattttgatgccatgagacatttaatggcctccttgtggcagccggggaagggagtgtatgtcaaagaattagagactgatctatacctctttcaattttctcacgaacttgatactcagagtgttatagatggtagtccatggacgtttaataaggctccattgatctttcataggctgaagagtggggagaacccgagaacggttcatctacacaaaatagacatgtggattcaaatacatgatcttagaaccgggtttatgatggagaaatttgtgcgtagtgtaggagggtatgtgggtgcctatgtgaaatcggatccgaagaacttcaacgggatttggcgtgattacttgcgggttcgagctactattgatattgagaaaccattgaagcgtcgtatgaagctatgcaaagaaaatggagaatggatctgggcgaatttcaaatacgaacatttgcctacattttgtttcatttgtgggatcattggtcactctgagcgcttctgtcctaaacgttttgaccacgattttgatcaacttgagaagccatatggcttaggaatgaaggcacaaatgcgaaggaagaattatcttatcggagcacaatggttgaagactggaaatgaagattcttcatcggcaactggaggctctgttcgtcggtcagaagctgcaaattcggctgaaa

SEQ ID NO: 47461 - DNA, 2027 bp, Cannabis sativa
  modified_base (375)..(403): a, c, t, g, unknown or other
acataccagccgaaattaataggaaataataaaatattttttatcaattaaatatgccaaaaatagaattaacaatttgtctgtcatgtttttcctctaggttaggaattgccctataaagtcaactatcttcccttgcattagctacttctgcaatcatattcaatccaaaggaagagccagcttcaccagcttcatccttctcatcagttgaaccaattcttgaaccttcatcagacattcaaggagcaagctttcaaaccactctcttcttctttgccatgaaaatgagaaaacagggctacgcgccaaaaaaaaagtattttttgagagaatttattattactagatttgaatattattattattattatnnnnnnnnnnnnnnnnnnnnnnnnnnnnnttattattattattatttgagaatttttacacaattgttgttattttagtaattaattgaaatttaaaagagatgtgaacatatattgttttttaataaatggcaatagaagttagggtaattattcttctcaaaaaatattaaaaggcccctaaatatcaagtaatttatatattgttcttcagcataggaggcttaataacaaagaataatatattttgttcaaaagaaagaaaaaaaaagcaaagaatatataatgctatagaatgctactcctatggtaagtcccttcaaataataccacatatataaatatgtatttgtataaatttatataaatgttaaattaggtatcaaaaccgataaaaggaaaaattctttttgcccactgctttttgaaaataataataataacttaactaactaggcaacccaacattgttgattccaagtgttttttcctaaccttttcctaatttatttacaaaaacccaattaatttaattaagaacatttatcatatataaccaagaaaaacaaattaattaacaggaatcatcttcctacctatatttatatgaataagttgtaaaccttgcctctcctactttaagttgactaattttaattaaaataataagatattttttatcgatcatagattatataataggatgcctaaacattaattaaggagttaactaaattgtatatgaaaaaaaaatacaaatatttaggtagtttataatcctaatttgtggcggtggtgccatatgtacaaaataattaaagaacaactttgatgactctgtagggtacctctcacttatatatgctattttgttcttattgtttttaaattaagggcaaaattccaagctagctagtcatcatatatatattaacctttgacctaacctaaccctttacccaaataacaaaactagaattattttattgagacaacaaggtattacacccaagcattagcaaccaagttttttttttttttttaaaaaaaaaaaaaagagatagttaattagtatataatcgaatttattttttaagtgtttttaattaattaattcttgccgtgcatagtttagtatgagactatgagtagccttcaaaaattaaatagtttttctactaaatttttttgatataattaatttttattgaattataccgccatatatatagcttttattcttttatattgcaactgataaaatttaatcgaaaacatttttaataaaaacttaaacaactttgtccccccaaaaaaaaaactctaaaaatcctctataattaattacaaccctttctaaagtacagataatagaatgtttttttttttggataaataaagattatgtgaagaaattttcgctaattaattaaaatccatcaataatgatatataaatatattttgaaaataccccttactcaggatgaaagaatcaactatatacaaggcctgcttaaccaaaggataatctgatatgttaacttctaggttattacggctaatattaagttttaaaacataataccatgattgtgtgttatggttaataattttgagtattgttatgtcatattttaggttgtctaatatt

SEQ ID NO: 47462 - DNA, 1165 bp, Cannabis sativa
cctttttcatgcgaggacctggtctcacgtgtccccaaatcaaacctgcacacatttataaggttgaatttattgcgactcagaaccatgcgtcctttagcatcgcaaagacctcatctccctttcaacaaccccgcgatcatccctacagaggacgtggttgtttccgtccctattctttgttgtgggatctccttaccttcatcccttcataaaagccttccttagacgttacgatgtctctcccttccaattaacccgaaatagttatcgcatagttctaggattcgatgcgatgtatatggaatatgttcgaagggagccctgaatcgaggattttagttatttttatgatataaaaagcatggggcacaacaatggcttttattgctttagtaaatgggccacctctgagattaacggggtagaaggcatggtttccaatatgggggattcaaaatctaagtggttttacgtattcaaagtaccaggagttaggacagatttcaatcgtcgacctagcatgtcgcgtatttaaccacttagtttatgtttttgttaccttgtgaagttgctaatgtttgttttttgccgatcgcagatagaccagttcaacctgttctagatcctgctcgcaaagagatcgttgaggttctcggtagcctatccgttcaagatcgtgattggcaattgtattgcataaatgccaaactgcgagaacataagctaatccccgaggatgctagccttcatcgggcaccagtgtacaaggaaccctttaagaaacaaaaggggagaatagacaagcttctatccaaacaaacttcaagaccaacatcatgtaagatatcgagtatgcacgtaatatttcatagcataaaaattgtacttatcttattgcttctttgcagaaatgactttcttgaagcaagctccacttctcaatcgaaagcctaaggctagaactgtaaccacatctcccatcatcccgcagaagaggatgagtgaggctgtcaagacttgtgtagctgattcctctaaaaagcaggtctgacctgctcaagacaaggggaagaatgtcatgattgaccccgttttcagagctggcgacatcctagctctccaagacaagcttgtgggtgaggagttcatgtcgaaggttaaa

SEQ ID NO: 47463 - DNA, 805 bp, Cannabis sativa
cgcatagggaacaagtcgcacgaaacactgatcgcgaaatatctcaggaagaagataccgagcggcgtaaccctcaaagccaagcccagtcaaaaaatgagttaaatgatgttgaatcccattcctcttcctctcatagttgttctcctagtgtttataccaggtctgggtctgtagagagacgacgaggggggaggtaccatgtttataggggcgatctttgcgatcacctcaatgaagtttttagggcacgatctcaaacgccccgaaatcacaatgagccccgtgatccctaggtgggcgatcaaggcacgaacaatagaaacaatccaactaatgttgtcaacccgcccaatgcaccagctgcgactactgaggtagtgatctcgactaacatagccacaattactgtcgtaccaacgatgacacaaaaaaccctatttttccaggaagtgttgatcaaagtattctgctatgagcgttgaagataatcgagcagtagagaaagcccatttataaactccatgggaccttgcctttcactaaataagtgcgacaagctcgacttcctaagggattcagattatctgaatcgctgaaatacaaaggtactacaaatcccatatattatttggataagttaaatacaattatggaagtagaccaagcaccacaactagcaaattgtcgcatccttgtggaaaccttggaggataatgctcatgattggttcaaccagttacccaaagtgtccatatcgacttgggagacttttgtagacctattcttgacgcacttccaagcc

SEQ ID NO: 47464 - DNA, 2624 bp, Cannabis sativa
aggaatgcacacggaacaaagaatttacagggagggcttcccgtccccatcttcattatagtggagaaagtcccacatagaatagtagagtattgagtaatacgtaagaacataagctactctatttatcactaattagtttgaggaaattacattgtatactcactttactttatttatttttatttttaccttcatttctatattctttaaaagaggctaattttgattaatagatacgaaaaagaggaattcatttaacttatcctaattaattttaagatggaatccggttacaaatttttaatataaaaagcacaacttaaaaaaattatataaatgatatttctatactaaaaaataccatccgttcctttccttagttgggttatgttcctctcaaaaagctcatccctcccaactatatcatatcggccttggggtggcccaaaatacattcgaaactacccatccgatggctttgatcgccacttgaaaccttttccaccatccacaataagcatgtgatttgggaaagaagaggtgttgcatttgtctcatttttaaaattcattataaagatccggtagttttgtaattaaagttgattttacaacgtgagatttaaccattctttgagcttgtcaataggggtaagttgaaaaataccacttttattaatcaaatttaccactaattttatatttaattgaaacatacttctttttatgtgtattgtacccaaaataccttgacataagagagtcacatggagagtatcttaaagtgacaggggtaaaattggtacaatatctaaaaaaaagtaaaagtgataaactttaaaaaataggataaaaataaaagaaaaaaaaatatagagtgtaatttaatcttgtctacctcttgtcaatataacccaattgggtccagctcaaatttggtcaattaaactggacaactaatttatgggccagtacattataggcccattaaaaagtgaagcccacgacacaagacgacagaacagtcatttgcaatttgcatcaccacgtgcgaagagagactgaacctgtcgagtcacgcaggcagagctgggccctcttttgtattttccattcaataattaattaattaaataaataaataagaaaaccgaggcaaaaattatgaaattctgtaaagtatttattttaaagtttcgcggttatgccctcagtttctcattcatcatcatcatcttcttcttcctcttcctgcgatcccatcatcatcaccactacttgcttcgctctcgatcgcccaacggctctgaatgtgaaaacgattcgattggtgagccactccttttctcttcggctgcaattttcttttgtttttcgtggtttggaattttcgaattgtttaattgcaagtttttctctcgatttctagggttttcttgtgtcttttttggctgtcgagtgaatttagaacaggagaagaatgtggatttttgacgatcttgtccttcgtcttttttaaagctcaatctttgagtaggtagttgtgtttcggttcaaattactggtttttgggattttgttttggagttgtatgtttagttattgcgaattttattactgtaattgtagaaattgcaagtggaatttttttcttctcgtttcctttttccgagcgggcaaacatttatgcttaggtgtctgtttgtttgtaatgctgagcttcgatgggttagagaaaatagcgttttttatttggtttattataagttgataatggggagcgaaagaaaaagattatcgtgtttagttcactagacatttgacttaatagaagagttttctatgtccatttatgttaactaaaaaaaaatctgatctttccttgtatatttgttgtgtttcagaaagctaagaaagttctccatggccccttcaagaaaatctagaaacggaaataagcagctttctaacgttattgaagtttctcctaacaaacatggagaacctataaacagaagtaggctgaaagtatgagctcattttcctcattggatcactgtgtcctttaactcagaaattttattcttattttgcaagcttgattatttatgtataatatgtgttcctttactggtgggaggtttgagctttttgtgttgaagcttgtttaccttgctctttctttttgtagataaggtattgtctattttattttgtttcttgttttcttttcgtaagctgtaattgtgagaaataacaactaggaacttttggatactcaattttagctagattatagttttaccacaaacatgtaaacatttcctttttcaccaaatgttttaggagaaagttacttggatggtctgtaaaatttggtaccaaaacttgctaaagtattttacatgttgcctctgataatttgttttaagtaataatttcctgaaaagtaggacatactgttgatcttccaacattttgattcctctgatacattgtgcagggtgctcgtgatcatttctagctgataaagttactcttttaactttcatttttgtttatccttttagcttgataaaggatgctcagacttattggtgtattgcatccaatgaactctga

SEQ ID NO: 47465 - DNA, 4578 bp, Cannabis sativa
tataatagtttttagggagtatcgctaaccaatcgcaacgcgacatgtcgcaaaagtgctaggcaccagtaatgtttaatagcaatgctctattttttaaccttcaaaaaagtcagccgacgctgtgattaatttaagcatacgaaacgtggtctctttcaatggacacgtgtcagaaggtttgattgaagtggtgcgtggggaccacgtgttccctttttcacctcattggatgctcctctgctgctccactgattttatggcatttttggccttttttgttctcttctattacacgctctcttcgcgtttttacttcacgcgctcttctagtgtttttttatttttttttttaaattgtttcattttattttagtttatatggttcataatttatgctatttcgattttgtttttaatgagtttgagacatttagaagaattacctaaagtgccataaattgtcttaattaaaatagtcccaaattttggatttatctaacaaaggccctacttttattttgttttgatttgcttaaatttaataaaacatattaactaggaatatttgaacagatgagagcaaaaatttctctccttacaggtgtactttaattgttattaaaattataaatttatagtttgaataagcaaacaaaagacactatccaagtattggctgtgaatggttattatgtttaagcacacttatttaaaatccatttatttatttattttgaaacgtttaaaatccaatttatgaggccaataagatattgttcgagtttaaattaaatccctttaaaaaatattcaattcaatctgatgtcacgttatctcataactcttattagatttcaatgccaattgtacttattaattatctttctatctacttatattatcaaactttcactagtattttttaaaggaagttttattagtttttaatcaattgtatcttatagtccttgcaaataatttattaaactcacgaactttattaaataattcaacagctaggaacattaaatgtgtaatctctttctttatgaaactaacattgtcatcatcaatcgaattaaataaatatgtaagaaattagatttaaaagtacatatggatcttaaacttatattatattatcaagattattttatgaattaatgaaatagaagacatatttgatttcataatattggatacgagataaaattgtagatgtatgatttttcacagactaattttctctctatgagttctcactcaattaataggaatgaaggagaagagtgattaagaggggaccaagctgcaaactaattagagccctataaactctagatttactattggatattacacattataaaactcatatcaaataagatgtttattagactcatttatttagatcactgatttagccttttttttgaaatattagcttaaataaattctcttaatttgtaagtcgcgtactgaattaataaaaaaataatccaacaatcttctacttgggctacaaattaatatcaatgataaatacatttaataactttatgtgcacacaaacttgctaattattctcaaaatatctcatttagacaatctggtctatctcctataccaatatgagaccaaagtggcctttgttacatttatcgtaactggacccaccaatgatcaccatatcaaatatattcaatgacatagatcaagtatggatgtgtaactgaaaattagatacaatatgatcttaatcatgcctatttttaattggtcctttattccttagtgagatcaatccgtagtctttcaaactttgcgtcaaaccacaattgaacgataacacattcaaagcaataaagataataaaaccagcaactagcaactttattctgtagagaattgaacctacttaaagtagtgtaatagtgtcaatcaacaaagtacctaatattgaaaacaaactcccactaaaactgaacatcatcaaataaaacaacacctctgtaagcaatatgctcatgaaagatcttaggtgttaaaactttagttagtgggtctgctagcaataagtttgttcctatatactcaatagacactatcttactctgaactatatatttaacaactagaaacttaatgtctatgtgtttagactttgataatcttctattgtcatctgaatataaaactgttgatagattgtcacaatatatttttagcagtcttttaattccttacacaacctgcagccaagtgacaaaatttcacagccatattgcattattctttgcctcacaacaagctatgaattccgttgtcatgataggatgagctatgagtgtctgcttagcactttgcatgatatagctcctccagacaacaagtagtcacagccaaaagtggatctcttagtttcttggtaacccacaacatcagtgtcagaatacctaacgttctataaattttatgtccttcgataagtgagcatataatcatttattctttataattacttcatgacccatttggctgccttctgattatccatattggggtcacttaagtatctgtccaacatagtcacgatgtactccaacactagatgtgtgcatacttgagcatacataagacttctaatagtcgaagcataaggaaccttcttgcatctttactctttgaattttgctcttggggcaataattgagactaaacttgtctccttttgtaataggagttagattaatttactctcactaaacttgtgatatatacaatcatttacaacattgactttcaatctgtatgagacaataaaatgatgcaattgtgatagcattgacgggaagcttatttgagaccatagatggatcttgagtttgcaactatagacttcagatcacttgacacaaaatttctggttgtatcatatacatagtttcctcaatgttgtcaatgagaaaaaattatcttaaaatccatctagtgtagctctaagtcaagatgagctaaaagtgacgtaattattctaaaagaatctttcaatgacactagggagaaaatttctttacaatcaatgccttacttttgtataaaactcttggcaacttgacaagatcttaaatgtcattgtctttcattgatttcatctcatcattcatggcatcaattaacttttgacaattaatactttttttgacttgttggaatttgattggatcatctttcattgtccttatgttaaactcgtgctctttaagaaacacaataaaataatatgaaattgctcttcttttctctctagtgtattgcctaagtgttacttcctcttgaggttgttgagtttgttcttctggagtagcctcttgatattaagtagggagttccataggtgaatcctcatttttgtcttcaaacatgccttaacaatgtcaataggttgatcgttgtcaggaacaatatttagtagaataatgtatttctcttttaaaaaaaaataacattccctactttatctccctcctcaaacataacatcctcaagaattcttgcatttcccatctcgaaaaaggacttggttgagggatcttagaactttaaacctctcgacctttctggataaccaacaaaatagtagttaattgttcttgagtccattttattttcatgtggccttaaaaggccttacctcagctggacaacccaaaatatgtaagtgtttacttctagactttttctctatccatagttcattcatataggggtttattagctaccaatttactaggtactctatttagaatgtagattatagtcttaagtgcattttcccaaagtgatttaggtaaagaagaatgattaatcatgcttcttaccatgtccttaagcaatctatttcatctctcagcaacaccgttcatgcaaggttaccttgacattatgtattgcaagacgattatgcatccctttaagaatttggcaaaagttcatggacgttgtttacttgatctgtcatatctataatagtattcaccaccacagttagacttgacaattttaatcttctcacctagttgatcttcaactttgtctttgaaggccttaataaatgtctgaggattgtgacttttcatgtatcaagtataagtacccataacgagaatattcttttataaaagtgataaaatgttgtttgtcattccaagaatttgcagggaatgaaccacatatatcagtatgtatcaattgtaagacgccagagctcccgttggcacttaacttcttaatgtaatcaaagggttcaagtatttcatctgacacaaatcttcctattctctttttggagatttgtcctaagcttttgtgccataagataatagaattctcatttgaacctctaaatgttatttaaaaggtctcataattagatgaatcaattgtattaagcatatatagattatcaagtaaagaaccagtcgcagctaagtaggattaaataagagactaaatttattattcccaaatgaacaagactaaccatagttatccaaaacaaaaattaaaaaaaaa

SEQ ID NO: 47466 - DNA, 1245 bp, Cannabis sativa
attttcttaaatttaagtccaacaaattcaataattcatattgttatgttgaggaataataatattaatataatatgtggacaaataaggggtttattttttgttattctttttttggcaataaaattgaagtaaaccaacttaaacaaaaagatcatgtttgttgtgaaaaaaaaaaaatcatgtttcaaaataaatgggtattcagtatttactttcaaatcacacattattttatgggacaaccatgatctctttacatgaatttcatttgtatggtttttttttaaaaaaaaaaaaaaattatttgatttgtatggttagaaagtcactgtttcattgaaataatgattaataatactaatgtttcagtggcatctttcaaaaataagataaggtgtgcatataatatttggtcaaactatagtaggttggcctatatatcatatatttctatttacctttataaattttaggtcaaatcctcaaactatattatatttactcttcaaatataatattatgtacatatacattctccttctttttctcaagaagaatttagacttttagttgttcataaggagaaaaaatgttgttgaaataatctcctataagagtacaatgtcatgatattttgaactgttaggcaaacttattattagaagaacttaattgtcacatatggttgtttgttttgcaaaaagggtatcattctctaaagaaatttcaaaaataataataatgataatgatgatcaagttggccatgtgatttttctaccatttaacatacaaatgcattcctgtccacgccaccgtggctgtgcgaatgacaagtaacaacaatgtgaatttggtactgtactgcagtctctgtttgggtgcccgtacagttgactaacatacaagaataagaaccaaggttattgcgtgggacttataagttcaaatttaaagtagactttagcaattttaggttaattaggattttcgttactcaaactttgattagtattaaattatattttttgaacttttaaggtcgttaaaaatctcccatgaactattgaaattgttggatttaaaattttttgtctaattttaataaaaaaagtctaacatagatgaaagttcatggaacatgattgttgtgaaaaattgtgtacgcaagtatacgcaatcgtaacaagtaataaagtgataaatcgagtatcgtctccacagggattgaaaattggaaatt

SEQ ID NO: 47467 - DNA, 1796 bp, Cannabis sativa
gtgtggacatgatagacttttgggaacacccagatgaaatctttatcattcctaaaagacttctttcggatggacaagttagacttttgagaatgccattccgaatatcatctaactttccataaccagaacaacttttaaagatcttttcctttagaggaactataccacaaatttcacctaaattaataggtgatgaaaaaaaatacagccatcatggttggtgttcgagatatctcaggatactaacttttgagattgatcaagtccaagcagtgattgaacttgtttatggttaagacctttataatgccctgatccgcgagggcgccacgtgtgtacttttagtaattagtttataataataaacttatattttaagaaaatgcggtttaattaagatttttaggaaaaattatttaaattataacttaaactttgttacaaaataccattagtttcggggatccccttaattacaaacttttacaaaatactacaaaacaacttattacaaaatattgttacattttcaaaacacaacaaaaggaagatcttgtccactaagaaccaaaatatggcaggttgatatgtatattgctggaagacctctgactcatggctggtcaagtttcccttttcccttacctggactgcagagcacccgtgagtcaccaaaactcaacaagaaaagtaggtaaaacataaatatcacatttagcataacattttaataacagagatcatacattaccacatatagcttaagcagttattcaaagcataatcaaatgttaataaacaaccatttatcttataagacaaaccgaactcgatactttataaagcatccttaactcttgtaaccaacgagtctctaatgtcactattattgcttaattaagcaactgatcataagtaagaagcttatcagcggtttcaaaagagagtaataactaatttttaacaatggtaattatttatcgtattttattttgacatgcaaagcagtgcaattgacttttttttaccttaagtctaaagtcaggtgtgcaggccaacctgagtgaatgatgcttgacattcttgggtcctcaagtatggataactcctagggctgaagaaattgacaataagttgctgaaattaataagctgagtttcccttgggttctgctagattccttgagccgaaaagaggaaagaaagataatgataggtttgtgtgatttttttagtttttttatttgatccactaattatctaatctaataaacataactaaataaataaaaataaccttaaactcagcctaaggttactagaaaaatcaaataggaaaaaaatctaaaacttaataaaattacaagtttactctcaattctacacttaagctagtttataatctaggggtactttggtcactactagctaccctgactaaaccgacaactcaacatactaaaccaatccggtacaattctaataaatctcattctattgtcgtcgtgacatctttgaccaatccatcgagtttccacggtcgtcgaacacacaaatattttattttaaaaatggtatacataatacccacatgttttaataaaatctccgtaattaatgaattacgctcaattattcatttactcaaaaatcactaattatttcataatttgcttaagtaagattataatcttactccagtattcataaaactacatatttaataaaatatgccctattaaacataactataattttcaggatattataactatcccctccttacaaaaattt

SEQ ID NO: 47468 - DNA, 1368 bp, Cannabis sativa
tggaagttggagagtctggatcgctaaagtgtgggttgaccatagcctctgtaggcttgtcggccacatagtcaaagccctggccggccacctcctcagtaggtgggccagccatttcctcatcaaatggccccgaggatgatccttctggctggacggtggtttggtctgcttccaacctgccctcaaataatgctctcccttgggccaatgtgctatctaggaaagaagcatcccccatgtatgaaagatcagcattggggttgcacagcttgaactcatagatgagttccgaagataagttgatgtactcttccctaattgtttgtttgccttcaatggttgccttcagcttctcctcacaccttgtgaggtcagtctctaacctggagatgtcagcatcttacaaggttttctcgtgatttctagtgccgagcatagcctccaaacttgaaatcatgttttgattctataggccaagagcctccatatcagctaaagctttgcccttcacaatcctgaagagcactcaaagaccctctggagttgcaatgcaaaaggctcagcttcataaaggcttaaaaataaaacaaagtcaagattagtgctagaaacaacactagccagcccctgtacggtgcacccaaggccgactagcctatttaagacattactccagtcggccaactttctacagcagcaccaatggcttgccaacttgcaataacacagaaaaaagtgagcaacgctaaacgtgtaacttaccaaggccaactcttgaagaccgacagaacagagcctttccagctcactatcaccaagctcctacagcttgctatccacaatagggtaagccctatccatacgcctacaagtcccttccatggctctttgccccatggctgagcctgctccccgactaggccttggcatgcccctacccaaaggtcgttccctcctcactagagggtcatccatcgtgggttacccagtcagtgctggctctggaggaagaggaagagatgaccctgtggaatctcctgcacgggtggtctgagccaccttggacctcagacgacctgaaggctcctgtaaaggtccatcaactagacctctcaacttggaagacaaatctgcaaggagaaagtaacaaagtcagaatacaagttacaaatgttcaacgtaaaacaaaaatataaaagatggtgcaatcaactatcaaataccatcattctcagaagtggaatcattagaatctagaatggctaccttgtccttgcctctagaagcaagcaaggggcaagtaggccctatagagctttggccttcaggcctaacctgaagagtagtgtccccaactgtgcccct

SEQ ID NO: 47469 - DNA, 1488 bp, Cannabis sativa
tttttatgttactgataggactgtgcactttgactttccttgtcccatataattaataataaacgtggattaactagtgctagttaggtagtgaaaaatgagacatgtgagctactaatccagcttgataattatcaaatcgaataaccctgacctaccatagtgcaagttgaatgaaaaaagtttaatatgctgcaaactatagcaacatatagtacaaaactaacatatacagggccgattcaaagccacaatagctactaccacatagcagcaacaagaaaagtctcggaaacagaattccttgcttttctaaatcactttgtttatcccttcggtaaccatgaactgcagagttcatgattgatacccttctcgtcttgtaatttgacacttaagagtgtattcaagttttctcatccaggcttacatagattcataacaatcatttgctgaatttgagcattcttgtcctcgaagatcggcatcaaagtcagagaatggggtagggacagtaattagtgaactggctggcattaggttacgaaatctgtattctagttatgtgttatatagaaacaaatcatgttaagaaatccatgtgtggagtaagagcctcaaagatgtgaccatgtcttgtagttacacactcttgtcaattttcgaatttactataatatgtcagagagttcatttggattattactgaatatctttcggtttctttacagctgactctgcatccgaggatggtgatcatgctgcggtacgctgactatcttgttatgtatcgtaaaaataatggtatattagtatgatgttttttttttttgatctaattatgggacaattattcattttgcagtatgtcggtgatgaagacgaaagcagcgatgacgaaggaatgctttgtaagtgacccttttaaaacaattcccatgaacatactgagttcttccctgtattcttacaatgagttcttccaacagatctccccgacttggaaaaggtgcgaggaaacaaaaagcgatgagtgaggagtactaacaagtaacatgcagccggcgatgcagttaaacaacgcccttatcagataattgataggtatatactagggaactgttgagtttgatgaattataacaaatatataattgagttgagactgtacataatctgacagtgcttccttttatgctctaaatctaacctctcaaatcatttggcatctaaacatgagatgccttttgctgctgcagtagttgtagttgtactaccacgagttctttccttcatctttttcaacttagtggacctgttatggattaaaaaatcatgtgaaatattggattttgattactatctggtgattttgagcattactatcacggaatgataccttatgattagttcgtaattttttatagagtaatttgcggcataaatatttaagttatattttcgactatgtacacgtcgataatgattt

SEQ ID NO: 47470 - DNA, 1445 bp, Cannabis sativa
tgcatatgcaaagattttgagttgcagcgataagctttgtttaggggagcctttaaggtgttgtagtattttatatgtagtagctaggtgatgttgccttggtgattggacatattggttgggtttgttaacaacaaagctgatatcaagtcttgtgatggtgagatatgtgatttttcttacaaggcttatgtattgagtaggatcttgtaaagattgtcctgactcttcgtgaagcttgatgttgagctctattggtgtggaggcaggtttattgtctaaatagcttgagtcttcctggagttgtagaatgaaaggttgacgtgtgacagaaatgcctttatttcatcaagttgtttcaagtcctaagaaaaatcgtaagttaccaagatccttcaatttaaattgagcatcaagagtagacttaaatgtagtcagtttagaaaggttcttagttgcaacaattgtgttatcaacataaatgagtagggctagaaaacacttgataaacagtgaatgataagatttagattgagtgaaaccttgttgtagaagagaggtattgagtttttcataccattgtctaaaagcctatgttaaagacttttgtttaatttgcaaactccattagttggaatcactcatttgagagtgtatccttgaggtagtttcaacatcctcttgtaggtcgccatggagaaagacattgtttatgtccatgtgatgtaggtgccaatttttaatggcaacaagggcaataataattttaaaatattaagggtaaataataatttcaaagtgttaaatttttccacaagagcatagtatcaaagtagtttatacttggctactataatattctaaaaatttagaataagaaatataaaataaaggcatatttttttattaaatatggggatttatttttgactatattataatatagtttaatatttaaatagaattagtaatgtgggaattattatgtccatatttcgagcattaaatatagacacgacacgtggatataaatttcaaaaattgaggaaaactataaatgtgaggaatgaaataagtgtttgacattgggatatgatacaattaaatgatgcattggcctcaggttgtattataaaatggttgtccaataaaagcgataaaattataaatacaacggttagcgtgaacacaacatcataaggtcgtctcaaacttgaccgaaatagacatgacatgaatagagtgcaaagggatgaactactagaaatggtagataacgagttctttaagagcttgtagctcattgatccgcaaactcatgagtatgttgaaagactaaaagaattgagcaaagtatgacccatctcgaaatgcacataaaggacgcaaaaagattgatcgaaagggacacgaaagatacaatcttaaagggtgtctcaagattt

SEQ ID NO: 47471 - DNA, 1101 bp, Cannabis sativa
ttaaagaattttgaattatacacgtctggacccgaactcttggtactcagaatgctaaacatggctgccttaatctctttttctataaaaggacgaattaattccagttgctggtgcagattaagaatgtttcccatcttcaaacagtctgcatctattctttcaaaagttatacttttactccccatgaagtttttaaaatgattgacatagtgattcaccacatcagaataattttcaatcagcatcccttgttcatcaacaaaactagtgattctattttcttcccttctcttttttaagcaagcataaaagtaggctgtgcaatcatccctcttctttagccaattgattttactctgctgcatcaaaaaacttctaaggagctgatcttggaaatggaaattactagcagcttgtttttcagcttgtaagaagttgtcatccctaggattagaatgaacttcttctttagctttttggtaatttgttttggccatgtggtacttaacttaaacatctccaacgaccacttggttaaacttcctaagaacatgtttaagtctcaccattttgtactgcactgttgccaaactcgtgccattttctttcttttcttttttggtcaccactccttctttcttcatccatttactacttccctccttcctacagtctgccatgccatgcccaaaacctccacattttttacatttaatgggcagccattcatactcaaccccttgctcctcaagtctaccatattcattaacatactcaattattctaggaggtgcatccattatttccatcttaactaagatacgagcaaacttcaccattgttctctctttagtaaccttattagtcataattggtttcccaattgtgctcactaacacactcagacagttactcccccaataatgtaaccccaaatcatacagcctgacccatagagggactgattttactaaccttatagcattgagatccgatgaccaaggtctgatgataaccgacttatgatcaaactgcatgataccattctctagaacatgatctgtaatgaccgctctagtaatgtggattagaaaaggc

SEQ ID NO: 47472 - DNA, 1724 bp, Cannabis sativa
aactaattgttggtggtgatcatggagctgtcttctgagcacttttgcaatatgatgcgcaatctagaagtccttgagcccactcggcgttagggcacttgtttataacgtcgattatagtgtcacaacactctttaggaatgggtgctttatcaagacgaaacaatgcaatctctttatagcatttatgaagtctaggttcctccgcacaatatttacgtgctaaaccattaaaatatggtgctggtggtgacggtggtgatggcggtggcaacaaagactgtgatggcgttggtggtggtggtggtggtggaatatttgtcgtaggcgcgttgcagtgaagttgagcttgatagaaagcgaaacgagatatgaaagagcggtaataaggtaaagtgtgggaacaaaggtcagtattgggagtgatatttttgactttgtcacaacatgtggaactaataggtttttgcgtatatgtgaagctaaacatctcaccaatgcatggagtaaaatccaagtattgattcatgcatgccctcctattgttgtaataatcaccaatattaccataatcataagaccatccctcactggaattgaccaagaataatgacaatgccaagacaataaatgagttcatcttcatgatgagaaattgtagagatatagaattttaatttggatacaataaaaatatagttatcaaaatgtaattttatttatagaaatgtatgcatatacactggtaactattagccgtaaatatctcattttctgttgtagtaataaataataatattaataatatatatattagtaggtaattacctttaatttatttatacatatatataaaagttagttatttggcaatatgcatatcatttttaaaaatcaaaacagcatatatttctcttcgtaactttgtattatgttagttttggttgacacagttggatattttttaatatatagtttaataaaatttaatgatgtcagtaattaataattattattattattaatgagtaaaaaaaaacctaatcaatcaaaggctaataatttcttgatggctaaaatcaataaaaaaatacaaatcaaagaatgtttgttaatcctgttcaataaaccatgcatatcgaaaactttcttaactaattatattcttctttgtacatgttacgtactataagagaaatttacaacttaaatatatagacttttattaaatattttttaagttaagaaaaattacattgattttttgtaacagcaatatcaaaacaacattatctttaaaacagcattttagtaaaagaacaaaaaaaatccctagaaaaaattcataaaaaagtacaaattttatgaaataatcccaaatattataatttgacaactcatcaatgctgatattttttttttccgttttcctgttacactgagtgttcattggattataataaattcagtgtaagtgttcgataaattatgagtgttcattggattataataaattcagtgtaagtgttcgataaattatgagtatttcatgaaaacaacttttttattttgacaaaattaaaatgtttcattaacagaaataagcaatttgatagagaatgattcattatacctaatagctaccaaaacttaatctcatgataaagttaaataatttgacatgcatgattaattaaatctatcaaaaacaaaaagaaacttat

SEQ ID NO: 47473 - DNA, 3472 bp, Cannabis sativa
  modified_base (62)..(64): a, c, t, g, unknown or other
ccttaatgcatgagggaatgtttctcttttgcttacaatgtctataataggaaggaacattnnntacataaatagaatacacaaaataggggattgagacagactgtcttatccctttaattcaatcccatgattgtagggattatcttcgtacttggactccacgatatcattttgaagtagtcaagtactggtaagtagtttggaaagccaaacatgcctctgctcgggtagtcttccctttaccctgctcgggcaattagacgttatacatacaagtgtgctagttgaagtatgttcgcgatattcatctccacccagatgcaaggaatgttggacacgtttcactcatatgtggtgccacatcacagtgcaaaaaatgggataacatttgcactatgatgtggcagcacatatgagtgagacctttgaggtcgcacgtggacttcactcagtctggatccctatctgaatgggtggcaactgttcgaagtgtcgcttgataattcgacgttactctgaccaagggtctcttcaattttcagctcattaatgctgactaacatgtcgatcaaaccacgcctaaaaattagcacgttttgacggttaccattccggtaattgagtgctcaacgtacaattttgggaggaaatcgatgtattcaaaatttgaaatgattactttgcctcaccaattagcttataaatagggctgaaatccctaatcaaccacttttagccatttttcgttcttgaagaatcaaagcaagaaaacctttttctctcaaatcctttgaagaatcacgatgagacaccgaacagcgtcattcgagcaactctaaatctttgaacagtgagtaagttcatctttttcctcttttatgcttgaatatttgattttctgggtttccactgcaaaaaatttgatagttattgaacttgctctaggaaaaccctagaaaatttatgtttaggaatgtgaaatcttgactatgcttaaccatgttgcttgattataacttcattttgatttcaattccaaaatattaaatttcactttcccatttggggctgagtgaaaatcaacattaattttatgttttgaaattctggattgtaaacctcaatatcatgtaaaatttctatttttgattccttggttggtgtaagcaatctgtttctcttcgttatcccggccaaatactcatcttgtgtcctaccttttgtagatgaaccctagtgagttttggggaagcgaacatcttatcgaccaggatcttcttcaacttctgtacgaggatcatcctcatctttgtgctagttcgtcctcatctagtgacggtctatcaaattcaagctttgaagattgcgaaataagtagcgaacctacgccttctctagaacccgaagtgcagcaccatttttaccccggtcaaatcgaaggttaaggttacaaacgattcatctgggagcttagaaaggggtagaggagatatttaccatccaattggacatatattgtctgaccagatacagcagatactttacccgtaggctggccaaatcctgttatgtaggtacgcccattgctacattcgttgtaactattgccaaacataccactcaggctcattcgaggaataggatgatggcacgcactaaacaaacagtgcaaaagtcttctctgtcgtacccacacgtagcttggcttgccacaatgccgagtgcggagcaggctcgacctactgttgaggaggaagatgttgaaggggatgctaaagtctgagagatggaggatcagggcgaggtccgccctgacactccttctgaagctgaggaagaaggtgcggctcggaggttgccctttggtgggtttaatgaaaatggataacctgtgtccgaggccggaaaaattctagaggtcgatgaagactatgttattgaggaatacaccgaggttgctcattagagaagacaaagtgtagcaggagctcggtgggtttctcctccatccatagtgacccaagcaaaaatgaagaatttgcagaagcacggttacttgggggatgtcgaattcttccttccctctccaaaccactgggcaactagtctaagagaggggtactgcgcttggttgggcgctcacactaagtaggatgctatgctgcccttacttccatactttagaagaattgcagattactaccatctttttccaacccagttcactccgaagggcatcaaatatttatccgccctgttcattctttatgcctcaaagtgatggggcgaaccatccccgcacaacataaactggctttttgatctgaaatcaaccccaagcagagcaggtcagggtatttctatttttctcaaatcgagtagaattggctgacgggaaccgtggactctgattttagcaagatagggtaaggatactgtccacactcggttccagcatattccctcatactgctgccctcccatcacattggggctcagggagagggcacaaagaattctccaactgccggatgttgcttggaacatcacccttctggccactgaggccaattatgttaagtgcaaactcttcccagaggactttgtgatgaggcatgtgaatgagaagaagaaggaaaagcctagcaaggttggggtgaccaaacaggagaagccgagcaagaagaggaagaagactcttcctagtgaccaagtaccagtggagcgtgctatcacgattagggaacctgatatgcctgtctggccatccgccccagtggaggaaaaacaaaaagccatcttgatggagcatgaggaagactctttggatgatgatgcctcgtctttacttattcgggtgaatgctcctgcccacgtgtagggaatttttcacttgcatttatttacttcataacatgctttgcatcatatttgccttttaacttttttatgttgttttcatgcagtcatgtccgagaaggtactccaggctttgaagaagagagttggggacagctcgggccagactcccccgcccaagagatttagaggtaatgaggttacgtccaaggagaaggtgccaaccggtgaagtaattgacctctctaaggtattgactattgtggaccctccagtctagaaggtctcaaaatccaagagttccaaaggggggaactcggaggggtctggtcaaaccaaggcttcttcaactgtcgtgacatatgctatgcagtaggaatggtgagcaggtatcatacaaacccaggagaggaacattggactgcagttaagtatattcagaaatatatgaaaagtattaggaattatgtgttagtctacaagggtggtgctttaaatctcgtaggctatacggactcagattttcaggcttctcttgatgacagaaagtctacatcttggatggtttttactcttggggtggagaagttgtttggagaagcgctaagaa

SEQ ID NO: 47474 - DNA, 1156 bp, Cannabis sativa
tgtatgaatcaaattaaatagtgaattgtctcccacaatgatctcacctttttgctcaaaatcctttccattaatttggtgcttcaaacgcaaaacgtaattaacaaagagcttagtctttggaggaagacttgaagtatccaattgtagaaacaatgaaatattggttccatttccttctccgaatccattaggataaatcacaattttcctgctcatgagatatatatatatatatgttatttatctatatatagatatataattttgagaatgaaaatattattctgtatgtaacatatataccatatgtagtctccaccaaaaaatggttgagatgcatggcggtcttgggttatagctgaaaaatcaccaatcttccaagtattagtgcatttaattgggtcttcgatcattgttaaacactctcctttgattgtgtttttgaccacaaaaatctctgccccaaaagcacaactgccattgacaaggaatccattggaactatcattgaatgttttaaggtcaatatatttgataatgccccattttgtcttcattgcatgaaaccgcagtacatttgcattatctacactaatcaaccaaaagaagaattaacagaatgaacgagattattacataaaaacatctatatttgttttgttcattatcctttgcaaaaaaaaaaaaaaaatagcttgctcaatataaaagattaacctaactacgaagatgttttaataaaccagcacgtgtagtaaatagtaagcgaatttcatcctataaaactgtccgtgcaatattaaatatatatatatacatctctccctcataatttgcatctttgagtgatatctataaataattagtgaagtgtaattaatattttcgatcattatttataaatatttttaacattttcagtgtatggatacataatttacttacaaccttaatttttttatatgactattttagtaactaattatgttaggcgaattaattataatttgtttcgtactatattttctacctagagatagagaaccaattggacattatataatataagggaaatttgattttctatacttaagaaaatcaaaaaaaattttccctaaaccaaaaattcaaaacctaaaaaaactatttcttt

SEQ ID NO: 47475 - DNA, 2717 bp, Cannabis sativa
tccaatattcccaccaaaatgcctatcttcgcctataaatatatactgaatttaataaattaactatattactctaataataacattttaattatatatatgcttaattacatttataccctcagacctcatctttgggtgagcataaagaggaaacaagaaaacctaaatggtctcaataaaaatgccaaaaccatttgacagtggccaaaaacacttctcttggcttggtcaaaccgtagtgagtccataataatgagtttagcagtgtacaaatgtatggaatgctctcaaattcctctgtcgaactattttttacaattctccaaatgtcgtgcacatatatataattaatcttcatgaattaatttatacaatatatatagaacttacgctggagaaagaaacattagcacaaatgatgcacacactaattaatccaaaatgatgaattggacttctgtttcctatgtggtactgccattggcagagaataaattgatgatgagaggggctttccaacacaatgaaagcatggctcctctagcgtgtttttctaattttggtagcttaacgatcgtgatgactgcggacttacgagagttgaaggcaaaaattgcaaaataaagccaaaaattagtctgccgaagtttgtgcttttatcgttaaaacaataaatatctaataaattgggattctgttaacctcagcaaaaaaaattattatttttgataatttttttttttttttaaaaacagtcacccaataatttttcataaaccaaattatattttataatcacattttttatatagaatagatatatatatattgttatcagttaagagacaaaatatgaatacaaaatcccttaaacttaaatgaaattgcatttgaaaattactactattatttactgattcaaatcaaatttcaaaatacaataatcaatatatattaaattaattaattttagataatgaatttcatactattaattatgtaaaaccatataatttttcacatcaaatactattttttttcttttcctaatattttttttttattattgttacaacaatatcacattatttcaaattcaaagatgattgcagccactagatcaaaattaaatgataaatcaattattaagagatcaatatgaagcacaaatggtttcgggtaaatggaaaaaaatacaacagggcgagatgacacaactgaggtactaatagccaacaaatttgctattctagacccagaatatgtggataacgaagggtcaaacttgaatgacacatgaagggagagagatccctcaagcccgaatggatagagtattagtttggaatgtttggggggattcatagctagcaaaaacatagcaaagtcaagcggttgatcaactcaaaaaatattagtttggttagtctccttgaaactaaaataaagaataaaaatatgggtacgttatacatgaacttactttcgggttggtgttttaccaataataatcattggttagataaatgaagaataattatggcttgaaatccttctatgttctccttggacataaagatttgtacaagtcaattgatacattgtattgctcaaaatcatcgaaattcaacaaagttccatattacttttgtttatggatttaatgaggaagcaagacgagagatattatggagaaacatattgaaaattgcagaagggattgacttgccatggatagtgattgggaattttaatgaaatcttgaacaatgatgaacgagtagagagaagggcccacaagagaccatccgagagttttcgagattgtattatgcagtgtggtttggaagacctgaagtactcatgatgcttcttcacctggaataacaagcagtagatagatgacaaagttttctctaaaataaattgcgcttttgtgaactcgaggtggtctaatatattctctaatttagaagttgtgttctttccggaaggtaattttgatcatagtcttatattaatatcattttacattgaaatcactttgaagaagaaaccattcaggtattatgatatgtagagaatggtcccggactatgctgaaaaagttaaaagggagttggtaatccccaattcgtggcacttgtatgtatcaattagttgagaaattaaaaaggttcaaacttgtgttgaaatgtatcaacagagatgggttcaatgaagtccacattgcagaagaaaaagctcgatagaacatgctcaaaatccaagagaaattgcaatagaattcgatggatgctgaattactgctgcaggaacaaaaggcacaggaagagtgtgcattaccataaagcccatagtttatttcttgctcaaaaagcaaaaataaattgagtaaaaagtggtcatgagaatacaaccttttgtcgggaatattttactatgatatagatttactaataagtatgttgaattaacatcctaaatatgaatatctttaaaacaatgaaattaaacacataaagagtttaaaaactttacattgattgcaggaataatatgacttcttctgctcagatctctaaccctcgttcctttctgtcgcagagtattatcaagattcgagcctgattctctttctctctttcgggttggttaccaccgtcttacccactatgattgagtacttgacttgctatgtgtggacatgacact

SEQ ID NO: 47476 - DNA, 882 bp, Cannabis sativa
cggagttggctgaggcaataggggttcgagaagcccttagttggatcaaagagaatggatggtagaactcaaccttggaatctgattgcttggtggttatacaagctattaggagcccatttcaaatgaattctatgtttggttcagttatttaagattgtatttctttgcttgttaaattgaagcatgttgctttagtctttattaaacgttcaacgaacaaagttgctcatgatttcgcaagagcttctaatttactttctgatcgtaatttcaatttaaaaaatgttccaactaagttgttaccttatttgttaattgaaattgaaggttaataaaatgattattttttattttgaaaaaaaaaaaaacaaattatcataattaatcaattttaattatcatatttttatagtgatttatgttcaattactaattaataacataaatacttacatgaaacccaccaatagtaatatacaccaccacttactaatttatttctctttctctctctctctctcttaataattgtcaaaaaaaaaactattctcattgtttttaataattgtcaatttgtcatatttttgtgtaataattcatgtatattattaagctcaattataaggcaaaataggtccaaatgtaagactctaacaaaaaataagaggaataataattattgcctcattttttttcccagaatgaataagatttcttacattaaaatatatgtgaaagaagaagatttagctggaaatattcttatctaaaatatatttttattaaaaaaaattgaccaaatctgatttacttgggtttccactttccacaatattattatattctaagataatagaaaaaacagttatataaccatac

SEQ ID NO: 47477 - DNA, 3485 bp, Cannabis sativa
ttgtacacgaactcatcgtgacattatcaaatatattatattaataataaaaataaataataacatactataccacaaaacaaaacattatcatatattaagaaatcaaatattccaaaaggtaaaaatataaaaaagaaatgtttaaaggcactactaatgatatctagcactctcttatatacgtgttaatattattattagtataattaaacatcgagtattagacgtgctgaatagcaatacttatttttatatattatttgtatttctaaataaaataaatgtattatcaattaattaattaattgatgatgatgatgtgtgacactcactaggtgaagcgtaaatgcttggatggtgaagaggatcaagagatttatgaaactgagcttgctcaattattctctcaagaagatgaggtatgtatacatagtacataaaattaattactatgtaatgattctataaaaatatatttaataaaataaaattatatgttattttgtaggtgaagacatttttcgagaaattagatgaagagcttaacaaagtgaaccaattttatgtgacaaaagaagatgagtttgcggagagaggagatattcttaacaaacaacttcagattttggttgacctcaaactaattctcaaagaccgccgccgtaaaaatttgtccggccccgccaagctcggctcggcaaatcctccctcctcttggtcatcttctccccggacctccgattacaccggtaattatttaattaattaactatatatctttttctttttagtattacatatttcttatttttttaaaagaaagtattaaatatttctatttcactattattaatgaaatccatgaatattatataaactataatattttaatttcttaggattactgattaattggttcttaattaattagcgagatattattgtttacaatattttttttcttttaaaaaaaaacattggagtgtttgaattttgattacggcggttgaccttgagattaagtacgtagaaagtcattcttaaatttagttgtcaataatatatgcaatgttttttaaataagtaagacatactgtaagttatgtacgaattaaagtaataataaaaacatttcatagagtagtatatttatttatttaattaatgtgtttttgaataaaacttaggtatctatatatatatatagccaaatattaatattaagcaacaaaacaatactttgtaaatgagtcaaattaatattaccggccgaaagataggtatacaaattatattttatcggtcaaaagaaaaagaaaaaagagttgtacgtaattatatgaggtcggtgtcggtatatatatatatatatatttatatatatattatagaaacatatggaaactttttttgaggcttaattatctttacaatatagtcaatattggacagcttaaaaccaatgattaatctataccgacaaaaactccctctctatatatatgtttacatcttatgtgttttataattcagagattatatatctgcctatatatatctatatttctatataaatttatgcattatgtatatacataaatcaaggatcgataaatacatattcaaagtgtccccacctcaaaaatcaattaagtagttattatatactgtttatagttgtcttattttttgatgagttcaattaagttgttgagtatatgtgtttagtaagaaagatactatatatatatatttctctctatttcacacttacaattgggttttgtaatttaatatgtatatatgttgatagtgatttaatttgtcagctacacatagatgtaggtagattaattgtgctatacgtatacgtacgtacaccacctaataatcattacattataattaattaatcataaattaattattaatatatgcagagagtgaaaatgataacgagggaattggaagaatgaataatagtaataatagtgaaagtagaatagacatatcagaaacaacagaagccatagcaagtcttgagaagaatggtataaatttcaccaacttaggaacaaggaccaaaaccaagaaaggaaagccaaaaatggcgatgaggatagatattccagtcacaacacccactcgaacaatctcagccctaacctcaatgctttgggaagatctagtcaacaaccctaagaaggaagggcatggagagtacatcaataggaagaagattcagtgtgctgagaagatgattagaggagcttttgttgagctctatagaggccttggtttgctcaagacttacaggtatacatatttatatatataattatattataacttttctaattaattacctatcttaatttcatattattaattattacctaattaaattcattgatattgttttggcagcaccttgaacatggttgcttttgtaaaaatcctcaagaaatttgataaggtaaatattaagttaattatatatatttttaatgtaggtagaaaatccaatataattaatatatgttatacatatggtgtcatgacaaatataattattttttattggaaggcttttttttattattatttttttggatatatatgaatgggagtcttctccttcaagagtggagagtactatacatactgatcacatgaacaatgtgaaattctaacaaactatttcttttttttttaaaaaaaaaaaataataaagataaataaatattacgatactttctgttatccaaaaataaataaacaaatctcatgaatataggtagccccttttataaattattaattaattgagttggattttacaatttctattttgaagataatatatatcattaattggtacggcttttttttcaatgagatagatatatatatagatatgaattaataattaattgatcataaaatgaatatgaaaacaatattaatttaacaggtatcgaatcagcaagcatcagcaagttatcttaaagcagtgaagagatcacacttcattagttctgataaggtacaaacatttctacgtacaactactacttttatacacataaatacataagtatatacgacttttatttttaattgagagaaattaatgtgtacatgaattgatgaaatgataatatcaaataattaataattggggggtgtaggtgggtcctcatgcatgatctcctccacaatcgtcaatccataagattgtgttgttgctgttgtgtcttaattaagtatatttaaatagtgttaaactatttgaatttgattcatctttcatccattatatatgtacgtcatgatttaattactttatttctttgacttcatctccattggttctgcctaagaattaaataatacaagtgtttcccacctccttaattaattaacaagtttatttatgtatattattaaacatgcacgtacagtagagaatggtttcattt

SEQ ID NO: 47478 - DNA, 2414 bp, Cannabis sativa
tattatattttaattaagaaattgtttttttttttgtaatttttagtgttgatggttagagtcgaaaaataatataattctaaaactactctattatttttgtgttaaactaatataattatagtatttatagttagagttgctattagaaaaagacaaaagtttgaaaatcttaatcttacaaaagccaagaaaatgtttattccttcttttcttttctttttttttaatccaaaaaaaaaagcattagtgattagtggtattggctaaggctaatgatgttgtataatatgacactttctcccatctcaagtggaccgaagatgtcaggaccgaccacccttggtctaaacttctttccccgcttttcttccaaacccatcacggtttctccctcacttgcccttttccccacatcaaaatcgaatctttcaacttcttttcttctctccaaaggcctctctcagtgtcggaggaaactcacttacttgggtcccaacaccatgtttgaattgatgaaagcttctgcttttaggaacggtaatggtgaagaaggtgttaaaacgattgaacaagaagctttagttggagggtcttctgggttgttgagtaatgggcttgagtcaacccttaatcgactggttagtgattttgttcattgattagtttctcaatcatagctttatttatttattggttattagagttctgggttccacttatattttatttatctgatagattaagcatacttatattttgattttccttatcttaaatgaaaaatatggctaaacagatttgtggtgctgtttctcttgcttttattgtgccttaaattctacaaatttatttggtggagaagcccaaaattacactgtgagatcgttttgtgaccataaatttacattttgagaccattaatattggacagtttaaattcaacctggttattttgcaaatttaacaattttatgttgtctggttgtcttagtgtgtagattaattagtaatgaaagttgagattggacttgggctctcatcagaatagcaatatctctttgtgacataataatgtgtatatgaacatagaaacttttagctgattagcttttttggacagagtaagtggattgtatctgggatttttgctgctgtgcttcttgggaggcatgatgcagaagccgtttggtttgccatggctatcttttgcattaaaacgattgaacaagaaactttagttgggtaagtgattttattcattaattagtttctcaatcatgggtttattagttcaatttattggttatttctaggttatggctaaaaagttgtgtggtactgttgtttctcttgcttgccttaaattctaaaataatccatgaaaatccagcagacccaaacctacatttgattcaaaaaagtcagtgaccaatctaatcttaatggttataagtacaactaatactcttcttcaattgaatataagggcgtaatgtatattaagttcaaatctaataataagccaaatattaggcactgagagatctcttaaagtaccaaattaattatctaaatttgtttcaagagaatcatcaaatctaggtttttcaaataattatggaattagtaattaattactatttatggaatttgttcaaaatgatagagggtaactctgtggtgcttcttctataacaggtattaaggcattaaagaaatcttaagcttaaacttgagtattacgtactgttttgcatggatgaatatgcacttatattttttttaaaaaaattaagcttttatatatatatatttatgtttcaaacagaacatatatagtataagatatatttacaattaattatctgtcttgtgctaaacaaaatatatatgatgatacctcttatttttctaatacatgattcactgactcaatgaaaaatattcgattatgtagtttaaatattttgattctattatatatatatatatatatatatttcccggaaaaaaatgtctcataattaaacatatatatatcatgcattacatgtttcctagtaaaactacttttaaagcccaaactactgtaatgtttcttgttcaactctctaatgattaccattgtgaattcaaaactcactaactctgaaaatctatggaaatcaaacaggcccaaaccatattttgtaaatcttcaagaaagttagggagcttcgtcagatgccgctgcatttgcttaaggtcaaacaaagctcatccaatcttgatggtatgtacaattactaaatttttttagtatgattttacaattaaaaattaatatttggtgtcattttcatttaatcttcattgaattgaactttttaagctatccaatttagttttcatatacatatttttggtttctt

SEQ ID NO: 47479 - DNA, 1390 bp, Cannabis sativa
tttgtagaattaagtataactaaatatgtaatttgagtcgcgtaaaaaaaaatatgtaatttaagtaatgttgtgccaatatctcttaaatagaaacaaagttataaaaaaaaattatttttaaggtttgctatagttttttatcttttattttgattataatattaattttattccatgatgtgaagtcaaggtaggcataaaatagtatttttatttgttactaacggtgtattattatgactacaaaaaatcttacttttactcacagtaaaatttgtgtctataaataaaatagttgtgactaattacaaatcaacatttctatattgtaactaaaaagtctatgactaaaaagtattagtcacaaaaatcacaaattgttgtgactaaatatatttttagtcacaatacttgtgactaaaactaaattagtgataacttgtgtctaaatattatcttatagttacaagtaattttttattgtgactaaaagtcacatttagtgacaaaaaatttgtgttgtgactgaaaaattgtcactaaaagtagctgttttttgtagtgtaccttaagaatacttattgtgttttatagtggttgtttatccaaaaagttagcttgatgacgcggacgctagttttgacatttggcatgaagaaaacaacattggggaccccgtatctcaaaataggacagtgttagctccacattgggggcacttaagtaagcaccaagatccaagaaagtcattgttaagtgatatcattcaataaacaagtcaccatgatcctaaaacaaagaaccatgaagttgaggatgtcacgtggacatcccagagcgaacgatgtaaattatcgtcttctggtctacatctactagtcgaatgtaggctagaatgtatctccttcttttagtttgtagcttcctttccttaatgcactgggagttgagtaaggactcacagcttcttgtttgagagctagtatctgaatgtctagtttaggtaagtattaaatattctctcatggcttctcttaagcctttctcaacctagctctaacatcagttctaggtgcctaagttgacatatgtgcgccaactcgcattagttttggttcctaccaacttcttatgggcaattatgcttagccattgtcctaagatacatgagagacacgccccagccaagtttcaaactttggagataagtctacgagaaacgacacccaagcacaaggaagccctaatgggcccccaaattgaaatctagtcgatctgggcgcaccatggctagagtttaggtttttggtgttggaatatattttatcaggacctagatttactaacaaatattattttaaaatcttaaatatgaacttctaaaatg

SEQ ID NO: 47480 - DNA, 1768 bp, Cannabis sativa
atatatagatataattttttgttggtggttttaattaattaataaaaatataggaaggagaaatgttttcaaaaaaagatggattgccaaaaaggccatttcctaatggatggaaaggagagagtgggctttatgcggtggggttcacaaagcgtggactccttggggcatcaatggacgccaaaagaatagcagaagatatccaacggtgttggattgctaacacatcaactacaactacgacctatagctacttgtcataataataatcatcatctcacaatatataaatttttatacccaaaaacaaaaatcaaaaccatattattttgacttgagacttagaggccaggagggtgcaaaaatatgttacaatttttacatgattatatatatatatatattgattttgggagaagaaaataaagtagcaaaaattaaaaaaaaaatgaaaaggggagagatgagttatatatatataaatatatctgtgatcctttttcatcatgtgtttccaaaactgacatataggttgggttggtttggtttgataggtagagaacaatattgggtgggaggaatatttatatatatatatatatatatatttatgaaattaattgacgtttgagagtgagctgagcttggggacctcaactgtacatcatcttgtacaatattgattattattaatgttcacactctgaagagaggtttaatttggtttttgtgaatttttttttatacctatatacagtaatgatgttttctctttgattaattagttgtaaccctaatggttattgtatgatttatttttttaatttattaaaatattctcccattatgagtcggccggttaattgtttggtgtcttttgtcaaagaaaagaaaaatgttggactttcttcttctttttatgaagaaaaaagttaacggcttaattaatcataataatgaaatctacaatttttttctgtccattatttatatgtacttatattaatattatatatatatataactggtggcatgcaaagcatcacggtcgatcgaaatgatttcagtactaattagcagaagattggaccaacgcaacaccaccatatatatccatatataatcgatttctgagaataaattattaataatttacatgtaaatggagggttggactgttagaaaaatatatatttcaatgaaataaatacatacgatcaacatataattgcaactttaattattgccagaaaaattgcaaagtcctaatatagcacgttacgtgttcgtgtaattgttatacctagttttcacaaaatatagttaaggataactttcaccaagacttaaaattaaaaccaaacggggttaagatttgatctacggactgtacatgatagtaccctatttgagtgccccatggtacactaagaaggccatgcgagcacgaccacgcttgcatcttaggatttcgaacctagggtttcatgaattcaaagtaaggtttttgctccgaaaccctaattaaatgagaagttcaacaagaactcaactcattgagatacaaaaagaccaagacttaaaaatatagttaaaattggacaagaacactcccacaatagtgctaggcgagcattaccattttttggccaaaaaaatggcactgctcgcctaagaagaatggtgtaaagactcagttttgaccgaatcaaaaagaaaaaaaatatatattaataagagaaaaaaatccttctctctctctctctct

SEQ ID NO: 47481 - DNA, 1387 bp, Cannabis sativa
  modified_base (1304)..(1310): a, c, t, g, unknown or other
ataaatatatatacatatatgttatttaaccttattcttaaacatagttgaaaatgcatattaaaaaaaggggttctagcctattgtttacaccaaattggtttaacttctctaataatacattattagcacagtcatagacattgacgtaaacataaacataagctagtagtaatctatttaagaaatcagttagcctattgtttataccaaaatggtttaaataagtcattctaatctaacttattatttgacttaatcaatatctatatatattttaatttctagtaatacattattagcatagtcatataaacatagacataaacacagctattactaatataccgttaacaaaaataaagtctttagatcatatcccactctcaactagagcaaaataaatggatgaatatcttatattcacaatgcaaaattaattcaacagttttttttttttttttttttaatataaaagaaattaattccaaagcactttcaatgagtgatggtaaaatagatatgaatctaccatacagaacaagtttactatgattaaatagtaaaaacttgctcatttactaaacctacacttactaatggtgtcttcattaaatgtcatctactctataaataatatagtataagtagatatattctcatacttcatttataaattcatgtatgatgaaagaaagatattatcttttctaaattctctccctataattaaaagtttataataaaactttagacttgtaataaaatttgagatcaaaatatatttatcactagaaaacataatatgaggaccgaaaataaatataataaatataatatatatcctataattctttttggttaacaaattaatatctaattaacatgtgtgatcaattagtaattaatatatgaaaatgacctaatataaatatccaaaaccatcagttttcaaaaaaaaaaaaaaaaaaaatccaaacaagcacatccaaaaccaatgggcctaatcaaatccttaagtggaaaatcaaatcaaatcctcccaaaaaaaccaccgttggtttagtctaatcaatgtgaccattttagatttgcaactaaagagtagaaccctactatttagcctgagaccaccccgattcacgtggcggatgcaggttggtcggcaggtcaaaccatagatgaaagtttagggggcatgacttgtaacatgtcaaagtttgaggagcgtgattggattgatattaaagtcggaagagcatgatttagtacataaacaatcactaaattagtaaaattgaatnnnnnnngacaaaagtccttaaatttgataatctcaatagttcagggagaatttttaattgtcagaaaagttcagggggcatga

SEQ ID NO: 47482 - DNA, 1099 bp, Cannabis sativa
tttggttcaaaataataggtagcaaacctgagaaaatatgtgcttgtaaatagctaaggacatataatataaaatcatagatgagttcaatcattgccagttgtttttgtgatgagctcattaatcttcttgtacagtgagaaagtattcaagtccagctttattggtctgtccacaagagtttgctcttctctaattccaagacctacaaaaagaacccaactaggattctattagtataagacaaatcagctccaaactaagcaatactgctaaaaagactacaaaagcacaaagtactagttacttgggcagtcttcaatagtgggaattatgacccttctgagaagaaatttgaaggtacttaaaaatcactctttttttctcagttttaggctatacaaaagtaatattagctcaaatcaattgttgtctgaaatttggttcaagattggtttttggaaagaaccaccatctttctaggagctttatagtatgagaatttttatatggaatccattgcttgcttgcctgagttgaaagattgtttggcattaggggttgcaatttatgttcgtgggtcgtgccatatcgaaacttaggtattataagtaaatgtcaaatccaaacccgacccatttattaatcatgtcaaaaattaaaacccaaactcagctcctttaactaaaaaatataatttacatgtaataaatataataaacttaagagtgtatactctttcataggtcattacatgtcattttcgagttaagtgtgtcaacccgaaaatgaccaaaacctatttaaggcaatccaaacccgtttattttgtgcaggtttcgagtcgtgttatcgtgtctgacccagattaccatctcatgctagcatagaattgattaaatatatgtgtgtgtgtttgtgtgatgttattaaatcttcttattgtcgatggaaagtgtggatttttaagatagtattagcctaattactctttggttcagaatgataggtgcaaaccatagaaaaaatatgtgcttgaaaataggtaagggaatataatataaatcatgatgagtgcaattcttttagagacgaactc

SEQ ID NO: 47483 - DNA, 996 bp, Cannabis sativa
tttatttttatttttctgtgtgaaattgaaattacaattactattactactatactatgatatgaggctcaaatttagttaacgaaaatttagggctagaaacatttaaggttgtgtgatttgcaggtctcgagtttaactttgctctattttttcaagaaattttttggggtattataatttgacaataccatgtcctattttaatccaactcccaaaccccttagaatcaaactatccttaattacaggtcgtagttttaagcctcaaattctcaaacctcagtctatactaaaatcaaatgatagaaaaattagcaagcacctaattaggaccaatcaggaagaggtatacacctattcaattcttgaatgaagtcatatatagaagataggcgtcattgtcagcaagaagcagcttggcctgaatcgctcaacttagtaaatttacccttagcaaggccattatatttaccacaagtcattgttgcttttccaccaagttacttagaatttaaattcatggcttctaaagttcgcaaatccaagatgccctagaatcatactgttacatttgaagcataaatgatcgagtctaggtttagataatttttccattatgttggggatgtttaagatcttatgacattaggaacgagaaaggatgtcacattcgctcagttgcacctggtgaatttagttgtttccctctagaatgtgtcttaaaggacgagggttgcagcaccagcgagtcttcaaacaatagacagggaacactgaatataagtttgaagagttgggtcacaaacggtctagaatgtcggtggagccttgattttattttcagatagtaaagtaatctgaacttagtgggatgttataaattattttagaaatgcactcaactacttattttgtttttaaatatgaatgatcattcgctttttgcatatttattgtaaaatatgttgtatatttctaaacagttttgaatctt

SEQ ID NO: 47484 - DNA, 2147 bp, Cannabis sativa
gtatccgtgcatcaagagcccagggaaagaggaaggaaaaatcgtaaacatcccttattgatttaagatagaagcttaacggcatgcatggtgaccttaggaatcacctggagagaaagaaacaaacaatactagtttcagagggcgctttgaatgagagaatcctggctgaactctctatcctctgaaaagacacagctaaactttctcgaaggcaaaagggagataattcagagtccgattgcaaagattgggagccgtgtgctagaaacatccttgaggcagagctccccaaaaattttaaaatgcttgaaatgatgatgtacacaagagacatggaccccagtgatcacctgacccgattcaaccaggtaatgagtcatgagggtcagtaatgacgtgaagtgtttgtgttttctgttaacattagggggattcactgaggagtggttcaagaagctagaaccataatgaataagttacaagtcagctttcgaagacagttcgtggcggctaggaaaattaacctcgaagtaagtgccttgaccaacattaaataactgccaaccgagactctgaaaaactttataagaagattcaaagaagaagtctccaagaccaaaaaagttgatgatggacaacagttggctctactccaagttggaatacgaatcgaaactcctttctggaatgaactccagttggaatgggccactagccttcaggactttcaaaagagggttcagaagtacatcaacttaaaagaagtgcagataacaacctttggaggatattatccgaccgacagaccagggtatatgccaggaacacagttttcaggagctactctcccagttacaccgtaggcaaacagagtacagttttctggaacactagggtatactcaatctagttttggggcgccagggagtaatccaactcccgaagcgaatgcacaataccctgctcaatctgccccactagctacaaatgtggcaggtactcccaaacctctcggagtaagagatcctcaaaagagagcactcaaactgaggataagaggcaaagaagaggttacaccccccaatatacacaatatatggaactcatggatacccaagaacgagtatactttgctaccaggcaaaatactcattatcgaagaaaatatccaatttgatttaaattcattattcaaatttaaatataaatatcatataactgattaacagaaatcagttaaatctttttattttattattatctttttaattaaatagattatccaataatatatttattttaataattaaaagttaattaagtaatttaatttaaattattttaactaataaaataatcaaacaaaattagcatgacctttatatgtcatcctacatgtgtgtgccatattttaaagtccaaaattaatatgttaattttgccataaataagatttattatttattctgccaataaataataattaattaattttttttgagcaaataattaattaatttttattaatctcttattataattaaaaaataaaataattttttctaaaataatatatttctctctttaatattatttaagaataatattatatttaactaattgatatagtttatttaataaaactaaatagttaaatactattaattatacaattcataattgtcataattattcaaaacgataatttcataaactattattttgcacttaagaatttatttctcatagaaattaattctcactcaaaatttactcatcaaataaaatatttctttgtacagtgttgtatagaggtgatttgggaccatggacctatatttcgaaactccaataaataattgattattatcgatctcatcaatagaataatcaaaaaattagtaacaacaaacaaacaattaagtaaaattacttgaattgaaacataatgatagtaaaacaacaaaacctagggctattcatcgaaactggaaaatcacggtttaaatcccgaccgcgacaatctgaactactgtagaccgtaatagggaaaatcatttttggtggcttggttaatccggaccgtttaccacgtaatggtttggttgtgattcgtaataaatagttaacggttaaaccagacc

SEQ ID NO: 47485 - DNA, 1681 bp, Cannabis sativa
taaaataatttccaacaatttattcactgcaattaatgtaagtgatctattacttatatgtgtttaattatcgttttatatttttcatctttaagatgttatattataatatttataatcaacatacatgattagtaaattaagatcttggtaaaataacttccaacagatggagcctcgaattacaacggaacaggagtcggggtgttaatgacgaccctggaggacataagatgtattatgctataagatttggttttaaagcctcaaacaacgaagccaaatatgaagcaatactagcaggcttgagattggccaaagaactaagaattactcatacaaatttttagtgactcacaagtggtggttttccaagtgcgaggagaataccaatcaaatggaccaaagatggtggcatatctgactagggttaaaagctacctggatcagctacaacactacatgattgagcaaattttgagagaatagaacgctaatgttgatgcctttgcaaagttcacaccattgagaatgttcaagtgtggcaagtggggaatgacgaaacctcttggatgacgtcttacatcaaatatatcattgcctttgaaaaagaaggaaacacaaagaattatgtataaagcgatcagatatgtcttgatggatggagttttatacaagaggagtttttccactcctctcctacgctacatcaaggaatgcaaagcacaacaagtgctatcagagatacatgaaggagaatgcaggaaccacgcgtgaggattctcgatgtcacgaaagacatttaaagtaaggatactactgtcccactttggaaagagacgttactacctttgcaaaaagatgcgcaagtgccaaagacatgctatcttttgtagacaccctccagccgagctcacaagcatgacaagtccatggtcattcaccatgtggtgaatagacttgattggaaccttaccaacgagaagacccagagcaaaatgagagaagccttacactactacaaaaagtactttttgtgtcggtcaacgagtctcaccaaaatgattgtccgaggcaaaaactgaggggagattttatgcttcagattgtgattgaagctaaaaataacaattagcgtcgggatatgatgtataaccgaggtaacatgtgacactttaaaaaattatcgtttgcattttacatcatcaacttctacattactttttaattttcttactttgatttttaactgagcaaggtacctctagtcttgtgtatcacttaagttattgataatcgtacttgaacgagatgattaacttaaaagaaagaagataaaacaaagtgaatagaaatttcactgttgacttttttttttcaaatgtaaaaataatgatatgataagaagacttattatgtttttagttctatagattttaactattttatttaagttgatcgtggtgataccattggaagactacttgaaggtcatattagagaagataaatttttaaattttatagtgagtggaataattattttttaagtttatgcatattaattattttgttaattagtattattttttaattttatatttatctagaagagtttgaatatcttagatattcatccatagtgaagtaggttctgggaataaatgtactgcggtcggatg

SEQ ID NO: 47486 - DNA, 806 bp, Cannabis sativa
taaattgatatagaaaaatttatacacattgaaatagagttttacttagggcacaaagcccaacagttcacacattaatttgggaaatattgaatttagtagtttgtaactttacacttgaatgatgaaatagtataatcttgttaggttgtttttaatgagcaaaatagaaatattttacttattttgcataactttttagaattggtttctttatttatgtttttaaatttaattttgtggtatttgatcctctaaaccaaactaaaactaacttacctacctttaactagctcaactaactttctgttatgttagttggttagttggtgctggttttacacctagtttctagtggtgagttgtacctatcaaaagggtattcttttcacttctgaagtagagaattgagagagagtttagagaatgagtgcttagtttgctaagttgtaaaatcatgttcttaaagaggtcaagaaccaagggtgtactcgtaggattgagaaactgagactgtttctctagtgtgtttttctagtgcaaaagagcattgtttgctttagtattggtgattgtacaaactctcttattctccatattaatgaaagtattgatggtgtttctactgggctttgtgccctaaataaaactctatttcaatgtaatctttaccattcaattatcaatgaagaaacaaaagttgtaggaaatcaagctagcaattaggtgtaaatttacatttaatgtacttttttcatttactctaatattactaagtgttcacattgtattacatataccctttg

SEQ ID NO: 47487 - DNA, 1535 bp, Cannabis sativa
cgacaccagaatgcagttcctccactccttcctctagcaacagctatttcttcatcaatgtaaaaccacacaaagaaaggatctttgttactcggttctctgtcatccttttcgccaagactaatctccaatggtttcaaaggtccaatttttatccgaatgctctcaaagatgaaagcaagaattcttgttttccatgaaagtcttccttcaaaagtcaaggctccaattggcccaaggtatactccattctcaattctttttccctggtaattcagtcaaacaatcattagagagagtctctctttaaacttgctccaaattgaaactattaacaacataaagatcaagtctttcatcacaagcataatctaacaacaaaggtgacaagatcttaagtcttactgcagcatcaaacctctgaacagctgttagagggaaatatcgaccgcctttcaattgtttctgcaaatcaagtaaccgaaaagtcaataagattttttttttaaaccctacactatttgagaaccaagtaactataacaattgctatgtagatactcaagagggactcgaaactcagaccttgtgggagcaaaccacatatgcctgaccattcgagttaaacccctcttcggtacaaaaaagaaaaactcaaataaagattgaaccaacaaatgcatgttatgaacacaatgaacataaatgtatgaacctcagcagtaaaaatgagcatccatgttctaccaggagattccgaaccgccaagtgtagcaagaaaattagagggatcgattttcgccttttcaatgacagaaaaagcagataggatctcctcttttggtacttttcttgtttttgcagcttccttaagcacttttacactctcctcaacttccttaattcacaacaagaacaacaaaaactgaatgaaaaaacacaaataccacaatatgaacaaacacatcaatgtgacaatgaactataattctgcttatccttgaaaattttcaacctgttaacttcattaaaagtaagagtcatcataatatcaagtggataaaccaaaaacacaaatcactctactcttctcaattccattaattcatgcgtagatagcggcataattacttaaagttttaagattgtaagcggcataaacccaatatttatttttagcgacataagtactcaatgtttgtaaaactgtaattttgtaagtacaaactccgttttaaatttatgaaaggaacacttagaagtaactggtactatatatttctatctagacccaataatttagaatctatgtggcctatttaagaaaataatagagtttgtactgacgaaattaaaaaaaaaaaattacagttttacaaatatttggtacttatgttatgccgctaaaaataaacgttagaattatgacacttacaaacttgaaattttagatacttatggcgctacttacccttaattcatcgaaaaggaataaaataccagtacagttcaaaacaaaattcaaattcataaaat

SEQ ID NO: 47488 - DNA, 1547 bp, Cannabis sativa
actcaaaatcggtatcagttcaggacttgcaggaagcggctgagcaatatgctgcagccaagacaaaaaggctcttagctagtgaaggcgatcagggatcggcaagcacgcctgtacctgaacgtgtgacagggacaaatggagctcggtccgttttggtggaaactaacctctgcgacatggaaagtagccaaatagatatcccctttgggaagccaccagggatcacgacaaaggagagttcagaccaaggattatctaacaaggttaatatattgggtcaagagttgttggactctacaaataaaagcagtgacctggttttgggaagccaagcccattgtgtcgattggccctcaaacgaatgttgggctcagcccaaagcccgtgaacttctcatgggggccctaactgttgataagtatcacagagaacctacccttttcaaccctataattgacattgaggattttagagttcaggagcacttgtatgggcctaggaaaaggaaagccacggatggattaattttcaggcccaatacaaaaggtaattcatcaccaagctcctctaatccagtaaaccaatgggctggaaaagagaccaattatccctcttcgtcgaacacgattgttgaagacgattccaaagtgatcttcgactcacctgcaagtctcactggggtgccaaccgtaaacaactactccccaggatcccagggagaatcgaaacaacctacaccgagaagaggaagaaaacccaagactcttgggaaccttgtcgaagatggtgtccgaaagagaaggggtagacctccaaaatcccaatccccgctggctgctacacctaagacattcaagaggggaaagaataccaactcaaagctgggaggtaatgcttcaactagcaacaactgggatgacagaaatttcgaccttaaggtaaatttggataaccatttcgttattgttgaaaaacaaagaaaaccgagtacaagttgtacaattacagaaatgattgaagataaacctttgaagaagagggatgatgccaatgtggatttttgttttggggccacggagacttgcccggaaaagtctccaatgtcgccatgaagatcttagcttggaactgtcgtggactcgggaattccgcgacagttcgtcaactggcgcacttggtgcgtcaccacaatcccgatatgctgatactttcagagactaggctcactcttaataaattcactacagtttgtacaagactcaatttcttagactttcattacgttcctccaattggactctcgggaggtttggctatgtgttggatgaaaggggtacattgcaagatacaggactcctccaagtacttgataattggtgaaatttcttctgaccctccggggattccgtggaaattattaggtacttacgggccacctacgagagttgacaaagagcaattttgggttcaaatgggggacattgttatgaagtctcaattccccttgcttttgcttggcgatatgaatggaactctcaacgaca

SEQ ID NO: 47489 - DNA, 1602 bp, Cannabis sativa
gcgagagagatgcttggcttttataaggaggctattgaaggtaagcaaagcaccattgttttatagattctaatcgaaacattttattcaacaaaacagaatcgctgttggggtcgtcattttttcctcggtgttttatcttccaaattttacgggatctaatgtaactttcaacgttgcagactttagatacgcacttgttctcgagccaacaaacaaacgagcagcccttactgccgatagattaagcaaggtgtttcagtaagtaatcagtcagttataacaaaagcttctctctctcgggaagttttcgctatgcgatttacgtgcagattcttggcctgggattgaagaagattgccatttataaatattagaccgaaactgcagcagcagatgaaaaaggggttgcgattcttcttcttcttcttcatgagtaaggcctaaaatcatttttcgttgtattttcgaggttcgataaaaagccatttttaattctctagctgctgattattagttttgaaaatccaattttgtttactttcattataatatggatggagttgtaattctttcagttgggtcttgaaaggtttttctttggagccaatgcatcatcatcatattatttgtgaacaactttgtttacataaagttccttcctttgttctttttgtaaatggtttagttattattgttattattatgggttgagtttgttgctattcccatcttatttttgataacctatgggaatgaaatttgtaactatatgttaatttaggagacttatattaagattaaagaaaagaaaagaaattaaaaaaaaaaaagaaaaagggaaataggtaacttttggtgtataataaacgtttgagagttatgtttataatttattgagaattgcatttctcaaatatgtgtataataaaagtgcaaggctagaaacacaactcaaattctacacactaattacacacttaaaaataaaaatggttaatatttaataatattgtgtgtaattagtgtgtgcaatttgaatgtgtatttagcattataagaagatacttcatcgtaatgctaagtactaggttcttcgtaacaatgcttttattagaaaaaaaaaatgctatttgaaaaattataaaattcgcatatataatttgatgtaaaaatagagttaaaaattatagtacttgtatcatgaatattcataacactaatagaattggcactgtcacaactagacaaaaattataattttattaacattagaagtatttgaggctaaaaaaatgtcacaactcaaaaattataattttattaacattagaagtatttgaggctaaaaaaagactacttacaaaatttagtgatttatgtaaattttattttttaaatagtgggacaatatgtaaaattttatttgcatcctaaaatttcgtaaggatactttattttaataatttttattttacataaaatttatatatttaattatattatttttttaaatttttttttctcccaattaattttcttaaaaaaaatatacatatcaaataaaaataattatattttaaatactataagaaaataaaa

SEQ ID NO: 47490 - DNA, 1379 bp, Cannabis sativa
tctagaattaacacttaaagaaaatcagcattcgatccattaggaaagtcaagtttctataattgtaaatcattttcccagccatccactttattagcttcccaaaacagtagttgtaagaaatatcttctctgagaaactttaatgagtgaatcaaagaaactaataacatgaacaggagttcatgattactcaagatttaggtcgatctactattgatcatcattatgataagaattaaatcattattgtaaatgacatgttagataaagacaacttcattcatatcgatcattgtcatatataatctctattatatacaacaccttctctttgacgtcatactacatttgtaagccaaactaagattacttgcaatgaaaaacaggcatcaacgaactgtacgatcaactattgattaaagattctacaactttaatatgttgctgactgttttattcatagctaagtggtcttagttttttgtacagttacaaatatttatatataaattatccaataataatattaataatttaatattcaacaatatatcaaaaaatttaactctttattaataatcaaaaatgtttttacatgtttttgagggcataaccctaacataaaaatcgtaagactatagcatagggtacatccttcatttcctttttcttcttcgaactgttcggacactattccttcaacaaaacaaacggtcccctaatagaacagacgtactctttgcatcttccatgttgagcttcaaattaactttcttgatgtgcccggactgtttcaaactgatcgtcccttctttccaattctttgaaacttcaataccgagtatcttttaaaccggtcaaagctctttcatctcaagttctcttttaagattttgatcactaatttatctttgcccatgatgagcatatcatccacataaagtagtagattcatcgatgtagattgctctaggttcttaaaatataagtattgatcatatgctgatcgtttcaagccgatttgttgcatataaatatcaaatcatttattccattatttttggggctatttcaaacgatatagggacctattatgcttgcaaactaattcaactcacttttcttcctcttaaaacccaagtagttgtttcatttcgatctcttcatccaagaatccattgagaaaggaagatttaacatcaagttgttcaacttcaaactccatttgagctaccagagataacatcatcttattgtcatgttctttaccacaagtgagaagattttagtatagtctattccttccacttgagtaaagcctttagccactaacctggctttgaaccgcactgattcattctcattgatttcctcttt

SEQ ID NO: 47491 - DNA, 1315 bp, Cannabis sativa
  modified_base (1257)..(1264): a, c, t, g, unknown or other
ataatccgaatatacttaccagttatactatatgataatttttttgtttgaattgattatattttattcataaaaaaattatatttttttaagatattattgagttgaattaatggctataattaatatatttttttacaaatataaatttgttatttattatattttatagcatataatttggtattaaataaaaatttatttattgtcataattaaatgcatgaagtaagatttttctaaatactaaaaatcttattttcttagtactcaaaaagagatatgaattcctaataaataaaagggatagggacgaaagaaagagataccaattatttatggaaaaacaaaaatttcctgatatgccagagttgtacagattgtttatgctttttttttcctattttttccattaataaatttacacattcttccatctctgccttgtatggatccccaacctcttcttctacatatccaagtggaacaccatgtgcactaaagaatataaaacactaaatattgaatatgagtttcaaacttaaccaaaacattatgtatcatgtaacttaaacttatgaaagtagaggtctcgttcctcaagcattgatgtgactgtctccaatcatatttttttttttgcagagtattgtctctaatatggaacaacaattaatgcattagccttcataccaaactcaatgcaccacttaatccattctttccacatcgaagaaagaatagtaggtccttacattaggttttcgagaagtggagaagaaaaataataaaaaggattgtcatagttgtgatcatgaaaaatataaaacaaaacttttcatggtgaagcattttttttatacatctcatatctattacaaattagaatttttgttagagcaaatttcataaagaataggtctgtatgcttttttttttttaagaaagtaatatttaaaagttttttttttaaaaaaatatatgatgtctcacttgatttgtgcgtttttcttctttaataatagtcataaataaaatgcttttttttaaaaatagttttatttatttaggagtgaagagaaaataaaaaaataacaaataaaaagaaataaccgccatgtcatcaggtagtaggttaaaataagaaatattaattttaaaaattagttaataattataaatatcaaccattagatttgatccaatggctaataataaaatacccattcatggataatacccattaagagcatacccnnnnnnnnatataaatatatttatatatataacacacatgcatgaactaataagtttgt

SEQ ID NO: 47492 - DNA, 1685 bp, Cannabis sativa
aagaaacttttggttaatgttttctaaaattttttattataatatttgagtgcacatatatcatttctcaaatctttactacactttaatgttaattggaagggagtgttctctcgtcctcatttccgtttaggattttaattttcatcttcgcttattttctatcgaaaacgggacaggtaattccctaatataaaaatgaaatttattttaaaaatttaaatgtataaaagttaagatattacacattatttattactcaatatactacttattatataaaaattaaaacacaacttaaaaattataaaaaagacactaatatattaaaaaatacaaaatattaataaaaaaataactaatatattaagtgggtccccgacaaggtagggaatgccattcccgtccccaccccctttaatattcggagacaaaaaattatttttgtccttatctagtttcctatttagacggagaattttcaaggaggctatccccataagaagatgtgcatctttaatgaaggtaagacgaatgtatatttttttattttcatttaatttcttttgaaagggccagacccttgcgatatgcattgaaaaataaagttatttaacaaaagtaaattacataaaaatttaattaccacacattattcatgattcaaaatgctaattatcttccaaatatatttaaaatctatacaatataaagttacgaatatactatagaacacattccctaaataaaataagtaacactataaaaaaaaatattggaaattttcaagaatattattttttttatattttatttataattttactacataaaatttttatttataaaaatattcttttaaagttataaaagtacaaaactttcccaacaaaaagtaaacgaaaaaaaaaaaatcaacctcactatatttatgaattaatcaattataaattaattataaaacaacctcataacaactataatataactttaaataaactataaaacaataataaatgatttattatttttattaaagaagtacttttgtaaagaaaaagttcaaagggtgaaaatgaatttttttctatattttttttaaaaaaattagtctattttgtaaaaatttctttataaattattaaacgagtctcgatcagagtaaggagtactatttccatcctcgtattttccattttttcgcttaataaaactcatattttagattgagaatatatgagtttctataggattagcccccgagtgtgaaatttgccaaacaatgtgaaatactaaaatttacaaaataacctcacttaatttactccatgcgaccatgatagtcgctcaatgtaaagaggaaattacactctatacccatttttatttcttattttaatttttaccttcattttattatttttttttaattcatactcaattttataggtcatacgtcatattcccattctgtgcattaaaaactctaattttgataagttatgtgaggttacatttggaactctgattataaaagagggtatttatcaattaaaattatttttgagttatatttagttaatgtgggataaaaacgggtagtttttaacttatccctaatgtaaatctatgtcgatttgcggccataatgatcgtttataatcgcacagtgtaatttatagttg

SEQ ID NO: 47493 - DNA, 1242 bp, Cannabis sativa
aagaaaggagcgaatctttattctctgatgattgttattacaaaaagaagtaccaatatatatacctctagaaccaagaccagaataacagaaaactaataacaaccaagaactaacttatataactaattaacagaaaataacagcacccttaactaacaactagtcattagtatcatgagtatcctcaacatctattgtacataaaattctattgtacataaaatatatatatataaaaaaaaaaatcaaaaaagtaataattgttgagagtaaagagaaaacagagaaaaagatatgtgaaaatgaaccttgaatattcacagctgagcaaataagctctataaatacatgatacagctgagctgggaaggctcagtttgtcccttaagaattgaaatctggaggtggacagaggcttagttagaatgtttgcaatctgatcttgagttggagtgtgcttcacttgaagttgtttatttgaaatcttttcttgcacgaaataaaaatcaagctcaatatgctttgttctggagtgaaaaacagggttgactgacatcaaaacagtgctttgattgtcacaccaaatcgtaggaacaggaagttatgcaaagccaatcttagtaagtaaagactgcagccagactatttcagcagtggcatttgcaaggctcctatattcagtttatgtgcttgaacgtggcactgtttttttctctttagaactccaggaaaccaaatttaatcccaaatagatgcagaagcctaaattcgatcttctatcatcaagatcagatgcccaatcagcatcacaaaaccctatcaataccaattttgagtataattttaggtgtaacccgtggtcaagagtccccttaagataccttagtatcttcttgataactttgaaatgagctcaaggggattatgcataagttgtggcactttgttgactgcatatgctatttctagtatttatatcgaatttgaattaaatgatctattttttacaaaatggcaagtgattcagatgatgacactatcgaataatatttggaacaaataactacaaatagaaatagtgagttgcttgataaaattatctttgcttttgcaaaaacaacaatatattatcaccaatattttttatttaaagagccaagtagaaattctcctcgtttaggatggaattttattatggagatacttaatggacatgatcagcgttgctatgaaattttt

SEQ ID NO: 47494 - DNA, 3411 bp, Cannabis sativa
cgtgcactgttggtgcaccaacagattttagatgccattgaacttgatggatataaagatatcaaagaggataagaagaaggttaaagaacttcaaacaaggctcacagtgccatacttttgagtcttagagatgaagtactcaggcaagtctctgaaggaactacaattagtttgtggagcaaagtctttgatttacttgaagaagactttggaaaacaatctatacttgaagaatcatttgtacactctgcgaaatggatgaagtttgtgaactcaaaaagtatctagattagttcaacaaaatcattctcgaactcaatgatattagtatcaaggttaaagaagaagatcagatcaagggattgttctatttatttcatcgccaaggtcttatgaacattttcttgacacaatattggatgaaaaagaaacattggcattgcttgaggtaaaagtagcgttgaattccaaagagactcagaagaaatcgaatgacaagaatcgttcaaatggtgaaggattaatggcttgaggcaagtttgataaaaagatagaataaaggccacaagaacaatagctccaatggaaatgaacagaggattcacataaacaagaataatggctcgaatcaatccaagtctaagttcaaatttggtaaattctgcaattattataagaaggaagatcatctgaaagatgaatgttatatcttgagaaactagaacaacaggaacaaaggcaaagacaagaatgaaaagggaaattgaaccaatgttggtttggctgcagatggttatgaatctatagatgtacttgttgctgtagacatagaatcaataaaagattggatcttggattcttgatgcactttccacatttatccagataaaattggatcagttcttttaaagaaaagactaggggaacaatgcttcttggagacaataaatcacgcttggttcaaggtgttggtactgtcatcatcaaaatgcatgacaatgttcaaacaacattgacaaatgtcaagtatgtttcaggacctgaaaaaagttggtgttagttggttctcttgctgctaaggattatatcgtcaaaattgatgaaaattctctcaagctgttaaaagaatctctaactgtcataaaaggtgaatacaaacatggtttgtattttcttgttggataaactattactgttattgacacacttgtccagaaaatggagccaatggtaaaaaaaaagttactgatcaaaccaaactttggcatcaaaggtttggttagtgaaaggggaatcactgaacttgagaagcaaggaattttgaaaagtaatctgtctcgaaagctatacttctgtgatgagtgtgcttttggggaaaggcgcaaactaaaattctcaattagtttacacagatctaaacacctttggattatatccattcaaacctttggggaccttccagatttaaaacacatggtggagctagctactttgtgagtataattgatgaatactctagaaatgtatggattttattacttaaaagcaaggatgaatcttttaatatatttgtaaattggaaaagattgattaaaaatcagattggaaaaaaaaattaagaaacttagaacaaacaatggtcatgggtattttttaggcatgttcaaggatttttgtgccaacgaaggcataacaaggcatcatacatgtccaaagacccctcaacaaaatggccttgcagaaagaattagtagaacactcatagaaagagtgagatgcatgctaagtggagctagtttggaaagacagttctggggtgaggcagctaaaattgcttgctacttggtgaataggtgtcattctactagaattgattttgtgaaacctcaacagaagtggactaaaagagctcccattgtgatcacctgaaggtgtttgaatgttcttcctatgagcacataaggtaggacaagcaacaaccaagagccataaaatgcctatttctaggctaccttgacggagtgaaaggctataagctttggtgtattgtactaggctttcaaagatgcatcattaatagagatgccattttaatgaaaatgaaatgtctatgaaattatagaagaaaacatacactcaatgtgaggatagcaatagaagggctcaggttcaacttaataatggcacaactaaaaatgaaatgagatgaatctacatccactaaaccttccacaactcaaggtggacttgagacatatcaactagccagagatagagaaataagagagatttaccctcatgatagattgggctttgctaaactagctgactacactgggtttgccttatctgtggcagatgagattgatattgcagaaccaaaatcctacaaggaagctataaataggagagatggtgtaaagtggctctttgcaattcaagaacaaatgacatccttgatcaagaacaagacctagatcattgtaaagaagccaccaagatagaaacttgtaggctaaaatggattatgaaggtaaaggaatgtattctaggaattgaagataaaagtaacaaagcaatgttagttgctaagggatttactctgagagagggtgtagactacaatgaatttttatcaccaatggataaacaagcttccataagagatataatggctaaagcttgaaggtgtgaatatgaaatccatcaaacagatgtaagaagagctttcctgcatggaaaaattgaagaaaaaagcctaatgagacaacctgaaggtttttaaagtggagatccataagaggtctgcctgctgcaaaaattcctttatggcaagaattaaattcaacaagagcatctttgaccctatgtgactactcaaatggtaaattttattcttctattctatgtagatgacatactcctggttgagaaaagcatgacagaaatggaagttataagaggtcttttaagtaatgaatttgagatgaaagacttgggagatgttaagaagatacttggtataaaattacaaggaagagacctaaaaagatttgcctatctcagaagactttttgaaaaggtcttgagctaatttagtaatgtaaaaacctgccagtattcctttggttgctcatttcaaactctcaaaagatcagtctcctcagattgaagatgacagaaagatcatggatcatattccatatgcaagtgttataggcaatttgacgtatgtcatggtctgcacaaagccaggcctaggccttgctcatgccatgagcatcataagtaggttcatttctgaccctagagagcaacactgggaagatctaaagtggatactgaggtatctttactagtttagtctacaatgctaacaacaaatcaaaggaagaagttacagggtatg

SEQ ID NO: 47495 - DNA, 2422 bp, Cannabis sativa
  modified_base (902)..(908): a, c, t, g, unknown or other
atatatataacattattagtataaaaataaattttaatagtttatgtttaaatataaattgatataaagaaagtgcatcctacaatataaaataattaaaatgtacgaacaaataataaataagccataaaatacacataaatcaatttactttttttttcttaaaaaaaaaaacataaattacttgtccatatatataaaattcatcaacttttacatatgatataataatattcgagcctttataataaatcattcaacaattgaaaaagctcaatatatatattttttgctttgaaataattaacatataataattaatgacactattttgtttttcttttttcaaagtaaaacaaaaaaaaaaaagaagttaaaattgagttgagattgagattacatatataaaaaagtcaaggatgatggttgactttctggagaattgaaagtaacttgttgaaagttaatggcttctgttgataatcatcaagaccagcttccacaaactctcttatattttcctctaaagaatgtgatgaaactcctgctattgtgctttcaatacccatttctctaagtttttttgtagcctaaaaataattaaaaataaataaaaaattaattaaaaaaaatgatgaaatggggtataatttttatataataaaaataataataataatgaaaattacctcaatgccattcatgataggcatatcaaggtccataagaatgaggtcaaatttgtgacccaagtagtgaacatcaatggcttctctaccatttgaaacgacctcgttttgaatgcccatattttgtaagagcttcttgtgtagtgtttggttgatcacattatcatccaccactagagctttcatcataatcaaattattattattattatnnnnnnnattattattattattattaacatctcccatttctattgttgaatattgcttcatcatcttcatcatatacatatatataaatatgaatataatgatatggatttttttttttttttttttttgtgaaattatgacaaagaaagaaggatatttaagcttgaacaaagtttggtttggcctacttaaaaagctgcagaaattagtactcaaaaaaaaaaaaaatagatatattttttatatattatgaaaaggaaaataaaaaagtaagatacgaattttaatttgacatgaatttggtgaaattttaaaaatctagccatgtgatattatttccttatttgggtaaatgatatagacttatgatcagactttttttaccaaaataaataaataaaaaatttgtggaaaatcaaaatattggagtgaaggcatgccactcctttatatttattaaatattttttttttgaataattgaaataatattgatttattaattgtaggggtttccaaaattattattgcttttacatttaaaacatttgattaatgtagaaacaaagtactagatatcacgtgatcttacacacatttaggtctttctcactttctttaattattcactaattgaggtaataattaataataatttggaaaaataagtttttgtgtttggaaaaccaaataacaaattaattaataatttgtactattttcttttatatatcaacgtcttaataattatgattttaaaaaaatcagtattatttattttcaattaaaaaatcagctttaaattttgtcaaccaaaagtaaaaaaaaactagcttattatattttcaggagttggttttttttttttttactccataattttttttatattttaaagcaaatttactaatatatagagaatctaaataaaaaaaaaatggattattaattaagagatggatttgtgcctttttctaaaataatactaataaaaaaattatatacacaagatacatgtacaatcaaaactagttataataattcaatttattagaacaatatattattaattagcatgaacgaacctttgaatttcatacctcatgtaatcaataaatatatataattattttaaaaaatatttatgaatgatatcatcttttcattttaagggtcatttttttttttaaaaaatcttatcatcatgttattaccaaagaaaaaattttaaatctttgaaaatttatatttatggtggtggagcaggctagctatatggataaattaatgtactatatggttttgttttttataaaaatatatatatatataaatgtatattataatgagatgagatttaagggagtgttttggtaataaagttatggatggaatcacaacaaaatcttctgatagatttgaacgtgatcattctacagtgaaacatttgtactctattcatattacaacaaatgtggaaaaaataattaatattctcacacaaaattacacacaatatat

SEQ ID NO: 47496 - DNA, 1431 bp, Cannabis sativa
actatatctctaagtacaatgctgaatttctgtgtctccctcagatttatcatctctaatgtcattggctttatccaatccaggggaaatacagtctccatgatgtttgtagatagtttgataatgtactgagatacttcatcatgagttttgtcatggagaaactcagactcaacaagagcatctttaaatccattcataagagtaagagcaaaagttctgcaatagagaggaaatgtttcatctttccaaacatctttgagaattttcaacactttctctccaacagaattcacttccttactccaatagaatttagcagcataagaaaactgctcatctctacaaaaacaaagctcgccttgttgatgccgatgcttatagataattttcttcgcccaaatggcatcagggttaagcaggaggtacatgtcctccttgattccataacacctactcacaactacaccgaaatagctcaaacaaaatttcccgtgctcatcatgagattcaacatggttaagatgatcgattatcttctcaatgtttcccttccaactattccaaacgaaaaccaatgtttcaagaatttcattcttccataaaaaactttgcgcgtgaagaccaaaaatatgatcaagaattttcctcccacacaaaattacacctgcaacattttgatgactctcaaaataacgcagcagttgcttcaactcgggcagaggcaatgcaaccttttcatcagccagaatatctctctgcctacagactaactcaaagtgtttagattctttctttgccaatgatattgccttatctaaaagcttttctttaccaggaaagttctttattggccaaccttcattacttggaatccagatagaatttgcaagtacatgtgacattataagcattgatgcttcttcaaaatgttcggctctttcgagtaaatcaactgcgtgcagtgtctctcctaacatctctgccacttttgaagccttgacaaagttgtcccattcagtttccaatttaaggagctcctcaaggaaaccttcagttcgcagaaaagtgcacattgaatctttagaatggaaggcctttacgcatttcatcattaacgtcttatctccatgacgtttgtagtcatgtgcagcaccagtcaaaatcttcatttcaatggttttaatttcatgctcttgtctttccatatcattgttcagagttgcataagctttccattggtcaaggtaatcaagtcccttaatgaatagtcctccctgaatacatgactccaaacatttagagtagaagtttcccttggcatatgcaaaagccaatcggtcataagattttgacagagtaaaacattctatggcttccattagcttagactctccataatgttccaaataaatggaacctgcaaaaaca

SEQ ID NO: 47497 - DNA, 1331 bp, Cannabis sativa
agcacctaggttgccaatatgtcagcctgagcacttggtccaagttaaaagtacttgaattttgtctttttgatgctcaatcttctttcttgttaaaagtactcacgggaattaagtttcatcgaatttgcatgggcattacgtaggaaacttgagatggtaaattggcgcttaggtgacctcatttgttaacctaggggctgggcctagtgtttgatcccctggccatagttttcaaaatctcaagtcctagcatcattttgtgttggatttgagaaattgggaaataaagaagttcccaagaagctaaaccctagctctcgtacgctcatgttgactgagaatatcaacgtagacgtcgagtgctcagtcactccaaattggaagtgttccaatgttggttctgaggcatgtatcttgcttgtggcatgtctctcatgtatctgagtgcaaggctaagcagtttgcactgagataatggcttcgaggatcgaaaatgatgcattctaggttacacaatgtcactgtcgacactaggcaaggcccatgcaccaagttgatttctaatatatctaaaggacatccttaacttcgaggtccatgagttggagtcttcttgacttgttagcttagtctattgaaggatagtgtctttgaaacaactttgcatgatccaaatacctaccaggaagcccccttctgtcagcctggacactaggcaaggccattagaactaggtcgatggccctatcatgggatgcggggcttcgggattgtttttcttcttacctcgtgtcaaaaatgatgtccacattgtcagtgctaatttctgaatatatatatctcatatatattatgtcacatgttttatgctccgtacctcacttatacatatatacttataatataacatgttataatctcaaataccatattatataacatcatcataatataatacacacatagacatatattatgtatactaacatgtaaagtttcatatcacaacatagaaaaatatgttagaatatctttactactatttaaaatactaaacacaaatgtctatagtgatatcataaggaaataataagttagaaaatttatttgttaaattttagatctattatattgggagcctagattgtatggcccctagtccccgtagtatccaaaatagatatcaagtacaaaatctcagtaattgatttattttaatcaattaggattcacattattgacccaatcccattaccactctcctcctcggctacgtccatgtactgccacaaccaacaagtgtcgatttgattttacgacgtcgtggc

SEQ ID NO: 47498 - DNA, 870 bp, Cannabis sativa
tttatattgctttattatatattgattgctataaatcacttatcgcttactaaatcagactcgttgtcattggctaaaagcgaggtcaacagttccattctttagcaacagcgtcgcgttgctcaatggttttatgaagtttagcttccaattgacttactttatggagtacccgaatttgggcgacatgcgataagaaggtggctcacacaaaaaaaaaatacacatgaattcttatgggttcttgaaagaaatgttaaaaaataaatagaaaaagaaggaaactaatcgagagattaaaggtaagactcctctcaagcatctctggtgggttgcccttgctgaccaaatcccagtcgctagactagaaatatcgaaaatggggtcagtaggacgcagtaaattgcgcacaatactctgaatcggtgcccccagcctccatggaaaaagtctcaggttccttactcgtagaagttgtggcctggtgagtttgtgggactgactcctagacatgtggaatggctggagtatgaacctaaattcagttcaggagtctcaacgtctatagtctgcgaggcacctttcttatttgtagtggtcttcctggatctcttgaggggttccacattaacatctgaagaagattctgaggcagcactcctctttttcccctttttactcgaagagtggaggagattctctaaatccatatctgcaagacaaagatatgcatcaatacttattaaaaaaaagataaagaggaaaatgggaaataaattcccacttaagggatgttaccataataatcaaatgatgaagagggaggactatagtattcaccaaactccctagatcttgtgatcatgaata

SEQ ID NO: 47499 - DNA, 2809 bp, Cannabis sativa
acaccaaatggaatagctcaagatgtatagaacgtaacaaaatctttttttttcttttgagagcagaatgcaagagcaattaaataggcttaatacataaaaattattttaaatatttgttacaaaattgttatgaaatttaagtttgttttaggaagatattttatttattttaaatattattaaaatttattttaaatatttgttataaaataatatattaaatattacattatattaatttattgtgtggttatcaattttacaataaaaatttacaagtaataatcacttcgcatctaaaaatatagtatatggggtaattttctaaaaaaatatgttgtattttaaaataaaatgaaactattctataataattacataaaatatattgtattttaaaataaaataaaattacttcatagtgattattatattctatactaattagacagttactttcaaccacattattatcattgactaggtactaggtagtcaacaataccattgtctgtggtcacaaaattcgtatcctccggaacattctttcttcttcagattttcctctgtaattacattgttttttcgcttttatacagataatggctactagtctttttctactgttagtttcgtgtttggttttgccattctcttccaatgctttttctagtgatcattgcatttaaaaatcattgtgtttttggttctttaataaataggtgctgataacctagtgcccatggagttggctttgaaaattgccaacaaaatcaaagccaatgagcgtttcagtgtgtacatagtaataccaatgtggccagagggttctccaactagtgctgccgttcaagagattcttttctggcaggtactattttttcattttgtaacaatagttccataaaagttctttatattgagatgagatgtttaacttagttaagtcattcataattcacatgcttttttactttaaagtttctccacaaaagtttgaatagagttcattctcgaaaactagcttatatctgagatagagttttgatgtgtcatccttaaaacaatactacttcagaaacactactatgccacttctcttggtttaatatacaccttttgtgaccttgtagaagatgccccttaccatgacattcatttcacaaggttgtgctaaaaattactcgcacaatcacatagactagtagtttattatatgaggatggtgtcaaagtggaattaccatttaggttgatagtttgtcaatgtataatcctaacaggttacccataaggagaattttctcttggttccttttcacttaattaacacatgcaacattattttttagtcctaaaaattatgttggtatgatggaatattgaaataactttggattatggataattgagccaatttcatttatttatgaccacagggacaaactatggctatgatgtacagtgtaattgctcaagctattaagaatgctggcctttctgatcagcatcatccacaagattatttgaacttcttttgccttgggaagcgcgaggtttcatcatctcgcagaagtaagccaactgagaacagtgtgttggtatgacacccttcttcatatagtactctgaaagaatacatttatgattatatatcaaatatttgagttaatatagtgtatgcgttgactaaattgaaattatttatttgaagaatatagtgagtactacctcgttcattctttctcaatttactcttgtcaaagtttagttgcaacttttaatatcaagactgagttagttaggttaggcagttagcctgactcatagtacactgagttatataaactccttttttgtccctttttccaaattaattaatgcagagtattcattctcaattttctctcttcggcaaataatatggtattggagcaagttctctgagtaaattccaatacttcttttttcttttcttcaccatggctggaggtgatggtgtccaatcgattctctgttttggactccaatgttcgatcctactctaatgaagctcgaaatccttgttttttgtccaacaattatcatcctggagctagtttagttccaaaaattctcataggttgtgagaattatagctcatggcgtcgagctatgatagtggctcttgttttgagaaacaagctcaagttcttcagtggaaagcttcgtactctttatgaagatgatctcaactttgagttgttgaatcgttataacaatagtgtgatctcatggattttctataccatttctagtgatattgctgaaagtatcatgtatatggacaatgctacacatattttgtctaatcttgaggaaagattcaaccagaagaatgctcctggtgtttttgaagccatacgaacaaaaaaatctatggctcaaggatcaaatactattacaaattactttactcgactcaaggccttttgggatctgatccaagaatatcgtccacaacctacgtgtacttgtggtggtacgaagacgattcaagaatatcacgaagtagatcgtgttctagagtttctggttgggttgaatgagtcatatagtggtactcaatctcagatcatgatgcaagatcctcttcttacatcaacaaggcttatgcctctgctattcaagaggacaaccaaaggtgtttgtcgaatgttcctacaaacaatgataaagaaggatttagattaggtttaaactttggcaatttactggaagtgtctaaccacatcacccaaaaatggtatgctctcagtttccttttc

SEQ ID NO: 47500 - DNA, 1550 bp, Cannabis sativa
caacaaattccacctcagttctagataaaccttgaaagaaaaaattccctgaagatcatggttctaggtgacaatcggattagcctttttccatacttagaagtttcacacagtactgaaacttgctaagtgttaaaacctttgttcccatatctgctgggttctcttcactaggcactttttctatgttgatttgcccttgtgtaactttctctctaatgaagtgataccttacttcaatataaattgttctgtcatgaaagacaggatttttacaaagatatagagcactttggctatctgtgaaaatagtagcttttccaacatagatgtttagctcttttaacatgccttgaatccatagacctcctttgagagcttctgttgcagcaatgtactcagcttctgtggttgaaagagctacaacaggttgaatttgtgatttccaactgacacaatttcctgaaattagaaatacataggctgttgttgattttcttgagtctctatctcctgcaaagtcagaatctacaaagccttctatctgaactgtgtcttgatttcttttaaactttaatcccagatcagtagtcatgttgatgtatcttagtaaccacttcatagcagcccaatggagttttcctgggttccccatgtatttgcttagaacacttgcagcatgtgcaatatcaggtcgagtacagaccatggagtacatgagagaacctataacattcgaatatggtatgtccttcatatcattcttctccttttctgtctttggacaatttttgttgcttaactgaaattgacttgacagaggttgagtagcaggttttgagccattcatttgaaacttgctaactaccttttcaaggtagtttttctgacttagaaacagagtgttctccttcctatccctctggatattcatcccaagtatcttacttgcagcccccaaatctttcatttcaaattcagatttcagaatctctttaattctttctacctttgttctttctttgctaatcaatagcatgtcatctacatatagtagaaggtattcagcttgaagaatacttgaacctttgtagtatagacaagtgtcatacatgcttcttacaaaaccatgttgtgtaataaaagagtcaaatcttttattccattgccttggtgcctgctttaatccatataaggattttttcaagtgacaaacatagtccttagcacttcctttttcatagccttctggctattccatgaagatttcttcttctagatctccatttaggaatgctgtagtgacatccatttgctcaagttctagatcatattgagcaaccagtgcaagcataattcttattgtcttgtacttcacaactggtgagaatatctcattaaaatctatgccttctttttgactaaagccctttgcaactagccttgccttataccttggttgttcatcttcccccattcctggttttaccttgaaaagccatttgcagcttattatccttctcccatgttaaattttcaatcaataactt

SEQ ID NO: 47501 - DNA, 2032 bp, Cannabis sativa
  modified_base (55)..(55): a, c, t, g, unknown or other
gtttctttattgatattgaataatagagattacattgaaatgaagttttatttanggcataaaacccaacaattaaatggatgttttaactcgttattgcataatcatagagcagttagattgaacgataactgattatgttggtttagcaattagtaggttattttttacctgtgttcaaacagattgttattacgtaagaatgatttgcttaaattttggtaatgaaaatacatttgtacttgtttttatggttatatatgagctcaataaagtgtgatcataatttattgagttgggggatttgcaatcttgcacaacttgtttaactccaaatcataaatttcaggaatgtgatttgtgaaaatgccttctttttaaccataaaaccctataaaatcctaccatcacaaccactgcacctttgaacattacaggtacccgtgctgctacaaggactcatgccatgagaactagatccctaattgacattgtcaagacaaaagctcatctggccacaaaatactctttgaatgaagctctcattccttctgaacctcggactactacaacaactcttcagtagcccaaatctatgcagcaagagttcactactcttaaaaaagcaggcatttggacattggttccatactccccagatatggatgttattggaaacaaatggcttcataaagtaaacctcaatacagatggtacattggatagattgaagtctagtagctaaagggtatctacaaacacccagcattgactatgaggaaaccttctcaccagtagtcaaacttgctactgtgagaatcatacttaccatcattgtatctctcaattggatggtcaaacaacttgatgtgattaatgcgtttctcaatggcaccttacatgaaactgtgtttatgaagcaactagaaggcttgtggatgagtctcgacctactaatgcttatcaataattcacaaagctatttatggactaaaacaagctccaagagcttataaccaaactttgaaagacactctaattttcccattacatgccccaacaaacctcatcaacaaaatgatttttgacttaaacaagtctttttcattgaaagacttatgccatgttcattattttttaggtgtgaaaagttttagagacaaatctaggatgtaattggccgcaaactaagtatatctaagatctacttgtaaagctaaatatggagggagtaattaaccgagtcctaacccaataagtgcaaacattaaactgtttcttgaagaaggagaaccatttgaagataaaatcttgtgtagaagtacattggggggcattacagtacctaactttgacaagacttgatatggctttcatcattaacaaactaagtcagtttattcatgctccaaacaacatacactggggtgcttgtaaaaagttaatgaggtatctaaaaggcactatcttacatcgtcttcatattacaccaagaggcactctagctcttgaaggttactcagatgctgattgggtatcttgtgtggatgacagaaagagtactggtggatatgttatatttttttggaggaaatcttggtctcatggtctaccaagaaacaacatgttgtggctcgatctaccactaaaaatttaagcctttaccaatgcagctgcgaaaaattaagtggttgatgtccccgctttcaaaacttcatatcaacacttcacaatttcttattctataggtggataattaaagtgctattgcaattgcagaaaattctatgttccatgcaaggtctaatcatattgagattaatttgcactttgttagggagcatattttatctaagcaaatgttagtcagatatgtaccaacgatcaaattgcaaatcttcttacaaaatctttatcaatagacaagtttttgtacctaagatccaaactcatgtcagatacacatgcattttcgtttgaggggaatgttaaccaatttttagggtctgtgacctaactaattgttatgaca

SEQ ID NO: 47502 - DNA, 1416 bp, Cannabis sativa
gttaaatatcaactagatgactacgcactattgtctgcacctgtgtatatgtaacagtaaaatttattcgaagtcgatacagtaataatccagttgtccatacagtaataatcgtatttaacggtaatatctaactaaaaccttaaatttatataaaaaaaaaaaatttaaagtaagagagtttttttcaaaaaaaaaaaaaacattgttcttaatattacttttatgtcctttttggtgcaagctctattaaggacacaaatgaactttcacactccaaaagtccctatatatataaatgtattttcttgaaaaccctaacacttccactctctcagcagcacatcactcatatataatctatgtttctattctttgaatcaaacacacgagatgataatgatcatcatcatcatcatctaccgcacatcttttcaaccaagtgaaaactttattacaggtattttccactatacacatacttataatattgtattctttatttactctgttttagctgatttttaagtgacatatcttcgtcctttttttttttttggttataaacagacaaaagtaaaagaaaaatattgattttgattattttacatacataagttacaaacacctttatagttgttaattattaagcttttgaatacacacgactccaacttgtttcataaaatcttttagtactacttagttaaatgttcgtttttaaggtatcaaatcaaactatataaaaatgttaaaataatatggaaaatatctatgtgatttattaacttgtttctttgaaacttcttgagaaatcatacccatttatgtgtttttatatacataccaagatatatatagttgaatattattactatttatgataatgaaatatatatgagtgttattactatttcaatctaatactctttttttctcttttggtttgcagaaatttacacactcgaaaacttcagtgatttcatgtacagaaatctctacactcattacatgatactcaggggaccacttattattttaaatgattctcttcattcttttctgatttccaaagacaatttttttttcactattgcagcgatatgtgttctgattttcgacttttggatcgaaaaagcagaaacaaagctaagcaatatcataaattgttcaaggtatcacattgctctctccacttttatgtttatatttcacaactttacaagtttataattaggtttggaatataccaacccaacttgtttcctaactatgtttcaaatattacaacaaacttttcatgaatttgaagagtacttattgcttatttaattgttttctctattagaatttctattatcatttttaaggtatcaaatcattctataatgacagttttgttaattatattttcat

SEQ ID NO: 47503 - DNA, 1157 bp, Cannabis sativa
  modified_base (186)..(188): a, c, t, g, unknown or other
  modified_base (1092)..(1108): a, c, t, g, unknown or other
aatgagatcccgacacttgtaaatattttgatataatataaagttttatatttattataaaagttttaatttgactcgtttttcaagaaaaatttttgattagaaagattgcactgtaattgaaaaagcactgtagcatgctttagcattagggcgttacattcagatttattatataaattaaannntttgtctgaaaatgtaaagaaaaagcctaagggtataagtcttgaaactgaaatcaagtttttagagaaacttggtacatagaacgtcttttttataaaatcactacttaaattaaaattccatgttccaatagcttccactcgtgagctcatcttgttttcagataagttgctttgctcacttgccactgacattcttagattttgaatatccaacaagaaatttcttatgtgaattaatgttgaaccgcattcaatccaacatatattaagattaacatagccatattatattcataacatactaaggaaattggattacttttgttgtccatccatttcttgaacttgtctcactcttttttcgcttgtcccttttgtttacaaaagaaacatttgatgaatgaaatctttctttatggtaggctggggggccatgggcattttttctttgttcttcttgaatgattagcgtttcttgggtaggctggccatgtgagcactttctccttgctgttttatgagccttgcttcttgtagcacacatggtcatcaattcattgatgctccatttatccttatttgtgttgtagaaaatttttaaaggcccatatcgtggaggaagattacgaaggatgtaacgaaccaggaaggtatcaggaatgataacatcgagcttcttcaaacgagttgtgatatccctcatctttgaaatgtgttctcgaactcctttaacaatgatgagttttgtggatgagaactcttggatgaggttgttgaataaggatttatcagaagtttctaactgctcatccatcacattgataaaatttttgaccttttcacgtggcgctaccgacccatgcattcccaaaggaattctatgttggaattattttaccannnnnnnnnnnnnnnnncaagtatgtttcattaacatcatattatgaatttctaaaataatgaaat

SEQ ID NO: 47504 - DNA, 898 bp, Cannabis sativa
aaaaaaagaaagaaagaaaaagagggaattaatatataaaagagactaaaaaggggggagaaatatgacttaagcaataaaaatatttttgtaattaaagaactttttaaaaaataaaattgaaaaacagattttatagaaaagtataaaaaactaaatataaataaaaatgtaaaaagaatgtcaaatttgacatttaagtgtaaaaatctcaaatattattttttatgtatattacaattataaaatgtttatttttttatatgaaagtcagcacaatatttacctttttgtattgaaaatggtgtaaagggcaatttcggcttttctcggagctaatcatgacgattaaattaatatcctcttttaattagactaattgcttatggaattgaagtacaagtgaggacctcaattctatattaatagggatatgtgcagtactagtagtctgctcaattaattcattacgatgattcatcttatccaaaaaaaaaaaaaaccattacgaaagatgctcttttaatgtttttcataaaatgcccttggaaatgtgttagatataatggcatggatcttcaccttcattgccttaacttaaaaaattattacaaattactgtaaatttcttgttgcacaatgttagagctgatggtttggacagttagtttgttattactgttatgagctgtcaagttagttacttaactaactgattggttgttatgagttgttatactcctttagtcacgtgtctattgtttgatcattgtataaatactcttccatatgcaattcaataaagtgactctttcttcatctttggctctctctttctctggtttctttctctctgttttgttcttgcttttctctatgttcagctatggctaggagg

SEQ ID NO: 47505 - DNA, 2503 bp, Cannabis sativa
  modified_base (418)..(431): a, c, t, g, unknown or other
gtaggatatgaacaaaaaaatccctaacatcatatcaaaatatgtataaaatatgtccttcgggatgagatgagctatccttgttagaatggttccaccaccgattacagtgtgctgcattgttaatcatgtgtgactctgttcaccacttaaaaaaaactatgataaaagccatattaccattcatgattctattaattataaaaccaacaatcatatatataatgaaatatataatagattaaatatgattaaacttaaatatgaaagaaatatacatgtagaacacgaaagaatataatttttactaaattatatctatttatataatagaatttttagtttaatgttaatttttggttttttatgttaactatatatactattacttagcagaatattttttattaattttatnnnnnnnnnnnnnntatttaaaaataaaaattatgtaaatattttatctaagaaatttttaatttaaatttaaaaatcctaaaatattgtaaatattcttaattatatttttaattttattggtttaactttgaatttgaataagaaataattccactcaattaagcacacaacaattcacacgatatcttattgagttttattgtacgtatttttacctatatataattatattcatatggtacactaatgtagttgcaatagctaaaaaaaattctcaaagaatcaaaatctaaccccacttcaatttttttttttttaaaaaaaatacataaatatagagcattgctattgggcacaagtggtgcctaacaccttctagatgtgtcgccttgctaatcatactccataaaaattattatattaaactatatggtacccgatacttaattacaccaataacaatatttacaagtaggagtttgctaggcaccagtggtgccctttaacatttctcataaagataggaagaagaaagaatattagatgtatttatgaccttttacaatttttattaaagagagttttatttagcccataaaattataagtataacctattttaataattttattttatataaatatatattgtactattttttttttattttttcactttcttgtgatataattataaaataaatataaaatatattttaaaatattaatatataaaattttattaaaaaaaatcatacatgattaaaaaaaaatgtgcaaataaaataaagtttatttttttaaaaaaaccaataaagctaactatttgatattaaaaaaaataataaaatgttttttttttatatttcactcaaaaaaaaaaataataaaatatctaaaaaaaaatattcaaaagaaaaaaaaaaagtaattattaaaaattaatttaagttaattttttattaatattaaaaatgtacttataaattccaaataaaatttctggtaattgtaaatggtgtgccagaggtgattcatctcatctttccaaactcgttctttcctttcaattgtcaaaaaggctgtccacgcctcccaaaaatcctttatatcaaacacaatgtaaatccatgttacaatcgagaccccgtccctttcattgaaacttcttctacgattctcttcgatcaggttttctgatctaagaaaggttagggctctctctggtatattgagttcgtttttagtttgatgggttttggttctctgatctaggttcttcttcttcatttttagttttggtttttctaatgaaggacagttgctttttttctggtaaattgttgtagatttcgccttagcttttcttgctgttcaccttaatctctctctctctctctctcactctacctctctctttttctctctctctgctcaccattaaaactcaccaactaaccctcgttttcttcgataaattcttatattctaatcctaatccctgttttgcaggattgttatatacaaatagttattttgtaattaatattaatatatatatatatataagcaataatttttagttggtcagatcataatgattgttattttcttaagtaattaatttaattatctgtttcataagtttttcatgaagagttgatttaatttgaatttattttagatacgtattttctttttaatgagaatatcttacatgttattaaattaatttattttcttaagtttttagaaatgaaattgactcaaatatctgtaaaaggttaacactttcatgtattactatttgcttaagataatggcttgagtcgtttgactcagtttcactgtttgggtgatcatttgttttctaatttttgtctactcatcattgtcctttcatttaccaaactgagaatgcaattctattcttatttcttaggctttggtgctttgcaagtgggaattttagtctcaacttctgcagcaacttatcacttgatcctttcatgtacattggaggtatattttatataattgttatattacatataattcagtagaagagtttgaatatcttatat

SEQ ID NO: 47506 - DNA, 1701 bp, Cannabis sativa
taatgtggtcatatatggccaattttaatacatatggatttaggaaaaaaagattaaggtattttatgcatatttaatcaaatttccttcttagaaatcaattatttatttttttaatctcatatatattttctcatatgacaaatgtaaagaagggcctttttatgttataactttattatgtctaaaatttagttgtgtactgctataaagaaaaataaacaaaaatagaaaacttagaatgaaaaaaaataattcaaaagtacggtctctacacgaacaccgaccaccacaaaaagattctagatttgttctataattaacgtagcttcttaaagaaacaccaccagggatgtagaagcctttctcaatcaccatgaaccgatgagaagcttttgtcgatctccatgaatgttggcgagaagctttgctttgatatttagccatagcagtgcgaccaacgatgagacagctccatcaaagcctacaagagaatatcaacaattaagggaaattcttcatgaatgcttgcacaaaaattttggttttttttttcttctaaaaaagaacatatgtgatatttattgtgttttatttaattattttcttaatcaattgttgttgtttggttgatttacatatattagtgatttttgttcatataattttggtgttttttgatatttttcaaaaatctggaataaaaactagtatgttgaatttcttgtgcagcataatgagaacagtgagcgtgttaaaatttcaaaataaatttatgtcttcataacattgttgtccatgattgtgaaataaaaattgtacatgcaacacaataataacataaaaacaatgaggaatgagacttttttattaagagtaataaataatgaaattgagtttacctggagaaatttttttttataatgtattataacatcttgactcatcccaactaaatatatatttttttattcagtagttggatcaatctttccataattttcaatattgaatatttattagagaaggaagcaaagcagccatggctgcacaaggagtgactcctcaaactcaacctgatccttctgcaaggcgaccacggggaaggcccaaagggtccaggaccaggagacaagaaaacaatcaagggaaccctacaaatacttaggaagaacaacctataaatgtgagggatatctcgatggatagagaaaacccacaaaatattggaaatataagaaatcaagaggctcaacgtgacaatctaagaacttcccatgatttgtaaactatgggaatgaatagtttgatataccaaagtcatctcgcatgaatgcaaatgccaagcaggtgcgacctagaaactaggaaattccacaacatgataggagaaatgctagaaatcaacctagggcaggtcaactcccaaggcatccacaaaagcctactcgcaatgacagagaaagtgcacacacttatctaagtaaggaccgtgtgtcaaatctcttttgaaggggaaggtcgatgcgagaagagtcacatgaatttggttcaattatagatcaaggtgggtcaagatcaaggacacgcaagcgcagtaggtccaccagagctcatgttcatgataggtgaatgtagggctgttcatccgatccaatccgtacttttttggtcaaacaacatccaatccgcactaagtgc

SEQ ID NO: 47507 - DNA, 2127 bp, Cannabis sativa
tccaacaagaattagacttgaccatttagtgataatcatattttatattgaaggttagtaacaataataatggtagtgttagtgtggtttaattagcattagatatatataaaagttgaataggatatagaaaattgatgtgggaagtttgcgtgggaggtgaacgtaatttgtgcgttcctttgaagcaatccaatgattgattgagtgactgctttcttggcatgttagctaacccactaattatactaatattttataccttaccaatccccaatccccattatacccaatgccttgcctttctcaccttatagctacgtcttttctactgttcctgtcactgtactcagctttcggtatcgctttttgtaattttctccacaatctctcctcctttaattatcatcccattatatcataattctgtactataattattattattttgttaagttaaatccgtttttatttttaattaatctcaacatggctgacaaaaagtatggcaaataattgaaatatgtgctactttctaccaatatggttaggagtgggacttaacttacccctcatattggcgagaagggttggtacatactacatatatagatatataggttgtgtatagtattgttggttgctatgtcatcacaccaggtagcgtcacatctccttaaactttttagttttgtttaaaaaatatatatataaataaaagtaggagattaaggccaattatgtggcttggcaaattgtcgtaatgtaattatggttaacagaattcttttctgaaagccactaactacgttacgtaaattaaagaacatgggtaatggattggacaacgctatatgacttgtcaaaagaagagaaagaaacaaagatataaatatattcgaaacacacaactgcgtcaattaaattgtagagaaggcaataaggcaaggcaaggcattttcaatgcccctaattaattaattaatttttaattttatatatatgtggaggtgaagcatgccacgttacacactcttttgtgtcatgaggaatatgccaaaccctggcaattggcatatatatgacattaataatattatggaaaaagagaaccaggtaactaactggcactgctcatcaaatgtaaatactggaataaaagatgattaatgatgccatccttcgaatcaacgtagtacctgtgtgtgtgtagtgtgtggttattggttaatttgtgtggctggactacttacacacaacttgtttatttatttaattgaaaaagaaattaaagaaatcaattgctcttcttaattcacgtttttaacccagtgcccttctaagaatttattattatatatactatatacaagtagaagtaggtgattccctcttttgtaatgcgcattcaaagagttcactaacaccaaagcctaactaaccaaacaaaaagaaaaagccattttgaagagattaatttcaaacggtgtcgcgcggtgagaagtcgcgcagcgcagccagccctgcattttagagggggcaaaattttttatatatataaatgagatattaataaaaaaaatataaattttgttggagaaattttttaagttttatagaaataaaaagaaaatatatacattttataaggataaacataaaaatattaaaaataaaaattttcaaggatttaactactaaaaatgaaattttatggaggcaaaattaaaattatttcaaattgagtaagccacataaatacttaagtttaagtcaggcaaataaataggtaagttatatttctagaacttagctgtttagtattaattaaattaccacatgccatttcttattagtatatttaaattaatatttttaaaaaataaaaatttaatgacgtggagcaatcaataattgtcatgtgccaatttacttaacactaattaacagccagcaggtacctacaaaagtttcaaaaatataacttaattattattaacgcagaaaattaaacttagatatttatttgcaaccggaaattaaagttaagtatttaattatctctctatttttctctcgctctttgtctctctacctccggccagtcgacccattctaaggcatcgc

SEQ ID NO: 47508 - DNA, 1282 bp, Cannabis sativa
acggcaagggatccaaggtctatctcaaatatcactcgaaccatcagcaatcaagataccagcacctttcacgcaaattcttctagcttcaagcaaacttttccagcatctagagtcggtgccatgcttttctatctgccaaacatctaccttagaacaatatttatccaaaagtagtttcacccacaccttgtcttgtccctgaagaaccatccaactcaacttagaaagaagagccatattcatatctttaaacctccgaaaaccaaggcctccacatctcttgggttggcatatctcgtcctagcattttaatgcacaatagtgtcttttatcagcattttgcacccaccaaaatctagcaagtagtcaatcaagttgtccacaaagagtactagggacttgagtagttgacatgaagtaattaggaattctttggaggacagacccaattaagggttttctcccagcttgtgaaagaagttttgctttccacccctctaatcttgtcataattttttccttcgaaaaaagatagtcatctctttttttagctgtgaaaaagaatggattgcccatgtacttttcagtagctttaatggggttcatgccaacaattgacttgatattgtcccgagtcctttggcttgtatttggagagaacaccaccccgcttttcggttcgctcacacattggcctgaccatttctcatatttttgaatgcactgcataaggttttctgcattctttactgtagcatgacaaaagattatcgaatcatctgcgtaaaataggtgggatataggacaagaattacgagatactgaatccctgtgatctctttattctcttctgccctgagaacaagttttgacaaaacttcattgcataagataaataagaacggggatagtaggtcaccttgccttaaaccacgtttgggatcgaagggagccaatagagcgccattgagaagaatagagtaactgaccatggttacaaattgcatgattaaattacatactttgccactgaaaccattagctttcagcacacgaagaagaaaggaccattcgagacaatcgtaagctttgttcatatcaattttaatggccataataccagttttccctttcttatttttcataaagtgaagaacttcttgagctatcaaagagcattcggtgatctagtgacccgagatgaaggttgattgaaacagggacaccaacctatccataacttctttaagccaatctgttagaattctaaagataattt

SEQ ID NO: 47509 - DNA, 2532 bp, Cannabis sativa
tgccccgcatggactttggtacgataattgagtcaagtttaaagctatagcagtaggaacctctctctatattttggttggtcgtctcttacgtcatcatggccctcaacataccatttaggatctggaccatcaccaaaaccatcaagaaagggcatttgtgctacaatgtttgttgtcgacatcataattttttattcaggtaacacatcagctgccaatacctttggatttgtttttggaacaaaactcccaacctcgctacgagtatccttaacattacttggtgtgggattatgatcgataaaaatattcttctttacaaaagtcatagacaaaggagtaaattcatctggcttctttgcaagcatagacaaaaagaaccttatacgcttatcatttccaataattttagggcgatacattaagcctttcatgtacttataattcacttccaattttaagtcatactgcactttatcaacatcgagttctttgtacaaaaaaaaccaaaagtgagtaacttacgttcttatcaatctcaaatgtcaaaatttggcccaattataaatacaatctctaccctcaagctcctaaacaccattatacataacgaatgcattaatagttgaacttgtcacatacattaaaaaatacaattacaaatttagaacaaaaatctaacaaaaacgtgttaaaaaaagtcttaagagccataaatctgtaaaccatcgggcccaaagatctaagagaacaatcggactggcatcgggcctatatcgaatacaccatcaaactcatttagcattgaactagcatcaaacttatatcaggcttacatcaggccaatcggccctgccctaaggtcgaagttgaccatcaaactcccatcggacccctatcgggcccaattgggccatcctttctaatcttagttcttacaaaactatcagactaccatcaggcacctatcgggcttactcagaccatcatccccggccttagatctaagaatcccatcgggctagtatcgggccccattaaactagacgaaaaaaaatacaaccatttaaacacaaaacaatagaaaaatagcaacaatccacagatcaattatgaaaataacattccaaactaaaaataagaacaaaaaaaaaatcacttacctattgatttttgctgaaaattgtttggtacctaaaaaatggagtctcacaccaaactctttaacatctagcactttgtagtagcttagagagattaattgtatactaattaaaaataaaattttagtttgaattgttagagaggaggaaagaaatgaggttgagagaaagagagtgaagagagaaagagtaagatgggttaagtgtgtgtgtataagaggcattttatattcaatatatttgtatatctattttttttttaatattgataaacataagtttagagaattaattttttcgtaatatatgcataattagtaaaaatttcctttattagttcctctccttaatctactggttttatttttaaggagaaaaaaattattttcagaaagctttattattacgtataataggttgtgattaaataaaactctagagctattaacaaagtcacgataatttatgtatttctagtgagtagtgaccaaaagtaatatagattaacaaattaaaaatttatgctatgagtacgaagtttataatagatttttctatgtacgttgacatttgaatataaattttaagaatttgtttttgaatttttaagaatatataattttagtcaaaattgttaatttcagggccaaataatcttaaattctttaaacacttgaattaagattcttttaattttttattcaaaaataaagaagattcttttagttaaagttttgtcaactaacaccaaacacttgttttttaatacgaacttgaataatacttgttgactaattaatattaaattaattatttattggtggtaattgttgttaaacggtgtgtatagatgtcctaatgggacgggtttcgtgtatatattaagttataataacttatgcaaagcgattaatacaacttgtcatctctatttctatctaatattaacaactaattaagtcatcatacataaataattaatatcaaaagcagttagtcctgaaattgaacaaatctgtactaattaaatcacctaatcatcatgttcaaaaaaatcacctaatcatcactatatatatatatgataatataatactccaccagaattatatcttttatatatatttatatgataatataatatagtcctactctaccagaaatcgatcaacttataaaattaaattgtgttctcctgcaaggggactaataagatgaaatatagaatcacatccggtagatttacaccaactgattcaatctaattatttattagatattaaattttttgttttccgatctaattcaattagaatcacccgatttaatctaatagatgtattagattaattaaattggtttcaac

SEQ ID NO: 47510 - DNA, 1115 bp, Cannabis sativa
aggtgagcgatcagttgtttggggcagacaatgagctatcgttggaggtggtaatggatggactcctaaaggaggaagctcaggcaaatattttcttctttgtttttatcttatcatattacccatgcaggtcttaacttttttctgtgtaggtcaatatgaagatggcttacgcctaatctcgagccaaatccatggtggcaaagaaccttgccaccaccaacaacttgcaaagggtggtggatgcggccaacaagaaggtctaggacgtgaggaatgagctcaggtaggtgaacaataagctccttaccgctaaaaacttggtcgacaagctaaatcaagagatttatgaaatgcgatcaactgccaagctcgaggcagacaatgatgccttatgcaaggatgtcaatatgctcaaagatgagagggagagtctccacactcttctttcaaagttggaagaggacatcatgtctaggaagacgaggcaagaggagctcttgaaggaggtggaaaacctagaaacagttgccttggaggttttctataaattttggaatgccaacccatcaggaaatttaatttacctcaaagattccaaagaggcatatcttaattactatgagggtcagacaaccaaagaaagccttgaggtagccaattccaaagctccaactgaccaaggcactgagacccttaccttcaaaaatgtcgagcttttggccccttcagacccagctgatccgtacaaggagcctgggaccactgctatttgaaacatttttctctttttttatcagttctacccttaggcctttattagagacaaaaatgatcggccaagtggcttttaaacttgggctatatttcattttgttttgaaacaactagatgaccgagcagcctttaatacagggttttccgtgcttaattatctttttttaatgaatacttccccttgttttgatacttatttttgcaaactgttatgttttttttagcttattatttactattactgatgctttgtaagggtatagttgcccctaagtgaccaagaagacttatgactcttggtcatttgcatttcacaagtatggttttcgtctgttcag

SEQ ID NO: 47511 - DNA, 1414 bp, Cannabis sativa
gggtccaaatgtgcagccctatgctaatccattcaagaatgtacctagctgaacttcgggtgctatgttgtcaagtggagctaataatctgatgaagttttttttataaaatcagcaagtgtaccatcttgttttatgaacagaaactgatcataacgagaccccttttgtgtatcacggaaatgtttcaacaccaaacgcttcatttcttcccaactcaagatgatttgtttcttactttcatattgataccacagtaacgtcttccccgaaatggaaatgaaggttgcttcattaatctaatttaatgtaatgcaatgtgctctcttttttgtcatgaatataatgatttttctagtataatattttaatttatggagttttaataatttatggtattattgtcgtgtaattaattagtatttttttttatatacagataattaattagatataataattgtaatgattttagtaaattgatataataataataaatattatattttattttaaaaaataatataataataaagaatattttctttagtgtaatttttggtgttgtggttagaatgaaaatattaaatttggtggtaaggttggagatgttctaatttctaactcatatttcatttaatttccaggaatgtctctgtcacacattgatgcatcatctgccttcatttatgcaaatgaaggctggctgttaggcaaaataccattgtcacacgataaaggcagatcatcagtgcgggcacaagcacaagcgcgggagataacttcaggcgggttgcgctaccctgcacacaatgagaagccagtgtggtggtggagaactttagcatgtgctccctatttagtctctatgcagatctcagaagcaggattgtatgtacagcccttcctatcacaccatgaattcttagaagaccttgtattcttcatccccggggctgctaaaaggtggtcatcatggtttgtaatggtatatgtcttgttgtgttactcggcagtggtgaagaatgaagattggcctcacttcttcagatatcatctgatgacagccatgttattggagacagccctgcaagttctttggcactcgagcaattttatgccacttatacacttcagtggctcttttgggatgtattattgggcagctgtggggttcatttacatttgcatattgttggagggcataagatgtgctcttggtggcaagtactataaaatcccatttgttagtgacgctgctttaatccacactttatttcatgtaggaggtttccacaggcctttctaaggtgtcatagtagaatttttttgaggtactctttttcgtgattttggtactttaatgtcttccttttctacataagatttagattagactcatattatactattt

SEQ ID NO: 47512 - DNA, 1574 bp, Cannabis sativa
tgtgtgtgtgtgtgtgtgtgtgtgaatatatgcatgtgtgtgttgtgtgcgtgagttgggggctcacacgcgagtcgtgcatacatgtgtgtgtacgagtgttgtggatgtaaggtgaaatacgagtatgcgttgaagggaatgctgttagaggaggaattaaaggacaagacgtgcaaggggaaaacgtacaaccatgcttcctgcaagctctaagagcgaggagatacaagtagtggaagcaacacacctgcaaagtctgaggacccaaccaagggtacgctgcagtcaccacctctgtaacctgggaccatctaatactagactaaggtatgacacacaagaccacctcctgcaccaccatgtacctcaggtcattagagcctatatatactctttctcagatatgagggagggttaaaaaaatcatgattgtaacattaaattgagagaaatagaaagtctatcattttctctccactttgagatagtaatttaaatttatattttctctttctctttatcttaattctgatcttgaagcctaatttaattttttggccaacgagttagttgacgagttctcactgcaaacaacactaaaaaataaaactaattagaaaattaacttgaaattaaaactaattagcaaatgacatataaaacaaaataactaaaaaaaacacacacacaaaactataaaagataatactaagaataataaattcaaaattacttaaaaccttattaaataaatcaaaagctcaaaaactaaattgattttagcttataaaatatgtaaaataactatttttttagagttatcaagtaggccaaattattggttgtagcatcataaatctgttgcattattttttgtattgaaacattccatttcgatgtttcaactttgatttctgttcctacatatcttcatatttaattttaatttctttgattttctcatttaattgtttggtcgtactattttgtggttcaattttttttttcgtattgtgttataaaattacaaactaaggttatgcagttagtgatatttttttttttaaaaaaaaaaatgcttaattactatttatattttgaataacaagctttttttgttcccttaattttttaatctaccaagttgtgctccttatagtatacaacttgttaataatatttctcgaaatataacttttacaataacatagttcttctattatattttatttaattttaccatgaaatgagtaaaatgattaatggtatttgatctttatcccttttatgttaataaataataaaataaaaagaatttttttaataatactttatatgtttagttttacatttttaattattaaagtaaaaatgacgaaatttatttaatttgtaccaatttatcaactatcaaccaccgtgtcacttatttcacaacgaaattgaataaaatataatgtaaagactacaagattgtataaattatatttcgagggatattattaatgagtcgtgtgatgagtcaaaccgagtatatatataataactaaataaatataatataatatata

SEQ ID NO: 47513 - DNA, 821 bp, Cannabis sativa
tacttaaaatcaacccaaagaactaaccacaaacttacctaactcggatagtgctttcttcctaaattgcatgcttggacttgcttgaacttagttaaaaagctttaagaacttaaaaaaaaaggaacactagggcttaccttaggattgcacccccaatttttccttgattcctaaataataatcacataaaatggaggaagaagctgttggttttgctagttctttctagggttaaaaaggagagagagagcttcagtgataaacttaatttatgtaatttctaatttaatatcaataaagagtttctatattatcttcttaacttaaaataataaaagataatcagccaaaggttatctattccactaaaagacaaggctaggatcttagaaaaaatttcaaaagtgcccttactcttaaagcttaagtagttaatagtttaggggtaaaagggtccaatactataacccagtctaaacttgatattttaaatatcacttatgattgtctcgctagataacaagttctaaacgaacccatgtgaccctagcaaccatccatcacatttttcatcgttattgagcaaaattataaaaatgataaattttacatataacatatataatacacttagagtttaataaaattttcgaaattataattctaatacctatttcttgaaaatacgacagaaaaaataataaatcacttataatcacaaaaaataattaattaatgctaattgtcctactaaaccataatttaagtatacggtcattataattaaaacctctatattcctctctctctctctctct

SEQ ID NO: 47514 - DNA, 1497 bp, Cannabis sativa
ataaaaatttaataatttggaccatttaagaattattgcatggtaatttacttaacacttaacagccaagcacaacagaagtggtgtagtttctttctaattttttttatatataaactaggtaatatagccattttgtcaaaataccaacaaactcagaataaaatatttagaaagtgagggacatatagtattaatatttatataaacttaagtagcagtagtctttattggctaaaaaaatatcattgtataatagattaatatagttacttactgatcaaaatttgaaaagcgttttgatcttcatcatatttttctgtagtctcatttaagagatcatgtttttctatcatcaagattggttctattaaatattttgacacaataaaattttcaagcccttcttttaaattgtactcattcaacttcaacttgtaaacaaattctttcccaaagcctttgaatctctacagaaacatcattgttcaaagacaacttattaaccaatttatttgctaataacatgtatctagtaatatttcagctactttattaaataagatcaaagttatttcaacagttttgacattgactttgatatgtattttgtacttatatattaggataaaaaattagaaagatgcccttgccctcgactgggggaggttgcaatccttggttgttttagttatcgggcagattttgctcatttcctttagcccttacatactgccttaggtatcctcgcgagatgagattttcaatctcgtctttcagttaatggcactcctcagtggtatggtcgatatctcaatggaaacgacaatacttattgggacactactacaaaaaaatcatttaatgtcctttttttcatgtccaacaaaattagtgttggacatgaaattttttttaggagttttctagtccaataatgttggactagaaaagaacttcatcatgtccaataatgttggactagaaaactaatagtggtggtaaaatattttttttaaaaaaaaaaaaaaattggttactttctagtccaattatgttggactactagaaattaatattcagccctactcatgatcagtatgtgggtcaatgagctggaaactcattatttacctattccaaaaattccattatgtattttgtttattctgagatggacctgtttaccttgctggtctcatcaattaatagttcttactcacgtcttgctgttatctatatggcagtgagtttaagtatttttattaactgtatttccgaggcgagtcaattaagtacatttaataatatgtaatttgagctggttcatattccagctttattacatgtatcaacttattattaatgcttgaaatataggtataacactcatatatacttattatatatgatatatatatctcaaaaccctaacaaccattgtatctctcccttgccaaaacctaatacctcaaaagaaaacttttcatcttctgc

SEQ ID NO: 47515 - DNA, 1244 bp, Cannabis sativa
taagaccattcatttggcccattatatattgattttatatttgcatcatatagaatatagaataatgtgaggattaaaattattatgtagttatatttggttaatgtgtaataaaaaagggtaattttttaaaaaaattataaaataaatatctaagcttaactctcaattgtaaataaatatctaagtttgatttttgatggtaaaaatatttatattatattttccaaacttctacaagtacctcaccgttaagtgtcaagttaatgaccacatgatagtttttaattaatccagattattatttttttatttttatttaaaaattaattaaaatatactaataaaaaaacgacagattgataatgactaaacatctaatggttaggtggtacctatagaagttctagaaatataacttatgtattattactgtcaaaaataaaatttaagtatttatttgcaactgagaattaaacttaaatatttgcaccacaaattactctatataataattataataaaatctattacaggatcaatgtaaactagttgacttcattatcattatctttgaaatcttccaactttacattacataattgcaacaataataatcatgatcatgaccttaatttagtttgaccaacatggccaacatatgctgcagagtaaaatcatgtatcaactacagattagtccactgaaccatttatgaaccagtgtcactcttctttaaatattggtccaattatgttgtgtatccctaaaagggacatacatatatgataattacattatgcaactatctaaacaagtaagaaaaataaaaggttctaattgctcaactaatcatagtgattcagattccactcactaggatttactaagttcatgaatgaagaacaaagtactaaacttgatttaacaagattgactgaaaccttaggataaactatcacaaactttgctagttcaattctacaattgggggtactaatactgacaagcaactagattacaatcaattctcacaaagatcttttgggtaatttacagaagttattatacaaaggaagagaacaatagtatctatcaaaaagcaaagtgtatatgtgttgttcttctatgtgtaagtcaaactataagaggatatatattgattatactatacaatatggttgttgcatatagttcatatactgatatgcagtgctatgttttaagatacaagaaacttacaa

SEQ ID NO: 47516 - DNA, 1117 bp, Cannabis sativa
ataaattatgcaattttaataatttttgcttggcgacaatagaaaatgtgatggatgaccattaaagtctcatggataagtttagaacctgattcttagtgggaaaaacatattagatattgtgaatgttgggtttaggcggggtggtggtatttgactattttacacctaggcctttagattacttaagttggaagcaagggcagaattgtaattttgccactttggtgagatttgtcctttagtggaattattgttttttagatggtttttaatattaaacttagcgttaattttttagtttaggaatagaaagaaaagacaaaatttaaagaccaaattctatcttgctctctctctcctttggccctagcaaaacaagaggaaactatccctaattattgcagcttttaagttttcttcaagggtttgaggtagctcaagctaacgtaagcctctaacactattcctctaagttcttgtgagtttttgtttaagttgaagtctctaatttggggttttcaattctgtccgaaccttcaattttttagggtcatttttgggtttagtttacgttgttcagagttggtttgaggttgttttgaagattgactcttgtgttgagcaagtttgagttcaaggaactcaaaattagctcaaccatggtggatttggtttttgtgattaattgttgcaattattgcttgaattctttagttgggtgcttttataggtattcttgaaagtttggtggagtttgggtttgatttgggtgagttatgaaggtttttgagatttttgctatgaaccagtcagccggttgtacaggtagaaccggttagccaattctataggtagaacaagttaactatttcattgggtaggatcccaaaaatctaatttaccagtttaggccattttcagcaccgtagtttttgtgtttcctctatatttagggtattgttatgctatttatcgatagggaagcttttaggtttgagtttaggcccccaaaaaaggttttaacaagttgtttacccatttatgtgaatgtgacatagggcatccattcagcacttgtttttttgttcaagtcgaccagcacacttgaattcag

SEQ ID NO: 47517 - DNA, 3027 bp, Cannabis sativa
ttttgaatgctcctatcatatgtgtctaaacagacattagttctcaaattttgatgaacttgatggaggagttatcctaatgggaaacgacattttttgtcagataaaagggattggaacaatacgattgaagatacacgatggtacaatcagaagaattacgaatgtgagttacattcttgatctaaagaaaaatcttatttttttaggtgttcttgattctgatggttacaagataacattagaggatggatacttgaaagttgtacgaggttcattttttgcaatgaaaggtactcgaaaagaaaatttatacttcctagatgggaatagtgttaccagaagagtagttgtctctagcagtttggaagaaaagacatcttactcctcgtcctttggtacatgcacttagggcattctagagagaaggctttgcaagggttagtgagataatgtctacaaaaggggccaagagcaaaaattttgatttctgcaagcattgtgtgctgggaaagcaaataagggttaagtttgacatttctttgcattgcactaagggaactatggattatatccacacagacgtctgaagaccgtgcaagaatgcttcactttgaggtaaagatggtttgtgacttttattgatgatttccctagatatgtttgggtatacaccatgtgacacaatgaagttttggatgtcttccttaaatggaagaaaatgatcgagactcaaacaggcaggaagatcaagaagcttagatctaacaatggtggtgaatacaaatgactttctagtgtgtcaagaagaagggataatcatacattttttcagtaccccgtgcgccgtgcaccgcaacaaaatggcatggcagaatgaatgaactatactttggttgagaaagtttgatgtatgatatctcaatccaaattgagaaaagcattttgggtcgagaatttgtcatatgcaacccatattgtcaacaaactccctacaaatgcacaagatgggaaaatacctaaagaggtatggtctagaaaacctatttgtaattatgattccttatgaatatttggtgtcctacatatttccatctcaaagaattcaaaatggatcttagagcaaagaaatttattttcttgggctttgattgtagagtaaaaggtttttgactttggtctagtaaatcaaaaaagatcagcttaagccgagatgtcacatttgatgagtctgttatgctaagacagactaccttagtgaaagagaatgaaagcccaaatactctttctaagggggagcgtgagatactggaagatcctgaaaagactattccaattgactatcatggtgaagatgagagtgatgatcaagaagagatctcagctgaggtagaggttccctcaacatcaccaccaatcaatcaataatcagaatctattgtcattactcgaacgagaaagaagattaaaaagcctgctacatacacatatatggtagcatttttacttttagtaattgatgatgatgtctcatgcacttacagagaagttgtgcagagagttgatgaaaagaaatggaagttagcaatgaatgaagaaatgaactctctacatctcaatcaaaaatgggtgttggttcgacctcttaaaggaaaaaaggttattggctggaaatgggtatgttccaaaaagagagttcttggtaaaggcaacatccgatacaaagacagactggtagcaaaaggttataataaaaaaaagaaggaatagattataatgacgtattctcacctgtcgtcaatctttcatttattcaaatttttttgactttggtagcacagttagatttcgagttagctcaacttgatgtcaaaatagattttctccattttactttaaataaagagatttacatgtctcagtcggatggttacaaagtgccaagtcgtgagaattgggtttacaagctcagaatgtcactatatgggttgaagcagtcaccgtgatagtgatacacacgtttgacaacttcattagagagtagaagtacacctgcaaccaatacgacccttgtgtatactttcaaaaactccaagatggtactttcatttattttctcttatatgttgatgatatgtcaattgcatctaatagagctgagaaagtcactatatggtttgaagcagtcaccgcgatagtggtacacacgtttaacaacttcattagagagtagaagtatacctgcaaccaatacgacccgtgtatacttttaaaaactccaagatcatactttcatttattttctcttaaatgatgatggtatgttaattaattgcatcatctaagagcaaggtgggtggagattaggctaaagactcaactaagttcaaaatttaaaatgaaagatcttggagaagctaagaaaattcttgggatgaagatcacaataaacaaagttgtaagcatagtctgtctaacacagactcaatatctgaagaaagtactgcataggtttaacatggacgagtagactaaacctgtcaatacaccacttgcacctcatttgaattttggtgcaaagatgtcacccataaccactgatgagaagaagaaaatggagcgcattccatatgcaaatattttcggtgccctgatgtatgcaatggtatgcaccagacctgatgttttgcatgttgtgagtatggtgagtcgctacatgcacaatcctggtaaaggtcactggaaagtaatagattggattctttggtatgtctatggtactgtggatattggtttgaagtttgagagggataagactgttggtaaacatctagtcagatattttggttcttgctacgttggagatctggataagcgtcgatcaactactagttatgtgttcacaatagtaggaggaccaatttgctggggattaactttgtagtaaacagttgctttgtctactaaagaagcagaatatatggttgtaacagaagcattcaaagaagctatttggcttctttggtt

SEQ ID NO: 47518 - DNA, 859 bp, Cannabis sativa
aattataaattattataaagtctttctgaatttgtagtgttgatggaaaagcgcgctagcctaaccctatttgttttcttctattgtaggatgtctctagtttatccacttattttcaaagtacttgcggacttactccagaggaaaagcagctttctgtaagtggccgtaactggggtgaagttgatttaaatggttagtaactttcttttatatttagatttgttgtcacaactaatagatttatgatattttcttttcttttattgtgagtaaaaaactgtaattagcaatgaaaaattattttaaggcaacacctttgctattctaatgattgttaacatgaatatattagttggtttggcctacaccaaataaaggtgcagtggttaatttaatgaaatgtattgctgagtttacatcatcaactgcatttgggaatgagaattgctgttccaatgcaagtttaaggtcgtctagtgatgtttcagtcaaatgattttccaaatttcttaaaaaattctatggtttttcttaagtaactcattgctaattgttgtggtaggagtggtagtgatgcttgttgttttcttaatatttttttggcaatttcataataactgtagtgtgatatcaacgtccggtgataagacttaatcttaaatttaagagcggttcttctataatctattaggaattcaccacttgaggccagctcaagtgggagagggggttattttggggtgtgtccgatcccaacttgtgtaattcaaaaatgtatttattagaagctttgataaaaaaaaatatattaggaatttcgtgtcttccattcttttttttttttcccctcaagccg

SEQ ID NO: 47519 - DNA, 1333 bp, Cannabis sativa
gtagatgaggggccttttgaaccaattctacctaaacgacatcataagagcaaaggaaaggcaaagctctcacaacctctctagttcctagagttcttaacaactctatttgggagatagaccaaaggccaaacttacagaggtattatggtcttttggaagcgtactctaaggatgaagaagtacgaaatgttccatgactcatgtggcaccgcatgtctgtccttaaagatttttcttcccaacgtgtggaaggttttggagcatggagttggtctcatatctcctgcggtgcccatcttccacttaggacttacttcgcagaattttgtgttaaagatggaattgttcccttcaagcacctaccagtagcatacaagtttctaacgaaacaatttatattttgaaaatcccagggaaagtctgctccaaccccaaaagagattttgtatttttattagttaaaatcccaacctatgcgaggatatccctctaggattgggttttagcgtctccagaaatacaacaatgcccaatgtcccacgagcacttcctctcacagtctaaactatcgtgagtactggtttttcacaaccgacttccccatgaggcgagttctaacactcccgttagaattcagaattctaggtatcatcttttagccctttgcacttttactattttgatgatttgtatagtggctccatttcaaaacctaattttaattcatttgttgtgttccttttttgcaaaatctgttcctaaaacggagctcacagaggagttaagacaaagaatctccttttatgagccatttctaaggaagaattgtaagttgaggggctgcttaccacccagttattgtgccaatatggtctcattacaacctttcagcgcattcacggagttaacagtaggggataacctcagactcctagtgacctcaaagaacaaacgactttagagctttcattggaaataactaaggcaaccaaggatgaggaacttcttgctgctacctaggacaaccatgatcctgagcccctcacagaagaagaagaaatccaggctaggttcagggctacgtacctagaggcaagtacttttggagccagtacttcaggaagacgtaatcagcccttctggatgatccgtactccagcctttctcagatttcattggtagaccaagggggttttgatcactctttcctagataaacccttgtaaatatcccataagagattacatcgatatggtagacaaactagttaggcacttcaaccatcgagaagtccctccaaacactattaaagtgggctcttttctcacta

SEQ ID NO: 47520 - DNA, 2053 bp, Cannabis sativa
gttgtcagctgactatatatacctcagtgaacttgtactatactcaagtcaaggctccgcgtcaagccttcatcctcctcgttgcctagagccttgacttgatattctattagtaaagtgtgtcatatatattgagggaaggggaaaaaggggggaatgacatgaaagtctttcttaaaacttagcattaagggcgttacaatgatcatatttatcacttcacattcgcttaaaacctagagaagtgtatagacatttactgttaaatatgagtttcttcctctgtaaagagagaagaaagagtgtaagaattggtaatctagtccattcatcgatatctatataagactaatactgctaaatgtgagtttttcagttatacaactagtttcagctgcaatcaactactttaagttcgagcttgttgtttttgtttctttgcaggttgtaagctagtgcacatggcagcaaaagatttacagaggagtgtaaagaatcagaagagttatgaaactgaattgattgtgtttctgattatgttgtactaaagtcacagttaaggagttagtctaataatgcaccaactcagtcatagaaaagataaagattcaatcctagtggataggctagctagtcataggggttctgaattctagttctggtttcttgtcactttctgtcttcaaggaggaatgttatgtcatctaatagtgtaggaacttagtgtcatattctgataactaaaagttgtgtacatgagacttagactagactttctaaatggtgagatagttgtcactggttttatagatataatgcaatttagttctgcaattgcacccactagggtcatatatttgtcattttcgattggattacaaatagtgacttgtctccccaagagatagatgcgatcctgttatattaagaattgtaccacatcacatgtaaagcaaatatatttattattcttcatttataaattatcgatgaagaaactaaaagattaacaattatgtagctaaattgtaaaataattatcaaaataatgttggataaaattcaatatttttttctggtttaaaaacgtgtgagctagtatactctgatacaaataggttttttatactacatattgaaatttttaacgtagatattttaaagtttcacggttgttttataaaaaaacaatattttttttaaaaaaattcgtgtgacagtaaaattgtaaatttttacttaaaaatataatatttttatataaatccatatataaattaacctctcttttcgtttgtgacgccagttaactttttcttttaacgctaaacataatatttttttgttataaaataatatagaatataaattttaataggagaagagagaatgaaatttttctcagtagtttattgtaatgagataaatttctgtttatacaaaaatatgactagaataatgaaaaattaaatcagtgaaataaaagaaaatataatcaagtatttatagtgtttattaatgcattgatttagacatctataataatattttataacactacccttgaatgtccataaaaaactttctcattaaaaatttggctgaaaattcagtcaatagaaaaagagtgcagtatgattaactccctctcatttaggcattcgtggagatttttttattgaggatttctgatcttatatgtcatcttcccaaatgttgatgttggtaataattttttgaataagtctgcaagattgacacttgattgaatacgttggacgccaatataattattttcttgaagatcatgtagtaagaagaacttggtgaaaatgtttttggctctatcttcttcattatagctttagttgagcaatacatttcgcgttatcttcatggagaattgctaatgttgacactgcattattgagtgtaattgttaggttatatttagcctatgtttcgggtctttaaagttagcattttctcgtctattggtgtcttttggagcagttttacgcttgatttacattgtttcaagttcccggggtgt

SEQ ID NO: 47521 - DNA, 1194 bp, Cannabis sativa
tgggactttggagaagacagattgcaaggcttcattatctacaccatcagtagtgtaaatgttctgaaagtaggactgtacaacattagcaattgctgattgagaagtatgttctacaccatgatcatccattaactttttgatagcattattcttctgtcgactattagccttttgatgaaaaaactttgtgttggaatcccctgacttcagccaattcatgcgtgatctttgtttccaatagtcctcttcttgtgctaagagttcatcaagtatatcttcacattgtttgagctcttcaaagtgatcaaaagtagttagatttgagttttgaagagtagaaactttatgctgagtactgtgaatcttttttggcaattcaccaaacttagatcaatgccacgattgaagacgagaggagcagcaggagagattatttttaatatgaagaataggatcggatgctgtgttagtctaatgtttggtgataatgtccaaggcctcttcctcattcagccatattttttcaaagtgaaaccgtgacttaaattgtcgctgagttctcccagttacactgcctactgaaaccagcaaggctcgatgatcagatttaaagaagtccaagtgagtgacctcatccgccccaaagtcagtgagccaagcattattggtaaaagcataatcaagcctctcttttacattagtgccattaacacaattattatgccaggtataacgtgcaccagaaaaagagatatcatgcaagccacaatggtcaattgcctttcgaaaattctcaatttgtatatcacagcgtagtggccctccaagtttgtcagtatgagaaaggacttcattgaaatcacccataacaagccagggcatcaaagtagcagtgtctttcaaacgcttcaaaatctgccatgtgaatggtctttgagaagttgcaggtgctccataaaaacccaggaaatgaaataaaggaccatcagtagtcgaaacataacaatcaataaagtttataccataatttaagacatttacatttacatcagctttccatagcaacaataaacccccactaagaccaactctaggaacttctaacccattagaaaaattaaacttagttcgaaatttagatacaacacctatattaagcttagattccataataaatagtacatcaggtaa

SEQ ID NO: 47522 - DNA, 3572 bp, Cannabis sativa
aaaatcttgttgatagcttccacttatccatttacttgaggtctggccatagctaaaaagcttttgacgattccacacttgacataaatttagtgaattgatcactgtcaaactactttccattattgaaaactattttttgtggaaatccatatcttcacacaatgttcttgattgcgaagtccaaggcctttttggaagtcactatgttcataggtttaacttccacccatttattgaagtagttaacaactacgatggcaaatttgactcctccccttctatttggaagtgatgccactaagtctattccccaaacaataaatggccaaggacaactcatgagggttatctctgttggtggagctaatggaactttggaaaaatgctggcattgtttgcatttacgaatatattcattgcaatcattctgcatggtaggcccaaaataaccttggaaaatgattttcttggaaagacttggtctgaatgtgtgattcccataaaatcctttatgtatctcatgcataacagtgattatctcagttccaacaatgcaccttaggtatgtcgtcaataatcctcttctgtacaactttccatccatgatcacatatctgggggcttggtattggatcttccaggagtgtgcctgattctaaatacttgagtattggggccataaaaggaagttgaatgatcaatggttgacatacccagtgtctctgtgcttggagtaagtagatgtgcgatgggcactagtctgtatttctccacttctagatttgttgccaatttagctagtatgttcgagaaggcattcttatccctagggatttgcttcaaaaaatagttcttaaaatgttgcaatagctttctagtattggctatgtaactaaccatcttttctccatttttcttgtagtctctagacacttggttgacaactagctccgaatcactgtacaactcaatgttcttggcatcaatctctttagcaaaatgtaagccaaaaatcatagcttcatgctcagcttcattgttggaggctttgaattcaaaaagtgcactttggagttgaagttattgaggagaaattaaaattattctggctccaaaacctttttcatttgatgctctgtctacatatattttccatacttctatctctaggattagcatttcaagatcttcattcatccccgtgcattccacgatgaaatctactaaggcttgaccattgatagaattcttggttgatactgtatatcaaattggcttcgctctattgatcattttgaagtctttctgattactctggcttctgtagcacttgatggagaaggtggttggtcagtaccctgatggaatgagcttgagagtatggtcttaacttttgtgaagaaattagtaagcaaaaggaaagcttttcaatcataggatatctcgactccatgcccagcaatcttttactcacgtaataaacaaagagatgtatatttccttcttctcgcactattacggaacttatagtatgatctaacactacccggtacaagaaaaatgactctccctcaatttgtttcgataatatcagagccttcgttagatgttctttaagttgttgtaaggcttctttacactcaattgtccattcaaactcactatttcctcaaagtacattaaagaaaggtatgcacgtatctgtagatttggaaacgaatttgctaagtgctgcaattcttccagttaaattttgaacatccttgtgttttctaggtgaaggcatctctagaagggctttgatcttctccgagttcacctcaatgcctcgagaactaactatgaaacccaagaattccttgaaaaaactccaaaagtgcatttctttggatttagtttcattctatactctcggatgataaaaaaagcctcttctaaatcttcgtgatgattcatggaagtctttgatttcactaggatgtcatcgatataaaattccatgttcttccccagtacattcttgaacattttgtttaccattcgctggtaggtagctccgacgttcttcaatccaaagggtatgaccttggagtaataaattcctttgtcagtttgaaagcttgtatgttcttggtctaccacatgcatttttatttgattgtagccgaattatgcatccatgaagcttaatagtttgtaccatgaggtttcatcaaccatctgattaatttgtggaagtgggaaccaatcttttggacaagctttgtttagatctattaaatctatacacattctccatgtccctttaggctttgggaccaaaaccaaattggctagccatatgggatatagagcttccctaaggaattcgatgttggttagcttgtctacttctgccatcactattttcgagctcacttgatataagggtctcctcttttgttgaactgaatcagccttgggatctatatttatttcatgaaaaattacttgtggactaattccaaacatatcagaatgactccatgccaatacattattgtttgccttaactgtggagactgtcttttctttcactactggagatagattttttctcgctctaattactttggtgggatcttaatgggagagagaaagtatgaagaggttaagtttctttttagctaaatgatgtgagataaataatttaggtttatttaaacctaaaatcacaataataatagtaataaagagattattccacaactccataataaaacaaggtaaacctcttgggtaattaccttaacttatcacttaagtaacctttaggtttaggggtaaaatggtctaaaattataaccctgcttaaccctcataaaccaaaatcaaacttatgactgacccactagaacaaaggttctaagctagctcatgcgactctaatgattgttcgacactttttccattcgaggaaaaattacaaacataataattttcacatatagcataaataatacacttagagtttaataaaatcttcgaaactgagaaattataaatttaatgcccgttcttgaaaatagggcgcacaacatatattttcatacataattataaaataaaagtaattaatactaattgccctactaatccatatgctagtcatgcagtcattacaattatctccccgttaaaagtatttcgtcctcaaaatctaacatgaataactctgaatattgagtcctcctgttggactctatttttgaggtggcttccttcaccttactattcctctaaagtactttgaccaatgctatcgtcttgtttcgaagaatcttttccttcttattgaggatttgaactggttgttcctcgtaggataaatttaactagttttagggcttcgtaactcaagacatgagtcaggcctgacacatatttcgttaacataaaaatatggaataaattatgtacagccgacaatgctggtggtaagcctagccaacacgctacctatctgaccttctcgagtatctcgaatggccctatgaacctagtgttggaaacttattttaccaggatct

SEQ ID NO: 47523 - DNA, 2615 bp, Cannabis sativa
ttgaagttaatgctagaaagaaataagggaggagatcatgggagattgacaattggaataaatgagggaaatattgggaataatgtcaaagatggcctggtggttacagatttaaaaagaaggcgtatgaataaggaaagtttgttggagcagttaaatagtgaggaggtgggtccgaattgggtcttagaagaagtacataggcccatggtgaatgagattgagcccattagaaatgtcattttcgaaaccacaaagggctcaacagtgggctgtgtaattgggcctaatgatacggaaggagttttgcaaagtgattcagaggaagggatggagcttaatcatggtacttttccaaaaaacgatgtaatggcgggcactcattttgggtcccgccatccattatgagtcttttgagttggaattgccgagggcttgggaacccgaggattgttcaattcctaaaggaaatcgttttccaaaagaaacccaatgttgtctttttgtgtgagacaatttgcaaaactgacaaaattaatattgtgaaaagggcgttgggctttgaagggagttttgtggtagaggcccgaggccatagtggaggcctagctatgttatggaagaaagaggaggagggtaagttgcttagcttcagtacaaaccataccgacttagagctcaacatggatggttacccaacatttcgtgcaaccggtttctatggagaacctcagagacatcttcgagctaacacctggcgtgctatacgtcaactctcaggtgagtcttccttaccgtggtgtttgttgggagatttaaataatactttgaaccatagtgataagagggggggccgcccatatcctaattggttattaactggttttcaagatgttgtgtcggaatgtcatctcattgatatggaaatacaagggcatcctttcacttgggagaagggtaagggtacggaccaatgggttgaagtaaggttggatagagcgttagtttcttatgattggcaagctctgtttccgtcggccatattggagaatttggaggtcacagtatcagatcattgccctatatggttaaatctcgccaagtctaaaccggttcaagttaagaagagatttcggtatgaaaatgcgtggtctcgagaaccgatgtgtaggcaaatagtacaagctcgatgggagaatggtttgggtgattccttacaagtgaaattggaagcgtgtagctcagctctggccgaatggggtagtgacatcacaggcaactttaacaaagaaataaggcaatgtaacaagactctgaagctgttgaaagggagaagagatcaagtgtctatttcgagatataaggaagttcattctaagttgttcgaagtgctgtctaagaaagaaattttttggcgacaacgatcaaaacaactgtggttacaagccggagatcagaacactaagtactttcatgcttgtgctagtagtcgaaaaagaaacaatcagattgttaggctgaagaatgcggatggggaatgggttgactgggataatggtctttcggaggtcatgcacaattattactctgacttgtttacctcttcttgttcgaattggcaagctgttattgattgtgtggctaccagagtgtctagtgatcagaaccgagacttactactagcagttgaggaggaagaagttcggagagcgctgtttcagatgcatcctgataaatcccctgggccagatggtttcaatcctgggttctatcagaaacattgggatatagtcggcaaagatgtcacaagtctggtacaacgtttcttttcttgtggtgaatttcctgattatctttccaatactaatattgtgcttattccgaaaaaatcccaccctgaaagtatgaatgagttgaggccaattgccttgtgcaatgttatttacaaaatattatccaaggttttggctaacagactcaaaggaattctgaccaaggttatttcagaaacccaaagcgcctttttgcctggacgacttatcacagataatattttgatttcgtatgagataatgcattatcttaaacgaaaacaaaagggcaaacagggatttatggcaataaaactcgacatgagcaaggcgtatgacagagttgaatggggctttttggaagcaatgatgaggaagttgggtttccatgagcaatgcattcggctcattttgcagtgtgtgagttcggttgcttataagtttgtggttggagagcatgaggttggccctattattcctacacgaggtttaaggcaaggggacccgttatctccatatctcttcttattatgtgctgaaggattttctgctttgcttcatgattatgagagaagaggcaagattcggggttgtaaagtggctaggggagctcctttggtttctcatatgctatttgcagatgatagttacatctattgtcaagcctctgaggaaggtgcccgaaatgtgattaatttattagagtgttttcaggaagcttcgggtcaacaagtgaaccgtcagaaatcttctcttttcttcagtccgaatatttcctatgatgagaaggttagaatttgtgca

SEQ ID NO: 47524 - DNA, 798 bp, Cannabis sativa
caataaaaatgtaaccattaaaacctcttcccactattattttaattattctattttattgttttacagttgtttttataaaaagataatatttttataaatatttcatgtgatagtaaaattgtaaacttttacctaaaatccagtattttcgtaaaaatctattttttttatgggagtttgattttgaggaaattaaaaattttatgtgattttatatatttttctttttttgtgcaaaaatattatcttcttttgaagaagtttatttttaagagaaaattgaggaaaaatttgaaaaatataggaaaatcaggtaagaataatcatgtacctttatggtaactagagggctaaccagttaccataagggagtaaccaggtaccttatgctatttttttcatattttttttacttttctaaaattttcccataatatatatatattttttttttgagaaaaagccatagtttcgcaaatttattctttaaaaaccataaaaaatgaaaatttgaatattggtaggaaaattacttgaactatacaatttgtgacacttaacccaacaaattgatatttaaattcggttaagtgctaagtggactacccaagtgtacacacaagtgtacacgtggaaaatttttagtggtccacgtaattttaattatttaaatatttttaaaaattataaaaataaaataataactaaatgaataaagatgttgtttggtaacacttttattttctaatcacaaaataaaagtaatttttttttaaaaaaaatatttttgaaaaa

SEQ ID NO: 47525 - DNA, 1335 bp, Cannabis sativa
tcctggtaaaatatttccagcactaatatgtgcctatacaccaattatataacttaattagtaaaattaataatcactatgagatatgattatgttttgttagatttataagtggcatgtttgagttttataattattttttctttcctaacttgggttttacttatttcgaaactaatatagtgaaattcctttttcagttataccataagtttgattgcatataatatgtgtttcatgtgcattgtacgcggagttgtcactagtatatatattgcatatgagtaatgctacatacactctcaaattgcacacctattacacacaatgatgtgtattaaatattaactatttatatttttaagtaaagatatgtgaagggtattaataataaaggtggttaggggtcaactgtttgtaactaacttttcagtgttagttgttttttctgttatttgttcttaattatatataaagttgtaaaatcctcattcattcaattataatagaattcacttctctctctctgtgtgtgttcttctttgattcaatatggttcacaaccatggagcaccatcgccggcaatggtggagtctcaagattgaaccaggcttaaggtcaaaatcaagctcaagctattcttccaagatcctatcttgtgttgtttacatttatcaatcaaactcaatgaacacaacttcttgccatggaaacatcaagttcttgtctcgattaaaggtaaaaaacttcagaaattcctgaattcaatccctgctaaatgagcagcagattaccaagaattccttctatttggtgtgacaattaaagtacagttcttcttgcagccaaccctgttcttcatgcatgccaatgatcaaattcgtattttgtttgtgacaaggttattcaacaacaaattcgtatcaatcatgtgcctgccaatgatcaaatagctgattatttaaccaaacatatatccagttccaaatttcctcaacttaggaacaaacataatgttgtttctcaaactacattgaagggagctgtcaagggtactgataataaagatggttaggggttaactgtttgtaactaactcttcagtgttagttggttttttcgctatttgttcttaactgtatataaagctgtacaatgctcattcattcaataataacagaattcacttctctctctttgttctcttctttgattcaacaggatcatatcacttttaattatgtgatcacaattaattgtgtgtaaaaagtgtgtataatttaagtgtgtgaattattattctattacatataagttagtttatttagctagtc

SEQ ID NO: 47526 - DNA, 2487 bp, Cannabis sativa
aatccctaagatacctacagcataagtcatgtatttcctattttatatttgctaggaatttgtgcccctaagaggctaacacttaaagacaagtgatctctttctagagattctcccaaaaaatactataaataccccaaagacagaatggaaaaggggtcgattgatcaattaaggaattgaagggagtaaaaaagagagagatagattcaccaagaacattatttgtacaaacactctcataaataacaaagactcgtggactaaggctcattaatgcccgaaccacgtaaaaatcacctgtattaaagcttccgcaactcttctcattctttcatgtaattggttgccgaaagcctcggtcaatacttggttttagtatttttcccatatcttccatatttgattatgtgtttataattttttgaatatatgtgattagaacttatattgaacatagcattattttctattattgattacgtagtatcaatttcgattcttctttgttggtctaacttagcttgttgtttctaataacaatccccaatagattgtcatctgttggactatattatagtgttagatctcgtaaaataagtattttataaatgtgaaatctagttgactcatccccactagatgacaacttagacatggatttacaatactgaataatgaagaattttgaatcaaaattgtcctttaaatttcctctaaatctttttcattaagaaattgccataatcatacatcattggacttgatggattatgatcatgagcttatgatgttactctattttcttataagaaaattagtgatgcgaatgaacatattccagatattatatccaagaaatgatgaatatcctcaataatttttaggaattgaatctccttcttactgtgctactaaaatattgattgaacataagcttaaggttataattctaaaatcgatatcaagcttttttacaagctgaacttagagttataatagtgtattagtggcagtcaaagctagaatagtaattcaatttctagattactaaatactaagtttaactttcacaagttttattatccatttcaatggatcaaactatttgttaatgtataaaattgagttgatattctatgactgagcatccacttaaactattaacaaactctttattgtaactagacctaggaatcatttacatcaaacactaataatgattatgaaatatctatggcactatatctgtgttatagtagttttaacaagattattctatataaagagaacatgtgccagataaccacttagatggtacattcatgtgtccttggaaatagggatacacattctaggagtggttatgagtaactcatcaaattcttagacgattgctatagatatttagcttatgccaaaaattggaaatgtttgaaaatttttataaatttctagcaaagacagttaagaaagtcattaaaagatcttgcgaaatgatagggatggagaaatatttgatatacagttcaaagatcatttaaatgaactttaaattgtaatcaaacttacctcctcaaaattttggagtcgcgtatggatgaaatgattgggctatgattagttactagaagctatgaaagttcttctagggatatgtcttagagatagcaaacgatattttaaacgatcgtcccatctaggtcataaaataaccttagtttatatcatgttaaagtacttattgtacaccattgttaaatttagggatgccctgattatgtcctttagaaatagctagaactattaacttagtttttttttttttcaagtttggtggctattctaaattgactaggggtggactataccatggtcatcaagagtagtaagtatttgtttccataaatactaattttctagacgttgactacttagatgtaatctcaaaaccaaagtagcacacaagtggagatactatttgattcaaatatgaaagtgttccattatcttatattatataagatagtcccacatcctctgttgtattgatgcaaacgaagaggtctataccactgaagttcctagacacataatcatggtaccttgtcatagtgagaggatttctaggaatccaccgtgttatgacttagatgatactagtgatgacaatttattgtttgttataacaagcaatgaatagtcctaataaggaactaaggctcgaagcctagagaactatggtttagccattcacatggagcaacctagagtgttcgaatacaaggataagatgggaaactatgcccagtctattcaatggacttaagaaaacttcccattcctagtatgaaggttttgatgaaaacatcaaagcctatagtttgtggtataactggtaacttacttactctgtcccaagtagctttcattagtaagaagctagagtattttttcaaatggctaactttaatggatgtcacttga

SEQ ID NO: 47527 - DNA, 630 bp, Cannabis sativa
catacaccatgaaggaattaaggggttcaaacaaatgaaagtaagtaccttcatgtaacatttcaaagagaatgagatcctgcttcacaccataccatatcaacaagaagtacaataggaagttggaacaaccccatctgatattaacaaatggggaccaggtcactggacttactcgattaagattgagatgaattaattccccttgccaccaaaatgaagaattgaagataaccccattccaaacaataagatccctaataaactttccaaaataggttagccaaattttcagattgagatatggagtaaataaggactcaagaaatattgaataagtgtcagcctctctccttctacaattgaatgtgtcagcctctaaatccatttaatctaagtaaaacactttgaaagaattcacacacagccaccagctttcccaaaatcaggggagatctgctgcttactgctcacgaaaacatccgacctatactatagtcaagtccgcatatctttctgatctccctattttgcagaactgctcccttaattccaccataagagggttctcattcaatggaggctgctgtgaaccctcaacgaagagtagaaatgatgtgagaaacagtg

SEQ ID NO: 47528 - DNA, 1668 bp, Cannabis sativa
cactttctctttctctcttcattttcttcttctttcctctcttctactttatattattttatattattttataacaatattttgtatttggatcacttatatttgcatcttcattaagatgctctaatgatggacttgttataatgaaacaagaagtataggtggtgtccaagtgattagaaatatagtctaaaagttattctattaaattatgtaggacgcaatatttaattatataaatagtcatttgactcctaatagagcatttccagtgcaataatcaatatctaaaattgctgcgataaaaatttatataactctaaaatataatattttattttctctttcatccacattattttttatcactttctaaaaaaatagtccaatattaaacaactttaaattatgcaaccatacctaacacaatattatttaatatttcatttattttaaactcatacttttattggtttcagttttcatttttacgttgaaaaaaaaaatagaaggtgcccctgacattatgtaacgtacgttgtaattaattgctccaagaaggtgctagcacccgtgtgcttagcatttctctattaattattactattcacgatgagaaaaaatatttgtatatttatttttaatttgtataatgatcacgttttagaacaatgatagaaaaatattatcgagtttttgtagaaatgagtatttatgtaaactttcccattttgcttgttaaaaattgtatgattcttattttgattggaatgtttgattttttttttatttacaaactagaccttaaataatttctttattactcccccaatattaatagcaatcaataaagaagttttaatcaacttatattgtcgtcaacctaacaggctacaaacaagtacactttaggaatatgggaattgagccataagttatagcccaattattattgaaaatacaagtacataagtcactttataattccttattcatataaagaggataattatagatatattatgataaattgttcccaatttggtggaacaaattaagaggagatggattatgcatgattcaagcgagtgtgccatcaacacaaagccattggccaacgaagagagcatcacagttgaggtttgggttgagggaactgaagaaatcgggtgccagctgcaatccttgtgtcactgaaaaacaagtgtctccatcttcaacaccatgaactgcgctgcaatctactacgactgccttacccgcgaattcttccattacaaaaataaaatactccattattatattataatataatatctgtgttatgtatataaaaactttcatatatattaaatttagttaattaattatggatgttgttaaacacttacttccggacaatcggctttcagcaatggagaaagtgattacaagagagatcatgaaaaccaagtaaagagttttgatgtttgagttggccatttctttcttcttagtaattttactttgagaatagcctaagtaaataatatatatttttttgtgagattgattatgctctctttcaattcttagaacgtatttatataataacatgagttaataaaaacaaaaacattgttgccctttcttgtcatggattgaaacaataataaggattttcaattt

SEQ ID NO: 47529 - DNA, 4905 bp, Cannabis sativa
  modified_base (363)..(367): a, c, t, g, unknown or other
ggcaagtcaaaactaggatcacttgtgtgatgcctaagcaagtttcaaacacctatcaagaatggtttagtaatttgtaattaaattacagtatggaagaatgatttaggagttgtaattagcttatagatttgaaaatgtacagaaatatttaggtcttaatgaccgtaagttgtattggatgcttgtttgattaatgaaactcctgattcatccaaatatatatatatagatatattattttaaaaaataatataccttataacaaaaaatacatataccatccaccaaaatatatatactaaacaataataataataataaaatatatattactaatatatatatatatactatactaannnnnttatataccacaattaaaatatatgtatgtcatgataataaaattatataccactattatatatactaaaataaaaattaattaaatataatttaaaataaatacacatcatacaactaaaatatataaaaataataattaaatatatgtagcatactaataaaattacatacatacattaaaatatttgtattatgctaataaaattatatactgctattatacataacaaaataaaaataaatatcatttaagaataataatatactatacaacaaaatagaaatatagtgtacaacaaaatttatataccaacaacccacaacaacttcttaaaaatctaaaaaatcgacataacttttcaataaaaaagattttaataaaactaatatagatttaccataatctttcaataatttacttctaattctaaaaaaaaattattgattcttttgtatggtaaaaaataatataaataataaataatctaaaagagttattttgctacaaattttaaaatgagaatatttactaacgttttactgtatgtatatgggaatatttactataattttcttcgtataaatccctcaacaaattttgccaaagcccaagttatagacccagcccattaatcaaatcctaaccctaagcacccttaaacaaaacttccatctctcccatctcacgttccgcagcagtttctcttatttggcttacgcacagcaaccacatcaccacagaagtctcttcatattcatattcaaggttttttcttttaactttttggcttaattttactactaactccgttcttcaaattatatatgcgttggttgtattttaagcatttctcttaatcattctactcattcaaaagaaaagaaaaaaaagaaggtaacagtagtgatgttaattgtatgtttcaaggttttgataaagagttattcactccgtgcatacaacacgagattcacttaattttccttagctctttctgcatcgaaattcatttctatattacttttacaattttagagcaagaattaacctaaatatatataaatgtcctgcttaatgtttcgatcggtttgtgtttgatgcttaattgcatctaccgtactattattgtacatggcttcgtaatatttcatacgagtaaatggttaatttcatttcatctccactgattttggattacacaacatgatcaaaagattcaaaactgtgttatttgtttttagttaccgtatttttttttcctttacaacgtgttacaatatttgtgctacattctattaaaactaaaacttatcacaaattgagtgattaattgttaccattgcagaaatcacaagaaatggccacagctaagacagtgaaggatgtaaatcctcacgagttcgtgaaggcttatgctgcacatttgaagagatccgggaaggtggagctgccggattatactgatttggtaaagactgctaaatttaaggagctagctccttatgaccctgactggtactttgtgagggctgcctctgtagccaggaaggtataccttcgagggggtcttggcgttggtgcatttcgtaggatttatggtggatcgaagaggaatggaagtcggcctccacatttttgcaggagcagtggtgccattcttcggcacatcttacaacagttggagtcaatgaacattgtcgacattgacacaaaggggggacgaaaaattacatctaatggtcgcagggatcttgatcaagtcgctggaagaattgtctctccatgaactcttgttttctttagtggtttatatttttatttttttgcttggtagacaattttggtaacctacaactactaattacaactactaattgagattcttaaaaagcatgtgttgctaatatcgtattttagttttttttagtagtttttaaatattttctgtattttacttggtgcgcttaattattactcgcttggtttataaatacttgtttttcccacttgttatatctgtaattataaatttaatagtataattctcattgtacatatgaaaagtattaatgttaacttattcttttcaaatataaaaaaacgcagaattggagttaattatcttgacaaatttaatttaattttatgtattattagcaaatgtcaattcaactccaattcaagctttcatatgttctgagtattattttctctgatttgtaagggtgtttatgaaatatttaattcaatttgcaaagtgtggatatctacactgtgttgtgcgaaacgaaaataatcaatgatttacaacttagtataccagaccaacaaaaacacaacacaaataagaaataatgaatcaagagatcttaaaattcaagtaatgaattaagtagcaaaacagaaaagaataataccaagtttaacgagttcaagctacgtgcaatgctctacatcttagtcgaaacaataacaatcatatctttgttaatatcagtgttcaaaaagttacaagaatcttcacagagattacgagaaaaggtttctctctctaggttagactagtgttgtaaatacgggtcggactttttgatacgacgcgaaactggcacgggcttcggcatgacacagcacgatgctataaattaacacgacacgagacaaaaaatatgtcctttagcatgacacgacacgagaaacacaaaaagaatgacatgtaagcacgaatagactagtctgagtagtacgacacacgacaagcccgaaagcatgacatgccatattaaaaaactttataattcattaataataataagatatgaatttatcaattataaataagttaaaataataataaaacttaatataatacttaatattacaattattctatattaaaactattaaaacataaaaaattaagattatatattttatagggtgtgatataaaaatttgagtatttgtaagtaaatatttaaattctaatgatgtgaataaattttttatatgattattggtaaaataatgttcaaaatttatataaatataactaaagctttgaaatatacatataatttagtaattgtaaaaaaaaaaaaattgaaaaaataaagcacaaatttaagcccaggtataaaataggtcggccgtcggagttagaatttttttcaggaaaagacacctttaacttcttcttcactggacgacggccacctttacccacgggagaagcgaaattgcagttatcatcgtcgatgactagacgtttccctttagccttgttagcaactgatttatgacctatttttgaaacttttttttggtaatggagatagagaagcaaaggcacatgtaatagccattatatagacgaaatgaaagatataaaaaaatgataaaggaggcagttggaagggttttgaacgtgggtttcgaaagggtaatggctggaaggtagttttgaaatgaaaagctgagaaagaaaaggaaaaagaaactgaatgctaaatttgaaaataaaaaatgaaagaaaaaagagaaaaaaaaatttgatatttgggccgaaataaattgatatgtgtaagtagtattttggtaagtaaaagctcattaaagacaaaattattgcccacgccttatagatgtatttttgtaaataaagtgttaatttgtatttttcatgtaaaaatttctctgaaatataattccaaaaatgggcatagagtttgaaactgaagacgaagctcataatttttacaatgcttatgcttataaagttagttttggtattagaaaaactaaaaggtataaagataagcatggtgtggtaataaatagaactttttgttgctcttgtgaagggtatcgtcaaattaataaccaggatgttattgtgagatgtcatcatgctgagacaatgtttggatgtttagcaagaatgaaagttgattgtagtcaaattggtaaatatcattttgttgagtctattcctaaacacactcatgtgatattaactcctacaaaaagtcatttacacatatcacaaagaaaactgatcactcctactctagttgcagaaatagacttagctgttagtttaggaattgctccaaaagaaaattaggaactaatcacaaagagagctggaggacatgaaagtcttagagttactcacgttgattataagaaatattacgaacaaaacgaccaattcaaatgaagttaggagatacatgtagtgttcttaagtactttcaggggaagcaattagaagaatcccaacttcttctatgctattcaggtcgataaagatgagttgataacaaatatcttttgggttgatgcaaaaataattttagcatattcttatttcggcgatattgtttcatttgatcctacctacaagaaaaataaagaaggttgaccttttgttatatttcttggggtgaatcatcataagcaaactactatttttggagctgcactactttatgatgaaactgttgaatcgttcatgtggttgtttgatacat

SEQ ID NO: 47530 - DNA, 990 bp, Cannabis sativa
caaacacgaaaaaaatataaaatatgcttagaacaaaaaactaattaaaaaagaaaaatacaacaccaaacaccccttgagaataagaggggacggccgaatgtcggtgaaccaatccgagaacaattaagaaagacattttaaaactcagaatgaagtaactaatggagtaaaccctacaaaaaagacctaaagccaatcttcttaagaacatagagtgcaaaacacaaaaaacataaaacaagctaaaaaggacaaaactaactaaacaaaaaaaaaaaatacaacaccaaacaccccctccttgcgaaaattgaagaaaggcaagaacctccgagacaacccgaatcttgcccaacaagagcaaatgagctcccacttagacatgatctccaaatgatctcatatttctggagaaactctatatactttataaggttatttttgttgggtctcgttcttttattttgttggactgcaaccaaaccttaactcctacattagtatgatattgtttgatttgggcctaatctattacattttatttttggacaccttcccaaaagacctcatactaatggagttggtggaacacttatatttgaggaacctcttgcctattcttccgatgtaggacttgggttgataccccaacaatcctcccctcaaaccaagagccacatacttgtggcctcccctctagcgaaaccactttttgcgactgttatgaatttatcaccaacgaaactcattgcctgaccatcaactttgtcaagaagattttcaacacaggccctgaacatcgatctccatcttgtattgtcgtaatcatcaatgtgaaacaccgcctgaccaccacaatatcattataatttcgataaaagccacaatatagatctccaatctcgatgtcatcacatcaagggcttctcccacgtatcgcaaatgcagtccactatctcagcgctcttgaacctttggctctgatac

SEQ ID NO: 47531 - DNA, 1287 bp, Cannabis sativa
ttcaatagagtccagtacctctcggaactgccttataatatgtccttggcctctgggagcgtgaaagtccttcccatgcctcctccaggaggcaccttgccagaggcgcttctctgttgtctaagacttagatgatttctttaaaagttggtcctctaagttccacgtgtcgtccttatccaggcccacgtattttgggcaaaatgaagggaaatatttaccccccaagcattgtttgttgggaaataaatgaggcttgtttggtgtttccgggaggctcatcgattccgtggtacgtgcttcgggcgcgtgagctgcatttatggcagtcatcattaatatttatttccctttgcaggcaacgattcgcttctcgtctattaataatacgacgcatttaatcagtgtcagaaaaggtactcaagcatttttaaccgccctaatgagcatttatcccaactgttggatctgcagaatacgaatcgattacgattcccactgtacgatgacgcctgatcacagctgccttgcacccgttggagctacatttatggcagttcatgtttaggatgttaaaaacatacttgttagtaaatttaaatcctggtaaaataattccaacagtctcattcttttcaagaggatctatccctgtgtccattgcattatatcattctagaatgcgttgagcttggctaaaaatttctagttcaaaatgactagaaatggccaaaacagtagctctgaaagtagcagataacttgtgataagataaaacttgagacaaaaggtaaggagtgacagaagaaccctaagacaaatgagtagaagcattagtagccaaataataatgataatcttgaaaatagaaaggtttaccaacctgcctacctgttctggtgggagaattagaagaactagaaacatgtttatgagaattatgttggtttttatggtccatatcagagttataaaagcagaagcagaattttgatacaacaatttttatctaatatgaatcataaacccaaggatatcaacataatgaatatagattaaatctaatctactgaaagaaattcaattacctattgatgcctacacgggtatcctttattcttttcgtataataaccaaacatccaatctaagaacttgaatgaagaatccacaccttgattttccaagtcagcctcaatactcaagaatagagtgggctattagatcttatagaatgaacaaatttaggtgtaacaatgtgtattcaactcattagacactacaatga

SEQ ID NO: 47532 - DNA, 956 bp, Cannabis sativa
ctgtggtgccatggctgctgctagaagaagtggcagcagtgttagcgtcagttgaacttgagagcattcgtttccgtatggatgagtgcctggatttttctaagtattgttttgcaaacgcagcagtttgtgtcccatctgaggttctattaccatgtagagccttatttctactcgaccatatagcccatagtatgcatataattagctcgaaattagtttgtgaatgaatggtagaaaggtggaaaatataatcaccattatacatttgttgcgctttgcttgaatccatgataaaactattttgtctccaaacagattttgcatgaggacaattaaaaagagcatgcccaacagattcccacatgcaagaacacatagaacaggctgccaagtcaagaactttccgtctgtgtaatgcagcagcagttggaagagcattatgcataactttccatgcaaatattttaaccttggagggaagagttaaatgccaaaaagctttccaccatgaactatgtaagtctgaagatgaagattgttgttgctcatccaagctagcagccaaatgaaaacccgacttaactgtgtattcgcccaatgttgtgtggtgccaaactaaacggtcagcaggaggcaaaaatctcaaagggattgagacaattttgtcaatatcaatctgaccgaagtagttgttaaggagatcaatgttccattctctttgtcagtgataaaatttacaaccgggaatgaaggatgacctgtataagtaattggatgaaactccgaatggccagaaatccatttgtcattgccactttgaatgtgaaatccattcgcaactttatatcgaaggcctttaagaagcagttctcgttcccaatgaatgctttgccatgtaagtgagggggagttgccaagtcttgcttccaagaacgagttatttgagaagtatc

SEQ ID NO: 47533 - DNA, 1074 bp, Cannabis sativa
taagaacggtctcccatttctcaaatatacattaaaatatatgaatttaatgaatagttgcacatgtttactagtaagtgcaactgaataaggtgtaattttatgaggttacaaatttaaatattataatttataatgaacgaagaaattttcaactataatttatatccaattttttttgacaacaaataatcttgtatgtaacaagtacaatatcggattgggattcattagagatgaatgaaaagagggtgtgagtgagacaatcataacacaaatatatacggtaaatactattttagtccctatgttttgtaaaaattatcgattagcaatgtgagactaactctaacactaacaaaaaaaaagagttttagagtctctggtgcttacttaagatactttgttgaaagatgtacagcccatgagcctaatttttatgatgctatgtagatagcttcacttaataaagtctaactgagagtgaccaaactacataattaaggctctcgaatttatggtctcttctagttaatgaccgaacaataactcttactcttagaccatttgatgatttaaaaaaaaaaagtgatgaatgttatatttatcacaatatttataattatattctacataatattagaatataataatcgacatacataaaaaaatagttattggtacaattataatattttgtactaaatttagtttaattttttttagcacgatcaaattttgcataacacaatactttaagaggtttttttttttaaaaaaaaaaatatatatatatataagttaattagtattgcctcaaaaatctaatcctcacgaatagattatataaattttttattaaatttaattagctcaaaaaataatttaatctcatatttgatctatattttacaattgtgatttaatgtactaagagtaaaaaaatattaatttaatagaaaaatataaaaatatcaacaaaaacattaaatttttgttggaaaccatattgaatatctttatatattaaaattgcctatctaacggcaattcgtttaacgattcttggtttaa

SEQ ID NO: 47534 - DNA, 952 bp, Cannabis sativa
  modified_base (925)..(926): a, c, t, g, unknown or other
ttagaagattgtttacatgaagcatcacagtatcaaatgccttcgagtatgagacgattgtttgtaaccatattagtttattgcaatcctaccaatccaagagatctctggagcgctttgaggaagaaaggtcagctgatttcaaaactccaggagattcatcacaacatgtaagatatgaagtactaaggtcaatatcttccacaatcgaatccatggggaaagacattaactcatatcaactgcttgatgatgacatatcttttgacgatattgatattcactctagagagatcaatgatgaattggcggttcatattccagaagaagatgttgcagcttcagaatcactaacgtcgagcagcagattgtctttaatgtagttatggaaaatacattgtcaaacaaaagccatgccttctacgtagatggtccgggtggaacaggaaaaacgtatttatacagggccatccttgcaaaagttagattgctaaacattgtggcacttgcaactactttgtcgggggttgcagcttctattcttcctcgtggtcgtacaacacactcacgttttaagcttccactggatgcagacgaaaaaagcacatgttgtgttagcaaacaaactgcccttgcaggtctacttcgtgcgataaagtcgataatataggacgaggctccgatgacaagaaaataacacatagaagcattggataagatgctacgagatataaacaatacaaacacaccctttggcggaaaggtgattatttttgggggagattttcgccaagtgttacccgtggtccttaaaggaacgagacaagagcaaataaattccttcttggtgtattcctacctatggcagacactgactaagtttcgactcattcaaaatatgagagctgttgggttttatgccctnnataaaactctttacaatctgattagt

SEQ ID NO: 47535 - DNA, 717 bp, Cannabis sativa
agttatgtgcaattattaatatgcatcaccgcgggtattcttatgaaaaatgaaatgtctcattaatgtgattaataaaagcttaaacccatgggtatgaacatttagacccatacccgctctcatctccaaaattagaccctcgcccccaccccattagggacgggtacctgcgggtataattgccatccatatctgcaacatacatggaatcattaagagtttcttagcggtcgcttatccacaagcaaatagataagtagaagaggtcaaccaaactcttaaggatacgttaaagaaatacctgaacaagccaaaaggaactaacctgaagaattacctgaagtgttgtggtcttatcgcattacggaaaaaatagcaacaggtactcatacttctttcactctaacctacgggtacgaagccatgatacccgtagagctcacaccacaatcacatcgaaaactaacatacaaccaacataccaaccatcaactgttggctgagtctttatttagaattgaagatattagagaaatgtctgagcttcgaaaggcggtgtattaagaaagagttgcaaaatactaaaagtccaaagttacaaatagaaaatttaagtctagagatatagtgtaacaacgagtattcctaaacaaggaagaaactgttgcaaattattttaccatgatcttagacctactcacaagtatgttgatt

SEQ ID NO: 47536 - DNA, 1306 bp, Cannabis sativa
tatgtcacttctgacgctacgttttttaaagagagcgacattgtccgcgactcagccagattattctatcggtaattcgttccaattttactgtatttaatttcggtataacatgatgtgtaagaaataataatggcgtagaaattgaaagtgtttattaaattctaactttgacaattaatgaaggaaaattataggcggctgccgacacttttgggcttggctaattgtattagggaattaaatatgttggctatcttctcaggccccttttcaattttcaatttgtttttttaaaataaatactcccattccttgaattgaattccttctatatttatgtcacttctgacgctacgtttctttgctgaacagaaaatcgagagagtatataaggtgagaaaaaaagttatatttgaagaataaataattcacctccatctatcctcctacagtcctactcatctacattttattattattattattattattattattgtttctaaagaaattacatgaaatatcatcaaaatcaaaaaccccaaaagtacaatccaaatatattgaaagcactgagattaagaatgacacaattatcaagtgatacttgaacacaacaataaaaaatgaattaaacattaagaaataaaagcgattcaaaggtgtgcggagtgtttacaaggttataagaaaagaatgggccaaggaggacatgaaccaataacttatggtgggctttgattagacaaatgatcaatactgtacaagggcccgtcctttctaagactttaggatggacaagacacacttgaaatttaatatctgcacttttttgacttttcactatttcaggcccggcaaaaataatatcactgtttaattttctacaatgctcacactcaataataattaagcaattactgagatggtttggttggtattattgtgaagtttggtcctctctgatgtcattaattacctcttatacttttcggactatcatttattcatctgtatgtagtttatcgtcatgattaaaggtatagtttataacatcgtcaaaaagtttatagacaacatgacatataccataaagaatgatcgcaaattcattaagaggatataggttgtttttgatagaatttaaatgtgctatatataaatatatttgtatttataacaccttagtagttctataagtattaagtataggatgggtacaccatgaaaagatttccttagaagaaataaaaaatttaataaagaattatgtactacaaaaactaagaaaattaatcagaga

SEQ ID NO: 47537 - DNA, 1621 bp, Cannabis sativa
  modified_base (207)..(216): a, c, t, g, unknown or other
tatgtatatatttatgttatttttaaaaataaaattgaaaaagtatactattcaaaaaaaaaaattgaaaaagtatatgatatttctaaaaaaaataaaaaataaaatattacaattaaattaaaattataattaacaacaaattttaaagattattatgtttttttttttttggaaattactctcatatactattttttaattttnnnnnnnnnntttacggtttgggtttctaaaataatttctctggtggttctatgtgggttgctatatagattttaattgcaatttaggtggacgttagttgaaataagatcttctatgtaggattccgtaaaaatacaaaaaaaaaatattttgaagtataaaaataaaaaaaaaataaaaaacctttttttttttataaataacacttaaattaaatattttttaataaaaaataatattatttattgaataacattcacacaaaaataaaaactaattatacaactaaaaatatacataaataaaattaaattaaaaatattaacctaagcatatcttagtgtacaaattagagctctcttagttcttttccaatatctctctaagcacatctaaaatttcctatctatatgtgctcatcaagcataactaaaagtagatgacaaatctctaaataataaactaaatgaagatcctaacaatgaaaaaaaaaaactttttccaatgaaggatgactttttacaaagtgtaatttagctgaatatcgtcaagctcaagccctttgcgctttactactgattcaacacgatccttcaacgtacgattctccatcagcctaaaaaattagaatccatattgatataaatacatatacacattacacattttgatataccaaagtaacatttgaacaatttggtaatagccaaaaaaatatatataatatatatgtgtatgtttttgtgattttacctagcaatttgagcacgtattctggcttgttctgcaatctcagacagttcatgtttatcattgttgtaatgaggtaatggaggttgaagaccatgaactgttcgttgagccgatgcccactgagcttccctttcacctcttccataatctctccttgttgtgaaagcaatcttaattggttttcaaaaaaaaaaaagagtaagtgattatattgatggatacatatatattttgtcaagagagagagttaaagaaagaaaaccttgctgtgaagcatggtattccaagccttgccactcaatgcatatcgagtcatgaacttgagaacatcaagagggaagtaagtgacaatgctgaaaagccatatcacaccagcccatccccatccaattccttggattttagcaaaaccccagtttgcatacacagaaattaaagtggcaacctgtttgtataagcagaaaatttcactatgtggggacttgttatgtaaactagaagggaaaaaaataaaagaaagaaactacaaaccagctgtgcagccatgaaggctccaagaagcaagaaaccagggcgttcaacaaaagaccaactccttgaacgggtcacaaagatgagtgcttgactaatgatgcttacttgaaggtagagagctgagtta

SEQ ID NO: 47538 - DNA, 3073 bp, Cannabis sativa
ttttgttacctgccattattattatcggctcaattaaaaaccatatgtatatgtgtatgtcatcaaaattttcaaaaggaaattatacataatgtatatacatgtagaatgtatagtatatatatatagtactcactgtaagacttaggggataagaacttatgattagcatgaaggagtgttgtagagttatcaaaagctggatgctcagccaacatgatccaatcttgatagcttttggcgtagtttagattggatatggtcactcgaacctttctttgatgatttatcacttgccagttgatgtttacagggcacatgtgtttcgtacactctattttcgacactaatctatcatgcctttttctatgttgttagaaagaataaaaaaaaagaagtgaatcattataaaaatatacaatatatctataatggaagaagttgaaaataataaggctattacgtacgtagagcatgaatgattctgatttgggcagctgcatgaacaaattgggcaagaagtgttgaccccatgagcagaggataaagagacacaacactgatttggtacgtccttgaattgggagggtggtttgtagctgcattccaccttccaagtctctgaaattcaattcaaaagtaacacatatataatttgagaagcgttatataaatatatatatttataaatttatatataaggaatttttatttatatgatttttttctttcatcttattttaaaaaattattttctctttagtaattatttacaacttagtatttcaggcaagctattttataaaagagcattactaaaaaatattattggtgtctagcactcccctcagtattatattgtaattagtatcacatcacatataacttaacaaaatagcttttagaaaatatcactaatcaatcgtggagcgctacctataaaaagcactgagcaagtgcccaatagcaatgctctttataatagatttttggtttaatattattttggaccttgtattttactatcttgggcttcaagttggagcgctaccctgtattttaataaatccggttacccagatgaggccagatttgggcacctcgattctagtgttttctccatatttaaactttttccatatttatcaattaaaaaaataagttttgagtttaagtcctagaacaaattaaaatgaattatttactgatttgtttttttaatgtaaccaacctgaagacaatttctagcccgaagagatgtaaaaaatatactaaatcttgtcataagacatataggtagatcagattattattaagttttattttgataaaaaaataaactcaatgtactatttgtactattttgaaaaatacaggatctaattttttatttaacaaaataaagagtcacattgatatttttataaaatacagggtctaaaataatatttatcatttttttcctttaaaattttaaactgcctttccatttttataattttaatttttataaaaaaaattaataattaacaatttaaaattaaatatgacatctacttttagttagacaaaaaacctaacttaaagcttgcaaaccaaaaaaaagcattaacttagacttaatgatgagtttttaagtagattaaagaactatgttttagtaataaattgatgaatttagatttgtttaggtgaatccttagcggacaaagattttctttttcttcagccagccccaccaacccttcaatttaggcgtggcttggtcggggtcagttttgctactgcgattagtcttgttattgtgaaatggttttaaatatctttttatttaggctactgagttgttgtttcatcttctttatttatttttcgatagatagccatcaaacatttgttagtggttggaaataataagttttttgcggttgaaggggtgtacttatgcaacttgcacaatagttgagtgttgaagctagaatttgtttttccttttttatttattttatatgtaaggaaggtaagagattgaatgaacccactgaaatagtttctattgttgtgtgtcttctaaacggtagaagaaactgaatataagtgttctcaagattaactttgatactacaatgtttttcatataatatattttagtttcttttgtcaaacgatctgggaatcagacaaccgattggttagttcacttttcttaagagtttttacaacacatactgaaatttctaacttttttacttttttactgtggagcgaattttttttttaaaaaatactgtgtactgtgttaagtttttactgttgttacacggttattttttagttgttttactgttgttttaattgttttgtattgttgttttacgattctttttgtaaaaagataatattttcataaaaaattccatgtgacattaaaattgtaaatttttacacaaaatctaatatttttgtaaagaaccttttttttcttattcttctgatcgtatttctattaatggggatgtcttaattgaattccaagctattattttaattagtagctatcaataaaattgaataatttcttaaaagaaacataaagaaaattaagtattaactttatttgtgtaaataattattattataattactatgaagattttgaagaaggatcgttaaaaatatttccatgtaccatttttatttataacatgtagagaaatttctgtatatatatttatattagtgtattttttgattttagcaaacatctcaacagttttaaaaataaattaaataatttgtggtgttaaaaatattgggttcaaacaatcaattgcttacttatttatttacatttatacgtgtgaaattaattaattaaacgatctttttttaaaccctaaaatgtttataaaaagaaattaaaaattggttagatgtgctataagtacatgtatacacactatcataaattataactttttaagtgtaatataaatatatttttattttgtgtgagtaacttattggaaaataattatttcataaactatttttctaactttttttttttttt

SEQ ID NO: 47539 - DNA, 612 bp, Cannabis sativa
tttgaagtgtaaaaatgataaagccccttatttttttttttataagagtgaataattacttaatagatcacttagacttgaaatagtttagggtaagtatatagggatacgacttgtaaaaaaagatttattaggtttagcgtatttaaagaaagtgataaccaggtattcaaggtttgaaatccctatctttgattatttggctgctgcacataggagacgattgaagacaaaggcggtgtgtaaaagtgaaacatatcgtagaatttctttcttttcggaggactagttgctatttgttcaagggagaagtatcaagttcattatattttttttttacgattaagttttaattgatttgatgaatacaatttttttttatgtatacatgagcatgtgaatattatttatgtgatagtaattatattgagaaatgttatgagatcaagaagtatattaagtgtgtatatatatgtgtggggatgtaatatattagtgggtgtgaatcatatgttatatatagcctttagaggcacttttttcaaccccatctataaaaagggaagctaaagggtgtgaaaatacccgctatgttcgaaattgacatttaga

SEQ ID NO: 47540 - DNA, 821 bp, Cannabis sativa
tttgacataacatattaacatcctcaaccttgcattttatttttcatttaatgtgttacattgtttggattttggtctgtctttatataggtgatggaaaatggttcaaggctatcttagcttatgcatttgttcattattttaagctcttgacttgcttgagtattcctatcttaacatgcatcttggcaccttcgaagggagttatctcgttcttgtatttttctttaattgattagcatttgctgtattgtattttgagtgtgtgaatatcagtctgtaggtgaattttcaggtatgtcactcgagagtgcaatgaagctgtttgatagtttgcttcacctattttattactttgtttatttctgcatgtatatggtttatttatcctggcttttcagggttttcctttcaatgtggacatgttttcagaagatgtttcaaacgttggagtgttggtcggtattcaacttggccaactatttactgatagtttcagtctttagttatttatcttcacgctgcagttttcacaattcttcaatctcacatagttttagtagtatatctcgtttgagagggtgaataaaagcatttatgaaatagctttgcattatgtgttaactgcagatttgggatatctggtattatctgctgtttgtgttgcccagtgcccacatctggtataatgaaatctcactcctgtttttttttttttaagtatggtatattggacttgacttttgctctctcgtactactccaagtattttaaatatagtatatggtcatttgcctcagtgattatgtttatagttggtt

SEQ ID NO: 47541 - DNA, 3897 bp, Cannabis sativa
acatacacaaattcacatccaaatttatgaaaaatctatttttttttatttaaaaaaacttacttttttactgagcttggtggtggcgacggtttgactctggagtctcttgttggtggcctgctactggtggttagtgctcgtggttgttatgggtcgcctgctgtcggttgaatcttgttcttcgttttcgtggtggtggtggtgggcgttgggtcgcttgcgggaaatggagagagagagagagacagatgctagaatgaggaagtggatgagactttaggcctttgggtggttttgtagccgtttgggggatcgtttggtctctcgatggttctatcacatcggttgggttctcggtgtggtggagagagagcacgaggaagagagagaaagtctgggagagaaaattaaataaaaagagtattttgagtagtttatgaaaataatgtcattattttgtaaaaattagtggaaggtataaattttgataatggggttattatcatgtattgataatgaaattctccaaaaaaaaaaaaaaataataaataaaataaataaagataaaaaacaaaaaatgaaaatccatttaaaaaaataggaaaggagaagcaaagtggggagtgaaaagtgcagaaggcaaacaatgagcgaagagggatttgaagaatgggacgcagaattcctggatcagctcatccaaattgaagagcttgcacttccttcttcttcctcaattgccatccctaaccctaaccctgattcgcatgcttatcatcacccttctcatttcccttttcctcctccttcgctacgcaatccccccagcttctctccccctcgtcagctttctcaaaggacctctaccctaaattctttccctcgctcatccaatgccaccgactccaaatgtagtactactattgctgctgctactacatctctctcttcggctccgactctccagccatcggaggacgacaaagagctcgaaatcaaacgtttaaaggtaagggttttatgttttaaggttaattactgtattgtgttaagtgttattttgaacgggtaactagacattcttgatataattactgtattgtgttaagtgttatgtatggctttcacaaaaaaagggagctttgggtgaccatgaaatgcaattcttcgaagagtttggatgattcagtttagatttaagaatgaaataaatgaaattttgagtgaacttgatgacttctgaatgcagggggagctcggacttgtgtcgaagcaactttcggacttggtatgtttcttactattttgttcttgctcatattgctatacctagacaaatttattggaggtcttttgtagaataactaattaaaaatatccccgttagacatttgacctgtctctttttaaaaaaagaaaaaaaaagggagccctgttcgaacttccataatttatattgctccaagtttattagttgatattggaattcgggttttttcgtaataacttttctttagtgctgtttttgggtagtgggtttttccttagaaaactttgttgctttatcatcctggcatcattgactggacattgtgagttgctatccactctgtgggccgaatactactactttctttgttcttctcatgttatagactaaggtgtttttagctttacgatgaattagttatggaaattgtcacttgtttttgtttcccatattcattcttatcagctattgctcatgtcttaatttatattttatgcttactttttggcgccttctgctaaatgccatatttttgtttgtaatctcatgtttagtgttcattattggcatcatcatgactcacataatccaataatttgaaaataaagactgttccactctaaaatcctgatctagatttctataattataagaagctgtgattatctaaaaagaattctagagagagacacatttaaaagagaagttgttaacagaactgaaatagggtatttattgaactcattgtcgtagtgcatcaggttctaatgagtgtttgactttcccaagttcatcattgaaacacttacaccttttgagggaacattcgatttccaaataaaggaaaatgcattgaaatgatcatatccttccatcaatgacatggatcctctcatttccttacattttgaactttgcatataaatatgtagcgatcttcatatcttttgcatggactaaattatttacttcaggaacaagagtgctcagtgctaagaaagaagagagtttatcagcccaataatgtatcttccaaaaacgaagaaaaagaagcatttcttcccaattcagaaggcacaggcacaaattcgtgagtataagctgtttttatgtatttatttatttattttttatatatgttttgtcatggttgtatgttatgtttaattttcccatcactagtattgctatactgagagatgtaccagtgaacattttttgttgccgtgggtgaacctttttttttttttttttttttaaaatttttttgaaattgggcttctcgtggaggaccccacagtagttgagtgatgagaaattatagcaatttctcctaggtaatagtttcctaaatgtgtttttaatttcattatgatagaagttctatttgagaccttgagtgatccatatattttattcttactagtctagaaatttggtggaagtgaaaggttaggctgtattggcatctcatatattaatttatagttattaccttccttgagtgacaaattgacaaccttctttttaatttcattatcataccatctcatctcatcctaagcaggccaagtttgagcaaggttggaaaagtagaaaacctctgtagagatttgtaacttatcttaccacgtttatataaattgatttagaaaacaaagattatttaagtgctcctcgtacttgttctcgacagttagctttcacaccaacttttatcctagtcccttatttgatgccaagttgggaaaaccccagaaacagtcccctttatgtggaattttaaaagtgtgggatgtttaatatattaattttaaagttatgaaatataatattaattcaatctagtacaacacaacaaaatttaggggtgatctcacaaagacctctggtactttggcatatgcctacattttgtgtatattattgttttttattttaaatgtgaaataaaaaaaatgcaaattatgtattatggtataacagggacagagaacatggagctcttggtgtgcgtcacccggtggtttctcaaagatttcaaaatgttgatattggtgagagcatagttattacttatcattatatcttattgtcttttgtcatagtatgttattgaataagtcaatttaattatgcaatagcaataccaagcaaaaaagctacaggagttcagacagatgatagtgttgtttttgcccaaggattctcaaatgaattattaacatctcgggatctgtcgaagaagttgttagcgatatgggaattgcccaacaaccaaatattgggaaggaacataatttctaatttatttgtgacttgccaatctgattttcatgttcttttcgggtgcacgggcatgaatcattctgctgaattaaaaatggattttccagtttgtggcagctctaatgtggatttgcagtgccctgtaaactcacatcatacttcggatgctgcaaaagtatcgcatctctattatgttctgactaaggtgcgtctgtttttgattttatgcatgtatggttggatgactttgatgataagacatattaaccgtcaataaacttcctttatgtgagttctaaaacaaatattaagtaaaccgttttccaatacatggt

SEQ ID NO: 47542 - DNA, 1219 bp, Cannabis sativa
  modified_base (1020)..(1029): a, c, t, g, unknown or other
attttttgtataaattaagtggagggtatatattttgaaatggggtattttattagggtcaattaatgaaatttccctttgtcaaatcgtaaataaagaataaattaaatttctccaaacacttagacaacccaacatccataataataggcaattatatcctaaaatcatgtttagaaaattgtacaaggtacggtgcaaacacacacgataatggtagtctttttaccactattataagcctttgaatactcttataataaataagaatagaaatggataaaaaaaactcagtaataaatactcatcctgttcatattagaataatttaatatcttatgaacaaggacaagtgccctcactacccccaaaactcttgtcaatattcataaatctacaaaactctacaaagaatttattattttacattttatgaaatcccaaaatcctcacaatcttacattgtgaatttattttcatgccaaacaaacctttaccactcaaccacaacaaaacaagaactcaaatagacaaacaatgacttaaatgtttttggttttgggatatgagtttccaaccaaaaatactagagataaatataataacctaaagtcaaaatcaatctcaatagtgtcctccattagaaaagaaaaaagaaaaacaaaacaaaagattggttttcttattcctccactactattctccaccatggtgtgtcattttaaaaacttcaactaaatatttttaattatttatatatgtgtatatataatatgaaatgaaaatacaattttttttcttttaagaattggaagtggtttttttaattattatgattattattccaaacatgtttttaatgttgttttaggtacttgtggagaaaattagtaatatgcattacatatcattaagtgggaatggttgatgagtctaaatcatggaagccaaattgagttttggtccctcccatcttctctatatatattttatatttgtatatatatatatatatgggtnnnnnnnnnntgggtattacccatgaatgggtaatattagaaaattttgagtttttatgataaaatatttttatttaattagaaaaatttctcatttttacattaagtgatataaaaagtagggctgcacatttggacccgcacacccgaaaaacctgaacaccgccccgacccgctgccaaaaaaaccgaccatcggaa

SEQ ID NO: 47543 - DNA, 2600 bp, Cannabis sativa
ttttttttttttgagaaaagtttattatattaatccgaaaaacaaattacataacagtcattagaggtggtggaacttcctctaaccaagtacaatttgaatccaccgtaagagcaaacttagccaacaagtgggcttcgttattagcagacctataaacatgagagatctgtgctcgtgggaaattggataacaaaaatgtaatatcattaagtataacataaaaagcagagagacccttagattgagattttaagccatttacaaccattaaggaatctgtctcaacaaaatcaacactgagtctgagtgtcagtaacaatttgagactccatgcgactgctaaagcctccatttcctctgtcttaacacaacctttcattggtttaaccattgcagcaaggacatcaccattagagtcacgaagaatagcagctagtccaaaaacaccagtgttgacattaacagcagcatcagtatttaacttgagtctgcccgagggaggagccaaccatttaggcttagttgggggcacctgtgtatgtggaacataggcatgaggcagtggttcaggagaaattgcagcagaaagatgcagagagtgtgcaccagtagcagcagtggcattgtgagcatctgcaggtgaatctgtgggcagtgtgatggtgggaagattgagccttcctgtactcagcaatataattattagcaaattgcaaaatttgcaaagcagattttggagtcttcgagtgagtctcagcattccttgctgtccaaatgcaccagagaatagtgatgaaaagttcaaccttatccgattgcaattgagaagaaacatatactagaaagtctgagaaagagcaagattttgacaaatgccaattaatttttgattcccaattcctccagacttgtctagcccgattgcaccagaaaaaagcatgattaatggtctccaaatgcatctgacaaaggggacattgaggagaggttgatatgtggtgatgttgcaaagtagcagcagtaggtaaagcctcatggtaagcacgccaaacgaaaattcgaattttagaaggcaatttaaggccccagaaatactgccaccatgttgcagatgtgagtgagctgcttgggagggaggagacaggtttttccgaagcaagtttataaccacttttaactgtgtagagactagtaggagtatagtgtcacaggagaacatcatcacatggaaacaaactcaaaggaattgaaagaattctatcgacatcaggtggagagaagaactgttgtagttttggaacatcccattgtctcaaatgagtaataaaatcagcaaccttgacatcatgatcattactcaaaaagagcagtggtttaaaattggaagacacaggaatccaaggctgagagctacagcaaacatcagttcccgaacctattctccatcttaatcccttaagaagtaattgtttaccccaaacaattgatttccaagtgagggatggttgtgtaccagcagtagccacaacaaaagaaccatttgaaaaatatctgctctttagaactctagcaaggagtgaagatggattttcaagaattttccaagcttgtttggctaaaagggcttgattcaaatgaacaaagttacgaaaccccataccaccatgaatcttagctttacatagaaacttccaatttttccagtgaatagcattaccatttgcagacttgccccaccaaaaccttgacatgagttgctaaatttgagtacaaagtttgattggcaattgaaaataactcatagcataggtggggatagcttgaaccacagcttttaaaagtacttccttcccaccaattgagaaaagttgttctctccaagcattcatcaatttccaaattttatcagtgattccactaaacaattgagacttatccctgcccgagaaagaaggtaaccccagatattgttcatggcaaggttgtataggcatattgagaagttcctggaaaaaaagttgttcagaggatcttgtgtttggagagaaagagagcacacttttctccggatttaacatttgccctgatgctcggctgtaaaggtcaagacaacgatgaatagcccttgctgaagaccgagaagctcgaccaaaaagcacactatcatcagcaaacaataaatgtgtaataggaggggctgaccgagagacttttggaccttgcaaagcaccagtagattcctcaaattgtagcagccttgagaaaccttcagagcagataagaaacaaataaggcgatagaggatctccttgcctgataccacgatgaggagtaactgagccttgtacggatccattcaacaagaaagagtatgaaaatgatctcagacatcgaagaatcaactcaaccattgaaaaaccaaaccccattgttaacattacttgctccaaaaaatgccattcaacccgatcaaaagccttgctcatatcaagtttcatagttgcataaccttgactacctcgtttccttatttttagtgaatgaagaacctcaaatgccacaaggatattatctgtaataagccgttgagagagaaa

SEQ ID NO: 47544 - DNA, 2705 bp, Cannabis sativa
ttaaagcctgtaataagttgtcggctatccgagaagggaaatcgattcattgttatgttgttagactcggtttagattataatttgaatatcttgaatagtttaatcaatttctattcgtgttcgaggaacttgatgggccttgcatgtgttctgtttgatagaattcctgagaagactattgttactgttaatggtatgatttctgggttcgtgaagaatgagtcatttgatgctggtttgaatttgtttaaacgaattctggtgtgccttttcggtttggaattgaagcccaactatgttactttagtaatattgatttctggttgttttgagtttcgaagacttgatgttggaaaaacacttcattcttactgtcataaaacgagtctggattcggtaacagaggcatgtaatgcactcattgatttgtattccaagtttaagtgtatgattgaggcatcacgtttgtttgaagcaatggttgataaagatttggtttcatggaatactatgatttctggttatgcttcggttggtgaatacatgagagctttcattttgtttagcgaaatgagatcaaataatattgcatttgatagggtatccttgattagtttgattttggcttctggttacggtaaagaaattgatttggtcaaaatggttcatggctatataatagctagtggaatagagatcactgcgcctgttggaactactttgattaacatgtactcaaaatgtggatcaatagagtttgctagaaatgtgtttttccaattacaagacgaaaatattgcttcttggaatgctctggttaatgcgtatgttgaatgtcatcatgatcaggaagcgttagaagtcttcagtcagatcaaattgagaaagctaaaaccagatgaagtaaccatgctaggagtaatcttagcttgccgaaactctggtgaattgtatcatggcattgacattcattcgtacattgaatcgagttctcatctcaatcagagcatcatattacaaaatgctcttatagatatgtatgcaaagtgcggaaacatgggccgagctaagttggtattcgatgagatgcccaggaaagatgttatatcatggacttcagttatagtaggctatgcaatcaatggtcagggagaggaagcttgtgatgcttttaggagaatggagactgagaacgtaaaaccaaactctgtcacttttcttggtgttctctctgcttgcaatcatgctggcctagttgaggaaggccaaaacttctttcattctatgtgcatgtcttaccatattcagccaaacattgagcactgtggatgcattattgatatgcttgcacgatctgggaggctagaagaggcagtaaaatttgtaaggaatttgcccgtcgggccaaacgcagttattaggaggatgttaatcaatgcttgtaaagttcatcgtgattttgatataggattgagtttgatcagagggctaaagactttttcacacagtcctgaaaatcatgtcatctcttccaatttgttagctgaagcaggaatgtgggatgatgtccttgatgaaagaagcttgatggtgaaacaaaaagttctaaaggttgctggtaaaagctcaatttctgaattaacataataaaattctggtagaacctcagctatgaaagttattgtggctttcccagtttcccttatgtgaattagcaatagcaataatagggaaagcttgctcaataacaatgagtcagaactgaagatgctctggataaaaaaatgaatcaaaatgtcacttcaagcatgtctaagagcaaaatcaatgaaagatgtaatgaatgttggaggatgcttgataattctagtaatatttaaggcaaattctaagtggtcaatggatgatatagaactagtttaatgaatgttgtttatatatgactgatatgagtagtttcttatctggttttaaataatgttatggtacatagaattattgaataaacagtatgtttatgttagactgtgacatcaatagacccaagtactagcatacaaaagattgcatcaaaagcttatctataataagccattaattctcctttaaaaaatgggcaagtattctctatttttgctgggaatacaggaaaataacttacacacttgaattccttttttttttttccatgttttttctccttcaaaagcaacaaaactaccattgccagtaattagattcatgaaaaaggtactggagccaaagtaaactcaatagttgtttattactgctaatctagagagcactctccttcatcgttagcagcaccagtactgcttgaagatggcccttgccaagacttctcatttgaatctgcttcggactggttgttgtttgtcataagaaacttaagttcattgctctcatgctgcacccttccagttatctctaagcacaatccatgggcaagggtcttatttggctgtctgcttttaccaggtttcttaatggggccaggatccatgaatattggttgaactttaagagttggatttggtttaatacgattagagtctctttcatctggtggcctcagtattcccttatctgattgtacttcctcatcttcatctttatttacaagaacctgcaagataactataggttatagcatgggtagagaaacaaattttctctaatgat

SEQ ID NO: 47545 - DNA, 849 bp, Cannabis sativa
aaaaattctaagaggtaaaaaaaaaaaaaaaaaaagcatagggcgggaaaggagtggaaggattcgtggttggaaagatgtgtgagatgaaatttgtcttatatatgtagaggtagtagttagtactagtactagtactagttccaaggtttagcttggtcaaaaaagaccaaaacttaattatttctatatattttaaagaaataaaaagatctgtcaatattatctccacaattttcacaatctcttcctcctgatcttcttataatttattgcctaactgtacagaatgagaatctactagatttgctatcgtcactcccttgggctttgttgcagaaacacaaaccatgtttaggaaacaaaatcccttgttcttattaaaaaaataatagggatattatatatatataattattgataatttgttttgtaggtacttactgctactataattatttatggtctgacttttgtttcttctattaatttaatatataggaataggatcatcatgcattgcatgcatgtatatataaggtgtacggaactttaatagaaggttcaattcgtattaagagaatcatgatcacagtccattaattgctttctaataattgtgatccgcctctacctcatgaatcccagaagatcagatatatatatgtatatatatattatacaggaagattatgcagtgatatcgatccttaaaaagaaactattccggtggatagtgtggatacttatttcgatttgatttatatatatatatttgattttaagagaatattattagttatatgatcgagtatatatatgatttcattctgtaattttatttaatat

SEQ ID NO: 47546 - DNA, 1027 bp, Cannabis sativa
aaaaaaaaaaaaaaaaaaaaaaaaactttaatggattttttttgggttttttttttaaaaaatacagaatttggcaacagtttacaattttagtgtcacgtataatttacaaaaatattatctttttctaaaacaaccgtaaaacaacaaaacgaaataattaacaacaacagtgaaaacataacacaatattttaaaaaaaaaaaatccaccccacagtaagaacgaaaaaagtggaaaatttcattatgtggtataaaaaccccaattttttttgaaactttcaaaaatactgtatgttgacctcgcttttagtcaacgacagtgagtcaattataaagtgattagaaatgtaataaaaatagagcaaaaactaataatcagtaaagaacatcggcccctttagtacggtaatagcatactctccttagattgtattaacttgagaacaaggaacacaatgttttctctctcaaagctcttacaacgaaatctctaagtaatgcttttagatctctctctaaagcaattttctattttcctttttgcttacaatgtctataataggaaggaacattcattacataaatagaatacatgaaatgggagattgagagagtctaccgtatccctctaattcaatcccataattgtagggattgtcttcatgcttggactccacgacatcaattctgaagtagtcaagtcctagtaaatagctcgaaaaatcgaactttttctctgcttgggtaatttgccctttaccctgtttgggtaagtagacgttgtgcgtgcagatgtgctacttgaagtctgctcggaatatctttcagcctaggtgcaaggaatattggacacgtgtcactcgtacatattgccatgtcatagtgcaaaaaatgggataacactgtaaaatgaagaaaaatatgtataaatattgtgatataaaaattttaacatttttatttttccaattaaaaaaaaaaaaaaaagcaatgtgtttaaagttcaaaattaacaaaaatat

SEQ ID NO: 47547 - DNA, 2044 bp, Cannabis sativa
tatatacaacacaactgacagacatttgcaaaaacacggtttttcaattataatgagtatgtagaatcccatttgcataaaatgattaattaatctgtacgaaaccatacctgcacccgagaacctgacaccgccaatttcaatcggaaactgggattagactgtttaatctctcctccaaacaatttgtcatcctcaaaagcagtgccattaataaccttgctgctagtcccaaacttcatagtattgtctttaacatatgaacaaagttgtattagcatactaaattcaagaacacttaaaatgtaaataattttgaacctttattcaccttattgttaattaagttactaaccttcagaatttgctcgattaatggtaacttggaacttcatttcatttttatcaataagttcaaatatacaaacatctcccactttcaaatgattttcatcaacaaatctctgccaatccttttttcgaaatgcagcccttcgaaatgggcaagtacttctaagacgtgcataaagtcttacaggccaaatcttgttttgatcatgaagaacatatagagtaatataatgacaagagttttcatccacattctgtctccaaaaatcttttggtaaggcctaaaatcattaaaacaagtaaagaaattagtataactgtataaataaagacaaaattagtataactgtattaatcaatttacaaagaaaacttaccatgtcatattgattatgtaaatgtgctttttgtatgacagacttgaaaaatggattttgggatgccaagttttcattcctagataaatctatttctttttctttctcttttgtagtcattaaagtcttaatgctaggaacaacaaaatgttctcctaatccatcaccccatttagcacaagccttaaacctccctgtaaatttatgcaaaatcaaaatgttaataaaacactaacataaacatgtaatatacaatacaaaacaatttaaccaaagcttttttctttggagaaggaaatggtggtgactgactgttgaagataatttcatcacaatgaagatcttggttttcttcacctatctcgggtaagggtagctcatcgaaatcgggatctatcttatcaaaatgtttggaatcattaacagggtaatctatttctgatccattttcattaactatgactacatgaaatctagattggccttcatttctaaaatacaatgtatatccacattttatggagtgatgccttgcaaactctggccaaccttcacccaaccatagatgatcatcatcatcaaatttggtcaatttaacttcccatgctccaccactaggaacttttaggacaattgggtttgatgtatcaatagtactagtcccatatttcagcatagactcacttgaaattttctagaaattaagcatgcatggaagaaagaaaatgccaaaagttagtgtaattatatatcatcaagcctaaaaattaaaataactaaaaaggaaagcttacaagcttattgtcaaatagatcatcttgtaagagtatcctacgaaagtgaggtgtaacaggagaaaaattggtagacattgttgattgttgaattaaagaaaaaaacacttctttaccttaacctgccatacattatgtttaaaataaggggtttattccttcaataaagttcacaatatattctttggaaaattcccaacatttccattgattcattgatttcttgtttgaaatgggtaaagttgattaattagttgggaattattattagttatgagaatagaaatttaagggctttgacacttgccagtttccaaagaccaacacaataggtctcaaaacacaaacattgatccatgcacaacacaaaaacataagttaagtctttttagggctcaaactgattgaatctatctgaaacttctggttctaccaagataaggttgataaccaactaactacaagtcagttggataagagttagttaaggccgttaggttgttaattttctgttatgatttc

SEQ ID NO: 47548 - DNA, 2041 bp, Cannabis sativa
aatatgtccaattaaaatatcaatatatttttcgggatattacacccttttttaagctcaaattttgattgtaaaatctccaaattgctgaactggtagtaaatttaaagtgtcattcatttttcacgggcaatatagactattaatatgtacttttgtacatgtgttaaatttatactggtacacttaatattattatttaaaaaatatacaaattatctcaaaaatttataatatatttaatttttttaaaaaaatattttatttttgctttttattattttatttaattttaaaatgaattttaaaaataatttttaaataataatattgttaagagagatgagttggttaagtttgttaattctgttgagcactgtttgtcttgacagttaggttgttagttaggagtagttagttgttggctaccacttgtatatataacctcttgtaattcctaactgacaatcaatacacaacagctctttctctctttcaatccagttctctttctttctttcattcgaatcttacatggtatcagaactttgcattgttcatggagtttacagattcttccaatggagcagcaacaagattgaacactgctcaactccacaatccccaagctcttctgccaaagtcctaccatgtcaccttcacacacttgttgtcaataaagcttgatgaacacaactttttgccatggcaacatcaagttcttgcatccattgaaggtagtcgtctgtctaaatttcttgattctagtcaaattcctcttaaatttctaacacatgatgatgaatgtgctaccaatgtcaaccatgtcttcgaggaccgggaacaacaagataacctgcttgtttcttggcttctttcttttatgtctgagaaaactaccaatcgaatgattggttatgacacaatgggaagccctgcatgaatactatacagctcttaatgtagctaatatcagtttgtacaaaacacagcttcgcaacaccaaaatgcttggctctctcaatgaatatttgcttaagatcaagaacattgttgattttttagctacaatcgggcataaatagaatgcttaagatctcattgaggccattttcaatgatcttccaccagagtacgatgtgtttgtcacatatattaccacaaggaaagatgcctactctattgttgagattgaggccttgctcatggctcagtctgcaagaattgaaatgaatgccaagaaccttgacatcagcaaaggggaagcttatctctctcatgccagatatcctaggtataatccttacacgcgcaacaattcatttggttgtcagcatcaaaattatggtggtggtcgaagtggtcctaatcaatatggtggtttaggatatccaggaggcaatgtgcaaaaccagaacaatcgtggtggcctaaatattggtaaaggacaaaacacttcagcacaaaacccaacaagccatggtgatccctcctttgctagaggacaaaacaacaactggaatcaaaagccccagtgccaatctgtcacaaaatggaccacactgtgaaactgtgtttttacaggttcgacaagtcattcacaggcccaaaatgctttcaacggtttcctcctacagcacatgttgctgaaatacaggcttgttgtgccacatgtgaaactgttagtgatgagagttggtaccctgattcaggagaaacacaccaccttaccccagataacaccaatcttggcactagtttagcctacaatggccaagaacaaatctatataggcaatggtacaggcctaaatagcgaacacattggtaatgcatccttcttatccccattttcttctgatactctacatctcaataatttactccatgttccatctattaccaagaacttacttagtgtgtctaaatttgcccttaacaatggtgttttctttgagtttcacccctttacttgttctgtcaaagatcaagtaaccaagaagatcttgttgtctaaaaagcttgacaaaggtctttacaag

SEQ ID NO: 47549 - DNA, 1680 bp, Cannabis sativa
tgtgttctatttcattcgtacttatttcttttaattgtttgaccatcaattaatattttatgattttgatacgagatctgagaaatgagtgtcaattatgatatagagaaataggaacaaatttcgatataggacgagagtccctatgtggtttggatagcttataaagtttctatatttaatgccttttacatgttttaatttatcaagaaagtaaaaaatttgcatgtaattgagatttatatatctgagtaaactataaattatctaagcaaacctgctattgtataaaaattagtaacataaattgaattatattaggccataatatatagataaattaaaatcaataactttagttctaatcattgttaattcacatatcagtttacttattttctgtttttattttttttagttttaattttctcttagtttcgatatagccgaatataagtaaaaaattaattttaacgtatataactacaacccatgtggtttcaacctcacctttatgagtaatattttcaatagatatgtacacttgcttgttaaatattttcaacaattttcccacacactctttcggaatatattgataaatttcacaaacaatatcgataagcatcaccaaaaatcgtaaattacaacaacactactacatatcgataaataaatcgctacacatcggtacttattgttaaacgacatccctaacattcaacacgctctcttatcactagatatcgctatcaacattgctagttatcgttaaatatcattcctaacctttaacacactctcttatcgataaatattgatagtagcatcgctaaaaatgttaaaacacgaaaaaaaaactacaaaatacaaaatcactcaagtccatttcaagtacaaaacaaccaaacaaaaagaaggatatgtgtagatctattcatatcaaactaaatacaattaaacctaacaagaattactaaagaaattatatactcattaatttttacaagaaatcggtttctaaaagttattgtttcaaggtggtccaaccaaatccactgtcatgcagggtggacgaatgataggagccccgacgacgggtgatttgactagtacagtgtaggtgttgtgtgacttccctaaagagagagagaaaagagagacgagagagtgagtgatagagagagaggatctttgtggttgaatgaaccaatgttaggttttaattgtttgagggataaaattgggaacaaaaatctaatcctagtatattttgtttgatgcaaaaatgggcatcatattttggctccatgcacactatttaagcatagaatgtcaaatttccctatgtaaagtcaataaaaaaaaaaaaaaaaaattgatgagtgtcaaattttcctatgtcaaatttaccctctcgactaatatgacataactcatatttgaatataagtttgtcatagtccaacacaaagctatgaaaataaaaattgtataggactggagagaaaagacacataattaggtagcgtttaattgaaagaaatgaaaacaatacgaatgaaattgaaaataagaataggaatagaatgaatcataaaatttaaaatactaaaaaaattgataaaagattattaaatttttttttcatcatatattgaagtagttttttcttctatt

SEQ ID NO: 47550 - DNA, 976 bp, Cannabis sativa
attttaacaatataatcctgaactctctgtttgaaaaataaaaatatataatataagatagaaatttcagtcgattattctcttcttctattttaatttttcctggtgaactgcgatttcgggcttcagatctcaataccgtttctgtcctctccagatcttacgccaccgttaatgacagttcagccctctccaagcagaatctcctccaatagctatgttcgccagtagcagtatagcaccagcaaagcctcttcaaagaatatatatttactatgtatgattactatgtttataaatatactgtgcgaggatataaaatatcattaccaatgtgactataataagagtctatagatatcctgcttcattagaaatgtatgaatttgatcatgcgatgttccaacagaaaatttatgtatcataatatacattgtctttgataacatacgcataaaaaaaaatatgcgggtagaagaagattcaaccatgcggaccaccacccgccccctcaagattatccccttgcagcacccttctacgacgtcctcttcctctttgccctccgtttctacacatgcttctcttttcctcaaatggacctccaagcttcagcgcatgatctagatcgattggcttgatctctttctaccttgctaccgttggattaggacctacaaggctacaaatggcgcgagtattttctgatcgacgttatggctggtgtcactattggtatcatacttgttcttcaggtaatttatatgtatctatgtatgtatgtgttgtgctttgttgtttggttggtgagaaaatgaatgaaataagaaaagaaacagaggtttgactggattaattgtgtaaatgttgtcgagtgaatttcgcaacaccaaattatattattttactaatacgaaagagaattttaaaagaaaagacaagtgcgagtattcaacctagaacgacgagtactcga

SEQ ID NO: 47551 - DNA, 1338 bp, Cannabis sativa
caaaacatctacaaaacaaaataaaataaaaatgaattaattcccaaaccataaaaaatatattaaaaaaagtcttctttgattatgattacaacacatatattgatatttcttcacatctaattaccctaataattaattacaataataattgttctttccctctatgcagctgtaatgaaagaaaatcagactataagattgtacttttttttgctaagttttaacatgatcctttaaaaaaaaaaacagaaaagggttgaataaaatagtcaaaacttttaataaaagtgactttttaagatgctttcccactgtcaatttatcatataaatattacataaagtcttaccttatatccattacttcactctttcaatgagacaataataattcatattgttttcttattcttctcacttggacctttttttttttgctttaatacattgatattgtgaatgtttctagaaccacattcaaccttacaaaataaaagataaaattgattcttaataatttctttagtcattaaccaattacaccacatcattatacaaagaatattcttttgaatttgttatgtagcaatacaagcaacacaaagctgggatttttattttttatgatttttaagatataagtttgtaaaaatatagttttttttttttttgaaaaattattttataagaattcttttaaaaaaaataaaaaatatgaaagaaataatataaggtaactggttacccttttatagtaattaattacccctatggttatgtagttacccttagataatataaaaactctttgtaatatcctcaattattgaaatgaggtcatgaaaatctctatttataaagatcttttattctattccttatagatatcttaatatgtgtatttatatatgcttaaaaaaaaataatacataaactacttttttttggcaaattatatatacatttacatttattttttaaaatttttgttagtgttctataaaaataataagaaagctacgtaaacaagaaaataacattcaaacaatatcaaaatacaacaaaaaataatatgtataaataacaaaaaaattaactacaaattaataagagtacatcataaaaatatatcaaagatcgtaagtatttttgtaattttgtttttgttatttttgtatttttttaaaaaaaattatcccctttaaaaaaagtgtatttatatatggtgttaaatatgtgtttatgaaatttggtttggtttgaatagttaatgaaatgaggcctatagggatagaagaggcccaatgaatgcttaggcccacaaggctccagccca

SEQ ID NO: 47552 - DNA, 2623 bp, Cannabis sativa
  modified_base (1398)..(1410): a, c, t, g, unknown or other
agtttccaatttgctagctattgaagaatcaaaatagttatagttatgcattgtattattaggaatattaattttgacagcttattaattaattttttatttgattaaagtttcctatcaatggagcccttattttgtgatgttataccgttaattttttattttttttaaatgcattacaatttaattaaaataatacttttaaattctttacttaatgactgtgtataacctaggtgtatagattcaaaatataaaaattatatatatatataatataatcaagttatatatatcttatttaatagttgctattataacttaattattaatttaaataatgataaaaaaatttaatttaattcaaagttatatgatatttctaaatacataaaacaaatatatctacataattttataaatatttgtaaataatttaattatattttaataataataaaattgaaaattaaatttaaatattttaagtaaaattattaataaatttgttaatgataataatttattggtttaattcaaatttaaatttctaaatatctatacctgattttatttagttaccttttaatacataataatataaaaaattaaattttaaatttaactattttaagtaaaatcattataaatttattcaaaaaaattatatttaattaattaatttaatattattaattttgatcgttaacttcaacataaaaaataacacaagatctctaaaaaaagaacatttttcattatatatataaatatatttttggaatgcattatatatatagatattatattatatgtttgactttataaagcattttcatatattaatattaaacgacatgtataaaatttgtctagggacacacttttccttgatcatgttattattattcatgaacattattatatgggaaatttgaatttatatttatttattagattaaaattatttttttaaatctaattaacttatattagtaggataggctaacattctacaaaacttaattttacccttcccgttttaaacacctgaccctctattttcctctctcatttctcttgctctctgaactcactcaaagaactcaaacccacaactcaccatccacaccattggtcgcttctttccaggaccaccacgaccattgaaccaaggatccacggacccaatgaccatcccagacctaacgacttctccatcaactacagcttcaccatcggtaatgttgttaaaggaataaattgtatgattaatgtttgttatctttgagtagatggtaaatttaggattgaaaatgaccagatttgagttttgggcaaaaaaattaatttttttgtcaggcccgatggtggtccgatgccttcctgttgttaaannnnnnnnnnnnngaagacgaaggtccgatggtagtttgatggtagctcgatgtgatatgctctgatggtggtctgatggtggcccaatgccttcttgatgagcttaataaatggagcttaacatttataaatatagagtatggtctcatggtggtccgatggttgtttgatgttactttttttatgtacaaaaatatgtatataaaaaaaatgagtagtatcaggctactattggactctcatcggccaccatcaatatagatgagaatgaggagtatagacggaaaagttagaagataaaaatagagaaggtaatatgtgaggtaaggaaatgcacaaagattaacaaacgacgtgacgttttatttatgtgaaataaaaacgacatgtcgttttcgtaaagttgaaacgggctttttccactaaggcccaaataaaacaaaaagaggcccattttaagaaccgatgatatccgttaccggcgatgagttgagttgttgtcgtactactcgtccatgaagatcggagagaatggaaaccagcggagctggacgaagattgctctgagttcgctctcagctatggtggctgagacgactacattccccattgacttaacgaaaaccaggcttcagcttcacggccaatctctttcctcttctcgctccaccaacgcctttagattggcatcggaaatcgtacggagcgagcaagggtttctgggtctctacaagggtttgtcacccgccattatcagacaccttttctataccccaattcgcatagttggctatgagcatttcagaaacattttaggaggaactgatgctgattctctttctctctcttcaaaagctctcatcggtggtctttctggtgttattgctcaggttttttcttcactttatatgagtatttatgatcagttctcaaaagggttccgtttcttttttatgctcagtgaatctttatatggaacaaggttgagaaagtctccatttttaattttgttatatgatttgagtgtttgagaaacaaggtttgtttggttttgtttctgtgtctgattatttgattcagttgggtgtttgagaaataaatagatttggatatgaatgtagacaacaagttttaatgatcgtatcaagaagattaatatgttaagttaatcttattattgacaaaggttgataatttatgttaattttggccctttttgtgtttt

SEQ ID NO: 47553 - DNA, 3944 bp, Cannabis sativa
aaaataatatatgagataattttcctaatttttatatattcttaataaaatatttaatgattattaatataattaatgatttttttttcttattttatatttttttttatattgaaacataactataaataatgagtcaaatataacaactcattattttttttgtgccaatggaccaaagtctagtatttcctagtagctacttaaatttaaacaatgtgattataaaacaattacatcattttggtaaactaatttcttaacaataataaactaaaaagattcgaaactataagctttgaccgaatttcttaattccaaagcctccagctcacagcaaaatcctcagtctgtgtctaacctggaatgaactcagttatttaaatccccaccctactaaatagttacctaatctaaatctaattaattagataatcacacaattttttctttttttaaagaaagaaaagaagtaaatacgacaagaaaaacaattataaataaataaggaaagccaaaatgaagagggcccatgctttgattggttgattgtattaaagaagaggtggtaagatagaagtgtacgagcacatagatctgaaaaacttttccaatgtgtttttgttttattataccataagcaatcccattttgcttttttatttttttttttaataaaacctcgagaaagtaagtcacgtgaaggcacgtgagttgggggtagtagtatagggctggggtggaagtgaagaggtctcgcgtgccggcgtgctcagctttatgaaacaaaaatatattaaagaaatgaaagtgggacccacgtcagctgcttctctgacaactctgtcttatgacgtgtgtcccctcaaacatgtgaggaggaggtggaacagaaatcttttatttttatttttatttatataaataacggtataagtatttaaaattttaagtttttaagcgaaataaatttaatgtttatttttaactgcataagtattcaatatttataaaactgtaatttttatctaattttatcagatttcgttttgaatttattaaaagaatatttagaactaactgattctatatatttctatctaaattcaataatccagatacttgaccttatatgtgatctgtttaagaaaataatagaatttacattaataaaattaaaaaaaattataattttataaatgttgaatatttatgatgctaaaaataaatactgaatttatgatacttgtaaacttaaaattttactgctatttattaatttttttttttaaaaaaaaaaagaggaaaaagaaaaaaaaattattaatgaatgacaatgtttatcttatagaaaacgaaagggtggttttattaattattattttattttgagtattaaatgaatgttattataaataaagacaaattagctgacttggatatgtgttgtgggacccgagcaagatccgtacgtgcagtggatccaagactttttattaattttattttattggtttgaagtttgaagtgtgaagtgaaggattggtgttctgagagagtgttttgggtttggttcttctgttctgtcacacttgttctttacacaatgtccggttcccacgttacaaaactcttatataaaagggctttcaaagaagaaagaaaagtcatattttcataggaaacaaattatattcaatttttttaatactaaaattatatggtttgtactctcacataaaaaaaagttaaaattttaaaaaaatttcaaaaaaagaaattaatgttttagtagtttgttaaataccaatttttatattataaattatttttaacttttaatattttttatgatattttaaataattataacgtacctacttaaaaaaaattatgaaaaatactagactaatttttttgcttgattgtccaatacattaatacagtggcgaaactagtcctatttttcagtagagataatttttttttttttattaaaagactattaatgaagaatatcatttttatagagataaaaatagaatatgtgaatataaaaataaaaaatgtaaagttagtagggataaaaatgagattatgggagatgaaaataaaattaaatgggataataagaaatttcacaaaataaaaattatactttaatattttaaaaaaataaacttaaaataatttttaaaatcactcattatgtttttctaattttttttctcatattattttgtgttaatttcaatatttattttaattttatttttatatttttatataaaaaaaatcatgcataatttttttattttttctaaaaaaaattcacatattttttatttatttttataaagtgcatttataaaattttagagtgcaaataaaactcggttgttaattttataagggtaaaaataaaaacatataaaaatatatgtacaaaaattaatttataagaagttgagatgggcaaataccccacataacaccctccatccaccctacaacaatgtaccttttttttttaagaggtaggtcgtagaagcttcaataggttttttgttttcatttgtgaaaaatgcattttttttaaaaaaaaaaaaaaataccaacaaatctattttttttaatggaaaatgcatctttattaaccattaaaatccgctaccaaagatggtagcaagtagaatggaacagactccatatcgaaagtacaaccagaaaaaaatatagaagctcttgcacagtcatgacaaaatttataacgatcagttcgtagttataccaattttttttttctagagaaacttgatgataacaaaatttataacacaaaatttatgactaatgtttccgaaaaagctacattgttagcaatttgcaccaaattgtcgcttgaaatttattcaattataatttgagccatttgttaatttatttatagaccaatttattattatttatttaagttccaaagctcttaagcaagtgattcctttatgagttcttggtatttaatacataaaaatattcaacaaatattatcatattataaccttatctcttaagatgcttgtaattatcatattataaccttatcatattatcattaaaagaaaattaaattttaatggtaatatataaaataatttaaatttagtataaaattagtattagttaaattttacaccacaataaatattaatttttatttattcttgtgttatttattaatataattaataattgtttttattttatttatatatttaataggtttttttatatattttcaataaaaaatttattcttttgttagattttttataaaaaaaaaaagaagaagataattttaccttgtaatacattgaagtactattataaatttataccaaatataatattaatttatttttttgagttaaatttagcttttaattatacattattcattattcgttggagatgatcttgaagaaaaaaaagtgaatgcttacttacaagcacacacaagatgcttgttagtcttctatcttcttcgtgtgtgtgttttttttttgtttttttgttttatatttatttatttaatagcaagatgcttttagtcttatttatgagcatgatttatcaattgatatggtcctctttattttattttcttttttgttagaaaaatggccctcctctttatggtttgcatcactcctctttagttagagtgatttctgacgattgggctttcagcccattacctattattggcccatatcaattacatttggagtaacatttgcaaaaaaaaaaaaaaaaatataccacatattcaaatttctaattttttacttttctactgtacggcgaatttttttttttaaaaaatattacatacttttttttttaaaaaaaatactgtataagtttttactgttgttctaccg

SEQ ID NO: 47554 - DNA, 1882 bp, Cannabis sativa
atataaatatattttttttctattttattgattaaaaagaaaataataatagaaatattttttttaagatatgtagattggataaaaaaaatgatgacagaaagatatattttaaacatgtataataaatttaaatttaaaatgcaatgtaaaaataaattcttatatagttccatttaatataatataagagatataagaaactaaaatatgtgtagtgtttaaattttaattgatatgttttagaaaaaaaaaaaaaaaaacaattttagttatataaactaaaaatcccaatttaatataataacataaatttatatacctaattaagagattaagtcaataagtggagcataggataaggatattctttaccaataacaaatgtgttatctggtgtcgattgatttggttattgttttgttccatgatgtccaaaagggtatccaaaacgtcatcgtttttaacagagtcggaagattcccttagcttcaacctttggttgatcattccttccataagtagcaatattctgctaaagataatcttcatgcgacgccttataccaaaagggtcaatcttcttaagcaaagggaaatagtcactcaagtttggcgtaccagcctccttcattagatcccaagtaatatccttgaaatctctagctaattcagattctgaatcagccaaatccacagaaaaaatggtgtttgacaacaaactaagtgtcgaagtgaaagcggcactgccaatatcgatagcttcaacactcaaactactctgttccactttttcaaaaagctctttcactttcctccgcctgagttcttggtttgtatccaaaactttgattgcaaacaattgagtgttacagatctttcgaaggtttctccacaggttagagactggaatccatggaaggccaacgttttcatgaccgtgaacatagagcgcatccggaatagttcggttggacaagtagtggtcgtgtgtttgaaggacttctttggccatcgccgatgaagaaaccacgatggttgtgacttgaccaagcttgaggctcattaaggggccatggagcttggcaagctcatacaacgacttgtgaggtttgtcaccgagttggtggaggtttccgatgactggtaatggttttggacccggcggaaggtgatcggaactgggtttggatctcatgaaagattggagggctcggatgactgcccatgtgaggatcagatagagaatactactccaccacaattccatcgatatatctatctgtgttattttttctttttcttcctcctataaccattaattaattactatttgttagtcatgtgtttggttggataaaaatttggcctcacttggttattattattgactatttcactttacgtgtggaactggaaaagttaaatagggaaaattcatttaaagctaattaggaattttgctctaactttgacatgtattaaattatgttcttgaatttttaaggtcagaactattgagattattggatttaacgacttttattcaattttaataaaatatggtctaaaatggatgaaagtagaggagcatgatttagtacatttcaaaattcgagagacataatttggtatgtatattaaagtctacagagcatagtttagcacataaacaatcactgaaatagtaaaattgaatgaaattatttttttcttctctcctcaactcttttatttttctttaaaaaaaacccaaaattaaaatatttttttccctccttaaatctcttatttttttaaaaaaaaatctaccaagattcctaatacgttttttattggattaattacgcatacaaactaaaatgtcaatttatttaccaaat

SEQ ID NO: 47555 - DNA, 1805 bp, Cannabis sativa
  modified_base (1735)..(1741): a, c, t, g, unknown or other
atttcaatcaaattgactacttaataatatcaacatatataatcattgtcgagactcaaatgacaagacgtgaaatcgtccattcacccaaaaatgaaacatcagtgttctaaaataatgatataatctccatcttatttaatgccactaacaactatgaaactttgttgaaaaattaaaccaaaaacagcacatcaaaagaaaaattgtgtcaagcacagtccctccgtcactatgcttcactcaatcattttgtcaaacacattttgtgcataaaccatatattccaatgtaagcaaatgtacatgtttttatcaaagtcctttttatcagtcgataatgaaaaactataaaaatagaataataatcataataacactataaaatagaatattaaagtgtgataatctgaaagttctaattaggggtgcatacgggtcgggttatcggatttttggggtttcgggtttgggttttcgggctgcaggtattagaaatgttcaaccgaacccggtttccgggtgtacgggtatagtcgggttcaggtcggttatttttaggttgggtgtagtcgggttcgagtcctattgggctgagcccgaatgtttaatttatgggttgaaataaaatttaatttttaaaaatatcatttttttttttatttttaacattggccggttggacttttttttttataattaaaaatatatatataaaagattgattaataataaaaataataaaggatttttacaatagttgagtgagaaggatttttacatttatatatataatatatactaacaaaaagttacgtgcgaggtacgtatactaaattttatgttaagttttttctacgttacttaaaagtgatataattaaaaattaaagaaaaaatttaattagttattatgggaaattattattgttagtatctaaatactataatttataatttttgacaattaaaagtaaataccggatgcaatatattaaaattaaatacaattaaaaggagattttttacaaagcttccaaatgtccaaatcgactctactaccgatcgcatatcttccatcttcaattgactcatccatatggccaaattacttcggtagcccaaatggcaagttatacttggagactaaggggccatcatacggggttttagtttctcgtcattgtacggaacaaaggtggcgaggatggcttacggggatgggttttcaaagagagagaaagagagagagactttcaacaatcaatgataattgatggttacagaaggggattaatatatatttattattatttatatttatatattaacttataaatcgtaagctatttaatattattatatatttaatttaattttattggcttgctaaggtcaattatttagtctttcaaatgagatttattcgcttgataagattttcaaattgattgaaaatttatttatcaattatttagtcttttaaatgagatttattcgcttgataagattttcaaattgattgagaatttatttctttttataaaaacataaataagttattacataaaagcgattaacaaactgaatcgttttagtaagaataggaaagtttgatttgaaatattttaaaattgttaaaaaaaaaaaatcacctaataatttctcataaactaagaattctgctatataggcacattttatatagatagatacaaacacacacacacacacacnnnnnnncacacacacacacacacacagacacacagacacacacacacacagacacacacacacacacaca

SEQ ID NO: 47556 - DNA, 1183 bp, Cannabis sativa
ctgatgacactgcatcagtactaaagaaactttatacatcttttggttcaacacctttaatcataccaaaagaaaaagatggaggattcaagagtttaaaagctccagatacattaccctcttgggtttccaaagaactcatcaattactgcgccaataagttcaaccaaactggctttaccggaggattgaactattatcgagctgctaacttgtaggattctctcttaggattgaatttgaaattagtccatttacatctatgcttagtggtttttgttaatccaatgctctttaagactttgatgttaaattggttaaaacactgctttttgtttgtggttttgcagatcatgggagctcctggcaccttggacaggagcacagataaaagttccaacgaaatacatagcgggagaacaagaaagcacctaccttttccctggcgttaaggaatacatagaaagtggtgactttaaaaaagatgtgccattgctggaagaagtggttataatggaaggtgtgcctcattttattaaccaagcaaaaccagaggagattagctcccatatacatgaattcattaagaagttccgagtttaatttgcttgaataatctatgtaaaacagagcagtcatgatacctaaatcaaataaattactattaattgtacttttagtagcttacacatcaattaataattgagtcatgagtgaatctgttgcttagttataaactaggaaacaaacagctggattctaaagcataattgaaatatatatatttaatagcacatttatttaattaattttaattttttttaaatatattataaatatataatgaatgtgagggatttattaaatttttaaaaagctgtatttataatgttatatttgtgtaacttgtctaatatttataggaaagttttattcccgcggcacaaaattataagagtacagataaaaatattgtttatcttcataaactcaatatttggtctatcgaaatacaattcttacatcaaaaaataaataaacaaacataactttataaactccaaatattaataatcccagtgtcgtatccgctgatacgttttgcagtctctcaggtttgagagtttagttctgagttttggtttttgttcaattctgattggttcgaaggtcttcaatggcg

SEQ ID NO: 47557 - DNA, 833 bp, Cannabis sativa
gataatgaaaagtggttcttttaattccgttccttttcattttgtttttctgattcaatttttgttgatttctaaatcacacacacttttgtgtcaatgaacatgagcttttgagttgttacagtagattttgattttatcttgttcttaattttgttcatgccaaatgtttttctccttgtttcttttaaatcagagttttctttgcaactaaacaaagatttgtattatatgtaaatacattgcttaattaattagctttttaagtgtattataataaatttccgcgatcatgactgctcggcgatgggttgatgggtctccgccacgatcattagaatcttgatcttaatgtaaatttagttggttgctggaatccagtctccatcgccatccaaacctttccgcagtagccagcacaaagaagacgaaccagcagagacgaacactaaggtaggatctgctgtctttttatctgtaaatctagtttgggaatgatatttaacaactatcgatgtgttttggtgattgttttgttgggattttttgttcttgttttttgtggcttgattcttgagatgttggtgtttggggtatgggttgtgttgctattcttggtcagagacgtgtaactcggtcggagatgtttagtacaatcttccaggaggagacaatttcgagatgatgacggaatttggagttggcagccgagattcacacatctggtattgatttcgtattaatatttgatatatcaatattaattttaattttatttattgttgattttattgttattaaaaggtgattaggtttttattatttttatttat

SEQ ID NO: 47558 - DNA, 802 bp, Cannabis sativa
gagtttactacttgattgcgtatacttgcgtagtgttaataaattttcagcaacaacattccattggtggcagaaggtgaacccctaggagccacatccttcaggtcttggatgaccaccacttttgaattattaccaaaaggagcaatctccccaatgcccgacagtctcacgagaggaatttgggtaatgaccgcctccggttgatctaacctagaattggactcgtcgtcctcaaaattcgttttttggccggcagttgcagtctgcattctacggttcgtcggaatctccatggagaatggccttctagatcttgaactagttacgaagtaccgggtcatggccaagaggcttttggagaatccaatcctggaaccatttggccagaggagaggtgaaggtggatcgttctttggattcatgtttcagccaggtcccaaacattgggtagaaggtgcctttatcgtctttaatcaccgtgggggtttaaaacaaacactttgatcatggattagcattccacatttgaagcaaagttttggaagttgctcgtacctatattgaatccaaaggtctttaagcttctgcctacgaaggaagaatcctgagaaaattggcttattgaggtcgatcgttgcccggaacctcagagtgctaagacccacatcgtccttaatacctagcagctcatgaacaggggagaatttggacgccaattctttcaggtttgacaggttccagtagaaggggggaatactttcgatattcacccacagaggtgttttgtcaaacctaactt

SEQ ID NO: 47559 - DNA, 1089 bp, Cannabis sativa
ttaatttatacatagtgtgagtatctggaattcaattagatctatttttttgaaacttattttctattttgtaagtgtattaactttgtattgtatattgaatatgaatttttattgaaaaatttaactgaaattaataaagattctaagttgcaaactttgaggagacaatgcatcgaatcagttagaagcaaaaccactaattttatttaacttatatggaaaaatatctaaaccaaaataaacactaacctgattgaagccacgattttgtatagcattaacaattttatcaagatcaaaaccacctctggaggtttcaagagccgtaccgcccctcttatgccagttatgcacgatcttcggattaagctcaacaggctccgtcgagtaaaatccccggtacccagcggtgactccgaagatctggcgcacgccgtagagctcccaaaggccattgacgagctccctgatgacggtgttgaggccggggcagagtcctccgcaggtgacgatagcagccttgacagacgacggctcgaagaatatgcttcggcgggggccggcacggtggtaggcgaggtgaggcgaaggggcgggcaaggttccaggtagctcgaggacgatctgacggaggatagcgtcacccggatggatgtagaaaccttcagaggggcggaagaaggggttttgatcgagagggtttggtagggttttgaggttagggatatagtcggttaagtgaggtagattctggagcttgatggatattgaaaatagattttgatagtccgactggctgatcaggtcatcttcctccgcctgcgtcatggccgccattgttggggattttgtaatctagtaaaaccaaagaatgcgattaagacaaaaacagagtcgtgagagtgagaaattgaacggtgaagcggagcgaagagagtaggaggagaagacgagaattagcagttgaatgcgtggcgcgcgcttttttacaggtactgacacgtggatatttttgctgggtttctaactaaaatgtgccacgtcgacacctggtgggtacccactgattgtctgaaattcccgatt

SEQ ID NO: 47560 - DNA, 2129 bp, Cannabis sativa
taaaccacaatttttcattaacaaaccaaattgagaaggcatttaaattgagttgttaagtgcctacatcagtccaatttttacgttttatccaactcaacgcctcattaacttctattacttcagctatttcaggttgaaccataccacacatgctagctgagatggtctcaagcattcttccactggggtcacgagccacacaccagaaaccaaacatttgttgagcttcaaaaatagcaccataaacattcacctttgaccttatgagctagtactggtttatgccactttcgcgctgccattgcttgtatcagcaactaataatggcccatgatacatatgtattatcaacaactaatagtggcctatgagctaccgtagtatatgaaaacaaatttttgttcgattgaatataccagatatttagtatatgtaatgtaacagagaatgtggtgtggcccatgatacacattgtttagtgggtttttttttattagtataacaaaaaatattatattattaaaaatgtataaataaattatgttataagaactctaattttttttgaaaacagttatctttattaagtagtgcaatagcttgatgagaattatggagttctatctcaggattttaagcgtctttgcaccatctggatctcgtgcggctggctaactatctagataggtgtggatcgaaagcccgctagggatatggctatgatactatgatgagaatcatggggttacatctcaaaactaattgatgatgagtggaataacccatgttcttatatatggctcaatacttttacatttaattcatgtgggacaatgttcaccaatatcgcttaacaaaatagacaataaatcaaacaagatcgaatttcccataaactctcgaccaacaagccatcaagaatttttaataacataatatgcaacttgatttacagattgtttaacaaaaaataaagaaacatcacaaattaaccccaacaaatccttacattaatcaattaaaatttcaaaattagagtacatttgtaacgaactacaaataacctctaccaccatcaaactatatgtttcaaggccaccaccggcgtactagctagggtatgtctttaaccaactcaacacctctttgatgcccaatacttcagctacttttggaacgactttcccataaaatcacctcgcatgagctgccactaaacaacccaacacatcacggacaacaaacccaacctcatatctcctttccccatcaaataaagttgtatcaacattaatcttaatgcatgaaatgttaattgatggagaatcaactcatgtatctatatagaggaaatacactgtatatccactttttatttcttattttaatttttacttttattttactactctttaatttatacccagttttataggtcatatccttattatgtacattaggactctaattttgataagttatgtgaggttatatttgacactttgattataaaagaagttatttatcaattaaaattattttacagttaaatttagttaatgtgtaataacaaaatgcagttctcaacttatcccatctctatactccctacagctagtaattttcataaatatctaaaatgttaattggagataattcccaagttactgccttagggtcattcaagttggatcgttaattggagatagaacatgattttaaaaaaaaaaattacttttctaattaaaaaaacgaaaaactaattaaaaaagtatatcaaaggcactcaatatttattacaaatatgtattattttctccttaatctttctggtccaaaagaatagttttctctcgactattgatgctctagtccatgctctaatcttaatttcaatattttttaaggaaaaaaacaatctataatattattttctctgtctcctcttatctttgtgccatattttattttaaattaatatcgtggtgtgattcgtgtatggttttactcatagatatggagtgttaggtgatgtttggtttggtggaatgtaatagtaatggtaatggtaatagtaatgtaatagaataaaaatagtaatggaaattgattaagatgtttggttt

SEQ ID NO: 47561 - DNA, 1689 bp, Cannabis sativa
tacatcactaaaattatagcttctctattttaacatcagacctttatattacataataaaccactttctctatttatttttctctatatcattcaaaattaaatcttacacttccaccttgttagaacacataaagaaatagacgattttgtttggtttaaattgttaacgagaattctaaaactgcaaccaataaaatcagagaaatataattagggggtctggatttagaatcataattgtttcattctcaaataatttggtccaaatttattgaagtttaagaccataaattacgaattataatattatataaaacaattctattttttattacaatatttttaattttaatataaaatttgtagtttgataattcactataataactttttttctcttttattttctctcctctttggagatcataagttttttaatatggaccctagtatcaaacatatatataaaagtaatagatttaaatttctttgtaagaagctagactatatttaatttagaacacataaaagtgtatttgacgacattacgtgtaagtaattttatgtcccatttttctttccttgttaatatattattattgttattctttttgtgaggtaaaacttttgatttaattttgatgagcatgtcaatatagtattaacatattttttgaaagagtattgctaattaatggacacacatttagatatactatataatttatattttttttttttttgaaacatatataatttatattcttactattttacttcattttttttttggtagaactagttttgtataaatatatatatttgaatactaatatcctaaccatttttgagtatcacactactacatctgtctactacctttagcttagtcgggtgacaacaacgtgtcatttgtatgtctcctccttcatgtacacaaaattgaatctattttaaagggttatgtttggcaagaaagaagaaatatttgaagggtgataaaaaggccatagatgacgatggatagagtgaattatcactttccataatattgtttggtgtggaaagagagggaagggataatgattgattttaaatttaaatgtaaaaaagaataaattatctaatatcatatatactgtgcatatattatttttattaaatgatatatgagctattctttttctcttaatgaacaaatacggaataatgacgggaatattacctgaattatatattttgatacatttgactttataaattgaatttttgaggataataccctctaatctcaattatgttttggtttttactattttattagattttctcaattaagtagctcagtaaattatctatgtatatataattgtacacattatattttgattgttccacttaattttaactatttaaatataataaaaattattttaaaaatttaaaactcacttaaaaaattacaaaaaaaaaatgtttttgttttttctatttattttcttctttctttggaaccatcgagatcctcccttctctttctgtggttcgttcaattgaattttatgccctaaataaaactaaaattcaaattatattttgactttatcaatcacttggttcatgtcacgacccgagtcaacgccgtattagatatgtaatattcatagcatgagtggttaaatgtcac

SEQ ID NO: 47562 - DNA, 1108 bp, Cannabis sativa
cgcagtcaggcatttgtttccccagtattggagacccaaatcttgaagccaaatcaacaaggaaactccacgaatcagtttgatggcgttcagatcagttgaccacggtctcactataactggttttttttgttgacttggagaacccctgcttctaggacttgatccctcgatgcctcatcattaaaattgatcattgtcaaacccattgtcatcctgactatttgagaaattcccaaatgtcccaaaattctcttgatgtagccttcaaaaacagccataggagggttagccccaaggaccgtacaaatcaaggttgtattccaatttgtagtttgttgtttcacttcctctggatcaacatgagctattttacatccatttttaatcataggttctgtataaacaagaattgagtctcgatagaccatcttttcctccttaaatgatttccggcgattcctcactgaatcccgaaaagattgctttggtcctctttctctgtttcgacctcatcttccacctcaaaagtgcttttgaggagatgttccctttcttcatcatgtctggtctcatcttccacctctttggcccaattcagattgttttggtcctctttctctgtttcgaccatcgttccagattgcaaattttcctggtgcgagttctctttcaacatctcaacaatcaaacccaatcctgaagctgactctgagtcttcgactacatcagtttcatcttgcttaatcgatcttggatcaatcaaatccattcgagtaactggcttgcgaatcacccttcatttcttcgccatggaagagagagaagagggaaaataagctttttcttaaactatctagttaagctttttggagaagggtatttttgtcatttttatcttgggtgaggtggctgatttttagtgtgggagctggccgctatgtgagtaatgactttggtttatcattcatttttatgactttttagaaatagaaagaaacaggaaaaagatcaagaaaaaccatctttttatgtctctctttttcgaactctcaaggaactagcaacaattgggattttcttcgctgcaaatcagagtaattagcaa

SEQ ID NO: 47563 - DNA, 5486 bp, Cannabis sativa
atagagaagggatgaggagaagccctagaggaatgggccgaaaataaaggcccagtgggccacagaaactaataaaaataaaattaaaagaatacatagtatttttatgttatattcctattattctaaggtatttttataataccttttatatagggaatgatattttaggtattaaaaagtaaaaaaggacatttgtttaattattttaaaaaaaaaaagtctttaactatcactaaagttagaaataaggttatttactcacacttttgtatgaggatttggtgagaattgaccattttaaagtattcaccatcatatcaatatagcaagttccgagttagcagtttttaatttctataatttttatcaaatcgaaatattggtgagaattgatattaaattacaccaatctagccatatactatttcttatggtgcctaacacattgtttgcagcagcttataagaaattgcacctctccttaaactattttctaactcactgaattatatatagttatatacaatactgtatatatatatatatatgatatatcaaatatatctacctacgtacggttgtacgagtttgtatacgcatacacgtagtagggatttgatatttaacagaatataagcatgtggcaatttggaagacaaaaaacattaatgtttttttttattttttgaaataaaaaataacaatgttaagagtagtatatatatatatatagcttcctagctaatataataggcgtgtatatatatatatgacaaatgaaccatcaagagagacttgtcgtgtgggtactaactccacagaacttgctctaccaaagacccactcatcacatgcgttggtctccctaagttccattaatttacaatacacacatcactacgtactcagagtaagaatcatgctctaggattgctctttctctctctctcctctcttgttatttatttatttgagaaaattaatataaaatatttgcaatatatgctgtccaaacttatcccttgcatgggatcatgcctataaatagaataagccacaagctaataaaattcacaattacacattccatcgaaaaacaaaacaccccaacacacatagctaaaaagacttcagctcttctctatatacacatcataaattattttcactaccaaataatggcgaagcttaaaaagatgaacagggccaacctcaaaaccgtggccgaaaagcttcaaaagatgagaataatgtcaactttaggtggccgtaccaaatccaactcagtgccccaagatgtgaaggaaggtcacttcgcggtggtggcagtggcggccggaggagatgaaccgaacaagaggttcatagtcccattgggttgtcttacacaccctagtttccaaaggctacttgagcaagcagcagaggagtatggatttgaccacaacggcgcactcacggttccttgccggccaagcgagctggaaggaattttggccgagcagtggcaccagacggacgaaggaatgtcttcttcatcatcagtttcttcttcctcatcaacaacatcttctaataataataataataataatcaaaatggcagggttaactggacctcttttaaaaccatggtgcacagctactagtttttagtatgtatataaaatgagtcttatatcaaattttatttgattaattagtaacttatttatttattttgtaatattagagagttgctatcagttattcaagtgtttattttctctctgatgatttggaggatatgttatatgttcttttcctatggctcttctatatgcactttagtctgtatctctaacattatcctccaatgcaaaatataaacccaaatttgtatgtatatacaaataatttactaatatttacacttcaaggactaatatatttacaaagaatttttaaacaatttttttaattaattatagtctatttgtatattctctcgttaatattttggatcaacaacttgaactgagacttggccccagccccagtgagctctacccattttttctcacctcaatttctcattcattttttatataaaaaaaatataaaataaaaagaaaatttacataatacttgtatttttttattttatatttttaaaattaagaaaataaaagtaaaaaatataaaataaaaagaaaatttacataatacttttattttatatttttaaaattaagaaaataaaagtaattgtagaacattcttttttataaaaacaaaagtgttattaaactcactcgcactttttcataaatttgtatgaatttacagtactgatatcttcatctatatcaacatttttttttcttggtttggaccctcctatttaaatttttctcacaattgacccttctattttcttgctctagttctacctaaaagaaaaaaaaaatatttattcacgctttaaattaatataatctcaccattaatgaaactaatatattacatatataattcaattaaatgttatttttgtgcttcaaaaaattaaaagttatttataaaatgtctctatgaaataacaaagaatataagagatttatgccaaaaataaaaaataaataatgatatcatcaacctccttttacaacctctcagtcaatattcgtgtctgaaaacatatgtcgtaatatttttttattaaattatttttacagtgacgttcattatacttacaacatcatctttataaatttttaaaatattttaatagtttacattaccgaaaacagattttaaattttttgaacacacgtgatccataaactggaatattcagaactttgtttatggtactgtaaactattcaaaaaaatttaaaatttacagggatgatattgtaactataacgaatactggtatgaaaaaaaaaattaaaatatattcttgtatgtgattttaggtatggagattgactaagagccagtttagcacaactctgctacgggaaaaagtaattgtagcagtgctgtgagaaaaaacagttgtatcagaactgtggaaaaaagctgagttgcgtgtttggtaaataagtgttgtaaatttttaagattctactataataatgagaatgttataatctagtttattataatcataaatctatataaaaaattatgttatacaaaatttttatttttgatatatttttaattattttctcacaaataaaaataatttataataatttaaattatttttttataacttgtcgtttatagaaaactgctgatgtggtttgctaataataaaaataaaacatataaatattaaataatttttgaaacaaaataaaaaataagaaatttaaatattatttattttcaatattttttcttttaaaaaagatatttttatttttttaatatataataaataattaaatatgtttttagtaataaataattattagtcttttaagcaaaataactttttctaaaagtgagttgtaccaattttaatttttagttgtagcttcttcataaattcttcaataagctattttttaattgcttactaaatatttttttatcaaagcttttttaaaaagtaatttttagcttttttaaaaatatacgaaactcgacttaagatattatattaggagattgtaattagcattcatttacaaaatattacaagtacaatttttatcacttaaaataacttttttcttattttattaaagtatttattacacttattaatatattttagctttttttatttgtcttttgggataaagatagggaaaaaaaatgagccctcccaaaaagaaataattagtgagagaatagaaagtgcacaattgtaatagtttaatagtattttcgttcttaagaaacagtaaaaatgttataatcaccataccacagtattttttttttttttgtaaaaattgtgtcaattttagtacttagtgtaaaatcttcaataaaaaactcactagttggataaactcaaaaaagaaaaattaattaatatttttacactatcatattattcccctaatatatgtaaccaataacttttatttatagaaatttaattttttgttaggttataaattattttgtccccataactttgataactaccaagggagatacattacttttcttctcaatttggcttgatgacatggacatcgattttgacacacggtacgaaggaaaaaattgtgggacccacatcccaagtgggccagtttcatctacaaaatgggggcgcctaggcttagatctcactaagtcgtttttaagcttcatcgccctacaaacagctcaaacaactataacaaagtacttgaaagacatcccacaatcaagtcttgagccccgataccgattttgtgacacaactatacctgggggcgaccaagtaggagttaacacctagactgacatcatgttgtcatggacacacgacaactagggtttaggttttccaaaacttctttagaacctaattcctcatgtctattaaggaatgatgtgtatacctaagtttttacaatcagtgcctaagagagctacaagccaatatcagtgcctaggtgcctaggtcacttgagtgacatctctaagcatctttaatttttccgaaacttgatttgtgagtgcatattccaccaaaaagatcattggacatcaaaaagatagaatcgagagaattttaacctagacctaatgcccaggttaacatgtagttaacttggggcacatacatgtattttatagagatgtttcccgaacatctccttcagtttcatcaaataagaaaaaataatggctttcaaacttcaaatcaaaccatttggaggtagaaacaactgaggacgcacccagattgcctctcccccaatttactagtgcccgagtttccttttaggggcacacctgggctcaatcaagctttttgatgattccgcgtgagtaaacctcaatgaaatctcgttccaagagtgcctatttgttatgtcatcccaaacccatcacaagctgcaggttgcctattgccctgcacctaggtcatgcacattgtaacgccctagtagttaatgcacgttacagtatttccttaattattgtgctaacctttactataatcaaagggtttaaaaataaaaagtacatttaataaaattttaatgataattaaaactttactaagcataattttttgtttataaaatatatacaatcagcgatctcaaaatctagttacaaaaaatatataatatgccgtatcaaaattttttgtctatttacataaccaaaaaggtgttagtggtgtctcgaagatcacaaccctttaggcttagacaattggatatgtataatcctcaccaagcccatcactcactgttgtttagccttgtctttgtctttacctgcacatagctattggaaattattttacca

SEQ ID NO: 47564 - DNA, 846 bp, Cannabis sativa
aaacttttccaccatgcttccatagccttatcactcgaccgatgagacacctcccgcatatcatgcgccaatcgatacccactgctaaccgaatactcaccatgtttagtgtaatgccacatcaccttatcctccactcccctatgaccactcggcaacctcagaattagctcagcatccacctcattaaaatgcgcccttatgaagctttcatcccactcaccatctgctaacttcaaatccaccacatacaactgatgagggaactctggcttgtcatacacacgaaaagtgaccggccttggcaaccacggatcttcaagggcccgaacagtattcccatcaccaaccctccacctataccctttcagaataagctttttcccccacatcatgcttctccacatgaaagaagcatgactaccacatttagcatccagaacaccaccattaaaatgataacaagctttcagaacccgagaactaagcgaatccggacatcgcaagcatcgccaaacttgcttagccaacagagcctgattaaatagacccaagtctcgaaaccccaagccacccttgtccttcggcttgcacatgtattgccacttgcaccaatggactttcttctgcctgactgaagatccccaccaaaaccgggctgccatactatgcaaactcttaatcgtactctttggcaacttaaagcaactcatagtgtacgtaggcattgcttgtaaaatagctttaatcaagacttccttccccgctaccgaaaacatggaccccttccaaccacgaactttttgccacactctattttttataacctcaaacaactctttctta

SEQ ID NO: 47565 - DNA, 2401 bp, Cannabis sativa
atccaaaatatgaaatccgcacttagcgcggattcgatgttgtttgactaaaaaagtgcggattggatcggatgaaatgatttgtttaacatgtttatgtctttatgacatatttaatgcgtttatgatatatttatgattttttttttaatttaaggtgagttttatattagtcatgtcattaaatacgttttattaaattgattaataagttaacctaaaagtgttccgaacttattcaagacaattaattttatgcagattttgaattgtgttatcacatctaatttatttgtcaattcaaatatgtagtgatgtgtttgtacacactttcttgtaacttgttgagagaattaattatttcaataaaaattcttttatttatatttacatatattcacgagagaaattttcaatagaatgtgtctaatcgtgaattatataaaactttagagttgaaactcagcataatgcaaatagcaatttgtttttttgaaagcaattacaaatagcattttgataagtaaactgactctatatatacatttttttcctttatgtaaaatgacatagtaccacgatagctttaatttttcttggcaatatccccacttaacaagaatttcaaattcattagaccatccaccttgccctcctgaataggtatctcggaacaatatttccaccgcaagatgttcaactacagtctgatagtaatatggcgaagattcaggagccactacatcaccatcggtaggggtgcatcaaccttgctctcctgaataggtacctcagtttggaaaaccccatagtattagaacttattttatcaaaatctaagttaattactaatatgtatgttgattataattctataatctaacatcttaaatataaattttctaaaataattaaataaacacacataaagttgtagaaaaccttacattggcggcagcaaaatataatagctcattccgttcagatctctaactcttgttcctttttgacacggagtattaccaagatttgaacctatatctccttagatgatagaattcttcacaattttccacactatatttaagtattaacttaaaatgtgtgggcaaacactcactcactaaagggatctcgaaattaagaagaagagaagaggagaggatttcgaaattttgagaggctctctttattttctaattatctgacaaagtagtctaatgaaggttatgaaaataagagtcatctctttctttacataggatttcaattagggttagaatttaaattatatggaattaaaaaaagaaaaaaagataatataatgtgtgccctgatcgaaccactatgtgtgccctacaaactctataaatgtcaaatttatttatttaatatttataattaattatcaaataaaattaccatttaatctactagaaaagttaaaattagcaacactttttttaactaatcaaaattaaaagacaacacttataaaagtgttgcctcctagagtgttgccaaaaatattagtattagacaacacttaaaaaagtgtgccatatcttattactttaaaaacacatagggcaacatttcctttaaaagtgttgccatatataattttcaaaatttaaacaaataaaattaattattattttctaattcaatttatattttaattatatcaaatggtattatcgaattcaatcttcctttctgtaaattgagaaacaaatcgaaaatcttttgtttacattaaaatgcaagttcacaaccatgttttaacagtacaaaaattcaaacatattcttagtctattaaatgcatagcacaccgagaaaaaaattattttgctaataaaactattatttttctttgtaagcctccattaattccatgttattctacgataaatcagtgaagttctcatatatatatgtgtgtgtttgtgtgagaaaaactgcaataagttatatatcaatgataatttatgttttttattatatgaattgtatatataattgcacagtagttcaggcaacagtacttacaatattgtttttagaattcttcaagcaacacttatgcacgcataaatagttagaaataaaaatcattgtaaagttacaagtaattgaaataaaatttttcaaataaaagcacactaatttaaatgtataagcttcaaaagttcaataaacatacatagtattcaaaattctgagtaaattaataattaaactcaaaagatacattaactaattattataatgcatatatataattttacgtaattatagtcgttattataccattaaagtataagtgaagaaaaatttagcacacttaaaagacaattttgaaagtatttgattaaaaatatcatgatatatatata

SEQ ID NO: 47566 - DNA, 1093 bp, Cannabis sativa
ataaataaattaataatttcactctttttatttttgatttttttatatactaaaattttatattataatattgacaattctcccgttacaaattttttactaattttatttctaagtactttggcatgttggattataggtctttatttctagataatttccaagcacatatacaactaaataaatacaaaaatacattagaaaaagaaataaatagatcaatatgatcttaaatgaagttttttttttttttttgctaaaatattattatggaatatggttaatttaaatttgtacagagaaaaaaaatattattaatatacatatgtatataatattataatttagaattataccaagcatacaattgtataaattatttgatagtaatttattaatatttattgtctaaattaaaaagatgttatatattttttttcaaacattctcaaaatatattatttttttagaaaaatattatggaatataattactaatcttagaaaattttattataaaatttgtaaattaattaataatttgaatatatatctaatgttacttattcaaaaaaaaaaaataataataatgtaatttttttttgatgaaaaatgcaattttcattaataatgttaaatttttagaataatataaataaaaaaaaatagatgatctagtaccaaccaattaaatctattgctatggaatagaaacataaatacattattgtttcaatttacattattttaaattatgcatataaattatttttaataaaaaataagtaaattatatttgtttattcaattaaaaagataaattatataaaatcaaatgattaaataaatcttaactatataccaaatacaaattcatattcatagctatatttaaatcatatatgagatatattttgatatatactttaaataatttaaattaaaaattagaaaataataagtaaaaagaagaagaaaaatgattagttaacaataataaaattagtaacgaataatagcttatcttttgacatggttctttagtcttgtcttttgacatggttttttagttgacatgggttgtgtagctcaga

SEQ ID NO: 47567 - DNA, 2087 bp, Cannabis sativa
taaatggcaaaacaaccacaggcaaatcctaaaaattacccaataattaagaaccaaaccactccaaaattataacaaaatatgaaagaaaacattatgcatcaactaaaatttaatagactacaaaatatccacgtacagatctggaatgtttatcagaaaatctgaatggggttcaaccatgaaacccagcacgaaaacagagagagcaaaccataatgtaatacagttctaaccaaacaaatcgatcaaatatttgaattaacaaaatagaaattgcagaataaggaatggctgagaaaggaagaaccatacctgaggaggctttttcggagaaatgagaagggagaggagagtcagagttgattttcaactctatggtaggagcttttgaaaagtctggaactaaaatgtctgtattaaatataataattaaataacgattatattgcaaataacaaaaattaagacaaacaaaaattgtcaaaactcaaaaggatatgtgaaagtgtaagaacttgttatgtaaattatattttattgcatttttagcactattgcccttgagttgttcatagattttcagtttacaccttaagattgttctttagcagttagatccttaagttcaaaataataataataattctgattatatttttaaggataaataagatatttttttaccatagttttagtctctaattttttgtctggtacaaaaatttcttcttaattttaattgtaaatattttgctttaggtatattctgctttattttttaaagaaaagaaaaaaaaaaaaaaaaacacaacactttgcatatgttaatgttacgagtacaattacagtatgaaaatctatttaataactttaatatattaattttttgcgcggactcttgaaacgtttatagtcggaggtgcaaacttttacaagtattataattcaacaaagtcaaatcctatttattttatttaaaaacaaccaaatgtaaattaatttatctttcatatttaaaaatacaaaatagaacatttttaacaatatatatatttttggagatgaacctcaataaatatatacataaagaaatatacattctaggttgagttagtgcctcttgcaatgaggatcttgtcgttgttagtattgtcctaattgcagacttgcctttttaggtgtactggttcttttcttttattaagaatccattttcaaaaaaataaaatcaattggagtttttttttttttttctgaaaagcaaaatcaattggagtgaatcaccacttttgtataaacaaggatctgatcacaacaaaagatttggtgagtaattttggtattaatttcgaatcatttaaatttataatcattttttcatattatatattttaccatttataaatatctcaattttatataaatttataatcatttttttatattatatattttaccatttataaatatctcaattttattacttgatattttaatctttttgatatatttgttttttttgttaggattttttaatatataattttttaaggatctttttaatatattttaaattacctttaatatatatgtaatattatcattaattagctttatttatgtgagtacatgtatgttttgatttcatatcccgtagattaggtaatcagttacattttagttttttctttttctttttttaacaaaagttatattcctttagtgtaaatacatatatagtgcaaggcatgcttaattttatattaggtgctatataatttaattataaataatataaaaaataattatgtataatttattttattattatagtctaaataaatttttttaatataaagtgattaagacaataaaaagtaatacaattattttgtgaagttttatctatatatatttaatacatgtaaataattaattcttagatgaataatattttatcattcttcaaatgtagcgttgttcatataaatcagaaaaccgcggtttaaattcggaccacgacaatccaaaccactataaaccataactggggaagctgttttcggtagtttggtcaatccgga

SEQ ID NO: 47568 - DNA, 2165 bp, Cannabis sativa
atatattttaaacgcaattcattttttttttaaaaaaagtaaatctaatttgaaatttaattagatgcaatgcagcttcaaacaatccaatttataattattttaaaattttaacgaaagtacatttgattaaaaatttgttttgtttatgctttcaaaaaaaaaaaaattgttttgtttatgctttcaaaaaaaaaaattgttttgtttatcataaaaaaaatagttttatttgagtaattttacaaaatttattcgggaattactctatatattattttttttaacctttttttaaaaaaaaaaaaaattacggctctaatggtttatatgtgagttgttttgtaaaatttaattgtgatttaagttgttccgttggttgctatgtgagttttgacgtggatttccgtaaaaatgtaaaaaaaaaaaaaaaatctatattacatctcgtcttataattggttagcagtttttcatgtaatttattaaattaaaatatgcacgacccgacattaaaatataccacatatcatgtcatgtcatttgacaccttaaggtactccttagcatttctctataattataacatattaattctgggaagttttcaacaaaagtgtccttatatcctcataaaagagtcttaaatacccttaataaaattaatctttcaaaaagttgtcgtagatgaatgaaaagaaaaatcgataatgggttattataactattatgtataggttatgagtgttgtagtggtttagatataacttttgaacaattcttggcagaaaatttaatcagaaggaaaagaaaaagaatttcatgttaagatcttaaattttgagagatttaagctgcaatttatgatctttttttcaaaccatgtttggaacagtttcaaacttaggacatatttattttattttttcgatggaagggacacatttatttggagagagtaagttcagacatgttcttaccaatttcgaacttgttcaggccatttcacatattgaattgaaaggattcaaaattcaaactattttagatcaaatttggatttatttcaacaaataacgtaatgtagcttattttatttattcatttatctaaacctttatggttcaagaaatagtaaatacaggaaaaaactaacctggaggaataaattactctctctctcttgaagggtttctctactttccccctcttagtttttcttacggtttcagatgccaccatgggcgggcgccaccgaccagatctaggttggtggcgcctggggccagctctattgttcctggtttttctggcgagtggtcgccgatcttggttgttgggcgtctctgttgagatatctctcgctcgtggctggaggtcgcaagttgagccgctctcttgggtcgcgatgacaatggtgagcttctaatggctctccttctcttgtttttgagttgtcgttttgcgaaggtccttttcaggcgtgtgcttgggctgtggtgtggtatttctcttctatttttcttacaaacctcagtgtacatccttgggttattattcatttgtcttggctccggtgcacaatggttcttgtgagcttctagagttttgtagatgtagagggaggaattggggtttaccctaaagagatgtgtttctcttgtctcatcaccttcattgttcagaataacaataagaggtcaagcgtggacttttctcatgggaagatggcagtgctccagtgcccgtggtctgcctgtcttgggcttgtgtattgcctcgtgtgccttagggatggttgttgaagttgttctatctttttctttctttgtttggtttggtttggtttttctattagtttatttagttttttcggtgatgtgcaccttatgtcactagtgacattggcgttaggccttttttttggggagtctgtccctctagatgctcctgtgtgagctttgagcttattactcctttagaattggtgtagttggccggcaattgtcatctcttagtgagattgcggtttttgtgctagactgtagggctctttccctttgatcatccttgaatgaagtttccatcacaaaaataaaaataaaaaataaataataataataaatccttatggttctattgtaatgaaatagaatggaatgaaa

SEQ ID NO: 47569 - DNA, 1226 bp, Cannabis sativa
aattatgtactagttaaaaataaggaatgatggatgctacacattatttttgtattttgttgacttattaaatttatgtattgagtaactatataattgtgagggatattattgttcttttacattaataagtgattctaatttcattactaatatttactttataggtacatgacctattctattatttttaaatgtgtatttcttaatataaattaaagtaatttataagtaatattttcctacaagggttaaagtgtaacttttgaccacccaaattatggatattacacatctgtcacgacctaaggctcggatcgtgacaagagcatttagagggacaaactcctaaaaaaaagcaccaacatcacaatggacataaggtgcaaaatactgaaagagctagaaaagctaaagtaaacaaaccaaacaaaaacaaaaagtaaaacaatttcactcgtcactcccctaacgcaaacgaagtaacactaaatcccaaaactagcagaacaaaaatagaggagtgctaccatctttcgacgagaaaagtccactctcagctgcccgttgtgattataaacggtgaaagtgttaggacaagggaagtccaaacatgtctttagacacaacataaaattacaaggacaaaaatatgtcaactacacacctatcttcgtctcaacaaaaaaaaaaaaaaaggatgactagtatcaaaataatctttatcgtggcatataatatgaatattattattctaaaccaaagtaaaataaaaatgatgtttgtcaaccaaatatgacaatttttctttcctattcttcttttttctcacccgttcatttaagcgtgtataacaattatttaaagtgaccaccctacctatttcccttttaacaatacaaatttatgttaatcaaacgtgtacataataactcttgtaggaatttgtacaaaagttgttatggtataatctcttatgcatggtttaaaaaaaaaagttcttttaaatctaagtattttagttatgcaaatatgaatttaattatgtaagaaaattaatttatcaaaacaaaaaattaattgaaaatagcgtgcaatttttgtgtgaatttgtgttaacatggaacaaattgaaaaaactatataaaatcatatagaatgaaaataataaataaatatgagtattattaattgtattaatgtacacacaacatacaaaatacaaa

SEQ ID NO: 47570 - DNA, 1286 bp, Cannabis sativa
tttttctccatcataattattattgcccgtctcttttgaaaatagtcctttcctcgtgtatatttcgccaatgtacaaaattcactgtcagacattaatgctacatccgaactggttgtggctaatgaggtattgatttgcctttttttaaaaatattttcaatatgttgctgttgcaagtcatatgcattgtcttataattgacactctctctgtgcttcttagggttggtcaccttttgattttagtccagagttttctagttaccggagagaaggtgataaagaccaggggggaccagtagactcctatgtaagttagtttcttccttgtcagtcttaaatgcatttctgaaagtatgtttttcttctgcttgttgcattttgtatctactttgaataagattttgaattgctttcttctttctacgtcatgtcaagcttccaacattttgtttcttcttcttcttctttattttttttttcttgtttttttgaagttcgaccgagagacctcccattggtcctagcagtctgtcattatgtttctcgatatgactttgccctctcttttaatatctggagcctacattacataatgattgtggcttgctgttacctttacctattcttgtccttcttaactttcctatcaggtgaaagcttggttgaagagattgataggccacctcttacttatgtgtattctcgcagggataggaaagggaatgtggtcaataccacagtggattaattggtgagctggcagaaggttgttaagagagctatgttagagtgtggttttctttgggtacactcgggtagtaagaataaagtgttttgggtaagtctttttgggtgtgaagagttttattatcttgcaaccactgtgagagaactaggctctcgaattcctaggtatcaatagaaggcaattctgccatttcttctttaaattctcactggtcttctttatttcctgcatttgagctaattttgacaggtgattcctatcaaattggaatcagagcaagattatgggacttcggaaagacaccgtcacaaagccagttgatgagcgattggaagctctccgatccgaagttcaaagagagatggcgaaggtgagatcttatttggttaggaggttttagagacccgagtagaaatacagcgattgccaaagttgatgatggctcagctgaccaaattccttgtagcagggaagacaacgaccgagatggccaccgccaacaacgagttccagcctcaatcggtgaacaagga

SEQ ID NO: 47571 - DNA, 1215 bp, Cannabis sativa
ttaaataaataaataaataagttaaaattcacaaaaaaaaaatattttatgtaaagccaaaattttacagtactaccattataaatttaatatttcttttttgaataattaatatctcatttttcttttaaaataattgtgattttcaattttttttttctcaaaaaaagaagttactgtaagacggtgacatctctctagaatctccaaatatttccccttaatttttttttttattttttattcaatttataaattttaaattgattaatttatttttaaaaaattattcatatctatatacttatatataaattaaatacataaaaaacaaatatccataaattaccgtacatatatatactaaagtattaaatttattgaacaataaaataaataaattaaattaaatattttaaacaaaataactaataaattttttataatttattattattattattattattattatttagggtataaaatttctagattggtgttaaaatcattacttatataaagccaatttgaatgtctcacagattgattactatgtctccggagaggacatattcttaactaatacaatgagatacaattataacaatagataaaatatggtgaaaattaaaggtgaaatatactggaacaacggatgagatacggtgttaatgatcggatataacaataatgcattactctatttttttttttctacaccaccctatttacttatttttataataacaatttttttaacaaagcaatttaaaattctctatatatacattaggataatttcaaaattcttaataaataaataaattataaaaccctaataaatttttcaataatcctctaaataaaaataattaatactgttgtgagtagatataacttttccttattttatggagttttatttttgataaatttaattagtaatattaatatataattatatgatataatttcaatatcactatatattaaaataatttttaaattattatttattatactaataataattatttttttttaaataattaaattagccgcgtgaagagcggctctattgcctactttataataatttttataattgaaagcaattttggcaatgacaaaaaaaattagtgggcaaaattatgccaaggttataattccgagaacaaatcctattaattttatttaacaagctataaaaaa

SEQ ID NO: 47572 - DNA, 1137 bp, Cannabis sativa
acgaatgcaaaaatttgaaggatgtaactgaaagtttaatccgattgggccacttgtatgagtggatcaaaaataggttaccacacctaaatccagccaaacacaggagccctagtgcctcaaggagggcccacgatagcaccggaggggcagtacctcctggagggatgccccatcagcaggcacccggactagatccctagactaacgaaagaatcgctatgatctctggaggtcctcttatcgagggaaccactagaaatgagttggagccgtacgccggggatctgggacatgataaagatatatgggaagttactcagctttcggctgaaaggcccatgctcatggatcaacccattaccttgactgaggaagatgcaaagccagtacggttcccacatcatgatccccttgtcattgagactcctgtccccaacaaagtcgtggcaagaatattggtagacaatgggatctcaataaatttgctgttcaaagtgctttcacaaccaattgactcactacagagatctctcccctagtggttcacaactcactggattcaacgggacaaccctcatccctatgggaaaggttaggctcccggttaccttgtgttctgcaccccccaaagcacgttcaaatattgcacctttgtggtagtggactgtcctacagcttataacgctattcttggtaggccgaccatagttaacttcaaagaaatcacatctgtctgacacatgtgccttaattttcctaccttggaggcgagagttggaacggttagtggtaactagggagaggcaagacaatattataacgctgtagtacacttgtcgatcttaactgtacagggtctggaccggcattgggagcggaacaggacgaattagacccacacattagttctaaggtagcattagaaccaatggaagacattgaagaagtaagggtatgtaaccacgacccatctaaagttatctgccggggtaagaacctagaatcggaggagcagattaaaatcattgacaccataaaggcatcgatggacgtgttttcatggtgccatggggacatgacctggataagccttttgagatttgtgccctaaataaaactctaattcaatgtaat

SEQ ID NO: 47573 - DNA, 1913 bp, Cannabis sativa
aaaatattatttgtacttgtacgtatatatatatctcactctctgccaaaccctaactctaaaaacaagttggccttaaagtattaaccttttatattcatatattcatcaaacggattaagcttttctttcttcatctctttcttgttacagtgataaaatcatcatcatcatcatgacgtcatcaatggtgggaggtgttgttgatgatgatattgacataattttgaaacttcctgatgcattaatcgatcacattctctcgtttctcccaactgaagatgtggttcgaacatgcattctttcgaagcgttggaaactcatctggtattcagttcccacactctctttcgaattcgaaaagattaactatgtcaagagacaagacctagaaacgttttatgattatgtctctaattatatggaaaatcgcaagaaaggtatggatcttgttgatgattcgagcataactagttttaagtttaacatgcctagttattatggatatcgtaagatttggttactagataaattgttatcttttgttgttgagaataaagttaaggaaatatatctattcctaggaggagaagctcatgctttctattactgcttacctacaatactaaacgacgcaagatatttgactattttggaattgagcggagtaaagttggatagtagtcattcatttagttttccattactaaaaacattgtcgttgttaaatgttaagcaatcaaatactaaagaggataatgtggtatttaagtttttgttgtgttgcccttctcttgaaaaattgcgcataatcaattattcgttatcatgtatggatgatcgccttcgtctacaaagtttaagccttaagttcttggaacttaactgtatagatattaagtatgaactagaagttgaagccataaatcttgaatctttggtaataatataccattcttcagaaagaataaatttctcttcatgcaaaaaaattagaaatctctccttaactaactacgcagaatgttatcagccgtcgttggaagatcttatctctagtattcctcttttggagaattttactttgatcaaccaatcttcttcggccgactgtcttagaatttcgagtcaacacttaaaaagtttcacttatgacggactttcctttttaagtgtatcgatttatgttgaaattgaatcagctccaagattagaatacttttgttatgaagacattttcgaattcagcatatcaatggagtcatctaatttgataaatggaaaaatagttagtagggagatacattttgacaatgacataaaatgttttactaatatgttatattattttcttgtgaaactcaattgctcttggaatgttgtgacggtacatgttagctcatatgaggtatgtttaatcctttgtgttttttttttcttttctttttcatagttttaatctattatacaatgtattaatgtttgtatgttttcataaatttttgcatggatgaagggactacttttgctagaagatttgaagataaagaattatcccttttgagcatctcagagttattactgattatcactatgagagagagtcagtgttgaaagatgatttgatgcggatttggccttctttagaaacattatctattaataaaagaatcatattttagttactttatgatatcataactgttgagattatgaattgtgttctattagttttctttgcttagtggtaattttatgagattgtctttactttattggttgttagacatggatcgaaactcaggctgcttcgcctgtttacgagtctggtggccttgacatagctgcaattcagggcaatgttatggtttcccggtagacttgctctatttcgggtgtccttgaaggtgagc

SEQ ID NO: 47574 - DNA, 2099 bp, Cannabis sativa
aatatttgacatgtggcataaatgaaaaaatttacagagttgagtagtcctgagtcatagcagtcgacttgggagaggtccctagtcctttgaccaagttgactccaagaactgcagaatggatgtttggatctcgccaatttgtttccaactcaacatcctttagtattaaaatctaagaagacaagaagaatccatgtctgaggcttagaaactaaacaaagataagacaacatcctgaaagtcaacctgtgcacctagagttttcacccagcgcttaagttaacattcccaactatggtttcaacttttaggttcgtcttagtaaaaatggctgaatttttgtacttatacatgaataagatatgtcacaaacatgttaaaagtattagaatcagaatcaaaacacttcccatttggagcacccggtcacccggtgcctggggcacctggtgatgcacccaatgcctaagttgacatgctatcaacttagggtatttccaaccacaatattgatgatgtatcttgagaattttcttcgtctccatctaaaatcagaaaacaagtgctttcaagaaagaaacagatcaacttggaggcaaatggacccaacgcctaggttaacatggtgttaagtcctagcctctaggttgacatgttgtcaaactaggccacttccaacaacagttcagacaaagtcttccgtgaatattctccgtttgcatcaataattaaggcatgggtgctttcaagaagcaaacagagccatccgggggttagaactgggagtcagtgcccaggttgacttggtgttaggtcccagtgccaagccatttctaaacatttctctctttttggcacatttttggtttttaccaataattgagatatgagtgtttccaggaatcaaatggaagaatttggtgggcaaaattgggacatagtgcccacgttgacttggtggctaggcccagtacctaggttgatattttatcaacttggatcagttccaagtattttctccaaaaagttgttctggtcatctttctattttcataaataacaaatatacaagtgatattggggagcaaaatagatccattgttgggagccaaaataggggccccgcgcgcctaggttgacatgcaacctggtttgcatgttctagctcctcaagcacaaattctactctgggtattcttcttattaggtcagaatcagggtaagagacctcgttcgcaatcttgaatgccttagaagtatcaaaaagaacaccaggaaatcccctgaggagcatctagtgccaaggttgacatactgcctggtgcgctgggttttggttatctgattctagttctgtctcgagcatctgactatctttttgtagtaaacgagagctacgacttgcagcaattcaaattcacacttagatatttcccctcttcaacaaagtaaaatatcgataaattagttgtaaatcggaaagttttgagtttgcccgattttgtagaaaagcaacatctctaagaactggtgaacgacttcaccaaaactatgaaaatttataagcgaggacaacatattacttaagcttcaaaaaaataaatatgggatgttttcttcaatcacacaacatactaatgtcaacctaggcgtagggtgttgaacaaccttcaataaaacggctataactccctcaatattgattggaatgatgcaattcaacttgagctttaaagctctttcaagtcatgtctcaaactcatatcacaattctaaagatttagagtcaaaattttgtccttaagatacgtgtgatttttttccgcaaattacttaaaaatgattaaactgacaagatttgagctccaaaaattgatgatcatcatccgaagtcattttcatcattagatcatcatcaatagccaagatcaactcaacaataattttccatattttttataatatttattattattttaataggacctctgtccgtataaaaagagctccactagcttatttttcacattcaaaaaagagtctatcaggttagagcatctctctctgctttctctctctaaaaatatagagctctt

SEQ ID NO: 47575 - DNA, 794 bp, Cannabis sativa
aacataaatgacttctaatctttcattgatgacaaatcagattagattgaaatgagttttatttagggcataaaatcccaaccaatagaccatcatccagcccaatgagtcgtcaccaagccacttcaatgaggctatggtcagcacacctactgagcaggtggccagccaagctactgacaaggtggccgaccaacatacaaaggccatggctggcccatttttctttgaagtttatatttttactttgacaatggaatttttacacgagatcattccacaaatacacaaaacaacaaaaaaattctaaaaacacggttctacggaattttaaataattttacgagttttatgatcttatttatagaaaatacggtcctttaatgtatttttatgttgtactcttattgtactcttattaatactcttattaatttgctgttatttatattgttatttatatgttattttttattgttgttttgatgttatttgactattattttcctgttacttttgtgtagttttcttgttatttttataaacactgtaaatatatatataaaaaaatatttaaacgtaaagatatgaattttttacaaaaaataatattttatgtaattatctctttttacatttacgatttacctatttatttttttttttacttttttttatttattgaaatttttataaagtttttttttctttcttatgtctttttgtatttttttttcatggatttttttttttctttgctaacttctttctctctctctctttttttctttatt

SEQ ID NO: 47576 - DNA, 2623 bp, Cannabis sativa
  modified_base (1043)..(1044): a, c, t, g, unknown or other
  modified_base (1260)..(1260): a, c, t, g, unknown or other
tcaaccctaagccctagttgaaacactataaaaggaatatgaatatgatgatctcatctcatccacttgactacttaatttttccacatgcaaaatttagttttcattctctgacaactagtatatgatagagttcattctatagtgattttacctcatttaggagttcaagttcgggtcccgagtccgggtttgggtttaggtccaggtccgggttcgggtccaagtcctaggtccgggtccaagtcccaagtcccaagttcgtgtcccaggttcgggtcctgggtccggggccaagtccgagtccaggtcccgggtccgggtcccgagtctgggtcctggtctgcgtcccaggtcccgggtcctgggttcgagtccgggtccggttcgggtccaagtctaggtctgagttcgagtcccggtcccgggtccgggtctgggtctgggtccgggttcgggtttaagtttaagtttaggtcaggtttagggttagggtttgggtctgtgtctcgggtccaggtccgggttcgggttcgggtccgagtccgggtctgggtctgagtccaggtcccaagggatccgagtcttgaattaagtttttttaaaataaattaaaatcgggtcggatcagatccgatccaaaaaaaaaattaggcagggcggagcgaatctgatccaagatccaataagtatctgaatgtttcagatcaaaggtgattcttcgggtcggagctccaacccgctccaactaaatggatcttttttacatgcctaacctcattcattgttctttacctattcggtctatagtgatagaatgtcatgtccacacatagcaagttaagtactcaatcatagtgggtaagaccgtggtaaccaaccccaaggagagaagagatccaggctcagatcttgataatactcttcaacaaaaaagaacaagggttagagatctaggcggaaggagtcatattattctgatgcaaccaatgtaaagttttataaactcttatgtgtttaatttcattattttagagatattnntatttaggatgttaattcaacgtatttgttagtaaatctagatcctggtaaaatattactaacaactagtctcagagccatggtaatgatttactttcatgtaatatggatttaaaatgataaatatatttattgtgttgatttagatgtgttcatgttggtttatgtgttatttaatgaatatatgtaaattacaaaaattttccatgaaaatanttttattttcattctgaaaatattttatttagatttcttgtgaaaaattaagcaactttggtttttacgaaactcgattctaataacaaacgagaaagttatgaaagtttaaaaatggggtgcacgtggtgctcagtcgcacgcaccaagcttcggacaaggcactgatgtgcgcgtgtgtaggggacatttattcacatttttctataaacccttttattagcaaaggagtgcacatgattaagaaatcacaataacatgcttaaactattagggtgttacaactatttttcttctaacctggtccaactccccaccaagagatttgctatctgtgcctcctctaatccgatttaccaaatccaagacgtgagcacggccatgaaattgataagtcctttttcttttttatttctttagcttctgtacttaaatttttttgctaatcttgatgcgtgaatttggccaggttactgcttaagttggtcgcttatccaagaccatgattgattaaggatttgctgcgactgaatattgcagcatttatgaggcactaaagaagcttaaggatggggaccaacaggaggtgactctcaaggatgaggtcttaacggagaaggccttgagggaatgggatcggcaagtggtcaaggaatcattaaagacagtccaagctgatctacaaactgctagagaggagaacaaagaactttaagacaaggtgaggaaactcaaagagcttcacgaagcggatctctagaaggttgccaacgtgtctgtggagctcaaagaacttagggatttctaggagaagaccaagcaggaggttgccaaagctagccaaaaggctcttgcggctccagtcacttgtgaccagtgcgtgaaatgttttgaacatggcatcttcatgtgctagaggtatagcaaatttaagcccatactccatttcctacatgatcctaaagtcgtccatacctgtttctgggaaaagaacaagaaactatatgctaaagttactgaggctttgggtcctcgcctttctcccaaagccgatcaattttccatttatccataacccttttataacttattttttaatttgtgtacctttgtagagactttttattagcctttcctaaggctcttttctaatatacgctcttttattgacatttgagcaatatatatatattatgagttatttatgctttatatcctactgcccccaattgaccaaataatttactacttttttgtcactttgcatgagtttaaaaggatagtatattgcataaaggtctgttgggattttatgccctaaataaaattcatttcaatttaatctgatttgttatcaatagaa

SEQ ID NO: 47577 - DNA, 2161 bp, Cannabis sativa
  modified_base (2020)..(2032): a, c, t, g, unknown or other
tgagttaatactaataaaaactcgcaatattaaaaattactatcataacaaaagttgtaatatataactaccaaatacctttttcttcttgtttatcatttaattaatttctcttaatcttttgatctattttttgattgtggtagataataataatatatatatattgtgatattattatttatggtaccaagtccagtccaatcaaactcttcaattttgtattttgtacaacttaattcataaatctgcaaatttaattgaaaaatatcaattatatatttgatataaaaaaattaaaaaaaaaaacacatagatataatcaatgaaaacctaacaataaaatgtttgaataatcaatttcgttaatactaataaaaggagaaaataagaatgaacgtacaataataataaaaagtgtgaagaaagcaaacttataatgtgtgaaaaaattagggctatgtttcgtatacttgtttattctctctgatctatcgccctttaaaaaacaaaccgagcttcttcactcgattactaaagaacatttccttcgaagaagattcaaggcgccaacaatgataatttagtctaatatgatataaagaaggtttgtacccgcatagcttttcgagttccatcaaagccattaggttttgttcgggaggtgtagcttcttcctcgatctatataataagtaaacaatatttagtattatttattggtttagttcggaataataaaactaaaaagaatatgaatagaatgaaataaaataaaataaaacaaacaattattaagaagatactaatatatttaagtaaatgattaattaaaatataaatcaataattagttaaacaaatacaaaccttttgaagtttaagccgcatagattctctttccttttggaggctttctttgtctacattacaaatcagtcaatattattaataattaaattaatataagcaaaacaagtaattaattaagctttcaatataacattataaaaaaaatatttatagaaagaaacattttcttacctagttaggacatcatttttacttaactggtaaaaatattttgtgttttcgacactttgaaaaatatataacaatcttttatatatgagttcaagaagaacgaacatagaaaactacatatagtttttcaagaatagagaaaacaccgatgatttaatgaggttcaagtctagtacaatgctttattcctcgacgaaagaacaatcatgatcatcattatttctttattaatcaccaacaaaattacaaaaaaattcagttaagttctatctcaagaaaacaaatcgagttacaagacgaaaacaaaaagcttctttatatatttagagacaaaaagatcaaatataaaacaacaataaaaattgtgaataataattagtctctattattaattaataattaaataaatataaacaaaacaagcaattattaattaagctttcaatataacaacaacaacatgtttcttatctagctagctagggcatcatttttactctcacaacataaatattgtatatattttttcgacactttataacaaatctataacttaatctttttcataagaaaactaatatttttcaagaaaagagaaatcttcaagtgcaagaaacaagaattaaatgaaattcgagcctagtgcaatactctctacacaaaaattacaaaagaataattacagtgtcaagttctaactcaagaacgcaaattgagtaaaaattaaaaattgcaaataataataatatacctaagaaaatggtgttttgcaattcagctttcctcctttttgcagcaagaattagctcactcatgggcacttcttctataaattaaataaataaataaatgttacattattattattactacaatataattactcatcaaattattattaattaaatcaccaaataaaaaataaataaataaagaactaacctcttttaaataatgatgatgatgatggtgatgatnnnnnnnnnnnnnatgatgatgatgatgatgaactagaagtagaagtagtacgatgatgattataattatgagaaggaatattattattaggatgatttttgtggtgaagatgatctttgtctctcttcttcatcatttcat

SEQ ID NO: 47578 - DNA, 810 bp, Cannabis sativa
cactctccttcttaatagaaattaatataatgtataaattatgcttgcttaccaatctatatatgtatatatataatctaggattgacaagttcattttcaattcataaaatataaataatcatttactactctaaaatgataaaaattacaagaataagtcaacaataaccgcacgcgagttagctatattttctagttactatataagagacataggcttgaggtaaagaagaaaggtttatactttatagtttttcgaatacgcaaataaactgtacaaactaggcgccgcgcacaacactataccccatataaaatatagtttaaatttttttgcggtacgattgcagtttgtatttttgctaaattatattatgcggtgggatttataattcaaaccgtatcgcactatatattacaaatttatcaatttaataatataatttttaattctttttttatataagaataaacatataatatatgtgtatactattttattttttagagacaattcaatataatgacttgaaaattattatatatgttatgatgttaaaattttaataaaaaatttattttgtattgttaaagtttattatagtttgatttttaaatttttattataaagtttgatgatgataatagtgtaaaccgctcaaaccgtaccataccatatcgtattcgcgatgtaatttttgtagttttaagatctcggttgcaattagaaaaattacagaaactgcatatgcggtttgatttaaaaaaaaaaaactacaacccacaccacctacactacgaacaccca

SEQ ID NO: 47579 - DNA, 1715 bp, Cannabis sativa
gctatggtgtccccaccgttgtctttggttgtgcgagtggtgctcatggtcatggggaggtcttttgtgcttcgctcgtaagttggatggtctctctccttggtgccaacaatccatcttctccgttcatgggttgtttttgcgtagcttttcttggttgatggtcagatagtctcctcggtggtgggcgtggcgtgcggtctgtgggtcctcggatatagtggcgtctgaaggctagaggtcgacgttctatgtttgtggtcgtggtcagagctatagttgaaaatatgtgtgtgtcgtgccgtcacgacccatattttgaaaagctcacaataataagggttgtggcgtgccggtccataaaaagatatgggtcatgctgtgtcgtgcaaatattttaaaggataagcttgacacagtccgtaagcctacattttcgtgtcatgctttactcaagttgcccgtttttcataaatgggtcaactcgttttcttatacgggtcgaactcgagcttcacttttttactatttttttttacaattaataagttaatcactaaaatatatgtatttttttttttatagtttcaattgttttgatataaattttcaacaatactttacacataattatataaataaattaattagaatgattaaaatttgaatatttattagtaaatattattattattattattattattatcgaactataagaatttttaacgtgttgtgcttttgggttagtttattcgttctcacgtgtcgtgcattcaagtttgttgtcgtgcgtgtcgtgcttaagcttatattttttgtgtcgtgccatgtcgtgcccaagttcatattttttgtgttgggtcgtgctcgtgccagtttcgtgtcgtgtcaaaaagtttggcccatatttacagttctagttggagcagtggagagccttactaagcctccactagttctatcttgactgatgagacaatagttcctccaatgtagtaccgtcatttttctccttggattgggatcccaaatcgtgaatggaatcctagatttgattctttattcctttttagtcaggatccttaaagattgtatttttatgagcttcacccaaagttaggtgattgttcgaagcaagaagatcttgttttgggtttttgggtgtttttattttttatttttactttgtgtaataacctataatcagtgttaatttcttgttcatcgttgagatgaattttctttagtgttgtttcttagtgtttattgtctcgagattttgtttccactgcctcaaggacaacttagcttttaggctattggtcggtgctctccatcaagcttggtgagtgcttagccactccttatcctctaaaagggatttgtttgtgtcattttaatagttagactgtcaaatttttactctaaataatttggtttcttctcattgttgtgaggcttttaagtttagttttttatttagattttagtaggaaaaccattagaaatttcttggtgagtcttcgaattataatggttttgtgccggtgttcattttctttaaatattgtatttgaactttatcatctctattataaatggaaataatatttatctaaaaaaaaagtattaaattatttttttaggagtgaaattataatctatatattgcaaataaagtaaccaactgcatatatacaaaaaaaaaaaaa

SEQ ID NO: 47580 - DNA, 1454 bp, Cannabis sativa
  modified_base (1265)..(1270): a, c, t, g, unknown or other
attaaaaatatactaaacttaatctaaaattaatactaaaaataacctaacacccttgcgacatgcttgtcccgttggaagtccgagtcctcgtttcagagaccctcaaatgccctgtgccacaccaaaggagacagactacccgagagattcgacggtctaagcatgcaccttgtaggtgcaaccatgcacctcctaaacctcccctaacttgttctacgggcatggaagatcattgggagtgtcacacgtcttcaaccgtcattcccaaaagggaagggttgcttgaagtctgctttactcccagggactcttccacccattgatcttttcaagcaaaatctaaggttgaatttttatacaacttcagccttccttccaggaagccaaagcttgttacataaaaattcaacatggactcttaccatggcactgttttttgtgcaggaaagatcactgggggtgtgatacgtcttcaatcctccttcccagattggaaggactgcttgaagtctatcctactcttcgtgatgcttttccctttgatcctttcaagtaaagtctaagcttgaatatttatacaacttcagccttctttccaagccaaagcttgtctaaactctcgcatgcacgttgtttttcgggtagaaaagatcgttgggggtacgatatgtcttcaaccctccttcctagattggaaggactgcttgaagaaaatccactcttcgtgatgcttttccctttaatcctttctagcaaagtcttagcttgaatttttatatagctttagccgtccttcttggtagtcgaagcttgttacataaaaattcaacatgactcttgcatgcacgttgttttttgtgcatgccagatcacttagggtatgatacatcttcaaccctccttcttagattggaagatctgcttgaaatctatcctactacttgtgatgcttttccctttgatcctttcaagcaaagtctaagcttgtatttttatacaacttcagcctccttacctagaagtcgaagcttgttacataaaatttaacatggctctcacatgcactttgtttttgtgcaggaatgttcactggaggtacaatatgtcttataccctccttctctgattagaaggactgcttggtctatcctactcctcgtgatgcttttccatctggtccttttaagcaaagtctaagcataaatttttaaacaagttcaacttttcttctcaaagtcgaagcttgttacataaaaattcannnnnnctctcgcatgcacgttgttttttgtggagaaaagatcactggggtacgatacgtcttcaaccctccttctttcttggattggaaggactacttgaagtctatcctactcctcgtgagtctttttactttgatcctttcaagcgaagtctaagcttgaatttttatacaacttcaaccttccttc

SEQ ID NO: 47581 - DNA, 2138 bp, Cannabis sativa
atttctcctaatataatgtagcatggtgatctaaagagtaaatcatactcacatttctatttcctaaggatgctcacttttcatataacaacaaacacaaaatcttttgttgggatccttaaaaaaaaaagtagttgacaaagtggtggggctgagaatttttttgtgctaaacaaaaaggagaaagggtaatccctttgtagtttgttttgttgtaattgtttcatgtctcactttttctttctttaagtttttgtagagagtacaaacaaaagcatgagatgatatttggtggtgggtcagatcagggtaggcttatggttccatgatacaaataacatacatatacatgatgtacaatatacaactactcctcctttcaattattagtcataattataaataataaaatgatatagcataggagggttggaatttggttttgttcatgtattggagtaaaacacaatccttatataaatcacattttgtttttttgtatgaaaagttcaaacatggtcatttaagaggggcaagcatttcagatgacttggaaatcaatgtctcttttgattctaagtaataaagtttgcaactttgttgttgttggtgttagcagaaccatacaatatatatagaatggaataacattaaatttaaattttgtttggttgcatgagaatgttataataatagaatggaataatattaaattttatttaatttcattcctactttcattctcattttcattcgaatatgtcaatatgaacgaactcatattccacaaatgcaccaaagagtaaaggtataaaacaattaatacttaatacttgggttcttaactacttgaaaattatatttatgactgtaggtgaatcggtattatttaaaaataatttgtatttttttttttaactttttacactattaaattatgcctcatatagtatagagctcgttaatagtactcattaaaatataacgcagtctttctatcacattctatttaattttatcgtaaaacgaatgacatgttgcaaattaaatgcccttcacctattttacattaacgaaataaacttttttttatatataataatttatatttttagttttagttttttaatcattaaaaaaggggaaagcttcttgatttgcatccattaatgagtcgtatattatagagtataatttggtagtataaaaagtccagagaacaaaaatgttaattatttttgtttttactatatttaggttgtgaaggtagtttggtataattcatctagaagtaatattttttataactagatcaactaggccttaacaatgacaacaacatcagaggggagattagactttgaaaaaaatacaattagcgtgtaaccgagaagctctagccacaaggtgagtgactcaattagcagattgtttgacaaaaaataaagaaacatcactaaaaaaagatagaagttgtttacaatcctccgcgacatcatcaaaagtagattgcaatacattcaaatttcgaacaacttgcaccaacaccagtcagtcagattcgataatactaacacttaagaaatcatgcttcaaccacgaaagcacttctttgagggccacgacttcaacaatttctagcagaatgcatccatactgtagccctgaaaacctagccacaacccgaccacgatgatcccgtgcataaccctaccaaaaccataccttttttcctcgtcaaaaagagcagtgtcaatattcaccttgagttttttgaaatttggtttagaccatagctcaaccccatccgaaagataccaagtatcaactcatggaaaaaaactccacccaacttttcttacccttccacaagagttgattctgcagaaactaaattgcccacaccaacatcaccgcctgagcactttgttcctcacccaaccaagaaaacatgtgaaaaaaccagtccttaaacgacccttcatccaccagaatcatagccaaaccaactacatgccaacaattttaagcaaaatcacaagaaactaaacaatgcaaaattgattcacttgccccattacaaactaaacaatatatatgttcggtcggtttttggtttattcggtcggtttgccatt

SEQ ID NO: 47582 - DNA, 776 bp, Cannabis sativa
tttttttattgatgcagccttcaccaaaaaagattgaattgacttaagctaacaaatgttcagattaatttaatattgtatacaaaaattagtacaaaagtttataatacaccaactggttattacttagttaaaaaaagggggaagcttagaatacaatttgcttaaaaatcattagataaaattcagatatttttcaaatttatacttgcaattttttgttgagaaaacatagatagggttttgacctttttttatatagaaaataaataaataaataaaaaattaggggaaaaaagagagtatttaattggtaataataaaccttttattagcttccacctaaagtgaaaatagacatacaatgaagtgttgtgcaagaaaaattagcaataataatttttaaataattcacaactaatccaatccatgatgtaattctcttcataaaataataacaattaataaatgtcatttaagttttcaagctgatgtaacatttatcaaaaatcatgcagtatttgcaccattgacatcactaactcacttcactaaatatctcactaataatattttataaaaatagaataatttcttttgttagcaaaaaaattattgtgaaaatatagaaacaaaaaacaaataagaaaataatgtgaatattgtaatattatataacataccaatttttagtccgcgctaaagtttaagatgtgtttagtaatacttttattttttaaaaatataagtagaacttttacttttggaagcaaaaa

SEQ ID NO: 47583 - DNA, 1618 bp, Cannabis sativa
taaatactatgttttaattacaagtaatattttattgtgactaaaaatcacatttattagtcacaaaaaaattatgttgcgactaaaaagttatcaccaaaaaaatagttttttgtagtgaataataatgtatattataatatgagtattgctattaggcatcaataatattaagcaccatctaaaagtggtgctttgtgattaattaatgatattctataaaggttattatattaattaaattatataaaactaatacttaattacattaataataatataactaaagtactagtgtcttttagcattttttatttataatgtacaagggtacaatcaatggaggacccaatgaaagacaagaggggctcttgcctaagcttatttttttctttctttcttaatttatacaaaaaataaaataaaataaaaaattaactatatatgtagaagaaaataggttttcaccccttctaaataaatatacatagttacatttgaacgtggtcggcctgtgggtaagcaaggcaagtgtgtgccttgagcccccgaccgcttaggccttgaaattgtaaaacaaaagctattagtatatagataaaatattaaataacaagattatataacaaatattatttggtgtaatgataaagagttttattttaatctaataaattaggaataattcttaatcttttacttttttattttttttaatatattaaatgtgtaattataaaggtttgaattttaaagtttttaagagtttttgaaaaaatttctaccttacactaaaacacaagaactattatttctataatgagtaaaatatatataagattgtattagaatttgagataaggtgaatgaggcttctgttagtaatgtgggactctctaacatcttttctcaagatggtactttttttcctttttgactttagctcttaaatcaattacttttggatttttggcggcttattttttttggctctacttagatcggttttttttttttttttttgtagggtcgaatagttattaaagggttttttatttttatttatttttttatctaataccatattagaattttgaataaggtaaatgggttttgtctcaaaatcaattgataataaaaagagtaattcatacatcttatgtatggtatttagtttcaacatattatcaatacgagtcctaaaacttctaaaatgaactattaatttgaatgaaattctggatccgcgagctggtacaatgacataaggatgagatgattagtcgtaataaataatgtcaagtctttgtgggtgggctgatgtagctttatatatttcaacgtttgtatataaaggcatctaaattcgaatttgatggaaaaagtgactacaaataatataatataatatttatatatatttgcatggcagtgcattgatgataatgatattattaattatgttctatactcccgacaaaaaaaattattgtaagaagaaatattaattacaatcttctatcaagtcacttgttaaaatttgaaataatttttatagcggtatttgttatagttacaataatatttctgtaaatttttaaaaaattccaaataattt

SEQ ID NO: 47584 - DNA, 2012 bp, Cannabis sativa
aaactgttttgaaatgtaaaaataaaaaacccctcccaaaaaaaaattgtctagtccattctaaaaccaagcacaagattacattaagtataatctattcttgtccagtccattcatgcgttgtctattgttataactattactcactcaatcctctatagatgatttactaataggacaagtgtaaattactgtttacccctcattactattttatcctcaactcctactaagttccttataaaggttattttcgtgaacttaattacaaaaataagtattctatcattttacacttctagctataaagaaatcatcatttcacttcttaaacagaattgtctgataaacattctcactcaattatactactaaatctttaatatgtaagtataatctagtctataggataagtcagtaatgaacaaattaaaaacttaaataatacaattagcagaatcttaatcactcagaattaagatctaattgacctatggtcaacattgtgatataattagataagataataactgttagaaataaatgagaaattacaacggaagaataaaagattaagacaattacaattctaagtataaaatacaaataaaagaaaaaagttacaactcaaaactcaaagatacaagtaaatgtaaactatagaaaagtatatatataattgtgtatatatatgatatagaatatatatatgaaatagattatatatagtagagatataatatatatatataaagtatatagtatgtatatataatattatatagtagagatataatatatatgataatatatataagagtgtttcttggagaagaagagaacaatataaaactagagattagaacaaagtaagaatagaagaacaaacagtcaaagtggagatgaggatcaccaaaagctttgacaaggtttctacacctttgtgtctccaagaagattatttccccctctgtgaaatagttagggttttgtggaaatacttttgtgaattatcaagccttagaattctctagctttgtgtttgaaagataaaaaagaaaagtgtgtctcagaagatgaatcgaggtctctatttatagtgtttaggatcacacactttaaaattcaagaagattatttcctcctctatggaatagttagggttttgtggaaatacttttgggaattatcaacccttagaactctctagctttgtgtttgaaagataaaagagaagagtgtgtctcaaaaaatgaattgaggtctctatttatagtgtgtaggatcacacactttgaaattcaaacatcctacacccaatgacttttaccatctcttaattaggtttaaatgggtgatttggagattaagggagttgttaaaagacattcccatagctatgtgtttgaagataaaagagagtatgtctcaaaggatgaatcgatgaatcgatgtctctatttatagtgtttatgatcacacactttgaaattcaaacatcctacacccagtggctgttaccatctcttaattgggtgtaaatgagtgatttggaggttatgggagttgtttaaggcatcccatagtaaaaaatgttccaatattaaagctgaaagaaaaaataataactagttactagttaccaaattttttatcttttgtaaataattcttcaaaccattccaaattattctcacttaattttatatcgcttatacacattataaatgacaaaataaatccccaacaactatatttgcattatagctttgaatttcaaaagattaagttgtgtaatcactctttacacacttaattagtgatcatgtagaagttacaaaatatgagtaactctacctcttatgttacaacttatatgaatattatatgtatgtaacttccaatcatattatatagtgattattagatgtatgtaactctcaatcacattatatattatacagtagaacctctattcaagaatacacttgggaccaagaaaataatattct

SEQ ID NO: 47585 - DNA, 1086 bp, Cannabis sativa
agtcaagtacctacagaaatttcaaaattataacttagatattatttataaacccatagaagaataataaaagcccatagactaaggtaaagactaataagaatgtttgtcccataaaattttgaggtcatttaatttgctcttgaactattgaaattgttagatagtaagatttggtagatattttggaagagcatgatttagtatatggacaatcgtcgcattagtaaaattgaacagaatccaacaatctcaataggggaacgtttttaactgcttaaaaagttcaagggatatattttggagatatcaaattttagagggtaaaaatcctaattagtcataattgaaatgacaaaatttaaaaactaaggacttaattgcaaagcaagtgaatttattttaattgctgtttaagtcttacattgaggttaaagaatcaagtctcttcatccctattctctttcgaaaaatctcaggtttatcttcttcttcgtcttcgtcttcgtcttcttcttcttcttcatcatcgttctctttcttcaaacatcgctggataaaaccccaaaattatctctcttttccgccgcctccgctggcttctcaggccaaccgatttcaccgcttctgtacccttcgtcgctatcgggtattttatctttcgtttgtatatttatatgtgtgtgtgtgtgtgttttgattaataatctatgtatgtatatctgcattttatttgcgaagaaatttttgaaatgtagttcagagcttaaaattagattattgtaagtgaaaattgtaattctgggtagtattcttcgtatgaaaagagttgagtctgtatatttaatgctagaacaagcttgatattggtttatagagacattagattgtttgttttaaaaaaaattcgataaaattatgactctaggggtttcattactgcaaagtaacaatgaatagttttttccatggtcgaaaaattagctttacaaaaggtcaattgaaatgtgtaggagtctattaacaattaatgccattcaataatgaggctttttcttcttaataatgctgcaatcattttgattt

SEQ ID NO: 47586 - DNA, 2801 bp, Cannabis sativa
agtatacgtgcctcgcacgtagttttttgctagtatatatatatatatgatcatatatagcattgttattagatattattggtgtttatataggtgatgatgtcttatgattagttaacgatattttctaaaagttattttcttaagttatatatgggactccatatctaagtacatcaataggggttatgacaccgaaaaggtgctcagcatcaatagtatcttctaacaattctcttattgttattagggattctttttattattattattatttttacactttaaagtaaattttttttgtatttttatggaaatcgacatagcaatctgcattgcaaccaacaaagaaatttaaatcgtaactaaaatttatataacaacctatattaaaactaccacagtaactaccaaagcaacccaaactataaattttaaataaataaataaataaataatatataaagtaatttctttaattactagtgaaagttatacgtgctgcgcacgtggagcaaaatatttatgaccatataaatgttcagaaaaaatactatttatacttaatattactataagatattatatcactattattataattaattaaatattaattctcaccattaactatttgtaaggtgaatactatccccactcaaaaaatatatatataaatatagaaaaattaaaaatacactccaaaaaataattgtacaatatatatatctatatcgtgttttcaacacataaatagttgttgctctgaaggagctcacttcacggaagtaatcggagaattgtgtacaattgctctagtggtcttatttgcaaccgttccaacatggatccagctactgtaagtgatctattcaaagactctgtccaaatatcccaggaggatatcaccctcacgctcaacccgggggaggttgatgaacctgaagaagcaaaccagattctgttggggaaaatcctgagccgttacaaattagggaaggcagcaatacaagggtctctcaagttgtcctggaacgccattaaaggctggaaatggaaggaaagggatcattcagttcacgttcgcaaaccgtaatgatgcattgaacgttctctctcgtcgtccatggttcgtttgtggatatctccttatcataatgtcgtggcctgtctggctcaccccatctgaagttagatttgacaagaccccgctgtgggtaaatgtagaaagcattcctcccttctattgaaatcgatccaacctgaaagagttggcctccaaagcctcccctgttcatgaactgcccttgggaattgaagatgctgtaggtcttagtaccctgcgatttcgggctacaatcgacctaaataagccaatcttctcaggcttcttcctccgtaggcagaagcttaaagacctgtggatccaatacaggtacgagaggctacccaaactttgctttaaatgtggaatgttaacgcacgatcaaagtacctgcttcaaagcccctacggtgattaaagatgagaaggataacttctacccaatgtttggcacttggctgaaacatgaagccaaagaaaaatctacattcacctccccattagccaaatggttccaagattggactctccaaaagcagcttgatcatgacccggttcttagaaaccaatttaagatccataaggccatcctccacggcgagtccgacgaactacgtgaatgcagactacaacttccggccaagaaacgaattgtctcagacgaagaaccggaggtacaccagtcggaggtggtcattacccaactccctcttgtgagactaccgggtataggggagtttgccccttttggagaaaattcaaaagtggtagtcatccaagacctgaaggatgccgcccttgagaaatcacctgacgccaccaatggaaaaccacaaccctctgtgagctgtgttgctgagggctctgagagtatcaacgccagccgtttggggatagagactactgatggtcatacctcttttggagaggcaaataagttacttcaatgtgtacccatgcaaaaggaccatttcggtgggaaacagacaattgggggggacccaccttccacttctacttcagagttaacggtcacctgtggaccaagtattgggccaagtgaagacttgaatggtaaagccattccctactcctcttctgtacttggtactcaggcccaactggtagattggccctctacgcaatgctgggctgagcctcaagcccgtaaacttctcatgggctcgctcactgtggataaattctttagagaaccaacgttgttcaacccaattctaaatattgatgacttccgagttgatgaacactctaatgggctgagaaaacgtaaagcctgtgatggcttgactttctacccatctcctaaggcccatacctcaagtggaattacttcccacctcaacgacccacaatgccccactgcccaggccccaggtgcgtcatcgactcctactcccccatctttgtcctcttcgactatccctgaagttcgagagactctcgtgagcaacgtcgatacaccctatggagaatcgtactctccaggatcgtccaaaagaaggggaagacccaggggaaggaaaaatattgttcccaatgagcctactcctcaaaagagaaggggaaggcccccgaagaagcaaggcgacctatctccctctccaaaagtcttcaaatggaaaaaaaaaggcttcaagaccgagtggaagctcctttactgtcaatcacggctgggg

SEQ ID NO: 47587 - DNA, 946 bp, Cannabis sativa
ctgcatacttagtatgataatacttaatatcttgaatacaaattaataatgcaaatataaaaattaaacatgttactgtataaagtaaatctgttcatttcaacctatatttcaatggtccttagtttacaaatcatcaatacatgtagaatctcttggggtgataaaaaaattaatataaataatcactgttctttcttaaacacgaaactaaactagtagactactgtttcgaattgtatgaattaagataaaatgaattccaacatttctctcttagatactaaccgaatgttaatttcatctagttgatacagatttcaatgtggtccatttacaaattttaccataacttcaaaattccacacaacgttacaatatactaaaataaaaggtctttgtttaagcatggcatcactcttacatataaccacaaataaaaatgttatagaaatagcagtaaattaaagcatttcctcaaacaagaattgaaagctctcagttctgtccattttacagaatgcttaagctttatccctttaaacttttgaaatgttatttatttatttaattatttttgcatgttttagtttgctggggtatataacaactgcccggcacaccatggctgtatccagcttgtcttcttccaagaaggattactatttaacatgacgcacacacacacacattgatgaccattttcttattaattgcaagacaaatttataatcttctagaaatttaaagagcaaccactagaaggaaggagatcttaccaacaggtcatgtggtgacagccttgagtgagctcgatcatcatacggcactgctggcaacgcctccatcttttattttgtgctaggcgaaataatgtaatatcagcagaatctctctcttcccatggaaggttttggaactcttcacagctcaatgctgtatgcca

SEQ ID NO: 47588 - DNA, 2271 bp, Cannabis sativa
gcaattgtgagtttggtacaaaatgctggaaaactatgactggaaatggactttgtaagaccatcagcaagttgatctgtagcagggacatgtttgacttgaacttgtttacgaagaaccttctcacgaacaaagtaaaggtcaagttcaatgtgttttgtgcgcgcgtgaagaaccggattggcagcaagcagaacagtgctaagattgtcgcaccaaacagtgggaggtgttgtttgaggtatctgaagctcagtaaagagtgagtgcagccatgtgagttcagaaacacaattagccaagctccggtattcagcttctgtactggagcggcttattgtctgttgcttcttacactgccaagtgatgagattacctcctagaaaaattgcaaaaccagaggtagatcgccgatcatcgggatcggaagcccaatcggcatcacagaaagcagtgagatcagtcgagggtgatttatgtagatgcaggccatggtcaattgtgccactaagataacggagaatccgtttcacagcttgccaatgtggttgtagaggagttttcatgaattgacaaactttgttaacactaaatgcaagctcggggcgagtgattagaagatattgtaaagcacctacaattgacctgtagagttggggattatcaaacggttcatgaccatgtgccgagagctttaaaccactcaccataggagtgggaagaggttttgcatcctgcatttgagccttgagtagaagatctctaatgtatttggattgtgataagtgcagcccttggggagtagattgtacttcaataccaagaaaataactcaaatccccgaggtcttttagagagaactgagagtttaaggattgcacaatggtggtaatgagattagagtcacttccagtgatgataatgtcatctacatatactaggatgagagtagtagaagtagatgtgtgaagagtgaacaaggacctgtcagactttgaagaggagaacccaagagtaaggaggctagtgtgcaatttgtcaaaccaagcccgaggggcttgtttgaggccatacaaggctttgtgtaatttgcacactagatgaggagcattggggagaacgaacccggggggttgttgcatgtaaacttcctcttgcaaatcaccattaagaaacgcattgttcacatctaattgtttgatatcccaaccccttgaaatagccatagagagaacaactcttattgtaaccggtttcacaacaggactaaacgtttcggtgaagtcgaaaccgggttgttgatggaaccctttagcaacaaggcgagccttgaacttggatgtagtgccatcaggattttccttctttcgataaacccacttgcacccaatagcctctcttccttcgggtaagaccacataagtccatgttttatttttcttgagggcaaccatttcagtagacatggcacggttccagtgagcactttggagagcttgcttgacacttgaaggctcttgagaaactaagtatgcttttaattttctgatgccagacttggcacgagtctgcatctggtgtgagttcactggaatggttgatgtagactctgtaggtgcagtaggatctgtaggcatggcacttgtggtggtattcctcacaccagcagtattagagacattcgcaatactaggcacagcagtaggttgatcagtagcagtagcccgatcactggaacctggtgttgagtgtgttgtttgaggtgcagggtctgtagcagctgtggtggatggtaaagattgagtatcagacattggagttggttcctgcacagtgggaaatgaactacacaagttgtgagagttagaaataagtgagttgtgatgttgtgtatgaacagtgggaattattgcagagggataaaatgaagccataacctcagtagtaattggaggatgtttgtgtaaagcatgaggaaaatgacactcatcaaaaataacatcccttgaaatgtacaccctacccgattggtctagacatttataccctttgtgattgagactatacccaataaaagtacaaggagaggatctaaattgtagtttgtgcctattgtaaggtcttatattgggatagcaagagcaaccaaaggttttgagttgagtataatcaggtgggatgtgaaagagagtttctataggtgatttgtaattaagaacaggtataggcagcctattatgaatgtacacagctgttcgaaaagcttcatcc

SEQ ID NO: 47589 - DNA, 1138 bp, Cannabis sativa
aaatgggttaaaaagcttaattaataattaatattgtgtgcatgtagaaactgaaaaaagtagtaaaaaaaagtaaaattcaactggattatttctttttcttttcctctaaaagttattttgttacatgagctccacaattgtgagtcaaaaggggttcttgttcttaaagatggtcaaattaattatagttttataaagattgatatataagttacatatgtgatcaacttatataatgaaagattaaaagaagactagtgatcaataagtggagcaatcataacatgtatgatcatcatgagccctaccaaagaattaaaactcaaaagagaagagaaattagagaggagaaaacaggttaaggcaatggaccctataaacacccataattggtgctatcatgtaggaccaattctcttatcatttgaactcaagataagatgagtaactttaacaaaataaaaaacaaactgtttaaaccgccttttggcgaactgtgtccttgttgggcatgtccaaaaagtactaaatagctagaagagaacacaaaatacattgtaactagctagcacttttgactagtcttttaggtataatattatatatgcttcatgcaaaatagttatatacatcattattcattatcctccaaaaacttttctacattattgtcttcattaattgtggtgagtttaagttctggggaaacaagcttttgttgggttggtccctccaaatattattttagcttggatttgatctccttgtcttaaaccaaacagcatgagcttcatattaaattaatataatcctctacgccttgtctccaatttggaaatcgtagactgctcatccaaacacccccttaattatgggacattgtggtcaaaacgtgaaaactcgtactgtttggaaacactgctactcttgatattatgagtattgctattagacatccgtaatgcctagcaccttctcgacatatcatgttgcgattgactagccatactacctaaaagttattatattaaattatatgggattcgatacttagttagactaatagcgatattgacacataagagaatgttaggcaccacaccacaagtgcccaatagcatttttctaatattat

SEQ ID NO: 47590 - DNA, 892 bp, Cannabis sativa
gtgatagaaggtagtccttagacttttgaccgtgtcccattaatctttgaacgtttgaaacaaggtgaacacgataatgatcaccctgaataaattggatttttgggtacaaatacacaatctgtccactagttttatgctagaaagagtagtccgggatcttggaaactacatgggtacttttgtcaaaacggatcctaacaattttattggcatttggcgtgattatttacgggtccgtgtccgaatcaatataaaatgtcccctcaaacggaagaagaaggtggaaaacaatggggagtttgttgttatgcccatttcaaatatgaaggcctgccactttttgtttcatttgtggcattcttggccattcagaaaatttttgtgaccagctttttcacaccccaattgagcaaatacaaaaaccatatacacttgaattaaaagttgttccaggaaggaatagaactatgccattggagagaaatggttaagacctaatatagctaacaaagttgacggagtggcctttttcggggagtctggcacctaatgctcagagtaaggatggtgacggtggtacgactgtggacaatcggcctggttatttacactagagtaatttaatccctaataagttgggatcttcctccaatcagccgataatgatgagtgatgatagagccaaaatggtggaagaatctttgccattaatggataatctagctgccaagaaaaatcaagtgttgatggagaaagatcaggagaaaggagatataggggagtcaataaccataaataaggaaaaaagtcttcttgtcttggaagcaaagagaagacgaacggggatcgacaacttaaatgggcctaggttgaggagtggtatgagcca

SEQ ID NO: 47591 - DNA, 1133 bp, Cannabis sativa
tattaattgaatattttgattatataattattagtgaaattaagtaatgacctagctactttgttaattcatgaatatgtatagattgatattaatgaggcttcagagtttttgacatccataagtgggacatatgatatttattatggaatgatggtgatcacatcattatcatttataacaaatcttaaaaaaatacatggaccctttgggagcgaaactggcacgactttctcccacccaattcaaggtagtactggcgccattgttgggtttcatggaaaatcaggccacttcattgattcaattggcatttatatctcaaactggtaaattaattaactcttaatattaattctagtttattataaaagaaaattattaattttggtcgttgtttaatagaggttgaagaatggatcggtgcgtgtacaattcgtgaccgtggagggtacttttatcacatgcatgcatgctcgttgaatttcgaataatgttattatttaagtttttgtaataagataggatatatatatatatatatatatatccttgatcgagtacttttgaatttgtgtgtaatttggaataatgttatttatgtatttgcaataagatatgcaatatccttgatccatcgaactctatgtttggtgtgtataatttgcaatattgtttactttttatgctggaattgtttatggcttcaatgcttgtacaatctattctagcatctacaactctagctatttgtaatgtttattttaatgaataaaaattctctcttttatataatataagtatgtaaaaaaaatatgtaatttaattttgtacccaggttcattctatttgtgctattgtgtttatttttaatttttctgaaaattatcttggtttgtattgagaggttcaatatttaactttattgatgtataatattgagtcagcggaatatttccagttcatcaattttggtttgttgaattgtttatgtgtatatagacttattattatgtggtcgcctgctcattctctcggtatttatgaatctggacactctctaacacttacagatacaatgcatggtgattcccctaaaaacttctattttaatatttaaaaaaaaaaaacac

SEQ ID NO: 47592 - DNA, 2721 bp, Cannabis sativa
taaccacaaaaatcgcaccgcactgcaccacaccatttaatgtggtgcgattttcgcaaatttttagttttgcggtgcgggtgcggtttggaaaattgaaaaagctgcatgtgcgagttgatttgaaaaaatggtcaaaaaccgcaccacctgcaccgcgaacacctctaatgtattgtatttaattattacggccaacatttttaatacagtgtaagctgtattatttaatatattgcaaatggtctgtattagcttgtattataatagttacaaaagatttggggtcaaccacaatctccgactcggaccctgatccagacctgaacccaaactcgggacttggacttagacccatacccgaattctgaccccaaaccccacacttaggctagggacccgagactcggacccggacacgaacctagacttgagacccgaacttggaccccagaccacgaaccccgacctgaacctgaactcaggacctagacttagatccgggacccgaacccaaattcgattcgggacctggacatagattcgaacccaaactcgagacccgggacctgggactcaaacttgactcgtagtcggtgtttgggttgagtttattaaaaatatattataactttacacaatatattaatacaagtcaataccaaatatagtttttattatataatactaatacaatacaatacaatccaacacaatacaattcaatacaataatacaaatacaacgtactaaacgaactattattttttaaaatagtacaaaataaaccctaatctatattttcataatttttttcattataacaaacatgaatcctgtatttagcatgcatagatacaaaaaaatataaccagactagtcataacacttttaggtcaggttattattagattttaattgacaaaaattaatcagggtctattttgtattattttaaaaaaatacagggtctaaatcgtaatttaacaaaacagagagttcaatcagtaattttaacaaaataaagaatccaaaatagtatttacaaaaaaaaaaatctaaaaatctgaggccaatctcaattagtattgtaaatatctgtcgtgccataaatatgggacatgtcgtgtcgtgccataaaaaattacgggccgtgtcataaaaaaatacggattgtatcgtgtcgtttcatgccataaaaaaatatgggacgtgtcattctgtgctgagatttgtattgtgctcggattcgtgacgtgatttacataaattgatttgttttcttatactagctcaaatttatactctactattttacattttattcttataattaatgagataattagagtgtgttttttataacttcaattatttttatataatttttcaaaaatatttaacataaaatcatgtaaaaaattcattaaaagtattaaaatttgaatatttactaataaatactcaaattatcactattgctactatcaaatatgactttttttgttaacatgttgcgctttaagaatagattatacatgtttacgtgtcatgtctttcttgcttgtagtgagttcactttttgtgtgatgtagtaccaagtaatagcattgtacctcaagcctaaccctaaacatgatcgaactagacttgtaccttggatctacctaggtcagagcccaaaaaaagggaaacttacacaaatattagaattttggttaacttttataaaaatactgtcacacataaaaattttcaaagatactgtgtttttataaaacactagtaaaacacaaaatagaacaactaaaaacaatagaacaactaaaaaacaccagtagaacaccagtaaaaacttaacacagtatactgcagtacgaaacttataaaaaaatactgtataaaagtaaagtatactgtctgacagtatttttgtaaaaaaaatgataaaagttagtatagcatgtaaattttcaaaaaaaaatcccatttatatttacatttttctgaagtgatttttaaaaatgtcacattttttctagcggcccggccctattgtgttcaaacccacattttttggtgtcttccgaattcgtactgtttcgtgtcttatcaaaagtgtggctcgtatttcgagcactattctcaatgcctcatggcccccatcctgtccaacaacgcaattccaagcggtccctgagctcagaccttatccaaacacacgggacaaattttcttttgatttgtgttccttcaaattaattgactttttctttaaaaataaataaaatggttaattggccgaaaataaagtagattactggaaaagagaaaaaaaagacaaaatattttatggaatcatcaaatacgtaatcaactccactaaaagtaagtatttgatttcacacgtgccgcacgtggatgtatatttcgtatgtacctctctagtctcacccactttcttcgttcgattagtctagataggtttatactatataaataacacatcccacaaattctaaaatccataaacccaaacaattctctctccttttcactacgaaaaatggcacccatcaaagtccacggctcagcctactcaactgccaccatgagagttatagccacactcaatgaaaaaaacctcgattttgagcttgttcccgtggacatgagaactggtgaacataagaaagagcctttcatttctctaaacgtaag

SEQ ID NO: 47593 - DNA, 1445 bp, Cannabis sativa
ggtcttgccacatttcaacagctatatcaaagtacataatactttgtgcaatatcagggaaaacagagtttacaagccatactgttgcagcggagccaagaattgaggagattaccagcaataggacgaggaagagaatcgtctatgaaagctgttttgttcttggcagcgagggccatggtgatatcatgtttccatgattgatagtttttccctgtaagaggaaaccaacacgaggcctggatgatcgcctgagctgaggaagaagggactggaagcgtcttcaagcgatccacgatcttggaggggacgaggagtctgatgaatctggtgcgccctgcgatcgaggtcttgaagattgatggtgagccgcaacaagaggaggcttatttggagcataggcgatgttaggaatggcgtcagatagggactgaacttgatcagaattggatgggagaatcccatcttgagatctagtcgaaggtctggccatgatggatatgtgggaattgtcttctaataccatgagagaaattgagaaagagagaaaagcttgaatatatttccactaaattgaattgagtacaatgatttagttggtttatataggctgagaaggtgatcaacttagtttgaacaaccaacttgtgtcagctcaacctaccgacttcataacagaaaaaataaaacagaaattaaacaacactaattcaaatttctaataacctccaacattatactacactttgtattattaatttttattttagaaagaacataaagttcttgatagattaaatcgaaagaagaatgggatctgcaggggtgatctctctcctttgtcaacatttttagcaagtttgtcaacaaagaacaatatctcatgaggagcatacatcagtctacaatttaaaaaacaaaactcttaagtttcatgacagtaaaacaaggcagaaagttcccaatcagggggtttgttccattgatgaggtcttgatcgcttgtagcatactacactagtatttcactgtctaatttaactttcttttttcttatctccccactttgggctcccttgtataatttgtttattcttaaaagaaaaaaataggggaggacattgtcattactatatttgtaattttagtagatttttaaaatccttaatttttttaaataatataaaaatacgaaatatggatgaaattattgaaatcctgaagtgcataattgtaaattgtgaaaggcaatgaacaatttgcatcccataaaataataaatacacctaattattaaaaaaaaaatatacacttaaataactttttaaaatatttttttaaaattttttcctcctattattttagattaatttcaatacttattttgatttcattttcataattttttctaacgcatgtatttatatattttttttttctaagaaa

SEQ ID NO: 47594 - DNA, 1790 bp, Cannabis sativa
atcgtattttctgtaaataaaataaaaaaaaatcgtaaaaatgtttaaaattttgtgaaactgtatttttgtaatttttgttgtttttgtgaaataacttaaaaagttcacgatctttaatagcacagttttccttaataaagctttttataatacttttttggtattatgaaaacatcttttcttataggatgctggcaactgttgggagattagtaatgttgtctctgatttggaaactttggctgtttcttttgattgcagtatgtttctaggtagttaaattatgttgctcacaacttagccaatattgggctttatctacttcattcaagttctgggttgatggatgttcctccctaccagaatctttattctgtaatgaccgttaggttcttttcttactatatttcatcgttttcagtttcaaaaaatataatatcccaggccaacgattacaacctccgcggtacgcggcgggatgagttacgcgcgctcatgtattgtatttgttgggctgacaacactcctgctttttattatgtaccacacaatatacttttaaaaaaatttatctgctttttatgtaccaaacaatatacactttcaaaaaagagaaagctaaacatccggaaccacgtttattgggaaataactttgattgagaccactacgtagttaatttacatctctctagaagttgcaatataattttgagaaataatttaaatattattagttttattatttgattgatttatacatctctctcgttctctttctctccttcaataatatcaactaaaaagaaaaatactaatcattaacctttatggcatgtttactaaaagaataatgagaatcaattgtatgggattgattctttactaaattttggaatgggaaaaattagtggagctcacataaattaaggagaaaacaaagagaaagattctcccccattttcataaagaatacctttccctttccttaacttactttatattaattatatttttattaattaaaaataaaaaagataaatatgtccttcaaaaatatataaataaaaaataattacatgctctaataatggcaatttagtgaaattaagtcattctgattactttttctgattatgtaaatagaataaaatgattctgatttcctttccgattagtttagtaaacaacaaaataaaatattgtttctgattattttatattttaatccgactcatttctttcattgatgattctgattccaattacagtttagtaaacgtgccattagttcattgattgtttttgttttttataaaaaaaaaactttggtatgtacagtcacaaaaaactgtctgcgtgcgtatacatagagacattttttttccatgtcactcttattttataccataatttgtttttttttttttttgtggttggggtaaccgataaaggttaaggtaacaactgtaacaaaagttacacagaaggagggcggattttttccatctaagaaagttcattgtctatcttaaaggcatgtttagccaatctatgagcctcaacattaaagttacggctaacatgagaaagagatgccttaggaaaactagacaataggactttaatatcagaaaagataacccccagctcatttaattacactgtctagccctccaaagctgagaccaaagaaagtgaatcagaaaaaaccctctccacgggaagtcccacatcttgagcccaacgcaaacctactagtatagcaactgcttctgcctagaaaac

SEQ ID NO: 47595 - DNA, 1451 bp, Cannabis sativa
  modified_base (113)..(133): a, c, t, g, unknown or other
gatttcattattcgttagatcaaaattcgatagtttgatatttttataattaatatttatagttaaatttgcttagtaaccattcattggtaatactcattaagaagtgttcnnnnnnnnnnnnnnnnnnnnnatatatatatatatactaggcatggaggatgtgccataagcatgtaaccctctttagaacctgtaaattataattatatatcttacttttattaattatgtttaaaataattgttaaaaaaatttatgtttaaacaagtacatagtatgatatatgttaacttattgaaattaaaatcattaatcatcttgtataaatgtaagtccatgtaatttgttctacttttatttattaataaagaaaatttagaagaaaaatgaaataataaataacaaaaatctatgaaaaaaagaaagaataacaacacaaaattgattaatatcatatgtatgctcgtatagtgttttacactattttatatttactaataaataaataagaaaaaagaagtaataattttttttttttaaaaaaaaaagaggagaaaaagatgataaaaaaattgagtaatatttttggagaaaaaagaaaataaaatgcagttttaaaaaaaatgacaaaaacataaataattggtataaacaaaatataacgcacaactccaaacatgacaaaaaaaaagtacaaattactatgataattttatttattttgagaaaatacataagagcaaagactatatataggaaaactttacttaagctgtgtgtaacaagtaaaaagaaaattaaaaattatgtataattaaagaaatagataaaattataattaaagtgattaaggatatgtacatattaagagcagatttaatggagagctgaaaatatcacatacatgcatatttcaagtcctctttataaaagtgaactctaatgtagtatataaagtggtctaaatttaacccatgctaaaagttgtgtaaaatttaacacaaaatataacatgtgccgaattttatatcatactaaatattacttttttatttactctttgccacttattaatgtaagtaattatttttttattttttatttatatatttaatagaatttttatataatttagtaaaaatttaatactttgttgaattttttatacatttctatcgaaagagagttaattttatcctgaatccataaaaaaagttaaaaaaatttggccaaatatagtttaactcattttttatctcaaattatacaccatttattagaaataataagaaaaatactaaggaatgtgctaaacatcataaatagtgacatgccgttattggtgtatttcattattgggtctcacaaattttaatttagtgaataatatgagaaaccactaaccaattatcaagtgttatatttgtataatgttggacatcttaagg

SEQ ID NO: 47596 - DNA, 1632 bp, Cannabis sativa
atttctaatcttctattgataataaataagattatattgaaatgagttttatttagggcctaacatcccaacaatttgatgattaccatagttgacatgactacctatgataccaaggtggataaggcactacgagctgaaggcatagtagagtgtattcagaagtcccgagggactcaaaatgttggtggggccactgctcctcctacctctagtttcggtaagggtggtagttactcaacttctgatcaaaagagaaaagctccattttcttctgatggctctagccaaagcaagaggttctgagggaaccaaggctataataatcgatagggtggttcagagagtcgtttcacttaccaggaatgccctagttgtaagaagcatcacttgggcgagtgcaagggttgagcatgtttccagtgtggtgtaactggacattaaaaaagagattgcctgaagttaaaaaaagaatagcagaagacaaaggcaaagcctgctccaactagggtgtttgcccttacccaggtcgatgctgaagctagcccttcagtagtgacatgtcaactttcagtcaacaactctttttactctatattgtttgattttggagccagacattcctatgtggcggccagagtaattaataaaatgggtaagccatgtgacaactatgaaatagggtttagaatattgttacccggtagagaattagttatcttcaaaatgtggaataggtctatgccaattaggattgaggatagagagttgagtgttgacctggtggaattaagtttagcacaattagatattatacttggaatagatttgtttgtacaagtacgctgctagtattgattgtaagtagaagatggtgacttttcaacctgagggtgaagaaccatttgtatttgtggggtaagttcagggttttcaaattccaataatctcgttgttgaaggctatatatttgttgcaggaaggatgcatatggtttctagcagtggtattagataccactcgggccaagttaatttgacctgataatattaaggtagtacaagagttcttagatgtatttctagaagaacttctagggttaccaccacaacgagaaatagagttcttagtggttgatgttagatgtcaatctgggcgctgggatgtcaacctgagcattaattgggacctgaatcgccttcagtaaaacagccacaacacattcaatttttatctgattgacgcgattcaacttgcattttgaagctaattcaatgctctatcaagttatgtgtcacactctagacgtaattctgaagctatcgtgtcaaaattcaccctaaaggagttacaaaaataagctttaaattacccatagcgggacctgtcgggcactgaaattttgctatcaccaccgaaagctaattttcaccgttagatcatcatcaacagtcgaaaacactttatttgtatttttacccgatttttgttggcctccttcacatctaaaaggagagatccacaagtcattttacatattcagagaactacctaaaaggtcaaagcttctctctctagaatttggagcttttaacacttattctattgctgtaattaccatcttgtgagaaa

SEQ ID NO: 47597 - DNA, 1960 bp, Cannabis sativa
acagcaacagcaggtacattaatattcttattatacataattatttatagaataaatatgatttatttcctcatctagactcttgtagaattttgtttcttgaatttttctgttacaaaaatttctgtgaactaactaatctaactcagttcaagagttctgacaaaaaataagtacataaatagttgtctaataataaaatatgagagtctatgtatgcatatttagagctgctgttatatgtttaatgttgaattaaattttaagcagcttaaaattattaaaattatttgcaacgatatacatagtttgaggggattttttcaataaagaaaaattgagaggacaaaccttcacaaaggtcttagttcaggagaaaagatcctatttattcttatttatattccatttaattattacaatttatatatataaatataatgtatatgcatgttggtgcacaattaaattaagtgaaacttgtttttgttgaataaatacagaacaattctgagaaatctaaggacactgaagatatcaaacaagaccttagaagtcgaggactatgtttggtaccagtttctagtacttttcctatgacacatgagaccgctgttgatttttggacccctacatttggtggcactttcagatagaaaaagaaagaagaagaagaagaagacgaagaagaaaaaggactctattctctctgcttcaactaggttattcatgtgaatatatatagtataagtcttatcagaaaccctagccaagttgggaatgataaggttaaacaaaaaaaaaaaaaaaagcagaagagacacgcccacatattgtaaccggtcatgggatcgatgagaaaaaggatttattaagtttcagtgaaggcaagatgacgattctacccccaaaagggacaatatgctatccttgctgggccagctagaggcagaatgatgcagttttgcccaaaattgggaccattggaaagcataataattgttgtaataaaaattgaagaattatattatatgattagagagttgggttaggaacgagagaacagattctgaacttagggaaaagttttaattcttctttttgttaatttattagtattattaatttatagtgttagagatcattaattaaaccactcatcaataagaaagaaaaaaaaaatcgaaattaatatgaatttgttattgatttagaattcataagctgacaatatcatcatgagttatcatatagtatgtgtatttaacattttatatatacatataaataaatcgagaagagagagagagtaaaagaagatataaaaaggagcttttattccttattgctatattgtgaatagtgctggcactaccttttgttgaagagaaaaagaaagaagggcaaaaaaagaaattaaatattggggaaagggaataattgaattttagaatagaagaagtgggtaagtgtagagatgggattggattggcaatctcacttttgcatttgttaatgtgtttggaatatatgtatgttagtggaagtcagaaggtggcccacaatttttccttactatcttcctttcaggtttttcagatattttctttttccttttttattatttttcgtattccatagagaggaggactagagcttaaaagaaatgtattgttatgagatgctatatggggtcactgattttatgctttttatcgaatggtcacattgaggggcttctattggaagctaatggaatagctccgctctctctccctgaatttttctttattatcgactttagaaattaaatttattttaaaaaagataaacttatattaaaatttgtacaagatttttcataatcaataaccctaatatattaatgctcttttttatctatatatatactattactaggtgaatgtacgtgccgagccacgtattgatagttttattt

SEQ ID NO: 47598 - DNA, 1472 bp, Cannabis sativa
tgtaattaatggactaaatttgtacaaattaaggaaaggtataaattttgatatgaggtatattattaagggcaaatagtgaaatttcattttttattttattttatacattgtaagagtttgatgattaggtgaatttttcatttattgacgttggtggatgtttcctttctataaagagcattgttatgagtcaccaagtgcctaacaatcttatgacatggcattttataatttgttggcaattcgttctaatttttatcaaattaaaataaatagaacccgatattaaattacaacaataaccatattacatctcataaaagtgttagacaccataaatctctccttgaatatttttcatacataaatattcacaagtcaaatttatttttcttttcatctaattatgtaaaagtgtgactgattatgagaggtcttggtcaatggaccccattggagaagtgccatattagaaagcatttaatttggtaccaatttctttggtgctctgtgcaatttgtcccttagtgcagaacttttcacatggtgtaaaatatcacaacaaatctcaattttctttttttttttttttaaagtatcacaacaaatatttcaaaaatatataattaaatagatcaataatgtgttaagaaatcaaaataagcaagatacaaattttgtatataatctacaacacaataataatagataataattaagtatgcgtacctaattgatccataataattacaacaatttgatagaacaatactatcaactaaattttcctccctaaatctctaaatcaaaagcaattttatatatttagttatcaaaaataaacaatagtaataaaacaatatgaacttaactacataactttaattgaattgcatctgtttatcaaaagcttcagttaacaagaaaagctcatacttctgcttcaactagactttacacacagatgttaagttcattaactactgatcactaacaatataggcaaacacaataaaaaactatccaatcaacctatattttaataaaatcaatagttaatgtaagcttaaataaaaaaatctaacacaatgttcttagattgtgtaattttgcggctcataatgtcgcttagtgagtgtttgctcaaaacttaactaatatggttgatgtgccaacttttctagcaaacattatctatatataatgatcatgaaatctaattttaaaatagatcaataatgaaaaaattaagaagcaatcatgttcttttttaagtcttaataataaataaatacataataataaaagattaacaacattaaattactaatgtaaacacaaatataagactagaaacttatgcaggaaatgtagttaagtcaatgaattattttttggtcgcaccagtacaaattttccatgtgcaaaagaaagacaactgttttttttttagtacagtatggtctccc

SEQ ID NO: 47599 - DNA, 905 bp, Cannabis sativa
atctcgagttgtgaacccgagaacctaacctcatgaacagatcctaggacctgttcatcgatgctcacatttgttgggactggggagattatttagggatcatcaagctcaataaccatttgagtcgtggcacacttcttatttgatgtggtctttttcgctctcttcaatggttcagggttagttctcgaagaagtttccgagtcagaaacacgttttttacctttcttggaacctggagggctcgagagaaggctttcaaaattcatatatgcgaagcgaaaaaaaaaattcagcacttgtccaaaataaacaataagaaagtggagaataaactcccacttaaagaaatttatcataattatcaaatgatgatgaggaagaactataataactactaacctccttggaaccggttatcatatataggtcaaaagggtttaatggagacatatcccagtctagatggatcgctctattagaatttgtaccatatttcttggcaattacataattagagttgttacatcttaattgaacatgatgcttgggatactaacagtcaaacctatgagctatgcgatcaaaataattctagatatagaaattatactgattatcgttaaatttaactaagttgatacactcaaacctaagtactgtgggagatcatccacaattattaccttgggatgcatcttcttcagcttcctgagggaatatattctttaagaaattgatacaagccatgtagtccttgtcttcctcgtcagcaggcattggaacttaccactacttagaatattttgagtttataaagtcgcaggtaggttgtttgctgactaggagattgcaggtcttcaggttgagctcgtttggcaaaaaaattagatgatcgcaatcca

SEQ ID NO: 47600 - DNA, 1047 bp, Cannabis sativa
atatatgtcgggggaggggtcaagcttagactttggcctctttctctttttcaaaaaaaaaaaaataggaaaaacttatacataagattctgttataacttcataactttgattgacatgaactttccctttatgaattattatttatctcagaaccctctaatagtagttttctttacattgctctaatatatgccacttatagtttcctaaatcagattttgaactgtctttttctgagtagtgatttttagtgccataaaaagttgtgattccagaacattacatgtggtggaatcattatttattaatagcagaggcaattgttggttcacgtgtcacactttttcaatattgtcttattactattaatattttttctatttatttattaaattagattatattgtatgaacttgtgtcaccatcttaaaaacattatctttatcttagcttaaacctttcatttttctaaaccaaaaaaattattgaagatttcatttctcttccacatttatatatattattattattagtgtgttgtgtactaattcaagaacacaactttattaaattacacggatttcccttgtgtctttttagccttttttagcatttagttcataaagtattagtctttaaaaaaaaaagttttaaaaaaaattaaaccataataatctctaggtttaataataagaaaataactaattaaacagaaaagaagaagggattttcacatttatttccttgtattttcaggattttttttaggaattaatcacagagaagaagaaaacaaaccttacatgaaaatctatacttcacttataatcattcttttgtactcaattatcttcttttttccttaattcatttatggtatggcctaattcagaccttacattatcacaatcttcattaacagcaacatcatcatcctcaccattctgctcttgttcatcatcatcatcatcatcatgatcatcttcatcatcttcctcctcattttcgccatcttcatcttcgacatttggttgaacaaagtgg

SEQ ID NO: 47601 - DNA, 992 bp, Cannabis sativa
aatagttcatggggcatttttaacggcattaaaagttcaggaggcatgatttggtacatatcaaagttcaggaggcaaaaatcctaattagccataatttttcttggggccgaatataaaaagatccctaaggtacaggcaaagatgatgcccttactttacaagttcaattcctatatatagtataatttaatattttaaatatatataattttgtgaattattttactttacactaattataaaataaaataaataaacttcaattattaataaaaatataaataaattgaattgaactaaattaagatagcataaacattcctagtgtttacaccaaaagtaatcccgatgatgtggacatcaatatttgacatgtgccaataaaaaaatattttagaattgagtagtctcgggttataacaagttgacctagggagcgtccctagtcctacgtccaggttgatttcgggaactctgaaatgtgtgtttggatcccactaagttatttttacctcactatattttagtattctataccatgaagacatgaagaatccaagtccaaggcgcaagagctaaaatcacacgaaataacaccttggaaatcatctcggtggcctagggtttcacccaatgcccaggttgacaaccaactagaattttagtttttgagattttcttagtgcaaataagtaaaaactttgcactgggacatgacttagacatgtcacaaatatatatgagacatcagaatgagattcagagcacttttattttcgagcactaggtgccccaggcacccaacgcccaagttgacatatatcaacctggaccacttccaagcatcaagctgaacaactatcccaggaatattcttcaacttcatcaaaagtgaggagacaagcactttcgagggaagaaacagaccaatctaggagccagaataagggtccaactcccaggttgacattttgtcaacctaggccaat

SEQ ID NO: 47602 - DNA, 1565 bp, Cannabis sativa
tttatagaatataattttagaaaatatttttatttttttaattttaaaaataaaaaaaaaaactaattaaaaaaatattaccaaaagtactctcaattatttaatttgattttataagtaacaagtaggtaatgaacaataatacctttgttctaacaaataaaataaatgcttttaaaaaaaacaaataaaataaataatattaataataccatatggcaaaacctgtgaatttctcctgaatcctgatcctagtcacaaccaaaatggccccacgtttatgggacccacatccacttcattaagcggggcccttacttctttctgctctagtgttttgacattttctttccatttaaggtagacaatgaattgtttttcatatatatttttaatataagtgatgataaacactgactgaaacaccaaacactgcttctcctaatggataagattatataatagtatctgttattatgtgttttgcgaatatggacttagacagactatatattcaaatactcagtcagaacagactaaagcacgttacataatacattgctccaacggcctcatgtcgccacttcgctggcactttcttacatgacccttcgtcaccccgaaaggtcactttgtccacctcatccttccccaacattgccacgtgtctgccacgtcaattccctcgtggattttcactattaccaaacaggtttattcctctgcatatgcgaatcttatcttgccttggtcaaccactgccctcaatcgccacgtgttatgacgaagccgattttcctcgtctgctgctcaatgaatgatttatttaattaaaattttacaccaaaaacaataaatcattttaattaattaatccttattagaagatatgataatcttttttaagtttattttattatccccatgaatcaggctattagtttactggtttgcaaattgcaataaaaattgagaaaaatcgtttctttttcttttttaaattataatgtttagagctgtatatataacgtgcttatggtcatctatcagcattggttacggcatcaaaatatgtcatcatcttagccacaccatatctatgcataacctaattttttttacaaaattctattatacaaaataataattttatataattcatttcaattgatattggcaatttttgcatgtttagtaatatgaccacgtttaacagccttaacccaacacccgcccgtctaccagattagactatttttctcaactatagtattacgtacaatttatagttgaagattataatattaataatggccgatacacacagcatgactctatgcacaagaataaaacttcacccaataaatggatgcatggtaatgataataatcattttttcttcagtggaataaattcataaaagtgaaataaagtaaactaattaattagataaattcacttgtgatcgtttttttttttttttgcttttttggaaaatttttaaccctttaagaacaaaactcataaggaaaaattcaaaaagaaaaagagtacccaaaaaaata

SEQ ID NO: 47603 - DNA, 1093 bp, Cannabis sativa
attattataggagtttttattttatataagtaaccgtttgtagtagttaagttaaccatttgttaaattagcccagttgttatttgaattcaaataccttacacacaacacatacccaattacttgagctagacactcaggtggctattacagaagtttttctttgatatgacttttatcggttaatacatgtgcttagcttttcaataaccgaaagttttattgcctcttgatttcagaagtttagtggctttttcattttttcccattgttattgtaaatcagatactcatcataacatgttgctgaaattacaagattctatctcaaaactgatgacacataaaaccccaatggcatttggaatttttttatcattcccacaaatcggttcctataaacttgtactaattatgaactctgtgttttcatgtttaggtttgttggataatgtgctgagcgattatttatgggcaaaggcggttattctgacaaccaccacagtggcaacagcaggcctcacaattcaggtgccaatggccgccattgttgattctctgacgggcaatgcccctcatcttatggattacctcggtgctttggctgtcacaattggttttgccggcataaatattccatctgaagccttttgcggatcaaaagaaaccaatgtagaagaagtagaatgtaaaagatctactttgactgagtatgatggcaacccagaagcaggagttgtttcttgattatgttttgcaagttaaattataccacaccgttccattttagagaatcgtctctcaaacatattgtttcaatgtatttagctaattagtatatcattttttttttttgcaattcattacatgtaatatttgatacacattaaaacacatatgttaatgaatagtctcaatactttcagatctcaaagccggaaacaaacttcatatcgtttcttctaaaaccaaaacatatttcttcccataatcggcatgatatcgaagaaaataagtgcatgtttggcataataactaaaaaactatttttttgtttttaaaaacagaaaattgttttttgaaaacaatttggc

SEQ ID NO: 47604 - DNA, 2970 bp, Cannabis sativa
aaccataagagaaatgctaaaaagacacccgtggtgcttaacaccattctcattgtcatatcgttattgctgcaattaagtatccactcttatataatttaatataataatttttagagaatatcactagccagtagccaataacaaagcgctacctctaaaaaatatgttaagtaccacccaatagcaatgctcaaaccataacatcttatgctttctccattaatttgaaacataacattcaaaatttaaacaagcctttgattaatttctacttgaaaaaattatagaacctctagaatatatatatatatatatatatatcattaattaaaaaatttacaataagaactgtacaatcaggcccaaaatttatactaaattaacgttaaattatattaataccgaggatgcctagatagcaaatacacagcaatacaaggcgaatcattccacactttagagtgcaaccttagtatacttgtagccttttccttcaagtaaggagcacaatctgcttgcattaccatgcaaagcttcgtcacagccccaacccttaacatctctataatcacttcattcgttgctgaaaacttagcaatcaaagaaagaatgtgaatcgctcggtcatcggttgcctccgaaaccctaagaatctttttcgacaccattgctatgccgcaggcgtgttggaggagcttcgctctcccatcggcgcaagagcacaagtgcgccaaaaggttgatgatcatctcggttgtgtgcctttctggtttcgttaactcgagttcaatcaactcaaaaaccgcccctgaatcgattatcttcatcctgtttcttccccaaggacaggcttcaatcagcacatggagagctgatttaattgtttgatgtgaaacacttctctcacccaacacttttttcgttatgttcatgaacatttcaagccttaaccgctccattcgactcgaattcgcaacttcaatcgccattttaagcacagaaatgacctcaaatctcatatctttttcactgctacagcttaaaatccaagccaaagaatcaacaaaatcactgttttcgttcacaaaggccttaacttcatcattaggagtccaaacgagacgtagaatacgaagagcttcttcaattccaaccacattatttccttctttaaaacacctaataagaaataaagccatggctttgtttacaccaccttccaccatgagcctcctgttcctctcattctcctcagcaagagctactattttcttcaacgttatgataaacttgttattgttagccccaactaattctctcaaaagcttaagaacttgcctcttgtctaaaagcggtgtcggggtgggaatccgatccactccgttgcaggcgtttatggtgcaccacgcttggatgaggcgtcgaagggtgtggttgggtgtgagatcagaatctctcggcaaaggtagcttcgtaactggacacgtaatcgtgtcgtttgatgatgatgaagtaataactaatgtcgttgagagccacttctcaatgctttctctgtcgtatgttatgcctgtgattgtcgtaactgggtctctcattatctgaagcgatataggacacatgaaatattttggtacttcaatttcttccatttgatctcaaaatccaaaaatgaatatgatataaaagctttaagctttggctctactgctatatatggaaagagagagagagagagagaaagagaggtaagtattattatataagataagaacaaaatgaaacccaattaggtttgcctttggtaagagaaagcggcatttgtttattatataagtatatagcggtttagttatttcacttggtttgccaatcttacatacaatttataagcattgttattgggtattagtggtgactaatattttctatgttattttataatacttactaaaagttaacctgagttggaacaataaagataaataatattttagatcatgtattttgcaaaagttactaattaaatattttgttttgttaaatgataaaatagattatgtattttttaaaattgtacaaataaaatattgaactgatttttttgtcaaaataaaacttaataataataatctgatctagagatgttatgataaaactggttatattttctgtatgtgttcatgttagaaattatagttagttaaaaaataaaattattaaaaattaagtttaggatcttatttttaccattttaaaaaatatatagttcattttgtcatttaacaaaatagggagtctaatcaatactttttacaaaatacagtccaaaataatatttacttgaacaataataatattaacagtaggatatggtagacaacaataatacaattataatttcttctctactattcattcttctctggaagtaataagattcagtggtcaacccacgttacaaaatcaaggagagtttgaattgttatctgtgccacgtggcagataggcagtgggtgatttaacaagagagagaaagtggggccagcttcagaattcaaaaagtgactctcattcatatgtggcaatgtgttgtgggctgacttttatgtatttgtgtttttttggagtcggcactatggacttgaaaagggatatttgataattgatagagagaagaaaggaatcatttttttaaatattgcagtacaacgcatggagacataacagctgttttattatgcatttatatattatgatgaatttttacttctttttttatttagggttgaccaatcaaaacaattgaccgacgtaatttgtgtgcactgtatagatttgtttgtttgtttctcagatgagtttcagtcaaagtttcaaacttaattcgttggtccaaaaaatataatgcagtcgtcatttgatgagagttggctatttcatcgttttaaatgttacataatttat

SEQ ID NO: 47605 - DNA, 1121 bp, Cannabis sativa
tggagccgatatgggcatatgtaaactttgtgattggtggtggatctgatttgggttgctggagcaagcaataggtgagctactgtattgcgattgcgattgactcttcttctttagcgatctaaaaatcaaatttggttgaggattacgattgagaaaattatgcacaaatatatacaaaaagtgattcctcaaatggtaatgactaatgagtcgtttccacgattttaagatattcatattctctattaaaattaaatttccacaaatatttaatgatctggcacgaacgatctatgtgacttaagtggttgttcttacctgtttgaagccgatgacttgggttatagagtatacaataattcaactgaaggtagcaaagttttcttaaggtaagcttgcaattagttggtcctatagggagcagatatgtgttctattctagatttctttgacagttttattctttggttactgtcttaattgtttatcatttctgataaatatctccagccatctatgttgagtaaactttcttgcatattgtgtgctcttgctgtgttcagtttattcctagcacaccattgctttggctaggaaatattgtatgatgaaacgacaaaactcttgaatagtggattggtggattcattaaaaaacgtcaagttataagaatgtatagatgctttgagtgctcaggaaagcaactataagatattcttttggaaataaggaaaatcacagacaataaaattctcttgcatttaacaaatctgctttaaaaggtttgtttctttctttcttgtgcaaatttatgattatcacctttctttttattatattcttcagctcttggtctattatatctaaaagagttataatagcattagcaattatagtcaaaatcatgcatgtagaccatgattatcaaggaaagttgtgttcttttcattttactatagcatattggatgttgaattattcttgcataggattgtagaccttaattttccttctgataatgtttttgtatgtataacagacaaaccttgcgataatgcttaggaattggacattgattctttatttatttatattgtttctgtataatttgttttatt

SEQ ID NO: 47606 - DNA, 1129 bp, Cannabis sativa
  modified_base (95)..(100): a, c, t, g, unknown or other
ataaaaagaccgcattttctgtaaataaaatcaaaaaaatcgtaaaaatatttaaaatgcagtaaaattttatttttgtaatttttttattattnnnnnntatttgtgaaataatccctttactctattgtataataagacatagtttttacaaaaggtcttaatctaagattattttcatttttccccctctttaggctatgtttggaagttgaattctagtaaagaaagaaaaaggtagaaaaaaataaatcaatttatcatgttcgatactaaaaattttgttgaataaatttttttccatacaattctttccttaccataccaaacataagaaactgaattttttttttcttttattatctttcactacatttttcttacctctttctttcccactaaatacaacttccaaacatagccttaatgtcgattgattcaactggcaatgaaaatagtcattaaatatgttcatttacactcaacaggttcattttttcttttcctttttcagaaaaacaaaataaaattgaaatcataaatgtttccacagaacaataaatcttagttaggttaacttgtttaattatcattgagagttgtcctcatcaaatcattgaaccaatcattgcaatttcatctacaataattagactcaaaattctctacttctttaattaaaaatttaagcatacaccataatgtcatttggactttgattatccatgtattgaagaataagacactgacaacctaattaagctttaaagaatggctgacatatttttctacaattaaccatttttctatcatattgtcatttttgaagaagaaaaaaactgaagaagtaattataaaaaattattcaagaatgaggaaagtgaaagacaattccaagttggaatgaagtcagaacacatgaaaagaaaaactacaaagttacattgtgattaacattactacagaaatttcctagtaaaagaatatctacaacacactaagcctaaaaaagacatcaaggggaaacattactaagctttaactctatccaacgtccgaaatattcactgcaaaagttaattttgatcgtggtgctccctaagaacatgacaaatcgctattctcgggc

SEQ ID NO: 47607 - DNA, 1999 bp, Cannabis sativa
gagaggtccccacaagactaatcattgatagggttactctcaaaaagcaacatattatggtaaaaaaaaatcgggattctagacacacaacagtaggaaaaagcccaaattccctttttcacagacaaagtaaaatgcatacatgtagtagagcaaaggggaactatttaaaaaactatggcaaacccaaaaatattcaacctaattatgtgaaccagaaaacgccaaataacagggaaaattattaacccaaactaaagggaaagtacctagacagagcccaagctcatagagaaattgtccctaagttcatgcagacaaattctaggcgcaataaccctaattcctaaaaattaaaccctacacatgcaaagcaaaaatctcttcaagcacaaaaataatatagtttaagtggaggaaataattacttgtaagacagattaaaagaggagaggatggttgttcatcatcatttgaaatttcactgacttttttgtgacaaggccttgcctatctccaaaaggggattaatcaattgggaaggtgatgcacgttagagaaacatagcaacaatgttgaagaataagaggttaaaatttggtttagaaaggtgaaggtttctgggcaaggagtttttttgagagtgttctctaggaaaaaaatcgcttctaaagtgtcgaaggaaaagtaacttcaatcgccaagactttcattttggtccagattgagttaattagaatctatgccatccaatggttttggatacgaaaggttttcatttaattcacctgaaggaaaagaataaagtacttattactcatcattttgtggctaaatccccaacgtgctaaaagcctgacatcttcttgaactaagtcgtcactcgctccacacgagaaatgtgcttcaattcacagcgtaggcttcacgactccacaagcaccacacttcaacaaataaacaacaatattatagatcatgaaaacccttcagatgctcaaggcagtgtggaagacttattccacattccaaatgcttggtcaatgaattagagacatgaggcaagcatctaggagaaagatacaagatctcaacactcctaagtcccgatagcttgggggataaatgttattcatattcccagatgaagtgtatgtgttaatcatggaaggatgccacattaaattacgcattgttaatgtacaccctctgtttattcaattcatggaaggcattataatatcaaatgtcatctgaaggccctccctgctagaaaagacagaaaagagtcggtgattctcataaataaaactactaccaagagggaacaaaagtcactcgtgctccagaatggtaccaggatagtttggtttgggaaagacttagccagacgttcttggacctctcttataccttatctgaaggcaatcccaatggttgcataccttctgacaccgaatcagatattgtccccagcgttagacctcagtagtgcgcatgcgtgctctacagcaccattttatccaacgggttgaacatacacaaaattttcaaggtttacccttgggcacgtgtgtccttagtccgacaggttgggtagcagtagtcgtgcagcacacaactaccctatttttcatatgtgcctataaataccctatttttcatatggaaagggtgaacaatattttacttacagaacctttgcaaaaattcctaagagctttcttcttcaaaaaaaaaataaatacaaagttaatgttcgtactgtaaacatttgaaatacttaaatactccctggtaaggctaatacacaatagactcgtggactagggataattaacgcccgaaccatgaaaaaatctatttgtctattatttattgttttatattttctttaagctctatttaataagtttttgaaaatctcggtaaacagtttgtctttctgagttaattaattatttaattaattcacttaggtaaatatctaatttgaaaa

SEQ ID NO: 47608 - DNA, 766 bp, Cannabis sativa
taattggttaatgtttaggtttgttaactggccaataatctgttacttaggcaaggcattcttttatacttttcatatccataaactaagtaattaaggtgttcctatatctcttgattgaacaatatattatctcatcatttacataacggactaaataaatttaaagtaaaatactttcactttcaacttattatatatgcagttcgacttaattaaattacaagtaaaaaaacatgtaaaattttcaacatcacttgtttgaccgacacgaaaatctctcttaattattctatgtcgattgctacgtttgactggaaagtgatattgttaatatttttttatatatataaccttttggaggttggtcgactctttatgtgtatacatgtatagtattttttattttaaatggttagtaaacaaattcagctgaccgactctttttatgtgtatataaccattaatgcaaagaatgacgatccatccagctatatatttatcaagctactatagcatatcatcaattatggtcttttaaaagaccataacctaaaatatataaatttatatattttaggttatggtgatcaatatattctgttcagctcatttgatgataagacttttttcaagttcaaaaaatacaatgaataatattttagttctaagaaatttatgataatctttataccattaacctcatcaaatggtcgattttgagttataatttcaggggaattgccactaggaaaatatatatata

SEQ ID NO: 47609 - DNA, 1783 bp, Cannabis sativa
tgtataccaaaacgacaatgactaagccgatcagagctgtgtagagttgttcttgttccatttttgaatacttgaagaaagtttgaggtgatatattagtagtgatttatatataacttgtggggtgtatttatatatatgatattaattgtacgacttgatgtgggactggatctgaatacgtgtggataagagtatttaatggtacggatatagctatatatttatattacatcattgactacgtacacaaatgtatttgaaaatttataatggtgttatttatttattttgttaaaattaactagggttgtaaatttgtgagtgcatgtggtgctaatttggtttatatttattcgtgctacttaaaatttatgggtcgtgttttgttgtgcttcataaaaatacaaatcgtgtatagtgttgtattaatatttttaaaatgtaagtccatcatggttcgtaggcttagtatttttgtactgtatttttttttcgtgtcagtgatctgtatttcttaaacaaacgagtctgttttcatattcgaatttgattcgtgctttactttttcataattatttttttttacaattactaaattatgaggattttttatattttagttatatttatataacttatcaacaatattttagtgataatcatataaaataattattagccttattaaaatttaaatatttacttataattattcaaatttttacatcacactctaaaaataaattagtatatatataattttaattttacatgttttaatagttttaattataaaagtataatatttagcattatatttaaattttattattattttaacgtaattgataaatacatacttattaatattaaaaataaattttagggttttttaatatatgctgtattttttagcttgtgacgtatcgtgttgtgtcaaaaaactcaacacttatttacaacacaagttaaccatatatacttgtaccctcacatgacatatacatattatttatatatatttatataaacctctaatggttcgtttgatatgtcgtattacaccgtattgtattgtataatattatattaaattatattttatgcaatatttttatgtaaaattatatgtggaagaatagtattacataaaaatatgatatataattcaattcaatataatacaataatacgattcaacacgacgttccaaacatgctcataaacataattgaagaacaaaaaacgccaattgagtaagaaaaaaattatttgtttctttctctatgtagtacaaatcgtttgtgtattttcattattttttaaaattttatcaaacctaaattgaacaaatcgaaatatatgtatataagaggagtgttaattataatattttattataaccttttagtttatttttatgtccaaaattatatgttgaaatattttttgttcaaaaaagttcaaatttattttgtaaattatttaaaaaaaattaaaaaatttcagagataatattataactataacaaataattttttttttaaaaaaaatatttcaacatatattttcatgcacaaataattgataataaagagattatataaaaagttggcggtaacattattatctttgtatataaattagataggagaaattctaagtgtctagtagtatattgttattggtgtaaatattaagtctcatataacttaacaaaatgacttttaaggattaatatcgctaactaattataaatgtactttcacggaatgtatt

SEQ ID NO: 47610 - DNA, 2393 bp, Cannabis sativa
  modified_base (2368)..(2368): a, c, t, g, unknown or other
gattggattggatcggatactttgtgaacacccctaccgtgaagatcaaagtttgaacacaaagatggaacaacaagattcgaggtggacaagtttacaggggtcaatgactttggtctttggcgaatcaaaatgaaggcactactcgtgcattaaggcattgcaaatgccattatggagtatgtctttaaaaaaaggtgaagatgtcaaaaaagtctctcaagaaactaaaatgaaggctcacagtgcaatcctgttgagcttgggtgatgaagtacttcgagaagttgcagaagaagagactgccttgggtttgtggaacaaactttgatcgatatacatgaaaaaatctctggctaataaactatacttgaagaagaagctttacaccatgaagatggatgaaactaaagaacttaaaaggcatcccatcttgatgacttcaacaaattgatcttggacctgaacaacattggagttaaaattaaagaagaagatcaagtcattctcctactaagttctctactaaagatttatgaacactttgtagacataattctttacgggaaggatacactgaccatgtctgaagtaaggctgacctcaactccaaagagattcaaaagaaggtagatgataaatctgagattggtggggaaggattatttgttcgaggaagactagagaagagagacttcaagaaatccaagactggacacaagtctaactccaagaacagaaatgtagtaggaaagaaatgcttctattacaagaaagaaggccatttcagggatgattgttacctattgaagaacaagcttaagagagataagagcaaggaaagaggtgaagaagatattgcatcaagtggctatgattctgcagatgttttagttgtctcaagtgaagattctagtgttgaatggattcttgactctggttgctcatttcacatgactccaaacaaggaccaattcacaagttatgaagagaatttagttggtacagttcttttaagaaataacaaagcttgcaagattcttggaattggttctgttgacatgaaaatgcatgatggcataactcgatctatacaaaatgtaaggtatgttcctgatctcaaaaagaaatttattgtctataggtatgtttgataatcatggttacactgttagaatagacaatggcacccttaacatctcaaaaggctcactcgtggtagttagaggcagactcaagaatggactatactacatggttagcactgcaattacagggacatcatcacttgcaatcaataatgtcaaaaatgatagcattcatttgtggcatttgagacttggtcatgttagtgagagaggtctcactgagcttgacaagcaagggttgtttcaaggtggattgagtggcaaacttagtttttgtgaagagtgtgtttatggtaaaagttgcagggttaagtttgctactagacagcccattactaaagagaaattggcctatctctggggtccatccagaatcaagacacttggggtgcaagctatttcattagcatcatagatgacttctctaggaaggtgtgggtgtttctcttgaaaagcaaggatgaagctttcaatacctttgtcacttggaaaaggttgattgaaaaccaaactggatgcaaaattagaaaattgagaactgacaatggttgggaatattgctcaaagcaaattgatgaattctgtaaggaacatgggacagttagacatcaaattgttagggatactcctcagtaaaatggccttactgaaaggatgaatagaactcttattgaaagagtaaggtgtatgctaaagggtgttgttttggatagacctttttggagagaagctgttaagacaacctgctacttagtgaacatgtgtccatctgtcccattgaagtttaaaactccacaagaagtatggacaggtcatgtacctaagctagagcacctaagggtatttggctacactgcctatgctcaccacaggcaagataaactttaacctagggccttaaaatgcatgttcctaggctaccctgatggagtaaagctatggtgcatagaactagggcacaagaaatgcatcattagcagggatgtggtgttcaatgagaaagaaatggctatgaaaagaaatgacatggttactgcatcaaaaaaaaaacagcagcaacaaagaccaaattaaggtggacacaacctcatctagacctacagagattatgaagtcactgctaaagatagcacgttaatgacactcaaaccagtcttagaacataccatctagctcgagatagagaaagaagaaccacaaaagtgttgggttttatgccntaaataaaacttcatttcaatgtaa

SEQ ID NO: 47611 - DNA, 1419 bp, Cannabis sativa
  modified_base (1347)..(1352): a, c, t, g, unknown or other
ctagctttgggcataagtgagttaggtttgtgcctacagcccacctaaaaaaaattatccttttaaatttatttattttttgttaattttaataatattatatttttttaaataagagtctaaaattttattttttttctatgacccctagctatattgtagagagaaagagaagtgttcattcatcacacccaagctttcttttctccatatgtgaccattggaaatcaagattaaaatatgttctaaaattaaatatttgattttagttaatatgatcatgatttgttgttgattgttattgttaatagcatgttgattgatggtatagtatatatttttaacagagaaagcatgttttatcaaatttttccttaattaattacctgatagtagcatccttgaacttgacaatttctctaatcatttgatagaaataaggattaaagagatttttcttttgagcaaataaacttgagaagccatttcgagtaccccactcatacccttttccttcctctaagcttactgagaatgacatatctaatggctccaactctactccaagcttatcaaaaaactccatcatgtttggatatgttacctgccaattcattacatttgatatacatatatatgtaaatattacattattcaaatacattattcaaatattttagaaaaatatatataatataatatatatatatatagagagagagagagagatagagcatgtatatatacactattaaaggccatgaaagcaagatccaaatcaaaaccatcaaaagtaagagtgttgggatggccttgtttctcatacacaaccacttcaactcccttttctgccaaaacataggctgaaaccagcccactaataccaccaccaaccaccgcaactctcatcttcttcaccgtcacaaaagaacagaacaaacgatttttatttcttgaatttactttgattgatttcacaccttggaaactccaagccacatcaatttatagtctttcaaaatgtgaaacactattcaaataagagtaaataccattttagaccttgtgttttgtaaggattatcaattggactctctgttttgttaaatgacaaaataaatcatgtattttctaagattgtactaataagatcctgagcttaattttcaacaattttattttttaatataatcaattttaagacaatttttgacacgaacagataaagaaaatataaccagttttgtcataatatctctaggtcggattattattaagttttattttgaaaaaaaatcagtttagagtcatatttgtacaattttgaaaaatacagggtccattttnnnnnntaacaaaatagatggtccaattaataacttttgcaacatacagaatccaaaatgatatttatccttc

SEQ ID NO: 47612 - DNA, 1674 bp, Cannabis sativa
tcacaatctgactttttctattttgttggtctaagattcaccccatgatatttcatagaaaaaaaatcctccctaaatagtagcatttccttaatgcttcgtttctcattagcatttacacctgtaaactatatactagcttttaccttgttttctgacaagccagaacatcaaccaagctgatgtaaattgtgcttctgcaatgcaactaatcgaaattggtttatcttttaaaaaataggattaaataatttgcaaagcaaagccagctcgaggctttttcataatgggtgaaatctgaacgcttcattcctagattgtctctttagtattcaagtcaaatactccatgactaggacaaataaaagagacgagattggatctccttgtttgaacccttttgcacctttgaactgccccttctcattcataactagaagatatgttgagctccacacacaattcataacccaattaacaaattgagtaggtaaatggtactctttcaaaagctgttctaaacaattctaggcaattgtatcataagctttactcaaattaatttttatcttcgagaaatatttttaataaacacactttgattatcacttaccaaaataggtaagacttcggctagccttgaacacattattttggatatgcatttgtacaccgtgttgcaataagtaattggacgataataatcaatggccttggaagggttatcaacttttgtaacgagcatcaaaagagtcttatttaactgattaggggtaatgccattctgaaaaaaaattctggatagcacttgtgaactctttccccaaatcctcactttgaagaactttgagccataaccattagatactgtgatctttagattaaaaattgaaaacattcctttcttaacttccttagggtctaattagctttatttaaagagatatgaacaaccaagtagggctggctctgaggatagcaagccaggcgcgggtctcgggcccccgaacacttaggatcctataattgtgaaaaaaaattattagtatgtagataaaatattaaataataacaaatataacaaatattatttagtgtagttgtaaagagccttactttaagctataagagagatcaattttcaatctctatttttatattttttctaaaaaaatatttaatatatatttataaagtagtgaacattggagttttaaaaagttttaccattacattaaaatactaaaattattattttaataataattaaactatatataagagttctaaaatttaattttatgttaaatggcatataacttaagtctcaccaagccactcatcaatacaattcatctgaatttgaactcttggcttgttggacttcccataaaatctttgaaatgagacagaaattggtccactactttaggatagtcttccactatttgcccctgagaatcagtaaatgaagttatcctttattattgttattatccttttaaaatttaaatacaattccgtagtttaataagttgcttagagagagggagaagtgaagatcaacatatttttcgtgcttaattttaatgttttatatatactttttttttttagctgcaccaagtatatatgcacggaataaataattttctcctttttctctgtttgggt

SEQ ID NO: 47613 - DNA, 1666 bp, Cannabis sativa
tatgtcctcctcttaatattattgactttgggggcttcttttgataacgacgacttatatctatatattggtgcatatatatatgttgcaataattataattatatatatatatatattttttttttatataaatacactgaatatgtagtagatgaaaatcactaataatactcttattgccattattacttgatccttaagattttcattttacataaaaattcatttttgaattttttatttcaaatataaaatttgatgtatatttatcaagtgatgagatatatatttcacgtactcgtagctatataaagccgccaagccataatcctaataatctcatttgtaaataatttatgggatttatattatagacgtttgattataaaataaaaataaaggtaaataagtcaatgtattcctcaagaacaaactttacaacctacaacaatacaatttaattacaattataaatcttgtttaactaatctttattagttctcccaacatgattattatttaaactttaaatcctattcacaacaatcttttttgtatacaattaacaatagtccaaatgattttaattttagcattccatataaggctcgatttcgcctcttccaaatagcataagtgcatatgcatgcattgaacacacaagcatgtagacttctctcttgatcttactagttttgcaaggcctaattcaattaaaaagacctttgtattgatatactgaaatgtcccaataccagtctaaaactacaacggttgtacaaaacaacacctaaaaaaaagatgatcacgattctcaattccttaaccacataacaagcatgatgaattagccacaatgctaagtaacataaatttatctcttgttttcaatctttgccaatctactatatcacatccaaatattagagacataccaagttccccgagaggcagtatgttgagattttagaacacgtacttgtttgatagagtatttagactgctcaaactcctctttagtaaacaaaaaattgagttgatttttaacttaactatcttcctctaatactagctacgtactattttttgtgagcttcataatctcatcaccaaacttgatcttgcatatagactccatgaaatcaatcttactcaagaaatttttattcttttgattggtaaatattatgtcatcaacaagagaataagaattactataggtattgaatggaattattattattttaaccaaattacctttttctctttaaaaacgacttttggttaatcaaacactattattattttacaaattaaacaaattaaataaattatatatatttatgtatcaattatattttcaaagtttccattatattaaaaaataagtaataaaattacacataaataattaacaaataattaatcatatattttagcttaaatacttaagtatcaatattaatattatttatatgatttaatcatcacatatattatatatttatacaattattaaagctccaattagtaaactctaataataaaactttctttatatttgaaaaaaaaaaaagtagagttgacataatttaaaaaacatgttggaaatgaattaattttcaactcattttgttttggaatcacaaatcttattattagtt

SEQ ID NO: 47614 - DNA, 1132 bp, Cannabis sativa
cccaatgaattccttgccacgttagagagggagaatgccctggattagcttcaagtatagagttgttggggtagtatctactcttcaacaccctggccagcagtgaatcgggttgttgtactaatcgccaagcttgtttggcaagcatagcacgattaaagtgaacaaatgagcgaaaacccataccaccactatctttccgtttgcataaaagattccatgatttccaatgaattttgttgccattctcattcaaaccccaccaaaaattggccatcatagattccagctgattgcaaaaataaacaggtaagcgaaaataactcatagcaaaggttgggatagattgaaccactgctttgagaagcacttcgcgccctcctgcggaaaagattttttcagtccaattatgcatgagcttccaaattctttctttaatgtcactgaacatgcgttttttatcccttcctgagtatgaaggcaaccccaaatatcgctcatgacattcacatataggcatggaaagttgtcgatggaaaaagatttgagccaccaaagttgtgttgggagagaaagacatgactgacttatcagtatttaagacctgacccgaggctcgcttgtaaatttccaaagatctcttaagagcaaggcatgaagattcgttggcttggcaaaagaggagactgtcgtcggcaaaaaatagatgggagatggaaggagcatgccgagttaatttgaaacccttcagattaccgctggtctcttcatgttgaagtaatcttgaaagtccttcggagcagataagaaacaagtaaggagagagtgggcaaccttgcctaagaccccgagatggaataagagaccccaaaggttcaccattcagcagaaacgagaaactgttagtgcgcaaacagttcataataagggtgatccattcacaagcaaatcccattttagtcatgacttcttcaatgaatctccattcaacacgatctaaagccttgctcatgtccaatttcagtgatgcaataccattgcgtctcgaagttttgttcttgatagcattaactaactcaaaggccacaagaatattgtcagttatcaatcggttgggcaagaaagcactttg

SEQ ID NO: 47615 - DNA, 982 bp, Cannabis sativa
ttaccacctaaacctagttagtttcggtttatgaaattaacactgtaataaaagtgttattataatctctatttgttgtttttcttgccataattgaatcttaatagaattaagtatagttagtacactttaattacatagcaagatcagtccaaaaataggcaaaattggagtgacaacaaatttggggaatcaaattttggaccaccataagtgctattatactaatgggcccacctgaggaacgcatggcccacaagccacacctctcgtccgtattgattttcattacagatgaaaataaataatttagaacatgtcgtctggatgatcaaaattaaataaaataaatgtcttctgttaaattagctaagttcttcggacttagtaaggctaacacatatagatcaaatgcaaatgtataaaaattaaatcatgaagtaaaagacaccaatagattcattctttaaatggaaacttttcacttatttgaagagacatattgaaatattatgaaaataaatgttgtggtaggtagccaatgtttgttgttattataattatatttgtttttagctgtacaggaatttttgatacattaaaatatccaccgattgtttcacacttactcgattaaaaataaaagtaaaaagataatcttgttactgtgtttgttttctagcgtttttttcttttgaactagaaggaccttatatatattatgaaaataaataattcgtattatcttaacatatatggaggtgaagcaagattgatatccattctatataaaataataaaattgttagggtgtgtttggaaataactatataattactaaatagggtaattacaagagtagtaattacacagtttagtaattacactattatattttaaaatgcaaggtgtgtttggatataaggtggtaattacatatgaattcctaatatcttgttttggcaaaatagttagtaattac

SEQ ID NO: 47616 - DNA, 2015 bp, Cannabis sativa
  modified_base (1437)..(1437): a, c, t, g, unknown or other
atatatatattaatcctatatttatataatggtcattccttgtatatcaagagaaaaaccaaaacaatcttattattacaaacctttcttctactatagcttgtttattaaagatcaatgtgcctaattatatcagctcatcatgatcatgatcagtaagtaattaataagggtactctcccacgtaattgcctgggggattgtagctgcacacaacgtaataccagccgttggtgcactggaccctggcgcacccaacttgagtggagtcagtccagaccacctgagtgtaatggaggcactgctgtccattcacgcacgagtttgagtagtagtcatagtaaggcttctcggccacccacaggttgaccgcgactatgcccgtgaacgatgctgagctgcctttggctaagttttccccataagggccgttagagtggaccaaattacagtctccttttctttggtttgcatagtttagagcataggttgccagagtggtgttccacactatgttgctcaccccaacttggctcctaggtgtgttgtgggtgttgacaaagtcttgtggggcgctttggccttggcaaagtcccaaaacagaagttaacataataagtactaacattgttgagattttagacaaatccattgtgtgttgtactcgtagtaatgtatataaaataagatgagttaaataatctttgtagtattgtatatagtgggttgttgtgatgattgactttgaggatgttaatacggtatttatagagttggaaactatgtaagtgcatgaacaattgttgaatttaattagaagtaaatagtaataaacaaatcatttcccacttttgagagttttgtacactttgctgcaacttttagtaaagcattaatcgttaataattaaaagaaagcttagtggtacatattgttaagataacttctatatgtgttatttttgtcaaattactcaaagtagaaatgggtgaaattaataaaaatactattgaatgtgtttttcctcattgattttatcccagtataatagtagtataatcaacttgtaaatgataactcgataatcactagagtataatgtgagcataatatattaaaatatatttagtgtaattgcttaaagaagagtagtccaagataaaatactcggacagagacacttggaggtacaaaactaaaataacaaagcgtagtttcatttataagaaatgtacatgcaccatgagacatgtaaaattttagttatatttggcacaaaatacggttttgtgaattttttacataatttttattattgtgatctaactgataattgtaaattttgatataaaatttaatatgtcatttaatatttttttaataatttattaaaaatataaaataataataatgtaaagataaatataaaatttaatnataataataataataaaggtcatttgatgtaagagtgataatttaaatcatgacactagctacaacacgatatgaagtccacgaattattgtgggttaaggtaataaaaaataggcattggtcaaaattgggtcgaactcaaatgacacgattattatttgggttgggttagggttaacacatgtgacatgaaatcaatacgaattgactcgcttattattaaattttatattatctttatattatagaaaaatatataaattaaaaagaaaattacttacaagaatataagataaatatgtatacttatatcaataattttactcattctatttgttaatttgtgataaattatttcaactgatcaatattatttaattacaacttgatgtatttttatttagtatattatttaaatgaataaaaaaatttatatttaaaaatatatatgaattaaaaatgggatatgtattttaatataaatatagtcaacaagtaaataagacaggtcgatacgagaacacgacacatcgtgtcagggttaagatcactacaaaaaaacaactatttttagtgat

SEQ ID NO: 47617 - DNA, 1428 bp, Cannabis sativa
cgccgccgccgcctttttgtacttgaagctagacggtaactgactgctctcaaaccctgccccggacgacctcgtactgacctcaattaccgacgaggagttcggcctcggtactgacagctggctccgccggctatcggagcagagtctgatgactacgatgttgtaaagagctagaacgatggcggcggttccgatgacgattaggccgtagtataacatgggtaaattcgatttggtgggcgtgggaggaggaggaggaggtggctggtaaaggaagggagtagccatatgtggaatttttatttttggaattttaattaggtggggtttaatagaagttatttattatttattataatcaccattaagacaaattattcttttttttatttctatttctaattatttttgttttggtgttgtcgttgttagattaattattattattaagtgcttaatccaaaagccgtggtggttatgttgtttataaggaaaaacaaacatttgagagaaagaaaatctgtgggctaaagaaatggataaaatgtaacgtacgctcactactgatattagatagacacataattgcacatttttctttttatatttatgtttgattttaatctttacacgtacgtatcatatctttcgttgaaaaaataataaaataaatgatcatttagagcaatgcctaatttactgatttctaatagagcttcttaattagttgtttcaaaggaaaagaaaatgtgagatccaagttttattttattttttccaaataggctaataaatttcaaataaatcatttgtgatcaataaaaattaacaaggaaacaaaaaaaaaaaaacagtaaccattaaaaaattagttttatttttatctaattcaaaaaatcaaaaaatttattacgctaaatatagagacaacacagtttcttttttgcaaatgaaaaaagaagaaacaaatgtgtgttagttgttttttattttttattttttttgaagaatgatgcattgataattctaattctataatgtgtgaccattagatatttgatattttttctctaaatcaattaaattgtttcatctttcatttgtttgtagttatcatacttaacactatgccacgataactaataatataaatgttattaatggtttcaaaccattgttttatttttggccttatcgccttattgtatattcgagaaggagttgagaatactcgagtagacaatagtgtttaaattgtttaaacctaacacagcataatcaatatccaatattttttaaaaaaattccgccccatagtaaaattaaattaaaaatttgagtatttaatgtaaaaatttcttaattaattctctttctcttattagaaatagatgtcatccgtaaataatttcacaatatattatt

SEQ ID NO: 47618 - DNA, 1703 bp, Cannabis sativa
attttgatattttctattttctagcttttaaaaaactgtttttaaatttttttaccaaacaacctttattagtttttaaaaattgtttactgttgtttaaagctgaaaacaattttttaacaatttttaagttatgaaattaaacagcccctaaaactctatgaaccagttatagagtagcactcacgaaagttcttggcttcactactgactaattaacacatcaccattagcatgttgcatctgctaatttattctgttagaacattttacagagggtggacataaactgtacaagtaatttgaaaattaaaatgaaaaatagagttaagccacttctcactcactcatttcttcaatcttcaaactacaactgtttcaacaaaatgcaaaacagaacagttttagaggaaatgaaaattacccacaatcacatatacaagagaaaccattggcatatatacctgtgaataagatgattatctgtatcactataacaaaatgattgaagatagctgcagctcccaactagacagttaacattttagtaaatgaattatccctgcaaactctgtatgatgtctaaaattactacgcgctttactcgctatatataatatatataatctgctttagcagcagattcaaaaatagtttgcagggaatgcaatttcatcccaaaaccagaggcagtttacagcttgttttcatcaaaatcctctttatccatgacatccttctcttacataccatctttttcagttgcatcctcaacatccttctgtccttcatcatcaacatccggatcatcgagtgatgagttctcaggttgaaatgtcagtgatacatttctttcatgagatgcttccttttgacacgagttttctgtttttgtttgagaacggaaggtttgaatgagataatgtgctacagatttgtagcccagcctgaaaacctgtaaattaacaaaattcaatcatgagtatttttagtatttcacaatcactgctctgtccatgaagagtatgcaatttgaaatttcttcctcatataacggaagtgtttgtcgacaagatatgaacatgttatatctcaataacctttctagtgagttgaccagtaggcatccaccctttcgccttgcggcataaactgcagttgcagatatctcgacacacaggacaaatccagctaggattctctttggtttcagtgacgttttctccatacctgttgaaaacagaaattttgaattcagactactatcaacatttttttgagacatatattaagttaattactataaaatgttacaatagattataagatagctaattcaaacaaataaatcgatctatacatacataacttgagagaaggagaacaatttacctactgtataagcagtctccacaaaattgtccctggaccaagttgcatttgctgcaatgggtatgatgaccaagagttttctgcctaaaagaagagaagcaatttatgtattcatgtaatctaaatgtaatctaacaaacgcacaattcaagttaatggtagaaaacaacataattcaatatccttacctacaaaaattagttgcattgtaataaagtcaactacttcagtaacaattgaaaataaacagtactatgtctatacttatctcccaatcatctaaaagtcaaacacaactatgaaaaagaata

SEQ ID NO: 47619 - DNA, 2043 bp, Cannabis sativa
tttctgatcttttattaattagtaaatctaattatattgaatttatttttatatagggcacaaaatccaatagtttacaatgttaatcttgtaagtaattaatactgtaatatattatatattgccaaaatttatatatttcagatgaaagaaaaagtgataatgaaaacaaagtcagaataatagaaaaattagtttaaaatcaatctgatgggagctcatgtagttttggtatatattttttgattttctttttcccgtatatgttagtacataactgacaacaaaacttcatttttgtcgatccataattgacgactacgtcgcctaaatttgttatgcccacatagctgtcaattttgagaaccgatagaaaaagtaatgtcattagttgtaggccaatggaaaaagcatgttttataatagtgattacactatccactagatccctatctctcaatacaccaatcatagagatgaaatcataaactagttagtcgggcctgataactaccataatatcgcgactcagatttaattcaattcttgtacagattctaggtcttacacctacatgtgagtgtacacttgatctatctatgatgacatagagactggatcgtgaaacaacaatacgcacaacaaatgataaagatggctctcattagtaaaacaaaacacatgcaacaaaatatttatgctggttgatagcaatgtgtgatgctctctccttgctcccatggcaaagaggaagaatggacaaggagcaccgaagctagtaaaattgaagcctgttgtagaggaaatcattgttgaaacaaaacaaggtaagctgcctttgatccaagaagaggctaatgtggagattttcctagatacttatgaagacctggacacggattcaaaagaacccgatgatggagtttttactcaaaaaattgaaccctaaatctgcaagctgggcagatgaaatggagaaaatggactttagtgttgtggctactgatacgtggaaaagattcagtctaaatcaagtaaggactccttcctctcagcttgattttacagagccaatgaaaataggtgatcaaatggttgctaaactagatttagaagaaattaaaattgaagcttcctactggagatcattgatagtttgcatagtgttaggggtgaatcccccattcaatgtggaaaacttgggaattgaaaaattgtaagaataaattatagattcaccttggttatctttaaagatgaagtgaccaagaacgtgatacttgtaacaagagtcatacattttgataagaagccaatggtgcttagaccttggtcaaaggatatggatactactcaaatggtgaaatcggtaccattttagattaggctacatgggttaggtctccagtattaggggaagaagaacttaagtgctccggtgagaaccataggcaaacaaaaaatggtggacaaggttactctttaaagaactatgattaaattttcaagagtcttagtcgatgttgaaattttcgaaagtcccccgaaatttattgacaatgtcaatgaaaggaaacagctcattgagcaacaagtggagtatgaatggttctcgtctaagtgtgttgcttgtgctcttcttggacacacagtagccacctgcaataaaggtagaccatttatatggaagaagaaacaacatgcagtcaaaatagtaagagtgatgagaataaaaaccaagtagaaccaactaattctggtgcagataaaaaattaactactaaagtgaaatctaggcaaataactgagaattctgatgttgttcgacagtagagtaatatggtgctagtttcagataattttaaaccagagcagcaaaaatgtcataatgagggggaggttcagaccagctgtaaagatattacattagggggttggatcactcttcgaagaaggggctcaaaaaatactgtgaatttttcaggatggaactaagatgagaaatggttatgatgttttgaaggaagcatttgagattttgga

SEQ ID NO: 47620 - DNA, 1241 bp, Cannabis sativa
tatcgagaaaaccatgaaaagctcatatttccctaaaccatatccccaaacttgaaaccgacaagaatcgtagtaatttagctaattctaacaactaattttgccacatttaatacattttaatactaacaatgttctaacaattaataacatataaaaattaacgatattgacataaaaccaaacaaaaagaacatatatgtgtttaacttatcaatgaggatgagtagtcatgggaggaggggttgtaacgtcttgattcctaaggacgctacgtgtatgtttttataaattagtttataataataaactaccaatttaagtaatattataatttaattaaaaacttgctaattaattttgaaacataaaatctcttggcatcacacttttaagatcggggatctcctttaaaatattacaagagatgccactatattattttagcaaagtacacttgaaagtccataacaacataacatatgaatcccgataactctactccacttgccggattagatgatatgtacattcactgaagcagattcctcactcatggctgcccacatgttttctaacccctacctacaccacataatacttgtgagtcacaaagactcagcaagaaaagtaataaaataatatcccaaatcagtacacaaataacatcaatttaaactcaaataatcacaatcaggtatttacaaatatataaacattcaataatacacaaatacttgtataatataacaagtcataccagttacattataaagtaatcaatttcgtcgttgtctaataagacaacactaatccttattccaacattcaaatataaatgtcattgtcttataagacaatccagatacctatcccgacatccatatgtcactgccgttacctaatgagataactaattgttatgatatttttagcatgttatttatgttatttttagagttaattttcttctttattatcactttttggaatagaattatgcttgttttcattaatttcaagtttcgacacttgggatgtataaattggtcaaatatcacaaaaaagatcatatataaaataggaaaaattgtgcaagaaaataaagctaaaacttcaagcctaaattagactatgtttagatcatattttggagaaagtcaaaacataaaagttctagatctctcttttatctttccgtaatattttgaatcgtttaatttcaagcaatatcaagagag

SEQ ID NO: 47621 - DNA, 1000 bp, Cannabis sativa
  modified_base (808)..(808): a, c, t, g, unknown or other
taagggcgtgtcctccctcggcggtggtggagcttttagggcttgggatgaagatcctgcttctttatcaaacaccatttttgacgtataaatcgaaagaagattcgaaattctctattgagaaactgaatatagtttgattgaggttaaaagattcaaactttatgagtcatcaggggaattgtagagatttaacaaaagaagatctcagaatataccaagtagaatcgttattgataggagtggattcttggatattgaaccatgaaaatggttttgatatttttatgaatgaacattgaaaattgaaaatatttaaagttaaagaaacaaaaaaagacaaattcagacttgtcagaatcaattacagcaatgggtaatattttatttgtaatcaaacacacgagggccacatgaattcggaagataattacatgatttaacatttttatacctaggacgatgtaaattaccagcttctaattttttatttaaataaaaaatgaaataagaattaaaattattttttgtttccgaatgttaaacgggtggagttagggattaatttaactcgtttagtgttttattttatatttttaaaaatattttataatttgtaatttatttttataatatattagtattatttttataatttttaagttatgttttagtaataaatagtttattaaataataataattgtgtaatattttaatttttatgtagtttaatacttttagggtaaatactattttagaatttgtgttttgtagaaattattgattggaccttctattttgttaantgataaaatagatcctatattttctaaaatgattaaaataagactttgaactcaattaatacattaaatctaaaccctaatgattaacatgaatgagcattggaatggacttgctattccttaagaaagctcaatcaagtgtttggtttctttattagaacttgaaagcccattccaaaggaattacaattc

SEQ ID NO: 47622 - DNA, 1682 bp, Cannabis sativa
gtatattttgttaaaattaacatagaaaattaaaaaatagtaccgttaaaccaaaaatttcgttacatagacacatttttatatagaatagatatttagttgaagatattaatatttcatcttacaattatatatggtggttggcttcgtaacttaaaattattttcaatttttaaaaatagattgtagattttaaaaattaatagggtgtgtttgcctaatttttttaaaaataattttctaaaaattgagttacaaaaaattagaaatagaaaacattaaaatgctgtttctattttataaaataatttttatttttttatctaacatattcttctttaccttttcactcacattggactggacccgggcccaaactctaaacccaaacttggatcctgtacctggacacggacccaaacccgaacctcgaatctagacctgcgacctaaacccggacctggacctggactcggacacagacctagtagctctgggatcgacccgacctcggacttggacatggcctagggaccgactcgaccctaccctggatcccgaacctcgaggccgaacccggacctggccccagacctcagacacgggttgggtctggggtccaggtccgagtttaggttcgagtctacgattcgggtttgggtctaggtctagggttaggtctgaggtgggctaggttcatatcatcatagtatggtgtagaatatttaaatttttttgagtaaaaataaatttaaaataattttaaaaaacataagccaaacaccattaaatttttaatataacaaaaaattatttttattcccacaactactagttttttgaaaactgaagtcaaacatcctcttgatttcttatttttctaataaagagtttttaatttattaaaataatattcttgaaagtaaactatagaacataaatgatgacatttaattcaaatggaggtacattgcaaaatgaaatggccctagctatatagcctgctggctcagactaagaatattcaattgcccacccaccaattcatgacctcccatatattagcaaatttatatataataaactaaaaaaattattattatagcaaaacacagcaattatgtactttcataaataattaaaggatgtaaataatggtccaacaataatattaattagacagaatgataattaaactaatataccattattatatacatgacatagttaaaattaattattatatattcaagtcattatacatagtagaaccaactcatgattacatgaagtttatatatataaaaaagaaaacaagctagtgctacatacatatatatataaataataataatattaaaaaaatagtgaatacattatcttatgtcacccttgaaacttgaaactctaatttgtgtaaaataataattaattaaaccatataattatccaaataattagcctaaaacctctaaaaatatacattctatgtagtgctcacaaggtgtttgctcatttgtctgagagagaattgtagttgaattttttgtgaacaaaactgataatcttcattggggttttgtttagtactcatcctttggtgatttttattactacccaaacgagaagtgagagtgaggaagatatgttctgagcaaggaatggtgagtcctcccatggga

SEQ ID NO: 47623 - DNA, 3617 bp, Cannabis sativa
  modified_base (1187)..(1187): a, c, t, g, unknown or other
acaacatagctaatacactcaatcgttcttgcaacatggttgatcttaaaaattttgaaaaatttctctctgctaaagcaacattcactagaatagttagtaaaattcgataagcaatgaatgcatttggaaaggaactaatatttttttatgtaatcaagtatttcaattaagttactatttttcatttggaaaaaatttcctcaacatagctaatccactcaaatatgattttatcatgttccgttcttgcaacatggttgatcttaaatatgattttatcaatttcaattttgaaaaatttctctctgcagaagcaacattcactagaatggttagtaaaattcgataagcaatgaatgcatttgaaaatgaaccaatattttttatgtaatcaagtatttcaattaagttactattttcatttggaaaaaattttctcaacacttttaattctgaaaataaatctaaaccattaatatcaagcaattcattgtatttcaaaacatcctcaagatttaaagagtgatctttcaaactatcttcatccaatacttttagtttcttcatgttgaacaaaaaatcaaaaatattttcatacacttaaaattgttcaaacttatttttaagtgaacaaataatttggtcaatcaagtaaaaaaaaataatcaattcgaaatgattctccaacagatttaattatatcaacatcaatattttcatcaaattactttttcctacaaataagtcatttttcacaaaatttaggctttattctcatctcaattgtaatatttttagctgaattcatagacactacaaatctatttttcctataatcttcaaaataataagaaaggagatcattcaaatatttcatagccttgtcaatgtctatgttcttactttataaatgtttactaattgagtttataggaaataaaatatcatacctgttgttggaggaattttgacaacaccagataaaaaatcaaaatataattatcaattaaaatgtgctagtacttcacctagaatggcgagtattcaaagtatatatactcagacgtactggaaaatatattgaacacaagagaattatagttgttcagtcagatcacggtttacttagtccactgttgcaaggatttctgccctcttttatttcatgttggatcactcctttntatacaaagcaagtgtcctttggtcacacagagcttaattaattatcaaaccattttacattgaatatcaacattaaatcaagaaaaacgtaaatagaataaatgaagaacagtttcgactcaatttacttaatatagcaacgtacgcgaccttaatggtacgagttgtctgttcatattctcgcataagctcgtgggcctaggatgcgtgaaggactaacgaatctttgtgttaagatatctgcattctaattgagtcgcatatgtggataccttgtcaatgtcgatgatctaggacgtgcgtgtccttatcggatcatcgagcgtgttaggtcatccagaccagttcgctaagtaaagaattgatctttaccaactcgcaagagaaaattttgtggacatcgcatatgtgcgagttttaaacccgcccttcttggtcctacatcatacgaggcgtaataatgcgactagactctgtcaaggtcacatcatctcgctgagtctggttcaggcgaggtttatacttgagtggtctccttccgacagcttagcaatcctcgaggagagtgagtccatatttcattcttatgggagcctagtctcgagtttctaggtaaaaaattcacactataacacatgcccctaatttcgcgattgacagctatgtcgtgaggcaaactatgagatagaggcatgtgagaggttgtcacaaggtggtgacttttggttgtcttatcgagggtttcaaaaagacgactgtaattattattttactcctttgaggtgccacgtcatcagaaccctttggggtacgtgtagccatgattattggtaaccattagattgagagactttaggcattcttttgccatgtgtctccatcccattaaatgagggatattaatatttaaactccctgttatgaaatgatcttttattcatttccctctcatttttgttttcccctctttctctcctttgaattccaaactctaaaaatttctttgcattttctgagttttcttcatctgagaaggattttgaagtttgcaatactcacagaatcactcaaagagaaactgcacttcaaggttagtgaattaccatttatgcaaccgttttcttttccttgagaatttatatgcgttttgtgcttttaggggtagaaaatacatgaaatgatagaatttgttgtctgtcttctaacaaaatgccatattttcctaggaaatatgtgcctaaatcttgaataatcacaggtttcaggaagaacacttcaggtattcgcgaatttcttgatgagcattttgaatactcgcaggtctttggtgagtcttttgaatgctcgcgagtttttcaaatatccgaatacccagaaataactttaccagaccaattactaagcctttctctgcttttttttctctgctagaatttactaattcttaggaccttttagcttttaggtcgtatgtatttttgttatgaaaactacccgagttctcaaaatggtgggtgcatcacagtacactaggggtgttcatcaaaccgcccaaaccacccgcaccacaccgcaccgcaaaaaaatgcagtttaaaattctattgttgatatgaaactgattttgtacttaagctgaaatggatggtctggatgacttaaattagcgatgtactagttagaaatgaggaatgatggatgctaggtattattttggtattttattgacttattaaatttgtctattcggtgactacataactgtggggatattattgttcttttatattgatgagtggtcctaattttgttactaatattttcttattaatataagagttaatccattacttttaaattagtattttgtgatataaattaaaggatcatttataagctttatctttttacaaggatcaaagtgtgacctttgaccacccaagttatggatattacacactgccacggcctaaggctcgggtcgtgacagtgacacacttgtaacatttatttaatcaatcaaaatattatattaaaatataacactaacatcccccttcaagatactagctatttagttgctcactatcttagacaactcgatcataagcaactcttttattttaggatttttagtggctctttttaattttttttatttgtttttctttactgaatttttcgaaaaccaagtatttagagagattaaagaaaatagcgaacaataatgataagaacaacatatttttacatggtttaggcgttaatgatccttaatccacgagtctatattattggtctcctagggcgaatgttgtaggattacaatgtattacagtataaaagccttgtgtaggagaaattactaggggtgttcgcggtgcgggtggtgcgatttttgactattttttcaaaccaacccgcacgtgc

SEQ ID NO: 47624 - DNA, 772 bp, Cannabis sativa
aatccaacatacttgttagtaaatttagatcctggtaaaataatttctgacagaatggtcattaactaacccactaatttcccaacactactaatacctaacaacgatgccctggtaataaaatactataccaaataaaatgtgactctctagtggcccaacgtcaatttccatcgttaccaagcaaagtcataggtaaacgagaaatttacagatagcataattaacatatatatgcttaaataaatccccacaacatgcatattctaaataataattaaatctcatgaataaactctatttatttaatagaccaatatattaacataggcggtctttacataggtactccttaaagagctagttaattagcttcgagatttagacacaaatcgttcaaattcagagttacaaaaaagaggagtttttattacttctttctaaatttatgcatctgaaaacacatgaatattttttttccaatacttttcatagcaatatttgttataattacaataacattcttataaatttttaattttttttaataatttacagtgttgaaaatcgattagaagttttttgaacgcccgtagtaaacttcaatatctggaatattatgttgtcaatactataaactatatatgtgtaattttttaaaaatttacataaataatgttgtaactatgacgaacaccaccataaaacttttttttttttaaaaaaaaataaaagatataccgacattcatttttgaatgcaaataataaaa

SEQ ID NO: 47625 - DNA, 2269 bp, Cannabis sativa
ggtcttgttgacttaacttttcaagcgtaaaaattaggcagttcttgtaaaccagacatttattagtcctctgagttggctcacaatgacttaattctatccagtaatggagccagagtcaaaaattggtgttttaatttcaggaatttcactcttatgttcttttttcataatgggattgggtttaatagttaaaatatcaatgccatggtttccattgtcacttcaattcaactgtaatagatttgacaaaagaagaagtttcaattcaatcttggccaattggtgtttttcttgttttcctttctggtattgtgttgataactacgtgagctgattatttgttataagtgatgctaaaatagtaagattttatataaggtgatctttctttcattggattgaccacttatatttgctcctttagggtgtctttgcctttagtgacattgcctaagtttttttcagactggtcataaaattgacaacaattcaatctgtttatggaacattattgccatttaaagttaaaattgaaaagctgagcctttgatattatctgtcatgtatgattgtatattacaaatggggtattaaagtgttgattttatatggtacattttcaaaatcataccttttttttttgctgttgtattcaaggttggagctgatataggagaaaggggcctcaactgtgtgttgcattgcttaggaaaactggtcacagttatggtgagcttaagaaggcgtaaactcctgggactatgctctggtaatattactgatgttaattagcttttaactctgtctttcatgtcatttgtttctactagataagaaaataagtggtgtctttgcagggaggaattcctttcttactccacttcccaggttttctggcaatggaaagattccttcaaattcttcattgaatgccaaatcgatcagtgtgcatcccatatattcggatgagataaagccaccaaatggggtaagagttaataacatgaatcttatgaagcattgctttgttttgcctggccttgaaacaagtatatatgtattggtattatgttatagtaagaccctttagttgccttacacaaatttaccaacttgagttttcagccatatcagattttgcattttgaatgtatgaactgtcataagccttttgaaatcatctttgttttgttccgcgatttttatcagaatacaagtgtgaagggagaacatggttcaacaaatgtatctgattgtggctcactcaaagaggaccataatcagcaagttgcaggtttgttgctgcataattttcaattggggttttaagattcattcacatcaacattgcataagaactaaccccgggattgagagttctttacttcttctttctgcatattcagtgtttcttctacacctgcatacattgtttttcatttattcatgtgcttcaatgtgaattctattatgatatgtcatatcaaatcatggcagggccgccaatcaaacgcaggaagcgacacaggagaaagaattttcagaaccaagaatcatgtttgatgaggggtgtgtattacaaaaatatgaaatggcaggcagcaatcaaagttgacaagaaacaaatccatttgggtactgttggttcacaagaagaggctgctcgcttgtatgataggtaggaattacaccttatcttaattgatactaattcaagagtgaggaaatgctgaataaagagcttactgttgtaggatatttctgtgttgttctgccttttgaagttttagtagaagcttagagtaacaatgatatcatttgttgttgccttcttctactttagatgtaggttaattagaatttccgccctcgaaatttgacatgtgccaaatcgtgttttctgaacttttcaggctatcaaaaatcttttcatgaactaatgagattgttagattcaaggttttgacttctgtttaattttgtttacttttactaacgaacacctaacgcggcgattgtccatgtatcaaatcatgtctcccgaactttaacatgtaccaaatcttgtttctcaaactttcgtcccacgtcaggtgcttattagtaaaattgaacgaaattggacgaaagaccttgaatccaacaatctccatagttcgggaaaattcttaacggcttaaaaagttaagaagacacaatttagtacatgttaaagtctcgcggtgggattctaattagcctttttgaaaagcaagttgcatcattt
